United States Patent Application Publication US 2024/0263153 A1 - sequence listing, part 3

SEQ ID NO: 5227 - protein, 510 aa, Unknown
  Description of Unknown: Integrase B5228 sequence
  PTHR30461:SF3,cd00338,SM00857,G3DSA:1.10.10.2600,IPR036162, PF13408,PS51737,G3DSA:3.40.50.1390,IPR025827,IPR006119, IPR038109,PF07508,IPR011109,SSF53041,PTHR30461, PS51736,Coil,PF00239
MSSVDKIAVVYARYSSHGQTEQSIEGQIAAAQKYAEQHGYTIIHIYADRAMTGRNDDREEFQRMLSDTATHQFGVILLWKIDRFGRNREEISFNRYRCKKNGVRVERVAEDVPDGPEGVILDSVLEGMAEYYSLQLAQNVRRGQRESAKKSQTVGGCKIIGYNVNPDTKRYEVDPQTAPFVTEVFKRYANGETISEIVTWLNAHGVRTTRGGEFTVNSLHRLLKNEKYTGVYIFHDIRNEGGMPALIDRATFDKAQEMLKVNRRAPARVWSKTEYLLTDKLFCGHCGSMMVGESGHGRNGTKHNYYTCWNRKKKKLCDKKPVRQDVIEPLVLKSIGKLLENPATLESIADQVWAAYERSDTSGDTIKALDKQIADVNKALSNVMKAIEMGIINEMTKTRMDELTDQKQALSAARAEAGLAGGFKLTRDMILFFLQEIAALDMADRDSQKRLIKTFVNAIYLYDDHFDIAFNYTDKGKVVVRMQEINDAACGEVFGRCAQSPAKSRLSRLR

SEQ ID NO: 5228 - protein, 510 aa, Unknown
  Description of Unknown: Integrase B5229 sequence
  SM00857,G3DSA:1.10.10.2600,IPR036162,PF13408,IPR025827, PS51737,G3DSA:3.40.50.1390,IPR006119,IPR038109,PF07508, IPR011109,SSF53041,PTHR30461,Coil,PS51736, cd00338,PF00239
MSYFIYARKSRKDAELEALGIDVLERHITTLLELAKALSLPIGAIYREVVSGDSIDARPVMTQVLSEVEACMWDGALVMDVDRLARGDTIDQGRVQRAFFYSNTRIVTPNKTYDPANEYDNEYFEFSLFMSRREYATIKRRMQRGRERSSSDGYYVGNVAPYGWERVIAPDGKHYSLAPHQTEAPVLDLMYDLCGNKQYGYQKACTYMSNMGILARSGKPFTPSTLKGIISNPANIGKVRWGHRKTVRAVKDGRVVKSRPKATDYILSDAAWAPRISPDLFKRANQPKGCFSAPVRNDRPIQNLFAGLVRCSQCDRLMVRKKAQTKTPYDMLICQYTECSTVGIRIDELEEALLGWLKDYIAKYEFADTHEEDTAAIAAKELIVTNFETEHQTLLKQRESLFDFLEQGIYTKEIFIERSNALEQRIRDCMNNITAAREDLHTTIARQANRKNFVPKCKNLLSEWDSLTVSEKNSALRQLIDRIVLTKTKRNKKNQKNSEFTIDVYPKVPK

SEQ ID NO: 5229 - protein, 510 aa, Unknown
  Description of Unknown: Integrase B5230 sequence
  SM00857,G3DSA:1.10.10.2600,IPR036162,PF13408,IPR025827, PS51737,G3DSA:3.40.50.1390,IPR006119,IPR038109,PF07508, SSF53041,IPR011109,PTHR30461,Coil,PS51736, cd00338,PF00239
MKRAVFYGRYSSDRQTEQSIEGQRRVCEEFAKAEGIHIVAEYIDRATSGTSTDHRDQFQQMISDSKRGCWEYVLVYKLDRFARNRYDSAVYKQKLKRCGVKVLSATERITDSPEGILIEGLLESMDEYFSRELSRKCKRGIRETIIKGNTFTRAPYGYHKTEKRLTVDEAEASNVRQIFTQYVFGATLQSIADKLNAAGHRTRQGNPFRRYSVSDILHNPKYTGTYYVTDIAEPETCPQIVPQSLYDAAQERLKHSAHNARVNRTGHVFALTGLLQCGICGRKVVGTSVQRKYFYYTCIAKSCKTLPHDHSLTVSSEKVEAAVIAALADYFTPEHVTDFAECLYRMYLAEDSPKPDRNKQIQAIEKQIQGAVNALIACPQSEALQARLTDLEQQKQQLEQAAPEPPKLTQQDFIKFFCWITKALDRADDRKKFFNAVIHSVTLYRDHVVIAINLTKDDVDPPERVILEKSFSDTVVKSSLYPTISKIKLVPPLLLLYVPLPAGIFRHRGA

SEQ ID NO: 5230 - protein, 510 aa, Unknown
  Description of Unknown: Integrase B5231 sequence
  SM00857,G3DSA:1.10.10.2600,IPR036162,PF13408,IPR025827, G3DSA:3.40.50.1390,PS51737,IPR006119,IPR038109,PF07508, SSF53041,IPR011109,PTHR30461,Coil,PS51736, cd00338,PF00239
MKRAVFYGRYSSDRQTEQSIEGQRRVCEEFAKAEGIHIVAEYIDRATSGTSTDHRDKFQQMISDSKNGCWEYVLVYKLDRFARNRYDSAVYKQKLKRCGVKVLSATERITDSPEGILIEGLLESMDEYFSRELSRKCKRGIRETIIKGNSFTRAPYGYHKTEKRLMVDEVESNNVRQIFTQYVGGATLQSIADKLNAAGHRTRQGNPFKRYSISDILHNPKYTGTYYVTDIAEPETCPQIVPQSLYDAAQERLKHSAHNARTNRTGHVFALTGLLQCGICGHNVVGTSVQRKYFYYTCIAKSCETLPHDHSLTVNSEKVESTVIAALADYFTPEHVTDFAECLYRMYLAEDSPKPDHSKQIQAIEKQIQGAVSALIACPQSEALQARLTDLEQQKQQLEQAPPEPPKLTQQDFIKFFCWITKALDRADDRKKFFNAVIHSVTLYRDHVVIAINLTNDNVDPPERVILEKSFSDTVVKSSLYPTISKIKLVPPLLLCYVPLPAGIFRRRGA

SEQ ID NO: 5231 - protein, 510 aa, Unknown
  Description of Unknown: Integrase B5232 sequence
  cd00338,SM00857,G3DSA:1.10.10.2600,IPR036162,PS51737, G3DSA:3.40.50.1390,IPR006119,IPR038109,PF07508,IPR011109, SSF53041,PTHR30461,PS51736,Coil,PF00239
MDTDIFAIYLRKSRKDLENQDYDVLKRHRKILLDFAKSKRITIHEEDIYEEVVSGETIQDRPVIQNLLKKIETGYYKAVLVMEIERLARGNTIDQGIIAQAFQLTNTLIITPNKTYDTNNEYDNEFLEFGLFMSRREYKAISRRIQTGRIESCKEGNYVGSVTPYGYDKEKLKGEKGYKLIPNDEATNVKLIFELFLDGLGTSNLSYKLNELKIKSRTGKQWTPAMVRNILTNKVYIGILTWGRRANVKKLDNNMISKTRPINNDYIESKGKHKPIIDELTFYRTQELLKANSFKKVHKDKSLQNPLAGIVVCKKCGTNMIRRPLKNIPDTLLCKNHYCNNVSSYIYLVEKKLLDSLKNTLNKYYHYLENYEEEHINHKKNYDSQIKKLDKEIEKLKKQHIKTCELLETGVYSLDLFRDRSSSINEQIEGLNKQKEELIKLNENNKVDKIIQAIPKIENCLKTYDTLNVEEKNKLLKTIINKAYYLKDEAGSRWNKDAQDKFILELELLL

SEQ ID NO: 5232 - protein, 510 aa, Unknown
  Description of Unknown: Integrase B5233 sequence
  SM00857,G3DSA:1.10.10.2600,IPR036162,PF13408, PS51737,IPR025827,G3DSA:3.40.50.1390,IPR006119, IPR038109,PF07508,IPR011109,SSF53041, PTHR30461,PS51736,cd00338,PF00239
MSYFIYARKSRKDADLEALGIDVLERHITTLLELAKTLSLPIGAIYREVVSGDSIDSRPVMSQVMAEVESCMWDGCLVMDVDRLARGDTIDQGRVQRAFFYSNTKIVTPNKTYDPANEYDNEYFEFSLFMSRREYATIKRRMQRGRERSSSDGYYVGNIPPYGWRRVIAPDGKHFSLAPDPTESPVLDLMYDLCGNKQYGYQKACTHMAEMGILSRSGRPFTPSTLKGIISNPANIGKVRWGHRKTVRTVKDGKISRSRPHSSDYILADAVWPPRISADLFRRANQPKGSCSAPVRDDRPIQNIFAGLVRCSQCGRLMVRKKAHTKTPYDILICQYTECPTVGIRIDELELALLEWLQNYIDKYELTDALPEDAENVATKEAIVKNFEKEHEMLLKQRESLFDFLEQGIYTKEIFIERSNALEQRVKECMEHIVSAQNDLHATLALQANRKNFVPRCKNLLGEWGELTIPEKNSALKVLIEKIMFTKTKRNKKGQNRSDFEIDVFPKVPK

SEQ ID NO: 5233 - protein, 510 aa, Unknown
  Description of Unknown: Integrase B5234 sequence
  SM00857,G3DSA:1.10.10.2600,IPR036162,PS51737,G3DSA:3.40.50.1390, IPR006119,IPR038109,PF07508,IPR011109,SSF53041, PTHR30461,Coil,PS51736,cd00338,PF00239
MDTDIFAIYLRKSRKDLENKDYDVLKRHRKILLDFAKSKNIVIHEEDIYEEVVSGETIQDRPVIQNLLKKIEVGYYKAVLVMEIERLARGNTIDQGIIAQAFQLTNTLIITPQKTYDTRNEFDNEFLEFGLFMSRREYKAISRRIQTGRIQSCKEGNYIGSVTPYGYDKEKLKGEKGYKLTPNDESENVKLIFDLFLDGLGTSTLAFKLNDLNIKSRTGKPWTPAMVRNILTNKIYIGILTWGKRASVKKLDNNLISKTRPVNHNCIESKGKHDPIIDELTFYKAQTLLKSNSSKKVPKDKALKNPLAGIIVCKKCGTNMIRRPLKNIPDTILCKNHYCDNISSYLYLIEKRLLDSLHTTLLEYYYYLDNYEKEDLKSKKNYDIQIKKIDKDINTLKKQHVRTCELLELGVYSLELFKERSTSINEQVDALIKQKDELIRLNKDNKTEKIIQAIPKIENCLNTYHTLSIEDKNKLLKSIIKKAYYLKNATGGRWNKEAQDNFSIELELNL

SEQ ID NO: 5234 - protein, 510 aa, Unknown
  Description of Unknown: Integrase B5235 sequence
  PTHR30461:SF3,cd00338,SM00857,G3DSA:1.10.10.2600,IPR036162, PS51737,G3DSA:3.40.50.1390,IPR006119,IPR038109,PF07508, IPR011109,SSF53041,PTHR30461,PS51736, Coil,PF00239
MGGRAAIYARFSSHNQRSESIEIQVEKSRDYCRENELTVVAEYCDYAQTGTNTDRAEFQRMMADARRGLFDFVVIWKVTRIMRNRDEMAMARIMLRRCRVEILYAGEDISDGSAGVLQLGMLEVLAEYESALDGERIRDGIQKNAERCMANGCVRYGWDIVDGRYVVNEEEAAAIRLGVRMVLSGKSVADVVRAWEPYRTKRGGKWRFQTVRRILMRRENGGEYRYAGVVVPGGMPAIVPMDDEERVIRMLEDSHRPRAKTEAWDFPLTGKLYDGRDGGLMTGTSGTGKSGRPYHYYRCRSCGRTVRRDVVEKRVADAVREALGSADSRERIARMLADAEEERADEKPLSETIKGELAKIETAFSNIWAAIESGIAPPGGKERIDALKQRQALLKDELRTAEALEAARLDYDRALFWLEGMAAAEVDDAQLLRTFVARVVLGGPDDDDGLRVAFTFDDSAGLGDNPSLPGAIGPGGEVFDRMNASSTKRGSVELFFYKNEFALVYRLGDA

SEQ ID NO: 5235 - protein, 510 aa, Unknown
  Description of Unknown: Integrase B5236 sequence
  PTHR30461:SF3,cd00338,SM00857,G3DSA:1.10.10.2600,IPR036162, PF13408,IPR025827,G3DSA:3.40.50.1390,PS51737,IPR006119, IPR038109,PF07508,IPR011109,SSF53041,PTHR30461, PS51736,Coil,PF00239
MQKRRTKYANSQGDNAVIYARYSSHNQKDTSIEQQIEVCTKYARDNGYRITNIYADRAISGKTDARPQFRLMMQDAREHKFDVVISWKSSRLGRDMLDAMTNDIILRNLGIKCFYTEENFDDTAAGRFALRNMMNVNQFYIENMAEDILRGMRDNAKKCRVNNGSPPLGYRRGADGKYEIVPDEAETVREIFTKVLAGMAFVDIANELNARGIKTKKGAPWGRSSFSRLLSNERYIGTYKWSDIVIENGMPAIIDREVFEMAQKKIKGERPLRRRHNENGDYLLTGKLFCGKCDSPMTGMSGTSKSGAKHHYYACYSARKDGSCDKKAVKRDWVEKTVALFIKEHVLRDEVIEWMVDQYMVYQKATFESQRIMEMRNQLKDVQSQLDNLVDAIARGIYTDSTKDKLLKLEADKKEIEQDIRLATYNLKEYDREHVRCYFLSFKEGSVESKDYLKRLFDQFVTKIYLYDDEIRIAFSGTKDDSPVSFKIIDEAEELAVSSVRLSSASSHHT

SEQ ID NO: 5236 - protein, 509 aa, Unknown
  Description of Unknown: Integrase B5237 sequence
  PTHR30461:SF3,SM00857,G3DSA:1.10.10.2600,IPR036162,PF13408, PS51737,G3DSA:3.40.50.1390,IPR025827,IPR006119,IPR038109, PF07508,SSF53041,IPR011109,PTHR30461,Coil, PS51736,cd00338,PF00239
MPEALNAVIYARYSSDRQTEQSIEGQLRECYAFAKANDIAVIDTYIDRAISGKTDNRPAFQKMIEDSAKRQFQAVIVYRLDRFTRNRYDSAIYKARLKKNGVKVLSAMENLNGSPESIIMESLLEGMAEYYSVELSQKITRGMRENALKGKALGGQRVLGYKVNSDCYFEIDETTAPVVVDIFKLYSSGKTVKEICDILNARGVKTARGGAFNKNSLHTILTNKKYIGIYKTKYGEIVGGIPAIIDKELFEMVALRMEQNKKAPARAKAEINYLLSTKLFCGKCRSAMVGESGTSKTGKKYYYYACVKKKREKACDKSNVKKDWIEDLVIQRTVTDILKDDVIENIADRLVELQKAEAAESGTMLYLENSLAEIQVSIKNIMTAIEKGIITESTKTRLTELEDEKRNVEIEIAKESIARRIISREQIIYWISSFKDGDITSEKYRQQLIDTFVHAVFVYDDKIVITYNYSGENNTATISDLDLSSPPKQQSQNVAVFVYCIFSLALNSF

SEQ ID NO: 5237 - protein, 509 aa, Unknown
  Description of Unknown: Integrase B5238 sequence
  PTHR30461:SF3,SM00857,G3DSA:1.10.10.2600,IPR036162,PF13408, PS51737,IPR025827,G3DSA:3.40.50.1390,IPR006119,IPR038109, PF07508,IPR011109,SSF53041,PTHR30461,Coil, cd00338,PF00239
MKAVIYARYSPGPNQKDKSVEEQIADCRQFARENDIMIVGDYADRKKTGRNDNRAEFQKMLKDSAKGLFDAVIVWKIDRFGRNREEIAINKVKLRRNGVRVMYAKEHIPDGPEGIILESTLEGLAEYYSANLSQNIMRGMRGVAMKGQSTGGGGHSLGYYVDQDKYFQIDEHGAQIVRQIFEMYSSGKQASEIIKELNGRGLKTANGKPFNHNSIARILSNRRYIGEYRWHDILIPDGMPRIIDDETFERVQKRLEKNKKAPARKIQAGSEEEFLLTTKLFCGHCGATMIGDSGTGKSGKKYSYYTCSTRKRRKDGRKCDKKSVRKDELERYIVEQTVAHVLVDDVIEYIADKVVELQRKELQDTSMLDYYKSSLRDTEKSLKNIVTAIEQGIFTPTTKDRLLELEAEKADLEECIQKEEIARPTFSKEQIIFFLERFKGGDVNDQSYQRQIIDTFVSRIWIYDDKTVITYNYSGEGNTITLEAAEKAADEAAGGCSAQLPPSPPRKSG

SEQ ID NO: 5238 - protein, 509 aa, Unknown
  Description of Unknown: Integrase B5239 sequence
  PTHR30461:SF3,cd00338,SM00857,G3DSA:1.10.10.2600,IPR036162, PF13408,IPR025827,PS51737,G3DSA:3.40.50.1390,IPR006119, IPR038109,PF07508,SSF53041,IPR011109,PTHR30461, PS51736,Coil,PF00239
MYEDIKTACLYVRFSSHNQTEQSIEGQTRVCRDFCKRHNIRIVEIYADRATSASKDIEKRVQFLKMIKDSERGLFDAVIVYKLDRFARSRYDSATYKYRLKRNGVQLISATENISNDPEGIILESVLEGMAEFYSAELSQKINRGMRESAYKHNSIGGAVPLGYKIEDKKLVIDPKTAPIVKEAFEKYADGETVAEICRQFNARGYKTSKGTTFGKSSFTKIFRNERYIGVYSFHDYRAEDAIPAIIDKDLWDRVQLRVGKIKNAPARNKAKVVYLLSGKIFCGHCGSKMNGNCNAGNYYYYQCYGKKNGNVDCKKKNIRKEFIERLVAQDALSLLTDEYIEQIATIACEKNQHEIELDSALPTIRDRIHQVDLSLNHLLKAIESGSAPDMLVKRMGELEKEKKDLQAQAKKESEDIVELDKAQVIYWLEQFRGGSIEDQEFCRMLIDLFVNSVTVWDEDDNTYKVTVAYNLTSLPTKTYRLNKGGTLSDFASNAPASQSPKLTSRRLV

SEQ ID NO: 5239 - protein, 509 aa, Unknown
  Description of Unknown: Integrase B5240 sequence
  PTHR30461:SF3,cd00338,SM00857,G3DSA:1.10.10.2600,IPR036162, PF13408,IPR025827,G3DSA:3.40.50.1390,PS51737,IPR006119, IPR038109,PF07508,IPR011109,SSF53041,PTHR30461, PS51736,Coil,PF00239
MNAVLYLRYSSDKQNEQSIEGQKRVCEAFCEKNGYSILSIYIDRAKSASKDTEKRIQFQQMIKDSAKKRFEAVVVYKLDRFARDRYDSAIYKSRLKKNGVRVVSATENISTEPEGIILESVLEGMAEFYSRELSQKVTRGMHETALKANYTGGGVPLGYKVEDKKLIIDERTADIVREAFSLYAAGATISDICSIFAEKGYKSTRGSAFTSHSFTRMLRNEKYIGTYFYKEVKIENAIPAIVDKGIFEMVQKRLKKNASAPARGKASTDFLLSQKLFCGHCGAKMVGESGQGRNGRVYYYYKCATQKKTGDCDKKPVQKDEIERLVVLDTIAMLTPENIEKIADIASSKSVERLQRESIIPALNIELVGVKKAISNIVDAVEQGRASDALFNRLDKLEIKKKNLELEIDKQMDEFPIVDADQVIYWLSKFKDGDISDPIFCKRLIDMLVNSVTLWDGPDGGKKITILYNLSPHEMHTFTISDSGDGGAPPQNNPKLFIYKNVFGQTKTH

SEQ ID NO: 5240 - protein, 509 aa, Unknown
  Description of Unknown: Integrase B5241 sequence
  SM00857,G3DSA:1.10.10.2600,IPR036162,PF13408,PS51737, IPR025827,G3DSA:3.40.50.1390,IPR006119,IPR038109,PF07508, IPR011109,SSF53041,PF00239,PTHR30461,Coil, cd00338
MYVIYLRKSRKDSDLEALGIDVLKRHEETLLELARARSLPIGAIYREVVSGDSIDARPEMVRLLSEVESGIWEGVLVMEVERLARGDTIDQGRVQRAFFYSNTLIVTPGKTYNPAIENDNEYFEFSLFMSRREYATIKRRMQAGRIRSVKDGYYVGNIAPYGWRRVKADDCKHFTLVPDEKENPVLKLMYDFMGNKKYGFQKTCSALTGMGIVSRSGKPFNPATVKTIISNPVNIGMLRWNYRKSQKAIVNGKIATSRPKADDYILVKGKHPGCISEDLYYRANSVSSSMTAPVKRSCRIQNPFAGIVRCSCCGRVMVRKKMSAKQPRDYLICQYAGCTTVAIELEELENAVLEWIRNYIADYKVNNFESADDSEQESLRSILANLEKEKETTLKQRGSLFDLLEQGIYTKEIFFERSTALEDKIKDFDKKIESVNADIVRLDLSKKNRSTFVPKCQELLNAWDTFDAADKNTALKNVIERIDFTKTEKNARGQRHSSFSIDVFPRISR

SEQ ID NO: 5241 - protein, 509 aa, Unknown
  Description of Unknown: Integrase B5242 sequence
  cd00338,SM00857,G3DSA:1.10.10.2600,IPR036162,PF13408, IPR025827,G3DSA:3.40.50.1390,PS51737,IPR006119,IPR038109, PF07508,SSF53041,IPR011109,PTHR30461,Coil, PF00239
MYVIYLRKSRKDSDLEALGIDVLKRHEETLLELARARSLPIGAIYREVVSGDSIDARPEMVRLLSEVESGIWEGVLVMEVERLARGDTIDQGRVQRAFFYSNTLIVTPGKTYNPAIENDNEYFEFSLFMSRREYATIKRRMQAGRIRSVKDGYYVGNIAPYGWRRVKADDCKHFTLVPDEKENPVLKLMYDFMGNKKYGFQKTCSALTGMGIVSRSGKPFNPATVKTIISNPVNIGMLRWNYRKSQKAIVNGKITTSRPKADDYILVKGKHPGCISEDLYYRANSVNSSMTAPVKRSCRIQNPFAGIVRCSCCGRVMVRKKMSAKQPRDYLICQYAGCATVAIELEELENAVLEWIRNYIADYKVNNFESTDDSEQESLRSILVNLEKEKETTLKQRGSLFDLLEQGIYTKEIFFERSTALEDKIKDFDKKIESVNADIVRLDLSKKNRSTFVPKCQELLNAWDTFDAADKNTALKNVIERINFTKTEKNAHGQRHSSFSIDVFPRISR

SEQ ID NO: 5242 - protein, 509 aa, Unknown
  Description of Unknown: Integrase B5243 sequence
  cd00338,SM00857,G3DSA:1.10.10.2600,IPR036162,PF13408, IPR025827,G3DSA:3.40.50.1390,PS51737,IPR006119,IPR038109, PF07508,SSF53041,IPR011109,PTHR30461,Coil, PF00239
MYVIYLRKSRKDSDLEALGIDVLKRHEETLLELARARSLPIGAIYREVVSGDSIDARPEMVRLLSEVESGIWEGVLVMEVERLARGDTIDQGRVQRAFFYSNTLIVTPGKTYNPAIENDNEYFEFSLFMSRREYATIKRRMQAGRIRSVKDGYYVGNIAPYGWRRVKADDCKHFTLVPDEKENPVLKLMYDFMGNKKYGFQKTCSALTGMGIVSRSGKPFNPATVKTIISNPVNIGMLRWNYRKSQKAIVNGKIATSRPKADDYILVKGKHPGCISEDLYYRANSVNSSMTAPVKRSCRIQNPFAGIVRCSCCGRVMVRKKMSTKQPRDYLICQYAGCATVAIELEELENAVLEWIRNYIADYKVNNFESTDDSEQESLRSILVNLEKEKDTTLKQRGSLFDLLEQGIYTKEIFFERSTALEDKIKDFDKKIESVNADIVRLDLSKKNRSTFVPKCQELLNAWDTFDAADKNTALKNVIERIDFTKTEKNARGQRHSSFSIDVFPRISR

SEQ ID NO: 5243 - protein, 509 aa, Unknown
  Description of Unknown: Integrase B5244 sequence
  cd00338,SM00857,G3DSA:1.10.10.2600,IPR036162,PS51737, G3DSA:3.40.50.1390,IPR006119,IPR038109,PF07508,SSF53041, IPR011109,PTHR30461,PS51736,Coil,PF00239
MDKYAIYLRKSRADLEAEKLGEGETLARHKKILTELAARRGLYVEKIYQEIISGAETIKDRPEIQKLINDAYKGKYRGVIIVEITRLSRGSQGDAQIIMDCLKYANRNKGLLVVTPTKVYDVAHNSDDEEYMEFELFMSRREYKMIQKRMDRGKKQCVVEGNYMASYRPYGYDILKTKTSRTLIPNDEEAPIVKKIFDWTVEQNMTPGEIARKLTSMGTPTYTGDPEWSAATVKTILTNPTYIGKVRWNDRMQVKTMVNGELVTSRPRSNHSEHFMLYDGKHKEYALIDEETFNKVSDRFTSDKTKHNLKLYNPLAGIFSCKKCGKMMHYQRYTTKQNVQPRFTHKHSQICKVKSVLATDVMNAVVHALKLYIEDFSVKINNLPQTDENEIAKEIESLTTELMKIEKKLSKLFDAWEDEQISDNEFVKRKAINNQRVENIKAEIEKLENSIPEKEEYEEKIMALSDALDSLLDENIDADIQNEYLKQIIDKIEFSRENNKEFILDVFLK

SEQ ID NO: 5244 - protein, 509 aa, Unknown
  Description of Unknown: Integrase B5245 sequence
  PTHR30461:SF3,SM00857,G3DSA:1.10.10.2600,IPR036162,PF13408, PS51737,G3DSA:3.40.50.1390,IPR025827,IPR006119,IPR038109, PF07508,SSF53041,IPR011109,PTHR30461, Coil,PS51736,cd00338,PF00239
MPEALNAVIYARYSSDRQTEQSIEGQLRECYAFAKANDIAVIDTYIDRAISGKTDNRPAFQKMIEDSAKRQFQAVIVYRLDRFTRNRYDSAIYKARLKKNGVKVLSAMENLNGSPESIIMESLLEGMAEYYSVELSQKITRGMRENALKGKALGGQRVLGYKVNSDCYFEIDETTAPVVVDIFKLYSSGKTVKEICDILNARGVKTARGGAFNKNSLHTILTNKKYIGIYKTKYGEIVGGIPAIIDKELFEMVALRMEQNKKAPARAKAEINYLLSTKLFCGKCRSAMVGESGTSKTGKKYYYYACVKKKREKACDKSNVKKDWIEDLVIQRTVTDILKDDVIDKIADRLVELQKAEAAESGTMLYLENSLAEIQVSIKNIMTAIEKGIITESTKTRLTELEDEKRNVEIEIAKESIARRIISREQIIYWISSFKDGDITSEKYRQQLIDTFVHAVFVYDDKIVITYNYSGENNTATISDLDLSSPPLQSNPNIFVTLDVFGLVVQIER

SEQ ID NO: 5245 - protein, 509 aa, Unknown
  Description of Unknown: Integrase B5246 sequence
  PTHR30461:SF3,cd00338,SM00857,G3DSA:1.10.10.2600,IPR036162, PF13408,IPR025827,PS51737,G3DSA:3.40.50.1390,IPR006119, IPR038109,PF07508,IPR011109,SSF53041,PTHR30461, PS51736,Coil,PF00239
MKRAVFYGRYSSDRQTEQSIEGQRRVCEEFAAGENIQIVREYIDRATSGTSTQHREQFQQMISDSKTGGWDYVLVYKLDRFARNRYDSAVYKRELKRNGVTVLSATERITDSPEGVLIEGLLESMDEYFSRELSRKAKRGMRESILKGHCITRLPYGYKRTGKTCAIDEDAADVIRWIFREYSSGKTIQEIVDTLNVRGFRTMTGKRFKRPTVSVILRNDKYTGTHYVSDFEEPERYPQIISQTMWDSVQSRLRESANRYRKHNDGFIYALTGKINCGYCGYAVNGITSNHKYHYYRCVSGKYNKHICDGCSVRADVVETAVVDALQEYFTAERVEEMGTHLYDLYRKSAPTERDDKRRLAEVDMQITGAVNALIACPESEALQNRLRELEEQKREIEQSHVEHQRLERGHFVEFFRNIVSALEHIDVRTRLFSTLIESVSLYRDHVVIMINLMDDSTDPPTPISLEKYFSSSVGNGRALHTLDKIQLAFPFLLLYVSLPERRNQRERP

SEQ ID NO: 5246 - protein, 509 aa, Unknown
  Description of Unknown: Integrase B5247 sequence
  PTHR30461:SF3,SM00857,G3DSA:1.10.10.2600,IPR036162,PF13408, IPR025827,G3DSA:3.40.50.1390,PS51737,IPR006119,IPR038109, PF07508,SSF53041,IPR011109,PTHR30461,Coil, PS51736,cd00338,PF00239
MARKKKYHLREVHSVCIYARYSAGSRQTDQSIEGQLQVCRDYAAAQGYTVTRIYRDSHISGTTDDRAQFRQMLADSDTGAFDAVLVWKNDRFGRNLEEQVVNEMRLKNNGVSLISVTEPLADGPLGPMQKALLMGIAEFYSAANSENVRRGMRQAALNCQVISGAIPFGYRKGADKRFALDPPAADMVREIYQRYDCGEKIFSIMDDCNRRGFRTVQRSAPFTHNTMYSILSNERYTGVYLWKDVRIEGGMPQIVDRELFERVRAKMQQNKKAPARSKAAEPFLLTTRCFCALCGAPMIGDSGTGKNGTTHYYYSCAARKNARSKRDACPQKSIRKDALEELVLRRTLSDLLQPQTCAQIARQLVEYQQKDRTGVQLEALARRRRQVQKAIENLLDLAEAGQCSAGLANRLALREKELEEIDTAAAQLRAERSVFTEKEILRYLQSFSETQLHDAAFRQRLAETFLQAVYVAPDTVVICYPYTAPQTPVTLDTVRRLLDDNAAAPMQPT

SEQ ID NO: 5247 - protein, 509 aa, Unknown
  Description of Unknown: Integrase B5248 sequence
  cd00338,SM00857,G3DSA:1.10.10.2600,IPR036162,PF13408, IPR025827,G3DSA:3.40.50.1390,PS51737,IPR006119,IPR038109, PF07508,SSF53041,IPR011109,PTHR30461,Coil, PF00239
MYVIYLRKSRKDSDLEALGIDVLKRHEETLLELARARSLPIGAIYREVVSGDSIDARPEMVRLLSEVESGIWEGVLVMEVERLARGDTIDQGRVQRAFFYSNTLIVTPGKTYNPAIENDNEYFEFSLFMSRREYATIKRRMQAGRIRSVKDGYYVGNIAPYGWRRVKADDCKHFTLVPDEKENPVLKLMYDFMGNKKYGFQKTCSALTGMGIVSRSGKPFNPATVKTIISNPVNIGMLRWNYRKSQKAIVNGKIATSRPKADDYILVKGKHPGCISEDLYYRANSVNSSMTAPVKRSCRIQNPFAGIVRCSCCGRVMVRKKMSSKQPRDYLICQYAGCATVAIELEELENAVLEWIRNYIADYKVNNFESTDDSEQESLRSILVNLEKEKETTLKQRGSLFDLLEQGIYTKEIFFERSAALEDKIKDFDKKIESVNADIVRLDLSKKNRSTFVPKCQELLNAWDTFDAADKNTALKNVIERIDFTKTEKNARGQRHSSFSIDVFPRISR

SEQ ID NO: 5248 - protein, 509 aa, Unknown
  Description of Unknown: Integrase B5249 sequence
  SM00857,G3DSA:1.10.10.2600,IPR036162,PF13408,IPR025827, G3DSA:3.40.50.1390,PS51737,IPR006119,IPR038109,PF07508, IPR011109,SSF53041,PF00239,PTHR30461,Coil, cd00338
MYVIYLRKSRKDSDLEALGIDVLKRHEETLLELARAKSLPIGAIYREVVSGDSIDARPEMVRLLSEVESGIWEGVLVMEVERLARGDTIDQGRVQRAFFYSNTLIVTPGKTYNPAIENDNEYFEFSLFMSRREYATIKRRMQAGRIRSVKDGYYVGNIAPYGWRRVKADDCKHFTLVPDEKENPVLKLMYNFMGNKKYGFQKTCSALTGMGIVSRSGKPFNPATVKTIISNPVNIGMLRWNYRKSQKAIVNGKIATSRPKANDYILVKGKHPGCISEDLYYRANSVNSSMTAPVKRSCRIQNPFAGIVRCSCCGRVMVRKKMSAKQPRDYLICQYAGCATVAIELEELENAVLEWIRNYIADYKVNNFESTDDSEQESLRSILVNLEKEKETTLKQRGSLFDLLEQGIYTKEIFFERSTALEDKIKDFDKKIESVNADIVRLDLSKKNRSTFVPKCQELLNAWDTFDAADKNTALKNVIERIDFTKTEKNARGQRHSSFSIDVFPRISR

SEQ ID NO: 5249 - protein, 509 aa, Unknown
  Description of Unknown: Integrase B5250 sequence
  cd00338,SM00857,G3DSA:1.10.10.2600,IPR036162,PF13408, PS51737,G3DSA:3.40.50.1390,IPR025827,IPR006119,IPR038109, PF07508,SSF53041,IPR011109,PTHR30461,Coil, PF00239
MYVIYLRKSRKDSDLEALGIDVLKRHEETLLELARARSLPIGAIYREVVSGDSIDARPEMVRLLSEVESGIWEGVLVMEVERLARGDTIDQGRVQRAFFYSNTLIVTPGKTYNPAIENDNEFFEFSLFMSRREYATIKRRMQAGRIRSVKDGYYVGNIAPYGWRRVKADDCKHFTLVPDEKENPVLKLMYDFMGNKKYGFQKTCSALTGMGIVSRSGKPFNPATVKTIISNPVNIGMLRWNYRKSQKAIVNGKIATSRPKADDYILVKGKHPGCISEDLYNRANSVNSSMTAPVKRSCRIQNPFAGIVRCSCCGRVMVRKKMSAKQPRDYLICQYAGCATVAIELEELENAVLEWIRNYIADYKVNNFESADDSEQESLRSILVNLEKEKETTLKQRGSLFDLLEQGIYTKEIFFERSTALEDKIKDFDKKIESVNADIVRLDLSKKNRSTFVPKCQELLNAWDTFDAADKNTALKNVIERIDFTKTEKNARGQRHSSFSIDVFPRISR

SEQ ID NO: 5250 - protein, 509 aa, Unknown
  Description of Unknown: Integrase B5251 sequence
  PTHR30461:SF3,SM00857,G3DSA:1.10.10.2600,IPR036162,PS51737, G3DSA:3.40.50.1390,IPR006119,IPR038109,PF07508,SSF53041, IPR011109,PF00239,PTHR30461,PS51736,Coil, cd00338
MPFDDYKESVAIYLRKSRMDPDSEDIDETLARHEDTLLKLAKQMDLNIVEIYKEVVSGDGLFTRPEMCRLLQNVEQGNYSAVLCMEIDRLGRSSQKDGGIILETFKDNDVRIITTSKTYDLNDDVDEQVVEMHSFIARQELKAIRRRLNRGIEKTVEMGYHICEPPYGYRRTYIDKRPTLEICEEEANVIRMVFDMYVNQHMGTQTIADNLNKMGYTPRKNDHFSRNTIQFYLQNETYIGQIIWNKRKHIKKKFPTDKHRTVLNPEEKWIVSEGKHPAIISKELFEQAREIHQFRTHPPTAHGIIRNPFAGLIYCKNCGELMQRQYSKISGNRLLCLHSGCIRSIRTMFVEKVILDAVKNILKNSSSAVQNSIQKTNNLQIEMLDRTIKDINTKIKQLNSQKSKLHDLLEQGVYDVDTFLDRSNAIAEKIQNSKLALAQHEKKLNSIQSVPTVQEVLPTLRYLIDEYDNLSAGEKNVIFKKLIKRMVYNRTKDHRGNDFDLDIEWRFTM

SEQ ID NO: 5251 - protein, 509 aa, Unknown
  Description of Unknown: Integrase B5252 sequence
  cd00338,SM00857,G3DSA:1.10.10.2600,IPR036162,PF13408, IPR025827,G3DSA:3.40.50.1390,PS51737,IPR006119,IPR038109, PF07508,IPR011109,SSF53041,PTHR30461,Coil, PF00239
MYVIYLRKSRKDSDLEALGIDVLKRHEETLLELARARSLPIGAIYREVVSGDSIDARPEMVRLLSEVESGIWEGVLVMEVERLARGDTIDQGRVQRAFFYSNTLIVTPGKTYNPAIENDNEYFEFSLFMSRREYATIKRRMQAGRIRSVKDGYYVGNIAPYGWRRVKADDCKHFTLVPDEKENPVLKLMYDFMGNKKYGFQKTCSALTGMGIVSRSGKPFNPATVKTIISNPVNIGMLRWNYRKSQKAIVNGKIATSRPKADDYILVKGKHPGCISEDLYYRANSVNSSMTAPVKRSCRIQNPFAGIVRCSCCGRVMVRKKMSAKQPRDYLICQYAGCTTVAIELDELENAVLEWIRNYIADYKVNNFESADDSGQESLRSILVNLEKEKEITLKQRGSLFDLLEQGIYTKEIFFERSTALEDKIKDFDKKIESVNADIVRLDLSKKNRSTFVPKCQELLNAWDTFDAADKNTALKNVIERIDFTKTEKNARGQRHSSFSIDVFPRISR

SEQ ID NO: 5252 - protein, 509 aa, Unknown
  Description of Unknown: Integrase B5253 sequence
  PTHR30461:SF3,SM00857,G3DSA:1.10.10.2600,IPR036162,PF13408, PS51737,G3DSA:3.40.50.1390,IPR025827,IPR006119,IPR038109, PF07508,SSF53041,IPR011109,PTHR30461,Coil, PS51736,cd00338,PF00239
MPEALNAVIYARYSSDRQTEQSIEGQLRECYAFAKANDIAVIDTYIDRAISGKTDNRPAFQKMIEDSAKRQFQAVIVYRLDRFTRNRYDSAIYKARLKKNGVKVLSAMENLNGSPESIIMESLLEGMAEYYSVELSQKITRGMRENALKGKALGGQRVLGYKVNSDCYFEIDETTAPVVVDIFKLYSSGKTVKEICDILNARGVKTARGGAFNKNSLHTILTNKKYIGIYKTKYGEIVGGIPAIIDKELFEMVALRMEQNKKAPARAKAEINYLLSTKLFCGKCRSAMVGESGTSKTGKKYYYYACVKKKREKACDKSNVKKDWIEDLVIQRTVTDILKDDVIEKIADRLVELQKAEAAQSGTMLYLENSLAEIQVSIKNIMTAIEKGIITESTKTRLTELEDEKRNVEIEIAKESIARRIISREQIIYWISSFKDGDITSEKYRQQLIDTFVHAVFVYDDKIVITYNYSGENNTATISDLDLSSPPLQSNPNIFVTLDVFGLVVQIER

SEQ ID NO: 5253 - protein, 509 aa, Unknown
  Description of Unknown: Integrase B5254 sequence
  SM00857,G3DSA:1.10.10.2600,IPR036162,PS51737,G3DSA:3.40.50.1390, IPR006119,IPR038109,PF07508,IPR011109,SSF53041, PTHR30461,Coil,PS51736,cd00338,PF00239
MSYAIHLRKSRADLEAEARGEGESLARHRSRLLAFAERAGLPIVAEYSEIISGDRLSDRPEMQRLLSDVAGGKYDGVLTVEVSRLTRGDLMDQARIMQTFKYSGTKIITPEHTYDLSEDWDEDVLQSDLMMARREYKYIKRRMQRGRQASASEGLWQGRVPYGYQQVKVRPGKGFTLQPDPDQAPIVRMIFDMYAKDRVGCSTIAKHLNDLGLRTNFGKPWTDSSVLCISKNPVYAGYVTWGKRTSVTRLSPDGSLSTSRVANSAPILALGKHPPLIDQSTFDAAQAIRASHDLTRCHVNTPVRNPLAGLVYCSICGKSMVRKDNGYARGSRYDMLKCKTPGCPTTATALSLVEESILSTLSDWALIGSGSPSSPTQNPHAEQIAAIQSNLDRLRQQRTRIFSAYEEGVYDSTVFVSRRAEKDREIADAESALHALQTSSEPTDDEIIRANYPRIQNVLESYHTTSDPQQRNLLLKSVFTRIEYIKTRRCFRNENPAVALSIHCYPRRY

SEQ ID NO: 5254 - protein, 509 aa, Unknown
  Description of Unknown: Integrase B5255 sequence
  PTHR30461:SF3,SM00857,G3DSA:1.10.10.2600,IPR036162,PF13408, PS51737,IPR025827,G3DSA:3.40.50.1390,IPR006119,IPR038109, PF07508,IPR011109,SSF53041,PTHR30461, PS51736,cd00338,PF00239
MPQVQVIQPIQQQPKRLRVAAYARVSSDSEDQLNSLAVQVDYYTHLIQENPNWEFAGIYTDEGITGTSTKHREQFNRLMDDCRAGLIDRVLVKSASRFARNTADALSSVRELKSLGVTVAFEKEGFDTETSNGEMLLSMICAVAQEESLSISQNMKWGIHKRMRAGNYITNSTPFGYTQINHQLVPEKNNAMIVNDIFKSYLSGMSINEIAEHLNTIYPKENSKWNPRTIHAILRNEKYIGDSLYQKTYTTDSLPLKRYLNTGQRSKYYAMETHEGIISKTDYEKVQNLLAKKSITGEIDRTCVFSKKIYCSICGAICSRKGPPTQGFVWCCRTHLQSKVLCLLKSIREDELQQAFLSIYNRLQCNQKTILEPLVDDLLGLRHLQEQKYKKRLALGEDIQHLAKQKHNLTRIHTLGYIEEPQFIERSAAIEQQIREKKQQLSRNDMPNTSEKILQKTRLIQKKLSSTPPLELFDESVFKELVKKVLISNTAIQFELINGMKLSESRAAT

SEQ ID NO: 5255 - protein, 509 aa, Unknown
  Description of Unknown: Integrase B5256 sequence
  cd00338,SM00857,G3DSA:1.10.10.2600,IPR036162,PF13408, PS51737,IPR025827,G3DSA:3.40.50.1390,IPR006119,IPR038109, PF07508,IPR011109,SSF53041,PTHR30461,Coil, PF00239
MYVIYLRKSRKDSDLEALGIDVLKRHEETLLELARARSLPIGAIYREVVSGDSIDARPEMVRLLSEVESGIWEGVLVMEVERLARGDTIDQGRVQRAFFYSNTLIVTPGKTYNPAIENDNEYFEFSLFMSRREYATIKRRMQAGRIRSVKDGYYVGNIAPYGWRRVKADDCKHFTLVPDEKENPVLKLMYDFMGNKKYGFQKTCSALTGMGIVSRSGKPFNPATVKTIISNPVNIGMLRWNYRKSQKAIVNGKIATSRPKADDYILVKGKHPGCISEDLYNRANSVNSSMTAPVKRSCRIQNPFAGIVRCSCCGRVMVRKKMSAKQPRDYLICQYAGCATVAIELEELENAVLEWIRNYIADYKVNNFESTDDSEQESLRSILVNLEKEKETTLKQRGSLFDLLEQGIYTKEIFFERSTALEDKIKDFDKKIESVNADIVRLDLSKKNRSTFVPKCQELLNAWDTFDAADKNTALKNMIERIDFTKTEKNARGQRHSSFSIDVFPRISR

SEQ ID NO: 5256 - protein, 509 aa, Unknown
  Description of Unknown: Integrase B5257 sequence
  PTHR30461:SF3,IPR036162,PS51737,IPR011109,PTHR30461, PF00239,G3DSA:1.10.10.2600,IPR006119,SSF53041,cd00338, SM00857,IPR025827,IPR038109,mobidb-lite,PS51736, PF13408,G3DSA:3.40.50.1390,PF07508,Coil
MYEDIKTACLYVRFSSHNQTEQSIEGQTRVCQEFCQRHNIKIVEIYADRATSASKNTEKRVSFLKMIKDSEKGLFDAVVVYKLDRFARSRYDSATYKYRLKKNGVQLISATENITNSPEGIILESVLEGMAEFYSAELSQKINRGMRESAYKHNSIGGALPLGYKTVDKKLVIDEKTAPIVREAFTMYAEGHSVAEICRIFNARGYKTSKGTEFGKNSFSKIFRNERYIGTYTYHDYRAEDAIPAIIDRDLWDRVQLRLKKVKNSPGRNKAKRVYLLSGKLFCGHCGESMNGNCNGNKYAFYECYGKKSKYNGCQKRNLRKEYIERLVAQDALSLLTDENIEHLATVACERNDYEIETGSPIPVIKDRIHQTEVSINNLTKAIETGATPDALVKRMVELEREKKDLSAQLKKEEELVVPLEKEQVIFWLEKFKDGDIEDEEFCRLLIDLFVNSVTAWDEDDDMLKVTIAYNLTSLPTKTYRLTKDGTLSDFADNSPGTKSSPKKPSKSA

SEQ ID NO: 5257 - protein, 509 aa, Unknown
  Description of Unknown: Integrase B5258 sequence
  cd00338,SM00857,G3DSA:1.10.10.2600,IPR036162,PF13408, IPR025827,G3DSA:3.40.50.1390,PS51737,IPR006119,IPR038109, PF07508,SSF53041,IPR011109,PTHR30461,Coil, PF00239
MYVIYLRKSRKDSDLEALGIDVLKRHEETLLELARARSLPIGAIYREVVSGDSIDARPEMVRLLSEVESGIWEGVLVMEVERLARGDTIDQGRVQRAFFYSNTLIVTPGKTYNPAIENDNEYFEFSLFMSRREYATIKRRMQAGRIRSVKDGYYVGNIAPYGWRRVKADDCKHFTLVPDEKENPVLKLMYDFMGNKKYGFQKTCSALTGMGIVSRSGKPFNPATVKTIISNPVNIGMLRWNYRKSQKAIVNGKIATSRPKADDYILVKGKHPGCISEDLYYRANSVNSSMTAPVKRSCRIQNPFAGIVRCSCCGRVMVRKKMSAKQPRDYLICQYAGCATVAIELEELENAVLEWIRNYIADYKVNNFESTDDSEQESLRSILVNLEKEKETTLKQRGSLFDLLEQGIYTKEIFFERSTALEDKIKDFDKKIESVNADIVRLDLSKKNRSTFVPKCQELLNAWDTFDAADKNTALKNVIERIDFTKTEKNARGQRHSSFSIDVFPRISR

SEQ ID NO: 5258 - protein, 509 aa, Unknown
  Description of Unknown: Integrase B5259 sequence
  PTHR30461:SF3,SM00857,G3DSA:1.10.10.2600,IPR036162,PF13408, IPR025827,G3DSA:3.40.50.1390,PS51737,IPR006119,IPR038109, PF07508,SSF53041,IPR011109,PF00239,PTHR30461, PS51736,Coil,cd00338
MKKAIAYMRFSSVNQDKGDSLRRQKKLIDDWLKNNPQYTLDPTTYEDLGLSAYKGKHAREGAFSEFIDALENGLIIPGTVLLVESLDRLSREKVGEATERLKYILKCGIDVITLSDNTQYSEASLDDPYALIKAILIAQRANEESEIKSSRVKLSWKKKRDEAELNGRIMTKACPRWLRVSPDYSHFEVIESKVKVIKKIFSLRKENKSLTAITKYLNDRLIENMTGTPGEWSPSVIEKILGNKALIGICRPTYRGRAKGVNEIIDYYPKVLTDDEFYAVQEVRLSPFGFNSHSGNPYLINLLRTVMKCKCCGNTMIVTAVSKSGKGYYVCPMRRLHRCKSPSIKRELVDVNLIEEILFNFDKLQIESNQVSLQETLEKNSIDLQLQINSLVQALTIAPEVNVLAGKVRELDRKLKKIETTIKVLKNKAKKDKSRGSKELNLSLKEDREVCRRLAFKSFREVYIDTETKKCDIYFTNGLVFKNFPLNKRCRADSIISTLKYMDENTVYF

SEQ ID NO: 5259 - protein, 509 aa, Unknown
  Description of Unknown: Integrase B5260 sequence
  PTHR30461:SF3,SM00857,G3DSA:1.10.10.2600,IPR036162,PF13408, PS51737,G3DSA:3.40.50.1390,IPR025827,IPR006119,IPR038109, PF07508,SSF53041,IPR011109,PTHR30461,Coil, PS51736,cd00338,PF00239
MPEALNAVIYARYSSDRQTEQSIEGQLRECYAFAKANDIAVIDTYIDRAISGKTDNRPAFQKMIEDSAKRQFQAVIVYRLDRFTRNRYDSAIYKARLKKNGVKVLSAMENLNGSPESIIMESLLEGMAEYYSVELSQKITRGMRENALKGKALGGQRVLGYKVNSDCYFEIDETTAPVVVDIFKLYSSGKTVKEICDILNARGVKTARGGAFNKNSLHTILTNKKYIGIYKTKYGEIVGGIPAIIDKELFEMVALRMEQNKKAPARAKAEINYLLSTKLFCGKCRSAMVGESGTSKTGKKYYYYACVKKKREKACDKSNVKKDWIEDLVIQRTVTDILKDDVIEKIADRLVELQKAEAAESGTMLYLENSLAEIQVSIKNIMTAIEKGIITESTKTRLTELEDEKRNVEIEIAKESIARRIISREQIIYWISSFKDGDITSEKYRQQLIDTFVHAVFVYDDKIVITYNYSGENNTATISDLDLSSPPLQSNSNIFVMLDVFGLVVQIER

SEQ ID NO: 5260 - protein, 509 aa, Unknown
  Description of Unknown: Integrase B5261 sequence
  PTHR30461:SF3,cd00338,SM00857,G3DSA:1.10.10.2600,IPR036162, PS51737,G3DSA:3.40.50.1390,IPR006119,IPR038109,PF07508, IPR011109,SSF53041,PTHR30461,PS51736,Coil, PF00239
MGGRAAIYARFSSHNQRGESIEIQVEKSRAYCAENDLRVVATYCDFAQTGTNTDRAEFQRMMADAKRGLFDFVVIYKVTRIMRNRDEMAMARIMLRRCRVEILYAGEDISDGSAGVLQLGMLEVLAEYESALDGERIRDGIQKNAERCMANGCVRYGWDIVDGRYVVNEEEAAAIRLGVRMVLSGKSVADVVRAWEPYRTKRGGKWRFQTVRRILMRRENGGEYRYAGVVVPGGMPAIVPMDDEERVIRMLEDSHRPRAKTEAWDFPLTGKLYDGRDGGLMTGTSGTGKSGRPYHYYRCRSCGRTVRRDAVEKRVADAVRDALGSADSRERIARMLADAEEERADEKPLSETIKGELAKIETAFSNIWAAIESGIAPPGGKERIDALKQRQALLKDELRTAEALEAARLDYDRALFWLEGMAAAEVDDAQLLRTFVARVVLGGPDDDDGLRVAFTFDDSAGLGDNPSLPGAIGPGGEVFDRMNASSTNCSVGEHMQVFVVRRAFVLLVE

SEQ ID NO: 5261 - protein, 509 aa, Unknown
  Description of Unknown: Integrase B5262 sequence
  cd00338,SM00857,G3DSA:1.10.10.2600,IPR036162,PF13408, IPR025827,G3DSA:3.40.50.1390,PS51737,IPR006119,IPR038109, PF07508,IPR011109,SSF53041,PTHR30461,Coil, PF00239
MYVIYLRKSRKDSDLEALGIDVLKRHEETLLELARARSLPIGAIYREVVSGDSIDARPEMVRLLSEVESGIWEGVLVMEVERLARGDTIDQGRVQRAFFYSNTLIVTPGKTYNPAIENDNEYFEFSLFMSRREYATIKRRMQAGRIRSVKDGYYVGNIAPYGWRRVKADDCKHFTLVPDEKENPVLKLMYDFMGNKKYGFQKTCSALTGMGIVSRSGKPFNPATVKTIISNPVNIGMLRWNYRKSQKAIVNGKIATSRPKADDYILVKGKHPGCISEDLYYRANSVNSSMTAPVKRSCRIQNPFAGIVRCACCGRIMVRKKMSAKQPRDYLICQYAGCATVAIELEELENAVLEWIRNYIADYKVNNFESTDDSEQEFLRSILVNLEKEKETTLKQRGSLFDLLEQGIYTKEIFFERSTALEDKIKDFDKKIESVNADIVRLDLSKKNRSTFVPKCQELLNAWDTFDAADKNTALKNVIERIDFTKTEKNARGQRHSSFSIDVFPRISR

SEQ ID NO: 5262 - protein, 509 aa, Unknown
  Description of Unknown: Integrase B5263 sequence
  PTHR30461:SF3,SM00857,G3DSA:1.10.10.2600,IPR036162,PF13408, PS51737,G3DSA:3.40.50.1390,IPR025827,IPR006119,IPR038109, PF07508,SSF53041,IPR011109,PTHR30461,Coil, PS51736,cd00338,PF00239
MPEALNAVIYARYSSDRQTEQSIEGQLRECYAFAKANDIAVIDTYIDRAISGKTDNRPAFQKMIEDSAKRQFQAVIVYRLDRFTRNRYDSAIYKARLKKNGVKVLSAMENLNGSPESIIMESLLEGMAEYYSVELSQKITRGMRENALKGKALGGQRVLGYKVNSDCYFEIDETTAPVVVDIFKLYSSGKTVKEICDILNARGVKTARGGAFNKNSLHTILTNKKYIGIYKTKYGEIVGGIPAIIDKELFEMVALRMEQNKKAPARAKAEINYLLSTKLFCGKCRSAMVGESGTSKTGKKYYYYACVKKKREKACDKSNVKKDWIEDLVIQRTVTDILKDDVIEKIADRLVELQKAEAAESGTMLYLQNSLAEIQVSIKNIMTAIEKGIITESTKTRLTELEDEKRNVEIEIAKESIARRIISREQIIYWISSFKDGDITSEKYRQQLIDTFVHAVFVYDDKIVITYNYSGENNTATISDLDLSSPPLQSNPNIFVTLDVFGLVVQIER

SEQ ID NO: 5263 - protein, 509 aa, Unknown
  Description of Unknown: Integrase B5264 sequence
  PTHR30461:SF3,SM00857,G3DSA:1.10.10.2600,IPR036162,PF13408, IPR025827,PS51737,G3DSA:3.40.50.1390,IPR006119,IPR038109, PF07508,IPR011109,SSF53041,PTHR30461,PS51736, cd00338,PF00239
MPQVQVIQPIQQQPKRLRVAAYARVSSDSEDQLNSLAVQVDYYTHLIQENPNWEFAGIYTDEGITGTSTKRREQFNRLMDDCRAGLIDRVLVKSASRFARNTADALSSVRELKSLGVTVAFEKEGFDTETSNGEMLLSIICAVAQEESLSISQNMKWGIHKRMRTGNYITNATPFGYTQINHQLVPEKNNAMIVNDIFKSYLSGMSINEIAEHLNTIYPKENSKWNPRTIHAILRNEKYIGDSLYQKTYTTDSLPLKRYLNTGQRSKYYAMETHEGIISKTDYEKVQNLLAKKSITGEIDRTCVFSKKIYCSICGAICSRKGPPTQGFVWCCRTHLQSKALCLLKSIREDELQQAFLSIYNRLQCNQKTILEPLVDDLLGLRHLQEQKYKKRLALGEDIQHLAKQKHNLTRIHTLGYIEEPQFIERSAAIEQQIRERKQQLSRNDMSNTSEKILQKTRLIQKKLSSTPPLELFDESVFKELVKKVLISNTAIQFELINGMKLSESRAAT

SEQ ID NO: 5264 - protein, 509 aa, Unknown
  Description of Unknown: Integrase B5265 sequence
  PTHR30461:SF3,cd00338,SM00857,G3DSA:1.10.10.2600,IPR036162, PF13408,IPR025827,PS51737,G3DSA:3.40.50.1390,IPR006119, IPR038109,PF07508,IPR011109,SSF53041,PTHR30461, PS51736,Coil,PF00239
MPKVTVIPPSINRATRQDISAPTRRKVAAYARVSTDFEEQLTSYEAQISYYTNYIQRNPDWEFVKIYTDEGISATSTKHREGFNSMIADALDGKIDLIITKSVSRFARNTVDSLTTIRKLKEHHVECFFEKENIWTFDSKGELLITIMSSLAQEESRSISENVTWGQRKRFADGKVSLPYAHFLGYRKGENGLPEIVPEEAETVRYIYQRFIDGLTPYKIANELTAQGVPTPCGKEKWSASTVKSILTNEKYKGDALLQKKFTVDFLTKKQQINEGQVPQYYVENSHPAIITPEEFDFVQSEFQKRCMKPYSSTSIYATKIICGDCGSYFGAKVWHSNSKYRRVIYQCNSKFKGSHFCTTPHLYEPEIQEKFLQAFAQYFSQKDVVIKNCQFALNCLKKQESKKKELQDELVAVNEKLKEYIQHGGEDFDALNAKYEELSAQLDAEEAAESDRKRRIAKMQKILQTLKKTDSVLETFDESVWNAVLENLTVFHDGSLVFLFRDGTEIKV

SEQ ID NO: 5265 - protein, 509 aa, Unknown
  Description of Unknown: Integrase B5266 sequence
  PTHR30461:SF3,cd00338,SM00857,G3DSA:1.10.10.2600,IPR036162, PF13408,IPR025827,PS51737,G3DSA:3.40.50.1390,IPR006119, IPR038109,PF07508,SSF53041,IPR011109,PTHR30461, PS51736,Coil,PF00239
MRAFIYGRFSSHKQQELSIEAQIDICREYAEKHNITVVGEYVDRARSARTENRADFRRLIRDACTGVVDCVLVWRYDRFFRDRAESALYRKQLEAAGVHLISVTEFIPDGSAGVITQGMIETVAEYFSAKLSEDVTRGMNKAAQHCQITGGAPLGYRPGPNKRWQIDPVGAELVKRCFEWYDSGKSMGELADHFNKEGHKTAKGNSFNKSSFTTILRNKKYIGIYEYDGTVSIAGGVPRIIEDDLFFRVQRKLDANRHRPGAYKAEVPYLLSGKLFCGKCGSPMTGTAGTGKSGVRHYYYICNNRRAKKCDKKNVRLDLIEEAVLQSALDVLTDDNISYISAEVERRCSENSGNKALVASLRVQLTEVEKQLKNIGNAIAQGIITETTKQMLMDAEADRAALRQQIDRATVQASLEVKAEAVACWLDGFRHGDRKSPEFRKDVFGALVHSVFVYDDYMKIIFNVDSAGAALVPFSAVQNAATSDFVGALPGSYLGGSGVPKGSSYRTPL

SEQ ID NO: 5266 - protein, 509 aa, Unknown
  Description of Unknown: Integrase B5267 sequence
  PTHR30461:SF3,cd00338,SM00857,G3DSA:1.10.10.2600,IPR036162, PF13408,IPR025827,PS51737,G3DSA:3.40.50.1390,IPR006119, IPR038109,PF07508,IPR011109,SSF53041,PTHR30461, PS51736,Coil,PF00239
MKRAVFYGRYSSDRQTEQSIEGQRRVCEEFAAGENIQIVREYIDRATSGTSTQHREQFQQMISDSKTGGWDYVLVYKLDRFARNRYDSAVYKRELKRNGVTVLSATERITDSPEGVLIEGLLESMDEYFSRELSRKAKRGIRESILKGHCITRLPYGYKRTGKTCAIDEDAADMIRWIFREYSSGKTIQEIVDTLNIRGFRTATGRTFQRCTISVILRNDKYTGTHYVSDFEEPEKYPQIISQTLWDSVQSRLQESAHRYRKHMDGFAFALTGKISCAYCGYAIKGVTTNRKYHYYRCIAGKYNKQTCNGCSVRAEVVETAVIDALQEYFTAERVEEMGTHLYNLYRKSAPSEKDNKRRLSEVDMQITGAVNALIACPESEALQNRLRELEEQKREIEQLHVEHQRLEKRHFVEFFRSIVSALEHIDVRTRLFSTLIHSVSLYRDHVVILINLMDDSTDPPTPISLEKYFSSSVGNGRALHTLDKIQLAFPFLLLYVSLPERRNQRERP

SEQ ID NO: 5267 - protein, 509 aa, Unknown
  Description of Unknown: Integrase B5268 sequence
  PTHR30461:SF3,cd00338,SM00857,G3DSA:1.10.10.2600,IPR036162, PF13408,PS51737,G3DSA:3.40.50.1390,IPR025827,IPR006119, IPR038109,PF07508,IPR011109,SSF53041,PTHR30461, PS51736,Coil,PF00239
MKRAVFYGRYSSDRQTEQSIEGQRRVCEEFAAGENIQIVREYIDRATSGTSTQHREQFQQMISDSKTGGWEYVLVYKLDRFARNRYDSAVYKRELKRNGVTVLSATERITDSPEGVLIEGLLESMDEYFSRELSRKAKRGMRESILKGHCITRLPYGYKRTGKTCAIDEDAADVIRWIFREYSSGKTIQEIVDTLNIRGFRTMTGKRFKRPTVSVILRNDKYTGTHYVSDFEEPERYPQIISQTMWDSVQSRLRESANRYRKHDDGFVYALTGKINCGYCGYAVNGITSNHKYHYYRCVSGKYNKHICDGCSVRADVVETAVVDALQEYFTAERVEEMGTHLYDLYRKSAPTERDDKRRLTEVDMQITGAVNALIACPESEALQNRLRDLEEQKREIEQSHVKHQYLEKSHFVEFFRNIVSALEHIDVRTRLFSTLIESVSLYRDHVVIIINLMDDSTDPPTPISLEKYFSSSVANGRALHTLDKIQLAFPFLLLYVSLPERRNQRERP

SEQ ID NO: 5268 - protein, 509 aa, Unknown
  Description of Unknown: Integrase B5269 sequence
  PTHR30461:SF3,cd00338,SM00857,G3DSA:1.10.10.2600,IPR036162, PF13408,IPR025827,PS51737,G3DSA:3.40.50.1390,IPR006119, IPR038109,PF07508,SSF53041,IPR011109,PTHR30461, PS51736,Coil,PF00239
MSNAVIYARYSSGHQREESIEGQIRECTNFAKRNGLTIVEHYIDRAISAKTDDRPSFQQMVADSSKKTFDTIIVYTLDRFARNRYDSAVYKAKLKRNGVRVLSAKENITSDPSGIILESVLEGMAEYYSVELAQKVKRGMTENALACRWASGRIPFGYTIDADKHLHPDPALVPIVQEAFEMYAAGAKIVDIARKINSYHVVTGMGNKFGRSSFDRMIRSETYIGVFKWNDIRKENAIPPIITPELFYKCQARYNARNRKNVARPSAIYLLSGKLRCGCCGGSMCGMSGKSRNGTMHYYYSCYSTRRRTSHCDIGNIRRDEIEHIIAAHAASILKKPINLDIIANQALKTNNSVKNYRLESLIQQEKDLTQKLENCMKAIDQGLVSITLMDRIKQYEADLQSVKNDISLEKIKSNPIQVTKEHIIFFLEKFALLEGEKFKDRIISTMVRDIVIKKEKDGNYLVTVQYNYANSKELPNEESYSVPESIGSQDVELVEMRGVEPLSENIAI

SEQ ID NO: 5269 - protein, 509 aa, Unknown
  Description of Unknown: Integrase B5270 sequence
  PTHR30461:SF3,SM00857,G3DSA:1.10.10.2600,IPR036162,PS51737, G3DSA:3.40.50.1390,IPR006119,IPR038109,PF07508,SSF53041, IPR011109,PF00239,PTHR30461,PS51736,Coil, cd00338
MPFDDYKESVAIYLRKSRMDPDSEDIDETLARHEDTLLKLAKQMDLNIVEIYKEVVSGDGLFTRPEMCRLLQNVEQGNYSAVLCMEIDRLGRSSQKDGGIILETFKDNDVRIITTSKTYDLNDDVDEQVVEMHSFIARQELKAIRRRLNRGIEKTVEMGYHICEPPYGYRRTYIDKRPTLEICEEEANVIRMVFDMYVNQHMGTQTIADNLNKMGYTPRKNDHFSRNTIQFYLQNETYIGQIIWNKRKHIKKKFPTDKHRTVLNPEEKWIVSEGKHPAIISKELFEQAQEIHQFRTHPPTAHGIIRNPFAGLIYCKNCGELMQRQYSKISGNRLLCLHSGCIRSIRTMFVEKVILDAVKNILKNSSSAVQNSIQKTNNLQIEMLDRTIKDINTKIKQLNSQKSKLHDLLEQGVYDVDTFLDRSNAIAEKIQNSKLALAQHEKKLNSIQSVPTVQEVLPTLRYLIDEYDNLSAGEKNVIFKKLIKRMVYNRTKDHRGNDFDLDIEWRFTM

SEQ ID NO: 5270 - protein, 509 aa, Unknown
  Description of Unknown: Integrase B5271 sequence
  PTHR30461:SF3,cd00338,SM00857,G3DSA:1.10.10.2600,IPR036162, PS51737,G3DSA:3.40.50.1390,IPR006119,IPR038109,PF07508, IPR011109,SSF53041,PTHR30461,PS51736,Coil, PF00239
MGGRAAIYARFSSHNQRGESIEIQVEKSRAYCAENDLRVVATYCDFAQTGTNTDRAEFQRMMADAKRGLFDFVVIYKVTRIMRNRDEMAMARIMLRRCRVEILYAGEDISDGSAGVLQLGMLEVLAEYESALDGERIRDGIQKNAERCMANGCVRYGWDIVDGRYVVNEEEAAAIRLGVRMVLSGKSVADVVRAWEPYRTKRGGKWRFQTVRRILMRRENGGEYRYAGVVVPGGMPAIVPMDDEERVIRMLEDSHRPRAKTEAWDFPLTGKLYDGRDGGLMTGTSGTGKSGRPYHYYRCRSCGRTVRRDVVEKRVADAVREALGSADSRERIARMLADAEEERADEKPLSETIKGELAKIETAFSNIWAAIESGIAPPGGKERIDALKQRQALLKDELRTAEALEAARLDYDRALFWLEGMAAAEVDDAQLLRTFVARVVLGGPDDDDGLRVAFTFDDSAGLGDNPSLPGAIGPGGEVFDRMNASSTNCSVGEHIRVFVVRRAFVLLVR

SEQ ID NO: 5271 - protein, 509 aa, Unknown
  Description of Unknown: Integrase B5272 sequence
  PTHR30461:SF3,SM00857,G3DSA:1.10.10.2600,IPR036162,PF13408, IPR025827,G3DSA:3.40.50.1390,PS51737,IPR006119,IPR038109, PF07508,IPR011109,SSF53041,PF00239,PTHR30461, PS51736,Coil,cd00338
MNAVLYLRYSSDKQNEQSIEGQKRVCEAFCEKNGYSILSIYIDRAKSASKDTEKRIQFQQMIKDSAKKRFEAVVVYKLDRFARDRYDSAIYKSRLKKNGVRVVSATENISTEPEGIILESVLEGMAEFYSRELSQKVTRGMHETALKANYTGGGVPLGYKVEDKKLIIDERTADIVREAFSLYAAGATISDICSIFKEKGYKSTRGTAFTSHSFTRMLRNEKYIGTYFYKEVKIESAIPAIVDKGIFEMVQKRLKKNASAPARGKASTDFLLSQKLFCGHCGAKMVGESGRGHNGHIYYYYKCATQKKSGDCDKKPVPKDEIERLVVLDTIAMLTPENIEKIADIASSKSVERLRSESIIPALNIELVGVKKAISNLVDAVEQGRASDALFNRLDKLEIKKKDLELEIDKQMNEFPIVDADQVIYWLSKFKDGDINDPIFCKRLIDMLVNSVTLWDGPDGGKKITILYNLSPHEMHTFTISDSGDGGAPPRNNPKLFIYKNVFGQTKAH

SEQ ID NO: 5272 - protein, 509 aa, Unknown
  Description of Unknown: Integrase B5273 sequence
  PTHR30461:SF3,SM00857,G3DSA:1.10.10.2600,IPR036162,PF13408, PS51737,G3DSA:3.40.50.1390,IPR025827,IPR006119,IPR038109, PF07508,SSF53041,IPR011109,PTHR30461,Coil, PS51736,cd00338,PF00239
MPEALNAVIYARYSSDRQTEQSIEGQLRECYAFAKANGIAVIDTYIDRAISGKTDNRPAFQKMIEDSAKRQFQAVIVYRLDRFTRNRYDSAIYKARLKKNGVKVLSAMENLNGSPESIIMESLLEGMAEYYSVELSQKITRGMRENALKGKALGGQRILGYKVNSDCYFEIDETTAPVVVDIFKLYSSGKTVKEICDILNARGVKTARGGAFNKNSLHTILTNKKYIGIYKTKYGEIVGGIPAIIDKELFEMVALRMEQNKKAPARAKAEINYLLSTKLFCGKCRSAMVGESGTSKTGKKYYYYACVKKKREKACDKSNVKKDWIEDLVIQRTVTDILKDDVIEKIADRLVELQKAEAAQSGTMLYLENSLAEIQVSIKNIMTAIEKGIITESTKTRLTELEDEKRNVEIEIAKESIARRIISREQIIYWISSFKDGDITSEKYRQQLIDTFVHAVFVYDDKIVITYNYSGENNTATISDLDLSSPPLQSNPNIFVTLDVFGLVVQIER

SEQ ID NO: 5273 - protein, 509 aa, Unknown
  Description of Unknown: Integrase B5274 sequence
  PTHR30461:SF3,SM00857,G3DSA:1.10.10.2600,IPR036162,PF13408, PS51737,G3DSA:3.40.50.1390,IPR025827,IPR006119,IPR038109, PF07508,SSF53041,IPR011109,PTHR30461,Coil, PS51736,cd00338,PF00239
MPEALNAVIYARYSSDRQTEQSIEGQLRECYAFAKANDIAVIDTYIDRAISGKTDNRPAFQKMIEDSAKRQFQAVIVYRLDRFTRNRYDSAIYKARLKKNGVKVLSAMENLNGSPESIIMESLLEGMAEYYSVELSQKITRGMRENALKGKALGGQRVLGYKVNSDCYFEIDETTAPVVVDIFKLYSSGKTVKEICDILNARGVKTARGGAFNKNSLHTILTNKKYIGIYKTKYGEIVGGIPAIIDKELFEMVALRMEQNKKAPARAKAEINYLLSTKLFCGKCRSAMVGESGTSKTGKKYYYYACVKKKREKACDKSNVKKDWIEDLVIQRTVTDILKDDVIDKIADRLVELQKAEAAESGTMLYLENSLAEIQVSIKNIMTAIEKGIITESTKTRLTELEDEKRNVEIEIAKESIARRIISREQIIYWISSFKDGNITSEKYRQQLIDTFVHAVFVYDDKIVITYNYSGENNTATISDLDLSSPPLQSNPNIFVTLDVFGLVVQIER

SEQ ID NO: 5274 - protein, 509 aa, Unknown
  Description of Unknown: Integrase B5275 sequence
  PTHR30461:SF3,cd00338,SM00857,G3DSA:1.10.10.2600,IPR036162, PF13408,IPR025827,PS51737,G3DSA:3.40.50.1390,IPR006119, IPR038109,PF07508,SSF53041,IPR011109,PTHR30461, PS51736,Coil,PF00239
MRAFIYGRFSSHKQQELSIEAQIDICREYAEKHNITVVGEYVDRARSARTENRADFRRLIRDACTGVVDCVLVWRYDRFFRDRAESALYRKQLEAAGVHLISVTEFIPDGSAGVITQGMIETVAEYFSAKLSEDVTRGMNKAAQHCQITGGAPLGYRPGPNKRWQIDPVGAELVKRCFEWYDSGKSMGELADHFNKEGHKTAKGNSFNKSSFTTILRNKKYIGIYEYDGTVSIAGGVPRIIEDDLFFRVQRKLDANRHRPGAYKAEVPYLLSGKLFCGKCGSPMTGTAGTGKSGARHYYYICNNRRAKKCDKKNVRLDLIEEAVLQSALDVLTDDNISYISAEVERRCSENSGNKALVASLRVQLTEVEKQLKNIGNAIAQGIITETTKQMLMDAEADRAALRQQIDRATVQASLEVKAEAVACWLDGFRHGDRKSPEFRKDVFGALVHSVFVYDDYMKIIFNVDSAGAALVPFSAVQNAATSDFVGALPGSYLGGSGVPKGSSYRTPL

SEQ ID NO: 5275 - protein, 509 aa, Unknown
  Description of Unknown: Integrase B5276 sequence
  PTHR30461:SF3,SM00857,G3DSA:1.10.10.2600,IPR036162,PF13408, PS51737,G3DSA:3.40.50.1390,IPR025827,IPR006119,IPR038109, PF07508,SSF53041,IPR011109,PTHR30461,Coil, PS51736,cd00338,PF00239
MPEALNAVIYARYSSDRQTEQSIEGQLRECYAFAKANDIAVIDTYIDRAISGKTDNRPAFQKMIEDSAKRQFQAVIVYRLDRFTRNRYDSAIYKARLKKNGVKVLSAMENLNGSPESIIMESLLEGMAEYYSVELSQKITRGMRENALKGKALGGQRVLGYKVNSDCYFEIDETTAPVVVDIFKLYSSGKTVKEICDILNARGVKTARGGAFNKNSLHTILTNKKYIGIYKTKYGEIVGGIPAIIDKELFEMVALRMEQNKKAPARAKAEINYLLSTKLFCGKCRSAMVGESGTSKTGKKYYYYACVKKKREKACDKSNVKKDWIEDLVIQRTVTDILKDDVIEKIADRLVELQKAEAAESGTMLYLENSLAEIQVSIKNIMTAIEKGIITESTKTRLTELEDEKRNVEIEIAKESIARRIISREQIIYWISSFKDGDITSEKYRQQLIDTFVHAVFVYDDKIVITYNYSGENNTATISDLDLSSPPLQSNPNIFVTLDVFGLVVQIER

SEQ ID NO: 5276 - protein, 509 aa, Unknown
  Description of Unknown: Integrase B5277 sequence
  PTHR30461:SF3,IPR036162,PS51737,IPR011109,PTHR30461, PF00239,G3DSA:1.10.10.2600,IPR006119,SSF53041,cd00338, SM00857,IPR025827,IPR038109,mobidb-lite,PS51736, PF13408,G3DSA:3.40.50.1390,PF07508,Coil
MYEDIKTACLYVRFSSHNQTEQSIEGQTRVCRDFCKRHNIRIVEIYADRATSASKDIEKRVQFLKMIKDSEKGLFDAVIVYKLDRFARSRYDSATYKYRLKRNGVQLISATENISNDPEGIILESVLEGMAEFYSAELSQKINRGMRESAYKHNSIGGAIPLGYKIEDKKLVIDPKTAPIVKEAFEKYADGETVAEICRQFNARGYKTSKGTAFGKSSFTKIFRNERYIGVYSFHDYRAEDAIPAIIDKDLWDRVQLRVGKIKNAPARNKAKVVYLLSGKIFCGHCGSKMNGNCNAGNYYYYQCYGKKNGNVDCKKKNIRKEFIERLVAHDALSLLTDEYIEQIATIACEKNQHEIELDSALPTIRDRIHQVDLSLNNLLKAIESGSAPDMLVKRMGELEKEKKDLQVQAKKESEDIVELDKAQVIYWLEQFRGGSIEDEEFCRMLIDLFVNSVTVWDEDDGSYKVTVAYNLTSLPTKTYRLNKGGTLSDFTSNAPASQNPRLTSHRLV

SEQ ID NO: 5277 - protein, 509 aa, Unknown
  Description of Unknown: Integrase B5278 sequence
  PTHR30461:SF3,SM00857,G3DSA:1.10.10.2600,IPR036162,PF13408, PS51737,G3DSA:3.40.50.1390,IPR025827,IPR006119,IPR038109, PF07508,IPR011109,SSF53041,PF00239,PTHR30461, PS51736,Coil,cd00338
MPEALNAVIYARYSSDRQTEQSIEGQLRECYAFAKANDIAVIDTYIDRAISGKTDNRPAFQKMIEDSAKRQFQAVIVYRLDRFTRNRYDSAIYKARLKKNGVKVLSAMENLNGSPESIIMESLLEGMAEYYSVELSQKITRGMRENALKCKALGGQRVLGYKVNSDCYFEIDETTAPVVVDIFKLYSSGKTVKEICDILNARGVKTARGGAFNKNSLHTILTNKKYIGIYKTKYGEIVGGIPAIIDKELFEMVALRMEQNKKAPARAKAEINYLLSTKLFCGKCRSAMVGESGTSKTGKKYYYYACVKKKREKACDKSNVKKDWIEDLVIQRTVTDILKDDVIDKIADRLVELQKAEAAESGTMLYLENSLAEIQVSIKNIMTAIEKGIITESTKTRLTELEDEKRNVEIEIAKESIARRIISREQIIYWISSFKDGDITSEKYRQQLIDTFVHAVFVYDDKIVITYNYSGENNTATISDLDLSSPPLQSNPNIFVTLDVFGLVVQIER

SEQ ID NO: 5278 - protein, 509 aa, Unknown
  Description of Unknown: Integrase B5279 sequence
  cd00338,SM00857,G3DSA:1.10.10.2600,IPR036162,PF13408, IPR025827,PS51737,G3DSA:3.40.50.1390,IPR006119,IPR038109, PF07508,SSF53041,IPR011109,PTHR30461,Coil, PF00239
MYVIYLRKSRKDSDLEALGIDVLKRHEETLLELARARNLPIGAIYREVVSGDSIDARPEMVRLLSEVESGIWEGVLVMEVERLARGDTIDQGRVQRAFFYSNTLIVTPGKTYNPAIENDNEYFEFSLFMSRREYATIKRRMQAGRIRSVKDGYYVGNIAPYGWRRVKADDCKHFTLVPDEKENPVLKLMYDFMGNKKYGFQKTCSALTGMGIVSRSGKPFNPATVKTIISNPVNIGMLRWNYRKSQKAIVNGKIATSRPKADDYILVKGKHPGCISEDLYYRANSVNSSMTAPVKRSCRIQNPFAGIVRCSCCGRVMVRKKMSAKQPRDYLICQYAGCATVAIELDELENAVLEWIRNYIADYKVNNFESTDDSEQESLRSILVNLEKEKETTLKQRGSLFDLLEQGIYTKEIFFERSTALEDKIKDFDKKIESVNADIVRLDLSKKNRSTFVPKCQELLNAWDTFDAADKNTALKNVIERIDFTKTEKNARGQRHSSFFIDVFPRISR

SEQ ID NO: 5279 - protein, 509 aa, Unknown
  Description of Unknown: Integrase B5280 sequence
  cd00338,SM00857,G3DSA:1.10.10.2600,IPR036162,PF13408, IPR025827,PS51737,G3DSA:3.40.50.1390,IPR006119,IPR038109, PF07508,IPR011109,SSF53041,PTHR30461,Coil, PF00239
MYVIYLRKSRKDSDLEALGIDVLKRHEETLLELARARSLPIGAIYREVVSGDSIDARPEMVRLLSEVESGIWEGVLVMEVERLARGDTIDQGRVQRAFFYSNTLIVTPGKTYNPAIENDNEYFEFSLFMSRREYATIKRRMQAGRIRSVKDGYYVGNIAPYGWRRVKADDCKHFTLVPDEKENPVLKLMYDFMGNKKYGFQKTCSALTGMGIVSRSGKPFNPATVKTIISNPVNIGMLRWNYRKSQKAIVNGKIATSRPKADDYILVKGKHPGCISEDLYYRANSVNSSMTAPVKRSCRIQNPFAGIVRCSCCGRVMVRKKMSTKQPRDYLICQYAGCATVAIELEELENAVLEWIRNYIADYKVNNFESADDSEQESLRSILVNLEKEKETTLKQRGSLFDLLEQGIYTKEIFFERSTALEDKIKDFNKKIESVNADIVRLDLSKKNRSTFVPKCQELLNAWDTFDAADKNTALKNVIERIDFTKTEKNARGQRHSSFSIDVFPRISR

SEQ ID NO: 5280 - protein, 509 aa, Unknown
  Description of Unknown: Integrase B5281 sequence
  PTHR30461:SF3,cd00338,SM00857,G3DSA:1.10.10.2600,IPR036162, PF13408,IPR025827,PS51737,G3DSA:3.40.50.1390,IPR006119, IPR038109,PF07508,IPR011109,SSF53041,PTHR30461, PS51736,Coil,PF00239
MKRAVFYGRYSSDRQTEQSIEGQRRVCEEFAAGENIQIVREYIDRATSGTSTQHREQFQQMISDSKTGGWDYVLVYKLDRFARNRYDSAVYKRELKRNGVTVLSATERITDSPEGVLIEGLLESMDEYFSRELSRKAKRGMRESILKGHCITRLPYGYKRTGKTCAIDEDAADVIRWIFREYSSGKTIQEIVDTLNVRGFRTMTGKRFKRPTVSVILRNDKYTGTHYVSDFEEPERYPQIISQTMWDSVQSRLRESANRYRKHNDGFVYALTGKINCGYCGYAVNGITSNHKYHYYRCVSGKYNKHICDGCSVRADVVETAVVDALQEYFTAERVEEMGTHLYDLYRKSAPTERDDKRRLTEVDMQITGAVNALIACPESEALQNRLRDLEEQKREIEQSHVKHQYLEKSHFVEFFRNIVSALEHIDVRTRLFSTLIESVSLYRDHVVIIINLMDDSTDPPTPISLEKYFSSSVANGRALHTLDKIQLAFPFLLLYVSLPERRNQRERP

SEQ ID NO: 5281 - protein, 509 aa, Unknown
  Description of Unknown: Integrase B5282 sequence
  cd00338,SM00857,G3DSA:1.10.10.2600,IPR036162,PS51737, G3DSA:3.40.50.1390,IPR006119,IPR038109,PF07508,IPR011109, SSF53041,PTHR30461,PS51736,Coil,PF00239
MDKYAIYLRKSRADLEAEKLGEGETLARHKKILTELAARRGLYVEKIYQEIISGAETIKDRPEIQKLINDAYKGKYRGVIIVEVTRLSRGSQGDAQIIMDCLKYANRNKGLLVVTPTKVYDVAHNSDDEEYMEFELFMSRREYKMIQKRMDRGKKQCVVEGNYMASYRPYGYDILKTKTSRTLIPNGEEAPIVKKIFSWTVEQNMTPGEIARKLTSMGTPTYTGDPEWSAATIKTILTNPTYIGKVRWNDRMQVKTMVNGELVTSRPRSNHTEHFMLYDGKHKEHALIDEDTFNKVSERFTSDKTKHNLKLYNPLAGIFSCKNCGKMMHYQRYTTKQNVQPRFTHKQSQICKVKSVLATDVMNAVVHALKLYIEDFNVKINNLPQTDENEIAKEIESLTTELMKIEKKLSKLFDAWEDEQISDNEFVKRKAVNNQRIENIKAEIEKLENSIPEKEEYEEKIMALSDALDSLLDENIDADIQNEYLKQIIDKIEFSRENNKEFILDVFLK

SEQ ID NO: 5282 - protein, 509 aa, Unknown
  Description of Unknown: Integrase B5283 sequence
  PTHR30461:SF3,cd00338,SM00857,G3DSA:1.10.10.2600,IPR036162, PS51737,G3DSA:3.40.50.1390,IPR006119,IPR038109,PF07508, IPR011109,SSF53041,PTHR30461,PS51736, Coil,PF00239
MGGRAAIYARFSSHNQRGESIEIQVEKSRAYCAENDLRVVATYCDFAQTGTNTDRAEFQRMMADAKRGLFDFVVIYKVTRIMRNRDEMAMARIMLRRCRVEILYAGEDISDGSAGVLQLGMLEVLAEYESALDGERIRDGIQKNAERCMANGCVRYGWDIVDGRYVVNEEEAAAIRLGVRMVLSGKSVADVVRAWEPYRTKRGGKWRFQTVRRILMRRENGGEYRYAGVVVPGGMPAIVPMDDEERVIRMLEDSHRPRAKTEAWDFPLTGKLYDGRDGGLMTGTSGTGKSGRPYHYYRCRSCGRTVRRDVVEKRVADAVREALGSADSRERIARMLADAEEERADEKPLSETIKGELAKIETAFSNIWAAIESGIAPPGGKERIDALKQRQALLKDELRTAEALEAARLDYDRALFWLEGMAAAEVDDAQLLRTFVARVVLGSPDDDDGLRVAFTFDDSAGLGDNPSLPGAIGPGGEVFDRMNASCTNCSVGEHIRVFVVRRAFVLLVR

SEQ ID NO: 5283 - protein, 509 aa, Unknown
  Description of Unknown: Integrase B5284 sequence
  cd00338,SM00857,G3DSA:1.10.10.2600,IPR036162,PF13408, IPR025827,PS51737,G3DSA:3.40.50.1390,IPR006119,IPR038109, PF07508,IPR011109,SSF53041,PTHR30461,PS51736, Coil,PF00239
MAYCIYLRKSRADMEAEARGEGETLARHKRTLTDLAAQRHLPVAEIYAEIVSGETIAERPEMRRMLSAIESGAYEGVICMDVDRLGRGDGSDQARILKTLKYTHTLVITPYKVYDPAGSEIDEEFLEYSQQFARMEYRHIKRRMWAGRVASARAGKWQSPRAPYGYTRVKTADGAWTLAPVPIEADAVRMIYDWYGTGKMGKNNIANALNDMGLRTHLGARFVPSAIRTILNNPVYLGKVRWCLRRTKTVIEDGREYLTRPLSDECMIYDGLHPAIITQAQWDAVQSRLADNPPPPCKAYARLSNPLAGLMYCSECGHAMSYTPMSNRNQAYAYKCITPGCPTSGIYANYVFGQLDEVLRTWQAMGDPQVDAARPAESAPDPRALRIAAAQSSLDTLLAQRTKLQELVEAGAYTIPVYIERNALNEDRIKAATAELAEAQRAVAPEQAIIAHYEQITHILDVAGKVPAEELNALLKQIIAKIVYHKSKRCNRSSNPAEHLTLDIYPKVD

SEQ ID NO: 5284 - protein, 509 aa, Unknown
  Description of Unknown: Integrase B5285 sequence
  PTHR30461:SF3,SM00857,G3DSA:1.10.10.2600,IPR036162,PF13408, IPR025827,PS51737,G3DSA:3.40.50.1390,IPR006119,IPR038109, PF07508,IPR011109,SSF53041,PTHR30461,PS51736, cd00338,PF00239
MPQVQVIQPIQQQPKRLRVAAYARVSSDSEDQLNSLAVQVDYYTHLIQENPNWEFAGIYTDEGITGTSTKRREQFNRLMDDCRAGLIDRVLVKSASRFARNTADALSSVRELKSLGVTVAFEKEGFDTETSNGEMLLSIICAVAQEESLSISQNMKWGIHKRMRTGNYITNATPFGYTQINHQLVPEKNNAMIVNDIFKSYLSGMSINEIAEHLNTIYPKENSKWNPRTIHAILRNEKYIGDSLYQKTYTTDSLPLKRYLNTGQRSKYYAMETHEGIISKTDYEKVQNLLAKKSITGEIDRTCVFSKKIYCSICGAICSRKGPPTQGFVWCCRTHLQSKALCLLKSIREDELQQAFLSIYNRLQCNQKTILEPLVDDLLGLRHLQEQKYKKRLALGEDIQHLAKQKHNLTRIHTLGYIEEPQFIERSAAIEQQIRERKQQLSRNDMSNTSEKILQKTRLIQKKLSSAPPLELFDESVFKELVKKVLISNTAIQFELINGMKLSESRAAT

SEQ ID NO: 5285 - protein, 509 aa, Unknown
  Description of Unknown: Integrase B5286 sequence
  cd00338,SM00857,G3DSA:1.10.10.2600,IPR036162,PS51737, G3DSA:3.40.50.1390,IPR006119,IPR038109,PF07508,IPR011109, SSF53041,PTHR30461,PS51736,Coil,PF00239
MDKYAIYLRKSRADLEAEKLGEGETLARHKKILTELAARRGLYVEKIYQEIISGAETIKDRPEIQKLINDAYKGKYRGVIIVEVTRLSRGSQGDAQIIMDCLKYANRNKGLLVVTPTKVYDVAHNSDDEEYMEFELFMSRREYKMIQKRMDRGKKQCVVEGNYMASYRPYGYDILKTKTSRTLIPNEEEAPIVKKIFRWTVEQNMTPGEIARKLTSMGTPTYTGDLEWSVATIKTILTNPTYIGKVRWNDRMQVKTMVNGELVTSRPRSNHTEHFMLYDGKHKEYALIDEETFNKVSERFTSDKTKHNLKLYNPLAGIFSCKNCGKMMHYQRYTTKQNVQPRFTHKQSQICKVKSVLATDVMNAVVHALKLYIEDFNVKINNLPQTDENEIAKEIESLTTELMKIEKKLSKLFDAWEDEQISDNEFVKRKAVNNQRIENIKAEIEKLENSIPEKEEYEEKIMALSDALDSLLDENIDADIQNEYLKQIIDKIEFSRENNKEFILDVFLK

SEQ ID NO: 5286 - protein, 509 aa, Unknown
  Description of Unknown: Integrase B5287 sequence
  PTHR30461:SF3,SM00857,G3DSA:1.10.10.2600,IPR036162,PF13408, PS51737,IPR025827,G3DSA:3.40.50.1390,IPR006119,IPR038109, PF07508,IPR011109,SSF53041,PTHR30461, Coil,cd00338,PF00239
MKAVIYARYSPGPNQKDKSVEEQIADCRQFARENDIMIVGDYADRKKTGRNDNRAEFQKMLKDSAKGLFDAVIVWKIDRFGRNREEIAINKVKLRRNGVRVMYAKEHIPDGPEGIILESTLEGLAEYYSANLSQNIMRGMRGVAMKGQSTGGGGHSLGYYVDQDKYFQIDEHGAQIVRQIFEMYSSGKQASEIIKELNGRGLKTANGKPFNHNSIARILSNRRYIGEYRWHDILIPDGMPRIIDDETFERVQKRLEKNKKAPARKIQAGSEEEFLLTTKLFCGHCGATMIGDSGTGKSGKKYSYYTCSTRKRRKDGRKCDKKSVRKDELERYIVEQTVAHVLVDDVIEYIADKVVELQRKELQDTSMLDYYKSSLRDTEKSLKNIVTAIEQGIFTPTTKDRLLELEAEKADLEECIQKEEIARPTFSKEQIIFFLERFKGGDVNDQSYQRQIIDTFVSRIWIYDDKTVITYNYSGEGNTITLEAAEKAADEAVGGCSAQLPPSPPRKSG

SEQ ID NO: 5287 - protein, 509 aa, Unknown
  Description of Unknown: Integrase B5288 sequence
  cd00338,SM00857,G3DSA:1.10.10.2600,IPR036162,PF13408, IPR025827,G3DSA:3.40.50.1390,PS51737,IPR006119,IPR038109, PF07508,SSF53041,IPR011109,PTHR30461,Coil, PF00239
MYVIYLRKSRKDSDLEALGIDVLKRHEETLLELARSRSLPIGAIYREVVSGDSIDARPEMVRLLSEVESGIWEGVLVMEVERLARGDTIDQGRVQRAFFYSNTLIVTPGKTYNPAIENDNEYFEFSLFMSRREYATIKRRMQAGRIRSVKDGYYVGNIAPYGWRRVKADDCKHFTLVPDEKENPVLKLMYDFMGNKKYGFQKTCSALTGMGIVSRSGKPFNPATVKTIISNPVNIGMLRWNYRKSQKAIVNGKIATSRPKADDYILVKGKHPGCISEDLYYRANSVNSSMTAPVKRSCRIQNPFAGIVRCSCCGRVMVRKKMSAKQPRDYLICQYAGCATVAIELEELENAVLEWIRNYIADYKVNNFESTDDSEQESLRSILVNLEKEKETTLKQRGSLFDLLEQGIYTKEIFFERSTALEDKIKDFDKKIESVNADIVRLDLSKKNRSTFVPKCQELLNAWDTFDAADKNTALKNVIERIDFTKTEKNARGQRHSSFSIDVFPRISR

SEQ ID NO: 5288 - protein, 509 aa, Unknown
  Description of Unknown: Integrase B5289 sequence
  PTHR30461:SF3,SM00857,G3DSA:1.10.10.2600,IPR036162,PF13408, PS51737,IPR025827,G3DSA:3.40.50.1390,IPR006119,IPR038109, PF07508,SSF53041,IPR011109,PTHR30461,Coil, PS51736,cd00338,PF00239
MPEALNAVIYARYSSDRQTEQSIEGQLRECYAFAKANDIAVIDTYIDRAISGKTDNRPAFQKMIEDSAKRQFQAVIVYRLDRFTRNRYDSAIYKARLKKNGVKVLSAMENLNGSPESIIMESLLEGMAEYYSVELSQKITRGMRENALKGKALGGQRVLGYKVNSDCYFEIDETTAPVVGDIFKLYSSGKTVKEICDILNARGVKTARGGAFNKNSLHTILTNKKYIGIYKTKYGEIVGGIPAIIDKELFEMVALRMEQNKKAPARAKAEINYLLSTKLFCGKCRSAMVGESGTSKTGKKYYYYACVKKKREKACDKSNVKKDWIEDLVIQRTVTDILKDDVIEKIADRLVELQKAEAAESGTMLYLENSLAEIQVSIKNIMTAIEKGIITESTKTRLTELEDEKRNVEIEIAKESIARRIISREQIIYWISSFKDGDITSEKYCQQLIDTFVHAVFVYDDKIVITYNYSGENNTATISDLDLSSPPLQSNPNIFATLDVFGLVVQIER

SEQ ID NO: 5289 - protein, 509 aa, Unknown
  Description of Unknown: Integrase B5290 sequence
  PTHR30461:SF3,SM00857,G3DSA:1.10.10.2600,IPR036162,PF13408, PS51737,G3DSA:3.40.50.1390,IPR025827,IPR006119,IPR038109, PF07508,SSF53041,IPR011109,PTHR30461,Coil, PS51736,cd00338,PF00239
MPEALNAVIYARYSSDRQTEQSIEGQLRECYAFAKANDIAVIDTYIDRAISGKTDNRPAFQKMIEDSAKRQFQAVIVYRLDRFTRNRYDSAIYKARLKKNGVKVLSAMENLNGSPESIIMESLLEGMAEYYSVELSQKITRGMRENALKGKALGGQRVLGYKVNSDCYFEIDETTAPVVVDIFKLYSSGKTVKEICDILNARGVKTARGGAFNKNSLHTILTNKKYIGIYKTKYGEIVGGIPAIIDKELFEMVALRMEQNKKAPARAKAEINYLLSTKLFCGKCRSAMVGESGTSKTGKKYYYYACVKKKREKACDKSNVKKDWIEDLVIQRTVTDILKDDVIEKIADRLVELQKAEAAESGTMLYLENSLAEIQVSIKNIMTAIEKGIITESTKTRLTELEDEKRNVEIEIAKESIARRIISREQIIYWISSFKDGDITSEKYRQQLIDTFVHAVFVYDDKIVITYNYSGENNTATISDLDLSSPPLQSNSNIFVTLDVFGLVVQIER

SEQ ID NO: 5290 - protein, 509 aa, Unknown
  Description of Unknown: Integrase B5291 sequence
  cd00338,SM00857,G3DSA:1.10.10.2600,IPR036162,PS51737, G3DSA:3.40.50.1390,IPR006119,IPR038109,PF07508,IPR011109, SSF53041,PTHR30461,PS51736,Coil,PF00239
MDKYAIYLRKSRADLEAEKLGEGETLARHKKILTELAARRGLYVEKIYQEIISGAETIKDRPEIQKLINDAYKGKYRGVIIVEVTRLSRGSQGDAQIIMDCLKYANRNKGLLVVTPTKVYDVAHNSDDEEYMEFELFMSRREYKMIQKRMDRGKKQCVVEGNYMASYRPYGYDILKTKTSRTLIPNEEEAPIVKKIFRWTVEQNMTPGEIARKLTSMGTPTYTGDPEWSAATIKTILTNPTYIGKVRWNDRMQVKTMVNGELVTSRPRSNHTEHFMLYDGKHKEHALIDEETFNKVSERFTSDKTKHNLKLYNPLAGIFSCKNCGKMMHYQRYTTKQNVQPRFTHKQSQICKVKSVLATDVMNAVVHALKLYIEDFDVKINNLPQTDENKIAKEIESLTTELMKIEKKLSKLFDAWEDEQISDNEFVKRKAVNNQRIENIKAEIEKLENSIPEKEEYEEKIMALSDALDSLLDENIDADIQNEYLKQIIDKIEFSRENNKEFILDVFLK

SEQ ID NO: 5291 - protein, 509 aa, Unknown
  Description of Unknown: Integrase B5292 sequence
  PTHR30461:SF3,SM00857,G3DSA:1.10.10.2600,IPR036162,PF13408, IPR025827,PS51737,G3DSA:3.40.50.1390,IPR006119,IPR038109, PF07508,SSF53041,IPR011109,PTHR30461, PS51736,cd00338,PF00239
MPQVQVIQPIQQQPKRLRVAAYARVSSDSTDQLNSLSVQVDYYTHLIQENPNWDFAGIYADEGITGTSTKHREQFNRLMEDCRAGLVDRVLVKSASRFARNTADALASVREMKSLGVTVVFEKEGFDTETSNGEMILSMICAVAQEESLSISKDLKWGIRKRMQNGTYTNSSVPFGYSLENHLLVINNQQAMIVADIFKRYLAGESISKIAQYLNNTYPKETGVWQYSSVQLILQNETYKGDTRYQKHYTANLFPTKVSHNRGQVSQYYIAKGHEAIISDEDFDKVQSLLKMKAPHKPKVAEKLFDQKLYCATCGTLFARKTRTSGAVVWGCRRHLNKSGLCPVKSVYETELCRAFLCMHNKLLINQEKIFEPLLNSLSHLKSCQEKLDTMRMGIQVEIQRLAKQRHNLERIYAQGLIEDSQYLERKALIEKQFYEKKEFLTRKPLDGNIDRLLKNTRQIKRLLGTCQPLMYFDKQVFTSLVSKVTISDTSFEFELINGMRVSERRTSK

SEQ ID NO: 5292 - protein, 509 aa, Unknown
  Description of Unknown: Integrase B5293 sequence
  PTHR30461:SF3,SM00857,G3DSA:1.10.10.2600,IPR036162,PF13408, PS51737,G3DSA:3.40.50.1390,IPR025827,IPR006119,IPR038109, PF07508,SSF53041,IPR011109,PTHR30461,Coil, PS51736,cd00338,PF00239
MPEALNAVIYARYSSDRQTEQSIEGQLRECYAFAKANDIAVIDTYIDRAISGKTDNRPAFQKMIEDSAKRQFQAVIVYRLDRFTRNRYDSAIYKARLKKNGVKVLSAMENLNGSPESIIMESLLEGMAEYYSVELSQKITRGMRENALKGKALGGQRVLGYKVNSDCYFEIDETTAPVVVDIFKLYSSGKTVKEICDILNARGVKTARGGAFNKNSLHTILTNKKYIGIYKTKYGEIVGGIPAIIDKELFEMVALRMEQNKKAPARAKAEINYLLSTKLFCGKCRSAMVGESGTSKTGKKYYYYACVKKKREKACDKSNVKKDWIEDLVIQRTVTDILKDDVIEKIADRLVELQKAEAAESGTMLYLENSLAEIQVSIKNIMTAIEKGIITESTKTRLTELEDEKRNVEIEIAKESIARRIISREQIIYWISSFKDGDITSEKYRQQLIDTFVHAVFVYDDKIVITYNYSGENNTATISDLDLSSPPLQSNPNIFVSLDVFGLVVQIER

SEQ ID NO: 5293 - protein, 509 aa, Unknown
  Description of Unknown: Integrase B5294 sequence
  cd00338,SM00857,G3DSA:1.10.10.2600,IPR036162,PF13408, PS51737,IPR025827,G3DSA:3.40.50.1390,IPR006119,IPR038109, PF07508,IPR011109,SSF53041,PTHR30461,Coil, PF00239
MYVIYLRKSRKDSDLEALGIDVLKRHEETLLELARARSLPIGAIYREVVSGDSIDARPEMVRLLSEVESGIWEGVLVMEVERLARGDTIDQGRVQRAFFYSNTLIVTPGKTYNPAIENDNEYFEFSLFMSRREYATIKRRMQAGRIRSVKDGYYVGNIAPYGWRRVKADDCKHFTLVPDEKENPVLKLMYDFMGNKKYGFQKTCSALTGMGIVSRSGKPFNPATVKTIISNPVNIGMLRWNYRKSQKAIVNGKIATSRPKADDYILVKGKHPGCISEDLYNRANSVNSSMTAPVKRSCRIQNPFAGIVRCSCCGRVMVRKKMSAKQPRDYLICQYAGCATVAIELEELENAVLEWIRNYIADYKVNNFESADDSEQESLRSILVNLEKEKETTLKQRGSLFDLLEQGIYTKEIFFERSTALEDKIKDFDEKIESVNADIVRLDLSKKNRSTFVPKCQELLNAWDTFDAADKNTALKNVIERIDFTKTEKNARGQRHSSFSIDVFPRISR

SEQ ID NO: 5294 - protein, 509 aa, Unknown
  Description of Unknown: Integrase B5295 sequence
  PTHR30461:SF3,IPR036162,PS51737,IPR011109,PTHR30461, PS00397,PF00239,G3DSA:1.10.10.2600,IPR006119,SSF53041, cd00338,SM00857,IPR025827,IPR038109,PS51736, IPR006118,PF13408,G3DSA:3.40.50.1390,PF07508,Coil
MIRLSKQSNAVLYGRGATKEQISESPKFRFAAAYIRVSTDDQDELSPESQLDEIRKYAKREGIILLEDCIYIEEPISGRKAKNRPKFQEMIARAKESDCPFSVILLWKFARFARNQEESIFYKSILRSKCKVDVVSITEPLIAGPFGKLIERIIEWMDEFYSIRLSQEVKRSMRVNAERGKRQCTASFGYRLDESDKMVPDPAEADYVRRIFDEFIAGKGLFPIAKEMNALGVKTHRGNPFENRTVEYIIRNPVYIGKLRWNPEGRTRRDFFNENIIIADGDHEPIIDLDTWEAAQRRMDEVKSQWGYKARPSTELKHWMSGIVRCSACGATLVFAKPHYFKCGNYTKGRCTHTQHIRVDLLEDAIISRLGQDATSSTGIIYDITYTNASEGRDLVHLEAALRILESKKERLQEAYLAGVIELDDFSKAKKALEENMAQTAKELEERKSNSDEEITRAAIKGAISTALETLRSSTATTVEKNNAARSVIENCVFDKDSYTLAITYRIIL

SEQ ID NO: 5295 - protein, 509 aa, Unknown
  Description of Unknown: Integrase B5296 sequence
  cd00338,SM00857,G3DSA:1.10.10.2600,IPR036162,PF13408, IPR025827,G3DSA:3.40.50.1390,PS51737,IPR006119,IPR038109, PF07508,IPR011109,SSF53041,PTHR30461,Coil, PF00239
MYVIYLRKSRKDSDLEALGIDVLKRHEETLLELARARSLPIGAIYREVVSGDSIDARPEMVRLLSEVESGIWEGVLVMEVERLARGDTIDQGRVQRAFFYSNTLIVTPGKTYNPAIENDNEYFEFSLFMSRREYATIKRRMQAGRIRSVKDGYYVGNIAPYGWRRVKADDRKHFTLVPDEKENPVLKLMYDFMGNKKYGFQKTCSALTGMGIVSRSGKPFNPATVKTIISNPVNIGMLRWNYRKSQKAIVNGKIATSRPKADDYILVKGKHPGCISEDLYYRANSVNSSMTAPVKRSCRIQNPFAGIVRCSCCGRVMVRKKMSAKQPRDYLICQYAGCATVAIELDELENAVLEWIRNYIADYKVNNFESTDDSEQESLRSILVNLEKEKETTLKQRGSLFDLLEQGIYTKEIFFERSTALEDKIKDFDKKIESVNADIVRLDLSKKNRSTFVPKCQELLNAWDTFDAADKNTALKNVIERIDFTKTEKNARGQRHSSFSIDVFPRISR

SEQ ID NO: 5296 - protein, 509 aa, Unknown
  Description of Unknown: Integrase B5297 sequence
  SM00857,G3DSA:1.10.10.2600,IPR036162,PS51737,G3DSA:3.40.50.1390, IPR006119,IPR038109,PF07508,SSF53041,IPR011109, PTHR30461,Coil,PS51736,cd00338,PF00239
MSYAIHLRKSRADLEAEARGEGESLARHRARLLAFAERAGLPIVAEYSEIISGDRLSDRPEMQRLLSDVAGGKYDGVLTVEVSRLTRGDLMDQARIMQTFKYSGTKIITPEHTYDLSEDWDEDVLQSDLMMARREYKYIKRRMQRGRQASASEGLWQGRVPYGYQQVKVRPGKGFTLQPDPDQAPIVRMIFDMYAKDRVGCSTIAKHLNDLGLRTNLGKPWTDSSVLCISKNPVYAGYVTWGKRTSVTRLSPDGSLSTSRVANSAPILALGKHPPLIDQSTFDAAQAIRASHDLTRCHVNTPVRNPLAGLVYCSICGKSMVRKDNGYARGSRYDMLKCKTPGCPTTATALSLVEESILSTLSDWALIGSGSPSSPSQNPHAEQIAAIQSNLDRLRQQRTRIFSAYEEGVYDSTVFVSRRAEKDREIADAESALHALQTSSEPTDDEIIRANYPRIQNVLESYHTTSDPQQRNLLLKSVFTRIEYIKTRRCFRNENPAVALSIHCYPRRY

SEQ ID NO: 5297 - protein, 509 aa, Unknown
  Description of Unknown: Integrase B5298 sequence
  PTHR30461:SF3,IPR036162,PS51737,IPR011109,PTHR30461, PF00239,G3DSA:1.10.10.2600,IPR006119,SSF53041,cd00338, SM00857,IPR025827,IPR038109,G3DSA:2.20.28.10, PS51736,PF13408,G3DSA:3.40.50.1390,PF07508,Coil
MKTCIYLRKSRSDEEAEKQGEFETLSRHRSTLLKVAKEQNLNIVEIKEELVSGESIAYRPKMLELLEEVKNGLYDSVLVMDIDRLGRGNMQDQGLILETFKKSNTKIITPRKTYDLNNEWDEEYSEFEAFMARKELKLITRRMQRGRVKSVEEGKFIASKPPYGYKFVFDESGSKSMVIDEDKAEVVRMIFDLYVNKHYGGVKIATHLNSLGLKTTTGRTWYDKGVRDILKNKTYAGYVVWNKVERGKNSSKTRPIDERIEAKGIHEPIIDESIFLEAQSLFKSNFIPSTKQHSTITNPLAGLIVCSECGHRMIAQQSTYKNKEIVKFVKCLNCGKNRGVRLDILEKDIINELADWVDAYNVSIKDLDSNENKNPNLEPYYSIIKSLESEYQTLMKQKENLHNLLEQGIYDVDTYLDRSKILTDKIDLNRSNLSQAKKDLENEKESVFSIADIIPQIKKVLELYYQSNDMQERNELLKEVIDYIDYSREPKKRTSRFNIKIYPRLIKNK

SEQ ID NO: 5298 - protein, 509 aa, Unknown
  Description of Unknown: Integrase B5299 sequence
  PTHR30461:SF3,IPR036162,PS51737,IPR011109,PTHR30461, PS00397,PF00239,G3DSA:1.10.10.2600,IPR006119,SSF53041, SM00857,IPR025827,IPR038109,PS51736,cd03768, IPR006118,PF13408,G3DSA:3.40.50.1390,PF07508
MRRAALYIRVSTLEQAQEGYSVGEQRERLIAYCKAQDWLIADIYVDGGYTGSNLNRPGIQKLMSETEKFDVVLVYKLDRLSRSQRDTLYLIEEIFRPNKVDFVSMQESFDTSSPFGKAMIGLLAVFAQLEREQIKERTWMGRVARAKTGLHHGGGNIPIGYDYEDGKLIVNPYEAEQVRKIYEWYLSGASLKAITDKLQDAGYTNKYSSYNSWSSVRNILENETYIGRLHFGGVVVDHAHEAIITEEQFNAAQILRGKRREQFGSHAFQSKHVLTGLLFCGHCGGRYYLRNTGKYSYYACYSRTKQMKNMIKDPNCQNKIWRAQDLEPIIEEKILALLRNPQIAEELAAGKPKTAAPVSKNTDIERRIREIDRQIGKLMELYQQDDIPPELLGEKINRLYGEKTALENSITPSRVFIAAAATPPLNRQSTISFMSIPPLRLQPVNYLDGVVQTAFRCLVFLPPVFCRPSRKAVGHGLDNEARDPISVAGEQNGCGFHVADVGSELIVQP

SEQ ID NO: 5299 - protein, 509 aa, Unknown
  Description of Unknown: Integrase B5300 sequence
  PTHR30461:SF3,cd00338,SM00857,G3DSA:1.10.10.2600,IPR036162, PF13408,IPR025827,G3DSA:3.40.50.1390,PS51737,IPR006119, IPR038109,PF07508,SSF53041,IPR011109,PTHR30461, PS51736,Coil,PF00239
MYEDIKTACLYVRFSSHNQTEQSIEGQTRVCRDFCKRHNIRIVEIYADRATSASKDIEKRVQFLKMIKDSEKGLFDAVIVYKLDRFARSRYDSATYKYRLKRNGVQLISATENISNDPEGIILESVLEGMAEFYSAELSQKINRGMRESAYKHNSIGGAIPLGYKIEDKKLVIDPKTAPIVKEAFEKYADGETVAEICRQFNARGYKTSKGTAFGKSSFTKIFRNERYIGVYTFHDYRAEDAIPAIIDKDLWDRVQLRVGKIKNAPARNKAKVVYLLSGKIFCGHCGSKMNGNCNAGNYYYYQCYGKKNGNVDCKKKNIRKEFIERLVAQDALSLLTDEYIEQIATIACEKNQHEIELDSALPTIRDRIHQVDLSLNNLLKAIESGSAPDMLVKRMGELEKEKKDLQAQVKKESEDIVELDKAQVIYWLEQFRGGSIEDEEFCRMLIDLFVNSVTVWDEDDNTYKVTVAYNLTSLPTKTYRLNKGGTLSDFTSNAPVLPDLYFLFYHNP

SEQ ID NO: 5300 - protein, 509 aa, Unknown
  Description of Unknown: Integrase B5301 sequence
  PTHR30461:SF3,SM00857,G3DSA:1.10.10.2600,IPR036162,PF13408, PS51737,G3DSA:3.40.50.1390,IPR025827,IPR006119,IPR038109, PF07508,IPR011109,SSF53041,PF00239,PTHR30461, PS51736,Coil,cd00338
MYEDIKTACLYVRFSSHNQTEQSIEGQTRVCRDFCKRHNIKIVEIYADRATSASKDIEKRVQFLKMIKDSEKGLFDAVIVYKLDRFARSRYDSATYKYRLKRNGVQLISATENISNDPEGIILESVLEGMAEFYSAELSQKINRGMRESAYKHNSIGGAIPLGYKIEDKKLVIDPKTAPIVKEAFEKYADGETVAEICRQFNARGYKTSKGTAFGKSSFTKIFRNERYIGVYSFHDYRAEDAIPAIIDKDLWDRVQLRVGKIKNAPARNKAKVVYLLSGKIFCGHCGSKMNGNCNAGNYYYYQCYGKKNGNVDCKKKNIRKEFIERLVAQDALSLLTDEYIEQIATIACEKNQHEIELDSALPTIRDRIHQVDLSLNNLLKAIESGSAPDMLVKRMGELEKEKKDLQVQAKKESEDIVELDKAQVIYWLEQFRGGSIEDEEFCRMLIDLFVNSVTVWDEDDNTYKVTVAYNLTSLPTKTYRLNKGGTLSDFASNAPPCQTSPKTARISP

SEQ ID NO: 5301 - protein, 509 aa, Unknown
  Description of Unknown: Integrase B5302 sequence
  PTHR30461:SF3,SM00857,G3DSA:1.10.10.2600,IPR036162,PF13408, IPR025827,G3DSA:3.40.50.1390,PS51737,IPR006119,IPR038109, PF07508,SSF53041,IPR011109,PTHR30461,Coil, PS51736,cd00338,PF00239
MPEALNAVIYARYSSDRQTEQSIEGQLRECYAFAKANDIAVIDTYIDRAISGKTDNRPAFQKMIEDSAKRQFQAVIVYRLDRFTRNRYDSAIYKARLKKNGVKVLSAMENLNGSPESIIMESLLEGMAEYYSVELSQKITRGMRENALKGKALGGQRVLGYKVNSDCYFEIDETTAPVVVDIFKLYNSGKTVKEICDILNARGVKTARGGAFNKNSLHTILTNKKYIGIYKTKYGEIVGGIPAIIDKELFEMVALRMEQNKKAPARAKAEINYLLSTKLFCGKCRSAMVGESGTSKTGKKYYYYACVKKKREKTCDKSNVKKDWIEDLVIQRTVTDILKDDVIEKIADRLVELQKAEAAESGTMLYLENSLAEIQVSIKNIMTAIEKGIITESTKTRLTELEDEKRNVEIEIAKESIARRIISREQIIYWISSFKDGDITSEKYRQQLIDTFVHAVFVYDDKIVITYNYSGENNTATISDLDLSSPPLQSNPNIFVTLDVFGLVVQIER

SEQ ID NO: 5302 - protein, 509 aa, Unknown
  Description of Unknown: Integrase B5303 sequence
  PTHR30461:SF3,SM00857,G3DSA:1.10.10.2600,IPR036162,PF13408, PS51737,G3DSA:3.40.50.1390,IPR025827,IPR006119,IPR038109, PF07508,SSF53041,IPR011109,PTHR30461,Coil, PS51736,cd00338,PF00239
MPEALNAVIYARYSSDRQTEQSIEGQLRECYAFAKANDIAVIDTYIDRAISGKTDNRPAFQKMIEDSAKRQFQAVIVYRLDRFTRNRYDSAIYKARLKKNGVKVLSAMENLNGSPESIIMESLLEGMAEYYSVELSQKITRGMRENALKGKALGGQRVLGYKVNSDCYFEIDETTAPVVVDIFKLYSSGKTVKEICDILNARGVKTARGGAFNKNSLHTILTNKKYIGIYKTKYGEIVGGIPAIIDKELFEMVALRMEQNKKAPARAKAEINYLLSTKLFCGKCRSAMVGESGTSKTGKKYYYYACVKKKREKACDKSNVKKDWIEDLVIQRTVTDILKDDVIEKIADRLVELQKAEAAESGTMLYLQNSLAEIQVSIKNIMTAIEKGIITESTKTRLTELEDEKRNVEIEIAKESIARRIISREQIIYWISSFKDGDITSEKYRQQLIDTFVHAVFVYDDKIVITYNYSGENNTATISDLDLSSPPEQDCYFNKIAILLFYPKVSRTP

SEQ ID NO: 5303 - protein, 509 aa, Unknown
  Description of Unknown: Integrase B5304 sequence
  PTHR30461:SF3,IPR036162,PS51737,IPR011109,PTHR30461, PF00239,G3DSA:1.10.10.2600,IPR006119,SSF53041,cd00338, SM00857,IPR025827,IPR038109,mobidb-lite,PS51736, PF13408,G3DSA:3.40.50.1390,PF07508,Coil
MRAFIYCRFSSYKQQELSIEGQRDVCQEYADKHNITVVGLYADRARSGKTDNRVDFRRLMRDAVKGEVDCVLVWRYDRFFRNRAESALYRKQLEAAGVHLISVTEYIPEGSAGIITQGMIETVAEYFSAKLSEDVSRGMTKAAEHCQVVGCAPLGYRPGPDKRWKIDPVGAELVRRIFEWYASGKPMRELAAQLNEEGYRTKRGTPYNRNSFNSILRNEKYIGVYSYGGTVRIEGGCPRIIEDDLFFTVQRRLSVNKHRPGAYKAEVPYLLSGKLFCGLCGAPMTGTAGTSHTGARHHYYICNNRRAKTCKKKNVRLDLIENAVLQSAVGLLTDENIAYISVEVERRCAEDNESAALLASLNEQLADVQRRLKNIGNAIAQGMITETTKELLEEAEADRAALRKQIDRAKVQAALVVKAEAVACWLDGFRRGDRKDPDFRRQVFGALVHSVFVYDDYLKIIFNIDSAGAAVVPFEAVQAATPSEAPPGSSLDIKGAPKKNRLGKPFMAA

SEQ ID NO: 5304 - protein, 509 aa, Unknown
  Description of Unknown: Integrase B5305 sequence
  PTHR30461:SF3,SM00857,G3DSA:1.10.10.2600,IPR036162,PF13408, IPR025827,G3DSA:3.40.50.1390,PS51737,IPR006119,IPR038109, PF07508,SSF53041,IPR011109,PF00239,PTHR30461, PS51736,Coil,cd00338
MSSVDKIAVVYARYSSHGQTEQSIEGQIAAAQKYAEQHGYTIIHIYADRAMTGRNDDREEFQRMLSDTATHQFGVILLWKIDRFGRNREEIAFNRYRCKKNGVRVERVAEDVPDGPEGVILDSVLEGMAEYYSLQLAQNVRRGQRESAKKSQTVGGCKIIGYNVNPDTKRYEVDPKTAPFVTEVFKRYANGETISEIVAWLNAQGVRTTRGGEFTVNSLHRLLKNEKYTGVYIFHDIRNEGGMPALIDHATFDKVQEMLKVNRRAPARVWSKTEYLLTDKLFCGHCGAMMVGESGHGRNGTKHNYYTCWNRKKKKSCDKKPVRQDVIESLVLRSIGKLLENPATLENIADQVWAAYERSDTSGDTIKALDKQIADVDRALSNVMKAIEMGIINEMTKARMDELTDQKQALSAARAEAGLAGGFKLTRDMILFFLQEIAALDMADRDSQKRLIKTFVNAIYLYDDHFDIAFNYTDNGKVVVRMQEINDAACGEVFGRCAQSPAKRPSVKS

SEQ ID NO: 5305 - protein, 509 aa, Unknown
  Description of Unknown: Integrase B5306 sequence
  cd00338,SM00857,G3DSA:1.10.10.2600,IPR036162,PF13408, IPR025827,G3DSA:3.40.50.1390,PS51737,IPR006119,IPR038109, PF07508,SSF53041,IPR011109,PTHR30461,Coil, PF00239
MYVIYLRKSRKDSDLEALGIDVLKRHEETLLELARARSLPIGAIYREVVSGDSIDARPEMVRLLSEVESGIWEGVLVMEVERLARGDTIDQGRVQRAFFYSNTLIVTPGKTYNPAIENDNEYFEFSLFMSRREYATIKRRMQAGRIRSVKDGYYVGNIAPYGWRRVKADDCKHFTLVPDEKENPVLKLMYDFMGNKKYGFQKTCSALTGMGIVSRSGKPFNPATVKTIISNPVNIGMLRWNYRKSQKAIVNGKIATSRPKADDYILVKGKHPGCISEDLYYRANSVNSSMTAPVKRSCRIQNPFAGIVRCSCCGRVMVRKKMSAKQPRDYLICQYAGCATVAIELDELENAVLEWIRNYIADYKVNNFESTDDSEQESLRSILVNLEKEKETTLKQRGSLFDLLEQGIYTKEIFFERSTALEDKIKDFDKKIESVNADIVRLDLSKKNRSTFVPKCQELLNAWDTFDAADKNTALKNVIERIDFTKTEKNARGQRHSSFSIDVFPRISR

SEQ ID NO: 5306 - protein, 509 aa, Unknown
  Description of Unknown: Integrase B5307 sequence
  PTHR30461:SF3,SM00857,IPR036162,PF13408,IPR025827, G3DSA:3.40.50.1390,IPR006119,PF07508,SSF53041,IPR011109, PTHR30461,Coil,PS51736,cd00338,PF00239
MKIAIYSRKSKETDTGESIKNQIRMCKEYFTRQYDDCTFEIFEDEGFSGGNTNRPAFKRMMQLAKHKQFDIIAAYRIDRIGRNTLDFLMMFEELKQYDIKLISVTEGFDPDTPAGKMMMSMLSSMAEMERMNIAQRIKDNMTELAKMGRWSGGTPPTGYKSITNVNSYGKKETYLDLIPEMEEKIKYIFKRAAEGYTTFQIGKETNLSSKTVYNIITNPVYVKSTEESAKYLESLGYLVYGELNGLGFMPYNRRPKKSGKKLFNATGMFVSVSKHNAIIDAPTWIKANSNISNRGQESRPRISPNSFLSHLIKCSCGNNMFVHQGRANSSGEKVYYFRCSAQKNKQNDCTAKWLKVSSVEESVLKILEGFALDKKTLEKFITSKKDIDYDSLIKDVKKDIGRKNKDIENLTEKLILIEGPAVKIVTSKINELSKEIDNLNSELLSLERKKIFQEQDKININTLHSSIIKLVNHFPTLPIEDKQTSIRGIIKEIRFNGNDEIEVVLVGGI

SEQ ID NO: 5307 - protein, 509 aa, Unknown
  Description of Unknown: Integrase B5308 sequence
  PTHR30461:SF3,SM00857,G3DSA:1.10.10.2600,IPR036162,PF13408, PS51737,G3DSA:3.40.50.1390,IPR025827,IPR006119,IPR038109, PF07508,IPR011109,SSF53041,PTHR30461, Coil,PS51736,cd00338,PF00239
MPEALNAVIYARYSSDRQTEQSIEGQLRECYTFAKANDIAVIDTYIDRAISGKTDNRPAFQKMIEDSAKRQFQAVIVYRLDRFTRNRYDSAIYKARLKKNGVKVLSAMENLNGSPESIIMESLLEGMAEYYSVELSQKITRGMRENALKGKALGGQRVLGYKVNSDCYFEIDETTAPVVFDIFKLYSSGKTVKEICDILNARGVKTARGGAFNKNSLHTILTNKKYIGIYKTKYGEIVGGIPAIIDKELFEMVALRMEQNKKAPARAKAEINYLLSTKLFCGKCRSAMVGESGTSKTGKKYYYYACVKKKREKACDKSNVKKDWIEDLVIQRTVTDILKDDVIEKIADRLVELQKAEAAQSGTMLYLENSLAEIQVSIKNIMTAIEKGIITESTKTRLTELEDEKRNVEIEIAKESIARRIISREQIIYWISSFKDGDITSEKYRQQLIDTFVHAVFVYDDKIVITYNYSGENNTATISDLDLSSPPLQSNPNIFVTLDVFGLVVQIER

SEQ ID NO: 5308 - protein, 509 aa, Unknown
  Description of Unknown: Integrase B5309 sequence
  PTHR30461:SF3,cd00338,SM00857,G3DSA:1.10.10.2600,IPR036162, PF13408,PS51737,G3DSA:3.40.50.1390,IPR025827,IPR006119, IPR038109,PF07508,IPR011109,SSF53041,PTHR30461, PS51736,Coil,PF00239
MNVVIYARFSSHSQTEQSIEGQLKVCYEYAESNHYTVVGEYIDRAISGTTDNRAEFQRMISDSDKHTFEGVLVYQLDSFARNRYDSAINKAKLKKNGVRVLSAKENIADDASGILVEGVLESMAEYYSVELSQKIHRGMAINAEKCLSNGSNPGMGFKVDAERRFHVDEEEAAIVREIYERYASGETKAEIIRDLKRRRVKTSLGKEFSPNSLSHLLSNKRYIGVYLYKGKETPGGMPRILDDDLFYRVQSMMNKNKNAPARTHGEGEYLLTTKLFCGHCKEMMVGYGGTSKTGRQYHYYMCKNARRKKCGKKIVSKSYIEDRVVNECLKMLTEEKIRFIAKKVAEECAKSPDNLTAKALKKAIREADTAIENLWKAIEQGQAVEMLTERLNKRMAEKAELEAQLAIEENKKITLTEAQILAFLDYVCEMPADDVNKCRAIINIFVHSIYLYDDHFTLIINASKKPLSIDNIPLDDIETAFEGETGALEGCSSLSTPAPPTRSRLHMQS

SEQ ID NO: 5309 - protein, 509 aa, Unknown
  Description of Unknown: Integrase B5310 sequence
  SM00857,IPR006118,G3DSA:1.10.10.2600,IPR036162,PS51737, G3DSA:3.40.50.1390,PS00398,IPR006119,IPR038109,PF07508, IPR011109,SSF53041,PTHR30461,Coil,PS51736, cd00338,PF00239
MRRAISYIRFSSERQLKGDSVRRQSKLVTDWLDKNPEFYLDSSLSFKDLGKSAFSGKHLKGGLGDFLTAIEKGLVKAGDTLLIESLDRLSRQDIDIASELLRRILRAGVDVVTLSDGEHYTKESLKDPLSLIKSILIMQRAHEESLRKSERVQAAWNRKKELISEGIKISRRCPAWLKLNDDRRTFTIIPDKVEVVKRAFDLRLQGLSFWAITRTLNDEGHLSLNQYTPKQKGWSDTAVKKLLRNRAVIGCFTPAGREEVQGYYPAIISESLFYRVQQLNTGQYGRASVSSNPLSVNLFRGIIKCSECGATIVLGGYALKRFGMYRCPNRSANRCSAKAISRKQTDATILYMLALCDRFETENTDIIDSLKLQREDLQRKISKMAELAIELDDMTIITEKLRDMKNALSKLNHDIEEETKRIKAITTGSLKDIDRTTKEGMIETQLLIKGVLKEIVIDAAKRRCKVTFHNGRIIDLPITENPSEDVTEAIQSLSEVTERGLIDVDEVII

SEQ ID NO: 5310 - protein, 509 aa, Unknown
  Description of Unknown: Integrase B5311 sequence
  PTHR30461:SF3,SM00857,G3DSA:1.10.10.2600,IPR036162,PS51737, G3DSA:3.40.50.1390,IPR006119,IPR038109,PF07508,IPR011109, SSF53041,PTHR30461,Coil,G3DSA:2.20.28.10,PS51736, cd00338,PF00239
MKTCIYLRKSRSDEEAEKQGEFETLSRHRSTLLKVAKEQNLNIVEIKEELVSGESIAYRPKMLELLDEVKNGFYDSVLVMDIDRLGRGNMQDQGLILETFKKSNTKIITPRKTYDLNNEWDEEYSEFEAFIARKELKLITRRMQRGRVKSVEEGKFIASKPPYGYKFVFDESGNKSMVIDEDKADVVRMIFDLYVNKHYGGVKIATHLNSLGLKTTTGRTWYDKGVRDILKNKTYAGYVVWNKVERGKNSSKTRPIDERIEAKGVHEPIIDESIFLEAQSLFKSNFIPSTKQNSTITNPLAGLVVCSECGHKMIAQQSTYKNKEIVKFVKCLNCGKNRGIRLDILEKDIINELADWVDAYNLSIKDLDSNETKNPNLESYYSIIKSLESEYQTLMKQKENLHNLLEQGIYDVDTYLDRSKILTDKIDLNRSNLSQAKKDLENEKESVFSIADIIPQIKKVLELYYQSNDMQERNELLKEVIDYIDYSREPKKRTSRFNIKIYPRLIKNK

SEQ ID NO: 5311 - protein, 509 aa, Unknown
  Description of Unknown: Integrase B5312 sequence
  PTHR30461:SF3,cd00338,SM00857,G3DSA:1.10.10.2600,IPR036162, PF13408,IPR025827,G3DSA:3.40.50.1390,PS51737,IPR006119, IPR038109,PF07508,IPR011109,SSF53041,PTHR30461, PS51736,Coil,PF00239
MPQVQVIQPIQQQPKRLRVAAYARVSTKSNEQLHSMSVQTEYYEDLIQKNPNWEFVGVYADEGISGTSIKHRAELNRLMEDCRAGMIDRILVKSASRMARNTVDLLTLVRELKSIGVTVQFEKEQFDTDSATGEMMLSMMCAIAQEESLSISKNMKWGIRKKMQAGTYVNCATPFGYRQQDHQLVLEKNEAAVVRLIFEKYLSGVGIAEIARYLNKNHPKEDGRWYTSAVQFMLHNEAYKGDTLHQKHYTTDTLPFRVYHNEGQFPKYCAYKSHEAIVSDEEFEKVQNLLKTKQMSVPNAAPRVFTKKIYCTECGTVFAQASRANGMVAWGCRKHLNKSSLCPVKSVYETELCRAFLYMYNKLQANRARIFRPMVDSLLQLKSQQEHQNTERESIYAEIQRLAKQNHNLERIHAQGYIEDTQYIERKTLIEQQLGEKRVQLSRTSISRNVELTLKSTRQIEKILASDPPLTYFDEHTFTEMVKKVSVSNTAIEFELINGMKLSEERTEK

SEQ ID NO: 5312 - protein, 508 aa, Unknown
  Description of Unknown: Integrase B5313 sequence
  SM00857,G3DSA:1.10.10.2600,IPR036162,PS51737,G3DSA:3.40.50.1390, IPR006119,IPR038109,PF07508,IPR011109,SSF53041, PF00239,PTHR30461,Coil,cd00338
MYAMYLRKSRADDKDIPLEKVLKNHYNMLTELADKLKIQIEEENIFREIETGDSISIRPKMQDLLEKVSEGLYEGVFCTELSRLCRGSKIDQEIVSSTFTAAECKIITPSKTYDLANNEFDEEMVDFGLFMSRREYKTITKRMQRGREQSVKQGKYIGSILPYGYNKEKLEGENGFKLTINEEEAHIVKLIFKWFLEDNIGASIIAKRLNQGGYPTRSGRVWSYNSVKNILTSNVVAGYLKHGERKYKKYIDAKGNVKKSRPVNKDVEYYKGLHEAIIPLHKFEKVQDILNSRKQHKSNFDLPLSNPLAGLIRCSECNRIMVKRRCSQGDFLYCSTTGCKNIGSYLNRVEEHILQALSNMLSDYEYYVDNYEQETIKEKRNVDNDLKRIEKEIEKLNKQFEKCCTFLEQDVYTIEVYKDRTSKIKDKIKILEENKKVLEKEFGSDKVIKIKKLIPKLENVLKNYNILSIEGKNELLKSIIKEITYAKKKKSKKGSNEDYFELEITLNI

SEQ ID NO: 5313 - protein, 508 aa, Unknown
  Description of Unknown: Integrase B5314 sequence
  PTHR30461:SF3,SM00857,G3DSA:1.10.10.2600,IPR036162,PS51737,G3DSA: 3.40.50.1390,IPR006119,IPR038109,PF07508,SSF53041,IPR011109, PTHR30461,Coil,PS51736,cd00338,PF00239
MICAMYLRKSRADLTAEARGEGETLARHRETLMRVAVQQNLIVTDVYAEVVSGDTIAERPEMQRLLRAIERGDYDAVLCMDIDRLGRGDGGDQSIILKALKYSGTIVITPYKNYDTRREMDEEFFEYSQFLARGEYKRIKRRMWAGRVAAAKEGKWLSPKAPFGYRRVRLEHTKGWTLVPDPAEADAVRSMFEWYGSGEVGKNIIANRINAMGFRTLSGVSFTSSTIANILNNPVYLGKIRWCNRRKRVDMVNGVEVVTRPRSDECMIIDGLHPALIDNVAWDAVQARLATHQDSHVKKSANIVNPLASIMVCGICGKSMLFTPEYTRNDIVATYRCRTAGCPTSGINVQCVYDALLYTLKCWSAYTKEDEPSASKPPKNQSAIVAATTQLAQLNKQLTRLQDLLETGVYSAETYLARSKVLNDRINDTISEIDRLKQLQATDERAAIIRLKPKIDHVLDVWDISTAEDRNTLLRQVLRKVVYHKTHRCFRNDNPADFLSLDFYPMLE

SEQ ID NO: 5314 - protein, 508 aa, Unknown
  Description of Unknown: Integrase B5315 sequence
  PTHR30461:SF3,SM00857,G3DSA:1.10.10.2600,IPR036162,PF13408, PS51737,G3DSA:3.40.50.1390,IPR025827,IPR006119,IPR038109, PF07508,SSF53041,IPR011109,PF00239,PTHR30461, PS51736,Coil,cd00338
MKKAIAYMRFSSPGQMSGDSLNRQRRLITEWLKVNSDYYLDTVTYEDLGLSAFNGKHAQSGAFSEFLDAIEHGYILPGTTLLVESLDRLSREKVGEAIERLKLILNHGIDVITLCDNTVYNIDSLNEPYSLIKAILIAQRANEESEIKSSRVKLSWKKKRQDALESGTIMTASCPRWLSLDDKRTAFIPDPDRVKTIELIFKLRMERRSLNAIAKYLNDHAVKNFSGKESAWGPSVIEKLLANKALIGICVPSYRARGKGISEIAGYYPRVISDDLFYAVQEIRLAPFGISNSSKNPMLINLLRTVMKCEACGNTMIVHAVSGRLHGYYVCPMRRLHRCDRPSIKRDLVDYNIINELLFNCSKIQPVENKKDANETLELKIIELQMKINNLIVALSVAPEVTAIAEKIRLLDKELRRASVSLKTLKSKGVSSLGDFHAIDLTSKNGRELCRTLAYKIFEKIIINTDNKTCDIYFMNGIVFKHYPLMKVISAQQAISTLKYMVDGEIYF

SEQ ID NO: 5315 - protein, 508 aa, Unknown
  Description of Unknown: Integrase B5316 sequence
  PTHR30461:SF3,SM00857,G3DSA:1.10.10.2600,IPR036162,PF13408, PS51737,G3DSA:3.40.50.1390,IPR025827,IPR006119,IPR038109, PF07508,IPR011109,SSF53041,PF00239,PTHR30461, PS51736,Coil,cd00338
MKKAIAYMRFSSPGQMSGDSLNRQRRLIAEWLKVNSDYYLDTITYEDLGLSAFKGKHAQSGAFSEFLDAIEHGYILPGTTLLVESLDRLSREKVGEAIERLKLILNHGIDVITLCDNTVYNIDSLNEPYSLIKAILIAQRANEESEIKSSRVKLSWKKKRQDALESGTIMTASCPRWLSLDDKRTAFVPDPDRVKTIELIFKLRMERRSLNAIAKYLNDHAVKNFSGKESAWGPSVIEKLLANKALIGICVPSYRARGKGISEIAGYYPRVISDDLFYAVQEIRLAPFGISNSSKNPMLINLLRTVMKCEACGNTMIVHAVSGSLHGYYVCPMRRLHRCDRPSIKRDLVDYNIINELLFNCSKIQPVENKKDANETLELKIIELQMKINNLIAALSVAPEVTAIAEKIRVLDKELRRASVSLKTLKSKAVSSLGDFHAIDLTSKNGRELCRTLAYKTFEKIIINTDNKTCDIYFMNGIVFKHYPLMKTISAQQAISTLKYMVDGEVYF

SEQ ID NO: 5316 - protein, 508 aa, Unknown
  Description of Unknown: Integrase B5317 sequence
  PTHR30461:SF3,SM00857,G3DSA:1.10.10.2600,IPR036162,PF13408, IPR025827,PS51737,G3DSA:3.40.50.1390,IPR006119,IPR038109, PF07508,IPR011109,SSF53041,PF00239,PTHR30461, PS51736,Coil,cd00338
MKKAIAYMRFSSPGQMSGDSLNRQRRLIAEWLKVNSDYYLDTITYEDLGLSAFKGKHAQSGAFSEFLDAIEHGYILPGTTLLVESLDRLSREKVGEAIERLKLILNHGIDVITLCDNTVYNIDSLNEPYSLIKAILIAQRANEESEIKSSRVKLSWKKKRQDALESGTIMTASCPRWLSLDDKRTAFVPDPDRVKTIELIFKLRMERRSLNAIAKYLNDHAVKNFSGKESAWGPSVIEKLLANKALIGICVPSYRARGKGISEIAGYYPRVISDDLFYAVQEIRLAPFGISNSSKNPMLINLLRTVMKCEACGNTMIVHAVSRSLHGYYVCPMRRLHRCDRPSIKRDLVDYNIINELLFNCSKIQPVENKKDANETLELKIIELQMKINNLIAALSVAPEVTAIAEKIRVLDKELRRASVSLKTLKSKAVSSLGDFHAIDLTSKNGRELCRTLAYKTFEKIIINTDNKTCDIYFMNGIVFKHYPLMKTISAQQAISTLKYMVDGEVYF

SEQ ID NO: 5317 - protein, 508 aa, Unknown
  Description of Unknown: Integrase B5318 sequence
  PTHR30461:SF3,cd00338,SM00857,G3DSA:1.10.10.2600,IPR036162, PF13408,PS51737,G3DSA:3.40.50.1390,IPR025827,IPR006119, IPR038109,PF07508,IPR011109,SSF53041,PTHR30461, PS51736,Coil,PF00239
MKKAIAYMRFSSPGQMSGDSLNRQRRLIAEWLKVNSDYYLDTITYEDLGLSAFKGKHAQSGAFSEFLDAIEHGYILPGTTLLVESLDRLSREKVGEAIERLKLILNHGIDVITLCDNTVYNIDSLNEPYSLIKAILIAQRANEESEIKSSRVKLSWKKKRQDAMESGTIMTASCPRWLSLDDKRTAFVPDPDRVKTIELIFKLRMERRSLNAIAKYLNDHAVKNFSGKESAWGPSVIEKLLANKALIGICVPSYRARGKGISEIAGYYPRVISDDLFYAVQEIRLAPFGISNSSKNPMLINLLRTVMKCEACGNTMIVHAVSGSLHGYYVCPMRRLHRCDRPSIKRDLVDYNIINELLFNCSKIQPVENKKDANETLELKIIELQMKINNLIVALSVAPEVTAIAEKIRLLDKELRRASVSLKTLKSKGVNSFSDFYAIDLTSKNGRELCRTLAYKTFEKIIINTDNKTCDIYFMNGIVFKHYPLMKVISAQQAISALKYMVDGEIYF

SEQ ID NO: 5318 - protein, 508 aa, Unknown
  Description of Unknown: Integrase B5319 sequence
  PTHR30461:SF3,cd00338,SM00857,G3DSA:1.10.10.2600,IPR036162, PF13408,PS51737,G3DSA:3.40.50.1390,IPR025827,IPR006119, IPR038109,PF07508,IPR011109,SSF53041,PTHR30461, PS51736,Coil,PF00239
MKKAIAYMRFSSPGQMSGDSLNRQRRLIAEWLKVNSDYYLDTITYEDLGLSAFKGKHAQSGAFSEFLDAIEHGYILPGTTLLVESLDRLSREKVGEAIERLKLILNHGIDVITLCDNTVYNIDSLNEPYSLIKAILIAQRANEESEIKSSRVKLSWKKKRQDALESGTIMTASCPRWLSLDDKRTAFVPDPDRVKTIELIFKLRMERRSLNAIAKYLNDHAVKNFSGKESAWGPSVIEKLLANKALIGICVPSYRARGKGISEIAGYYPRVISDDLFYAVQEIRLAPFGISNSSKNPMLINLLRTVMKCEACGNTMIVHAVSGSLHGYYVCPMRRLHRCDRPSIKRDLVDYNIINELLFNCSKIQPVENKKDANETLELKIIELQMKINNLIVALSVAPEVTAIAEKIRLLDKELRRASVSLKTLKSKGVNSFSDFYAIDLTSKNGRELCRTLAYKTFEKIIINTDNKTCDIYFMNGIVFKHYPLMKVISAQQAISALKYMVDGEIYF

SEQ ID NO: 5319 - protein, 508 aa, Unknown
  Description of Unknown: Integrase B5320 sequence
  PTHR30461:SF3,cd00338,SM00857,G3DSA:1.10.10.2600,IPR036162, PF13408,PS51737,G3DSA:3.40.50.1390,IPR025827,IPR006119, IPR038109,PF07508,IPR011109,SSF53041,PTHR30461, PS51736,Coil,PF00239
MKKAIAYMRFSSPGQMSGDSLNRQRRLIAEWLKVNSDYYLDTITYEDLGLSAFKGKHAQSGAFSEFLDAIEHGYILPGTTLLVESLDRLSREKVGEAIERLKLILNHGIDVITLCDNTVYNIDSLNEPYSLIKAILIAQRANEESEIKSSRVKLSWKKKRQDALESGTIMTASCPRWLSLDDKRTAFVPDPDRVKTIELIFKLRMERRSLNAIAKYLNDHAVKNFSGKESAWGPSVIEKLLANKALIGICVPSYRARGKGISEIAGYYPRVISDDLFYAVQEIRLAPFGISNSSKNPMLINLLRTVMKCEACGNTMIVHAVSGSLHGYYVCPMRRLHRCDRPSIKRDLVDYNIINELLFNCSKIQPVENKKDANETLELKIIELQMKINNLIVALSVAPEVTAIAEKIRLLDKELRRASVSLKTLKSKGVNSFSDFYAIDLTSKNGRELCRTLAYKTFEKIIINTDNKTCDIYFMNGIVFKHYPLMKVISAQQAISALKYMVDGEVYF

SEQ ID NO: 5320 - protein, 508 aa, Unknown
  Description of Unknown: Integrase B5321 sequence
  PTHR30461:SF3,SM00857,G3DSA:1.10.10.2600,IPR036162,PF13408, IPR025827,G3DSA:3.40.50.1390,PS51737,IPR006119,IPR038109, PF07508,IPR011109,SSF53041,PTHR30461,PS51736, cd00338,PF00239
MSVQVIKSKNTRKGRIRVAAYCRVSTETEIQEGSIENQIEHYEELIKSNPDYEFVNVYYDFGISGYKEKRPGFQEMMKDARSGKIDLIITKSITRFARNTNTLLKATRELKSLGIGVFFELQNMNTLNEGGELLLTVYAAFAQGESETYRELAQMTFKRKFSEGRPEYQLRKTLGFDMTENNEIQIVPKEAEGVKQIFQWVKENYSTQTIVKMAAAKGITLKSGKPFTAQWVYKTVRNVAYKGDYIMQRTYTDSERKVHVNQTLVPSFYIENDHDAIVSKRLWNAANKVIDDRAKERTTHLEMKPLTEENYPYIHKLHCAKCGGVLHGQKTKSGAQYSFSCGRRNRQGKGFCSGVSVPQKVIESWGEIDGNIYISFDPDKPLHKQHSYVKESTWKKNHTKKKLPPLPAYNVENYPYYRRVYCAECGHLLTRSRRYDGLVEFICNGMASRGKSYCKGVRVPVEVLNRLPEWDGFYWIKEDKENGEKHYSYTCKEEKPQRKEYSAGGRED

SEQ ID NO: 5321 - protein, 508 aa, Unknown
  Description of Unknown: Integrase B5322 sequence
  PTHR30461:SF3,cd00338,SM00857,G3DSA:1.10.10.2600,IPR036162, PF13408,PS51737,G3DSA:3.40.50.1390,IPR025827,IPR006119, IPR038109,PF07508,IPR011109,SSF53041,PTHR30461, PS51736,Coil,PF00239
MKKAIAYMRFSSPGQMSGDSLNRQRRLIAEWLKVNSDYYLDTITYEDLGLSAFKGKHAQSGAFSEFLDAIEHGYILPGTTLLVESLDRLSREKVGEAIERLKLILNHGIDVITLCDNTVYNIDSLNEPYSLIKAILIAQRANEESEIKSSRVKLSWKKKRQDALESGTIMTASCPRWLSLDDKRTAFVPDPDRVKTIELIFKLRMERRSLNAIAKYLNDHAVKNFSGKESAWGPSVIEKLLANKALIGICVPSYRARGKGISEIAGYYPRVISDDLFYAVQEIRLAPFGISNSSKNPMLINLLRTVMKCEACGNTMIVHAVSGSLHGYYVCPMRRLHRCDRPSIKRDLVDYNIINELLFNCSKIQPVENKKDANETLELKIIELQMKINNLIAALSVAPEVTAIAEKIRVLDKELRRASVSLKTLKSKAVSSLGDFHAIDLNSKNGRELCRTLAYKTFEKIIINTDNKTCDIYFMNGIVFKHYPLMKTISAQQAISTLKYMVDGEVYF

SEQ ID NO: 5322 - protein, 508 aa, Unknown
  Description of Unknown: Integrase B5323 sequence
  PTHR30461:SF3,IPR036162,PS51737,IPR011109,PTHR30461, PS00397,PF00239,G3DSA:1.10.10.2600,IPR006119,SSF53041, cd00338,SM00857,IPR025827,IPR038109,PS51736, IPR006118,PF13408,G3DSA:3.40.50.1390,PF07508,Coil
MKKEEDTVKTAALYIRVSTDKQEELSPDSQRCLLLDYAKSHNMIVSNQHIYTENGISGRKADKRPKFQQMIAAAKSDEHPFDVILLWKFSRFARNQEESIVYKSMLRNKCHVDVVSISEPLIEGPFGGLIERIIEWMDEFYSIRLSGDVTRGMTENALRGAYQCRPPLGYRIPHHKATPEIIPEEAAIVQLIFDKYVNEKMSLFALTKYLNAQGYKTSRGKPFEKRSLEYIIQNPGYAGDIRWNRTINETNEIRDRSEWIIRPGHHPAIISKELFEQAQERFNKEYTPRNAKPSEVTKHWLSGLLKCSGCGRSLSSCVVHRKSLPDTFYFQCYGYLKGKCSTNCYVNESVIGPAVLNALKDALNNGSVSYSLRQRQTDHAPDAEIKNIEKKLSRLDSKELRAKEAYIDGIDTIEEYRANKERISQERTELEEQLAKLTQVPEEPEDNTRKMLQSISSILDILQSDSFTPQEKNAALKSIVEKITYDRANSHIDVDFYLTENPEMPANP

SEQ ID NO: 5323 - protein, 508 aa, Unknown
  Description of Unknown: Integrase B5324 sequence
  PTHR30461:SF3,cd00338,SM00857,G3DSA:1.10.10.2600,IPR036162, PF13408,PS51737,IPR025827,G3DSA:3.40.50.1390,IPR006119, IPR038109,PF07508,IPR011109,SSF53041,PTHR30461, PS51736,Coil,PF00239
MKKAIAYMRFSSPGQMSGDSLNRQRRLITEWLKVNSDYYLDTVTYEDLGLSAFNGKHAQSGAFSEFLDAIEHGYILPGTTLLVESLDRLSREKVGEAIERLKLILNHGIDVITLCDNTVYNIDSLNEPYSLIKAILIAQRANEESEIKSSRVKLSWKKKRQDALESGTIMTASCPRWLSLDDKRTAFVPDPDRVKTIELIFKLRMERRSLNAIAKYLNDHAVKNFSGKESAWGPSVIEKLLANKALIGICVPSYRARGKGISEIAGYYPRVISDDLFYAVQEIRLAPFGISNSSKNPMLINLLRTVMKCEACGNTMIVHAVSGSLHGYYVCPMRRLHRCDRPSIKRDLVDYNIINELLFNCSKIQPVENKKDANETLELKIIELQMKINNLIAALSVAPEVTAIAEKIRVLDKELRRASVSLKTLKSKAVSSLGDFHAIDLTSKNGRELCRTLAYKTFEKIIINTDNKTCDIYFMNGIVFKHYPLMKTISAQQAISTLKYMVDGEVYF

SEQ ID NO: 5324 - protein, 508 aa, Unknown
  Description of Unknown: Integrase B5325 sequence
  PTHR30461:SF3,SM00857,G3DSA:1.10.10.2600,IPR036162,PF13408, PS51737,G3DSA:3.40.50.1390,IPR025827,IPR006119,IPR038109, PF07508,IPR011109,SSF53041,PF00239,PTHR30461, PS51736,Coil,cd00338
MKKAIAYMRFSSPGQMSGDSLNRQRRLIAEWLKVNSDYYLDTITYEDLGLSAFKGKHAQSGAFSEFLDAIEHGYILPGTTLLVESLDRLSREKVGEAIERLKLILNHGIDVITLCDNTVYNIDSLNEPYSLIKAILIAQRANEESEIKSSRVKLSWKKKRQDALESGTIMTASCPRWLSLDDKRTAFVPDPDRVKTIELIFKLRMERRSLNAIAKYLNDHAVKNFSGKESAWGPSVIEKLLANKALIGICVPSYRARGKGISEIAGYYPRVISDDLFYAVQEIRLAPFGISNSSKNPMLINLLRTVMKCEACGSTMIVHAVSGSLHGYYVCPMRRLHRCDRPSIKRDLVDYNIINELLFNCSKIQPVENKKDANETLELKIIELQMKINNLIVALSVAPEVTAIAEKIRLLDKELRRASVSLKTLKSKGVNSFSDFYAIDLTSKNGRELCRTLAYKTFEKIIINTDNKTCDIYFMNGIVFKHYPLMKVISAQQAISALKYMVDGEIYF

SEQ ID NO: 5325 - protein, 508 aa, Unknown
  Description of Unknown: Integrase B5326 sequence
  PTHR30461:SF3,IPR036162,PS51737,IPR011109,PTHR30461, PS00397,PF00239,G3DSA:1.10.10.2600,IPR006119,SSF53041, cd00338,SM00857,IPR025827,IPR038109,PS51736, IPR006118,PF13408,G3DSA:3.40.50.1390,PF07508,Coil
MNNVIVYARVSTLIQAEQGYSIDAQLEDCRKKAQELGAIHIEEYIDIGKSGKFLERPELQKMLYNIKHSEMKYDALIIYKLDRLSRDSMGLAYIIKILQQNNIKIISTDGAHYGTNPQDILIMQMMGSISEFENALRKERSIRGKIEKRRQGKIDKVKKYGFIYNDKKKNFDINKEEAEIIKKIFNWFTEERIGAFKIAKRINKLKIPTPLPSKNIHIWHENTIRGILRDESYAGTMHTMKYKFEKISIKKIKKTIRPKSEWIDVSVPAIVEKITWEKAQEILNDNKNNKRNTKNIWLLQGLVLCNICKKPMYIKQTITKSKNTNNKVFYFRCRTKIYNHAGLPEKCDARSVQVNVVEDLVWNTLLKIFYSKETLEKYLKRNRKENTENILLEELITKRQTLLNKKNTITDWFLDGKLEEDIATEKLNKLNMELDTLNLRIKMLKKNATKQPATIESLYNKFHEVNNPDREKKKEIIQSIVDKIYLERLDDTNGKYCVPKLKLNIILY

SEQ ID NO: 5326 - protein, 508 aa, Unknown
  Description of Unknown: Integrase B5327 sequence
  SM00857,G3DSA:1.10.10.2600,IPR036162,PS51737,G3DSA:3.40.50.1390, IPR006119,IPR038109,PF07508,SSF53041,IPR011109, PTHR30461,Coil,cd00338,PF00239
MYAMYLRKSRADDKDIPLEKVLKNHYNMLTELADKLKIQIEEENVFREIETGDSISIRPKMQDLLEKVSEGLYEGVFCTELSRLCRGSKIDQEIVSSTFTAAECKIITPSKTYDLANNEFDEEMVDFGLFMSRREYKTITKRMQRGREQSVKQGKYIGSILPYGYNKEKLEGENGFRLVINEEEAHIVRLIFKWFLEDNAGASIIAKRLNQGGYPTRSGRVWSYSSVKNILTSNVVAGYLKHGERKYKKYIDTKGNVKKSRPVNAAVEYYKGLHEAIIPLHEFEKVQDILNSRKQHKSNFDLPLSNPLAGLIKCSECNRIMVKRRCAQGDFLYCSTTGCKNIGSYLNRVEEHILQALSNTLSDYEYYVDNYEQEMIKEKRNVDNDLKRIEKEIEKLNKQFEKCCTFLEQDVYTIEIFKDRTSKIKDKIKILEENKKVLEKEFGSDKVIKIKKLIPELENVLKNYNTLSIEGKNELLKSIIKEAIYSKKKKCKKGSNEDYFELEITLNI

SEQ ID NO: 5327 - protein, 508 aa, Unknown
  Description of Unknown: Integrase B5328 sequence
  SM00857,G3DSA:1.10.10.2600,IPR036162,PS51737, G3DSA:3.40.50.1390,IPR006119,IPR038109,PF07508, IPR011109,SSF53041,PTHR30461,Coil, cd00338,PF00239
MYAMYLRKSRADDKDIPLEKVLKNHYNMLTELADKLKIQIEEENVFREIETGDSISIRPKMQDLLEKVSEGLYEGVFCTELSRLCRGSKIDQEIVSSTFTAAECKIITPSKTYDLANNEFDEEMVDFGLFMSRREYKTITKRMQRGREQSVKQGKYIGSILPYGYNKEKLEGENGFKLTINEEEAHIVKLIFKWFLEDNIGASIIAKRLNQGGYPTRSGRVWSYNSVKNILTSNVVAGYLKHGERKYKKYIDAKGNVKKSRPVNKDVEYYKGLHEAIIPLHKFEKVQDILNSRKQHKSNFDLPLSNPLAGLIRCSECNRIMVKRRCSQGDFLYCSTTGCKNIGSYLNRVEEHILQALSNMLSDYEYYVDNYEQETIKEKRNVDNDLKRIEKEIEKLNKQFEKCCTFLEQDVYTIEVYKDRTSKIKDKIKILEENKKVLEKEFGSDKVIKIKKLIPKLENVLKNYNILSIEGKNELLKSIIKEITYAKKKKSKKGSNEDYFELEITLNI

SEQ ID NO: 5328 - protein, 508 aa, Unknown
  Description of Unknown: Integrase B5329 sequence
  PTHR30461:SF3,IPR036162,PS51737,IPR011109,PTHR30461, PS00397,PF00239,G3DSA:1.10.10.2600,IPR006119,SSF53041, cd00338,SM00857,IPR025827,IPR038109,PS51736, IPR006118,PF13408,G3DSA:3.40.50.1390,PF07508,Coil
MYNVIIYARVSTLIQAEQGYSIDAQLEDCRKKAQELGATNIEEYIDRGKSGKFLERPELQKMLYNIKHSETNYDALIIYKLDRLSRDSMGLAYIIKILQQNNIKIISTDGAHYGTNPQDILIMQMMGSISEFENALRKERSIRGKIEKRRQGKIDKVKKYGFIYNNKKKNFDINKEEAEIIKKIFNWFTEERIGAFKIAKRINKLKIPTPLPSKNIHIWHENTIRGILRDESYAGTMHTMKYKFEKISIKKIKKTIRPKSEWIDVSVPAIVEKITWEKAQEILNDNKNNKRNTKNIWLLQGLVLCNICKKPMYIKQTITKSKNTNNKVFYFRCRTKIYNHAGLPEKCDARSVQVNVVEDLVWNTLLKIFYSKETLEKYLKRNRKENTENILLEELITKRQTLLNKKNTITDWFLDGKLEEDIATEKLNKLNMELDTLNLRIKMLKKNATKQPATIESLYNKFHEVNNPDREKKKEIIQSIVDKIYLERLDDTNGKYCVPKLKLNIILY

SEQ ID NO: 5329 - protein, 508 aa, Unknown
  Description of Unknown: Integrase B5330 sequence
  cd00338,SM00857,G3DSA:1.10.10.2600,IPR036162,PS51737, G3DSA:3.40.50.1390,IPR006119,IPR038109,PF07508,IPR011109, SSF53041,PTHR30461,Coil,PF00239
MYAMYLRKSRADDKDIPLEKVLKNHYNMLTELADKLKIQIEEENVFREIETGDSISIRPKMQDLLEKVSEGLYEGVFCTELSRLCRGSKIDQEIVSSTFTAAECKIITPSKTYDLANNEFDEEMVDFGLFMSRREYKTITKRMQRGREQSVKQGKYIGSILPYGYNKEKLEGENGFKLVINEEEAHIIKLIFKWFLEDNAGASIIAKRLNQGGYPTRSGRVWSYSSVKNILTSNVVAGYLKHGERKYKKYIDTKGNVKKSRPVNKDAEYYKGLHEAIIPLHEFEKVQDILNSRKQHKSNFDLPLSNPLAGLIKCSECNRIMVKRPCPQGNFLYCPTTGCKNMGSYLDRVEEHILQALSNTLSDYEYYVDNYEQETIKEKRNVDNDLKRIEKEIEKLNKQFEKCCTFLEQDVYTIEVFKDRTSKIKDKIRILEENKKVLEKEFGDDKVIKIKKLIPELENVLKNYNTLSIEGKNELLKSIIKEAIYSKKKKCKKGSGEDYFELEITLNI

SEQ ID NO: 5330 - protein, 508 aa, Unknown
  Description of Unknown: Integrase B5331 sequence
  PTHR30461:SF3,cd00338,SM00857,G3DSA:1.10.10.2600, IPR036162,PF13408,PS51737,G3DSA:3.40.50.1390, IPR025827,IPR006119,IPR038109,PF07508, IPR011109,SSF53041,PTHR30461,PS51736,Coil,PF00239
MKKAIAYMRFSSPGQMSGDSLNRQRRLIAEWLKVNSDYYLDTITYEDLGLSAFKGKHAQSGAFSEFLDAIEHGYILPGTTLLVESLDRLSREKVGEAIERLKLILNHGIDVITLCDNTVYNIDSLNEPYSLIKAILIAQRANEESEIKSSRVKLSWKKKRQDALESGTIMTASCPRWLSLDDKRTAFVPDPDRVKTIELIFKLRMERRSLNAIAKYLNDHAVKNFSGKQSAWGPSVIEKLLANKALIGICVPSYRARGKGISEIAGYYPRVISDDLFYAVQEIRLAPFGISNSSKNPMLINLLRTVMKCEACGNTMIVHAVSGSLHGYYVCPMRRLHRCDRPSIKRDLVDYNIINELLFNCSKIQPVENKKDANETLELKIIELQMKINNLIVALSVAPEVTAIAEKIRLLDKELRRASVSLKTLKSKGVNSFSDFYAIDLTSKNGRELCRTLAYKTFEKIIINTDNKTCDIYFMNGIVFKHYPLMKVISAQQAISALKYMVDGEVYF

SEQ ID NO: 5331 - protein, 508 aa, Unknown
  Description of Unknown: Integrase B5332 sequence
  SM00857,G3DSA:1.10.10.2600,IPR036162,PS51737,G3DSA:3.40.50.1390, IPR006119,IPR038109,PF07508,SSF53041,IPR011109, PF00239,PTHR30461,Coil,cd00338
MYAMYLRKSRADDKDIPLEKVLKNHYNMLTELADKLKIQIEEENVFREIETGDSISIRPKMQDLLEKVSEGLYEGVFCTELSRLCRGSKIDQEIVSSTFTAAECKIITPSKTYDLANNEFDEEMVDFGLFMSRREYKTITKRMQRGREQSVKQGKYIGSILPYGYNKEKLEGENGFRLVINEEEAYIVRLIFKWFLEDNTGASIIAKRLNQGGYPSRSGRVWSYSSVKNILTSNVVAGYLKHGERKYKKYIDAKGNVKKSRPVNAAVEYYKGLHEAIIPLHEFEKVQDILNSRKQHKSNFDLPLSNPLAGLIKCSECGRVLIKRPCPQGNFLYCPTAGCKNMGSYLYRVEEHILQALSNTLSDYEYYVDNYEQETIKEKRNVDNDLKRIEKEIEKLNKQFEKCCTFLEQDVYTIEVFKDRTSKIKDKIRILEENKKVLEKEFGDEKVIKIKKLIPKLENVLKNYNTLSIEGKNELLKSIIKEITYTKKKKSKKGSNEDYFELEITLNI

SEQ ID NO: 5332 - protein, 508 aa, Unknown
  Description of Unknown: Integrase B5333 sequence
  PTHR30461:SF3,IPR036162,PS51737,IPR011109, PTHR30461,PS00397,PF00239,G3DSA:1.10.10.2600, IPR006119,SSF53041,cd00338,SM00857,IPR025827,IPR038109 ,PS51736,IPR006118,PF13408,G3DSA:3.40.50.1390,PF07508,Coil
MKKEEDTVKTAALYIRVSTDKQEELSPDSQRRLLLDYAKSHNMIVSNQHIYTENGISGRKADKRPKFQQMIAAAKSDEHPFDVILLWKFSRFARNQEESIVYKSMLRNKCHVDVVSISEPLIEGPFGGLIERIIEWMDEFYSIRLSGDVTRGMTENALRGAYQCRPPLGYRIPHHKATPEIIPEEAAIVQLIFDKYVNEKMSLFALTKYLNAQGYKTSRGKPFEKRSLEYIIQNPGYAGDIRWNRTINETNEIRDRSEWIIRPGHHPAIISKELFEQAQERFNKEYTPRNAKPSEVTKHWLSGLLKCSGCGRSLSSCVVHRKSLPDTFYFQCYGYLKGKCSTNCYVNESVIGPAVLNALKDALNNGSVSYSLRQRQTDHAPDAEIKNIEKKLSRLDSKELRAKEAYIDGIDTIEEYRANKERISQERTELEEQLAKLTQVPEEPEDNTRKMLQSISSILDILQSDSFTPQEKNAALKSIVEKITYDRANSHIDVDFYLTENPEMPANP

SEQ ID NO: 5333 - protein, 508 aa, Unknown
  Description of Unknown: Integrase B5334 sequence
  PTHR30461:SF3,SM00857,G3DSA:1.10.10.2600,IPR036162,PF13408, IPR025827,G3DSA:3.40.50.1390,PS51737,IPR006119,IPR038109, PF07508,IPR011109,SSF53041,PTHR30461,Coil, PS51736,cd00338,PF00239
MKKAIAYMRFSSPGQMSGDSLNRQRRLIAEWLKVNSDYYLDTITYEDLGLSAFKGKHAQSGAFSEFLDAIEHGYILPGTTLLVESLDRLSREKVGEAIECLKLILNHGIDVITLCDNTVYNIDSLNEPYSLIKAILIAQRANEESEIKSSRVKLSWKKKRQDALESGTIMTASCPRWLSLDDKRTAFVPDPDRVKTIELIFKLRMERRSLNAIAKYLNDHAVKNFSGKESAWGPSVIEKLLANKALIGICVPSYRARGKGISEIAGYYPRVISDDLFYAVQEIRLAPFGISNSSKNPMLINLLRTVMKCEACGNTMIVHAVSGSLHGYYVCPMRRLHRCDRPSIKRDLVDYNIINELLFNCSKIQPVENKKDANETLELKIIELQMKINNLIAALSVAPEVTAIAEKIRVLDKELRRASVSLKTLKSKAVSSLGDFHAIDLTSKNGRELCRTLAYKTFEKIIINTDNKTCDIYFMNGIVFKHYPLMKTISAQQAISTLKYMVDGEVYF

SEQ ID NO: 5334 - protein, 508 aa, Unknown
  Description of Unknown: Integrase B5335 sequence
  SM00857,G3DSA:1.10.10.2600,IPR036162,PS51737,G3DSA:3.40.50.1390, IPR006119,IPR038109,PF07508,IPR011109,SSF53041, PF00239,PTHR30461,Coil,cd00338
MYAMYLRKSRADDKDIPLEKVLKNHYNMLTELADKLKIQIEEENVFREIETGDSISIRPKMQDLLEKVSEGLYEGVFCTELSRLCRGSKIDQEIVSSTFTAAECKIITPSKTYDLANNEFDEEMVDFGLFMSRREYKTITKRMQRGREQSVKQGKYIGSILPYGYNKEKLEGENGFRLVINEEEAHIVRLIFKWFLEDNAGASIIAKRLNQGGYPSRSGRVWSYSSVKNILTSNVVAGYLKHGERKYKKYIDAKGNVKKSRPVNAAVEYYKGLHEAIIPLHEFEKVQDILNSRKQHKSNFDLPLSNPLAGLVKCSECNRIMVKRRCSQGDFLYCSTTGCKNIGSYLNRVEEHILQALSNTLSDYEYYVDNYEQEMIKEKRNVDNDLKRIEKEIEKLNKQFEKCCTFLEQDVYTIEVFKDRTSKIKDKIRILEENKKVLEKEFGDDKVIKIKKLIPELENVLKNYNTLSIEGKNELLKSIIKEAIYSKKKKCKKGSGEDYFELEITLNI

SEQ ID NO: 5335 - protein, 508 aa, Unknown
  Description of Unknown: Integrase B5336 sequence
  PTHR30461:SF3,cd00338,SM00857,G3DSA:1.10.10.2600, IPR036162,PF13408,PS51737,IPR025827, G3DSA:3.40.50.1390,IPR006119,IPR038109,PF07508, IPR011109,SSF53041,PTHR30461,PS51736,Coil,PF00239
MKKAIAYMRFSSPGQMSGDSLNRQRRLITEWLKVNSDYYLDTVTYEDLGLSAFNGKHAQSGAFSEFLDAIEHGYILPGTTLLVESLDRLSREKVGEAIERLKLILNHGIDVITLCDNTVYNIDSLNEPYSLIKAILIAQRANEESEIKSSRVKLSWKKKRQDALESGTIMTASCPRWLSLDDKRTAFVPDPDRVKTIELIFKLRMERRSLNAIAKYLNDHAVKNFSGKESAWGPSVIEKLLANKALIGICVPSYRARGKGISEIAGYYPRVISDDLFYAVQEIRLAPFGISNSSKNPMLINLLRTVMKCEACGNTMIVHAVSGSLHGYYVCPMRRLHRCDRPSIKRDLVDYNIINELLFNCSKIQPVENKKDANETLELKIIELQMKINNLIAALSVAPEVTAIAEKIRVLDKELRRASVSLKTLKSKAVSSLGDFHAIDLTSKNGRELCRTLAYKTFEKIIINTDNKTCDIYFMNGIVFKHYPLMKIISAQQAISTLKYMVDGEVYF

SEQ ID NO: 5336 - protein, 508 aa, Unknown
  Description of Unknown: Integrase B5337 sequence
  cd00338,SM00857,G3DSA:1.10.10.2600,IPR036162,PS51737, G3DSA:3.40.50.1390,IPR006119,IPR038109,PF07508,IPR011109, SSF53041,PTHR30461,Coil,PF00239
MYAMYLRKSRADDKDIPLEKVLKNHYNMLTELADKLKIQIEEENVFREIETGDSISIRPKMQDLLEKVSEGLYEGVFCTELSRLCRGSKIDQEIVSSTFTAAECKIITPSKTYDLANNEFDEEMVDFGLFMSRREYKTITKRMQRGREQSVKQGKYIGSILPYGYNKEKLEGENGFRLVINEEEAHIVKLIFKWFLEDNAGASIIAKRLNQGGYPTRSGRVWSYSSVKNILTSNVVAGYLKHGERKYKKYIDTKGNVKKSRPVNAAVEYYKGLHEAIIPLSDFEKVQDILNSRKQHKSNFDLPLSNPLAGLIKCSECGRVLIKRPCPQGNFLYCPTTGCKNMGSYLNRVEEHILQALSNTLSDYEYYVDNYEQETIKEKRNVDNDLKRIEKEIEKLNKQFEKCCTFLEQDVYTIEIFKDRTSKIKDKIRILEENKKVLEKEFGDDKVIKIKKLIPKLENVLKNYNTLSIEGKNELLKSIIKEAIYSKKKKCKKGSREDYFELEITLNI

SEQ ID NO: 5337 - protein, 508 aa, Unknown
  Description of Unknown: Integrase B5338 sequence
  PTHR30461:SF3,SM00857,G3DSA:1.10.10.2600,IPR036162,PS51737, G3DSA:3.40.50.1390,IPR006119,IPR038109,PF07508,IPR011109, SSF53041,PTHR30461,PS51736,cd00338,PF00239
MKKAIAYMRFSSPGQMSGDSLNRQRRLIAEWLKVNSDYYLDTITYEDLGLSAFKGKHAQSGAFSEFLDAIEHGYILPGTTLLVESLDRLSREKVGEAIERLKLILNHGIDVITLCDNTVYNIDSLNDPYSLIKAILIAQRANEESEIKSSRVKLSWKKKRQDALESGTIMTASCPRWLSLDDKRTAFIPDPDRVKTIELIFKLRMERRSLNAIAKYLNDHAVKNFSGKESAWGPSVIEKLLANKALIGICVPSYRARGKGISEIAGYYPRVISDDLFYAVQEIRLAPFGISNSSKNPMLINLLRTVMKCEACGNTMIVQAVSGSLHGYYVCPMRRLHRCGRPSIKRNLVDYNIINELLFNCSKIQPVENKKDANETLELKIIELHMKINNLIAALSVAPEVTAIAEKIRVLDKELRRASVSLKTLKSKAVSSLGDFHAIDLTSKNGRELCRTLAYKTFEKIIINTDNKTCDIYFMNGIVFKHYPLMKTISAQQAISTLKYMVDGEVYF

SEQ ID NO: 5338 - protein, 508 aa, Unknown
  Description of Unknown: Integrase B5339 sequence
  PTHR30461:SF3,SM00857,G3DSA:1.10.10.2600,IPR036162,PS51737, G3DSA:3.40.50.1390,IPR006119,IPR038109,PF07508,IPR011109, SSF53041,PTHR30461,Coil,PS51736,cd00338, PF00239
MICAMYLRKSRADLTAEARGEGETLARHRETLMRVAVQQNLIVTDVYAEVVSGDTIAERPEMQRLLRAIERGDYDAVLCMDIDRLGRGDGGDQSIILKALKYSGTIVITPYKNYDTRREMDEEFFEYSQFLARGEYKRIKRRMWAGRVAAAKEGKWLSPKAPFGYRRVRLEHTKGWTLVPDPAEADAVRSMFEWYGSGEVGKNIIANRINAMGFRTLSGVNFTSSTIANILNNPVYLGKIRWCNRRKRVDMVNGVEVVTRPRSEECMITEGLHPALIDNVAWDAVQARLATHQDSHVKKSANIVNPLASIMVCGICGKSMLFTPEYTRNDIVATYRCRTAGCPTSGINVQCVYDALLYTLKCWSAYAKEDEPSASKPPKNQSAIVAATTQLAQLNKQLTRLQDLLETGIYSAETYLARSKVLNDRINDTISEIDRLKQLQATDERAAIIRLKPKIDHVLDVWEISTAEDQNTLLRQVLRKVVYHKTHRCFRNDNPADFLSLDFFPVLE

SEQ ID NO: 5339 - protein, 508 aa, Unknown
  Description of Unknown: Integrase B5340 sequence
  PTHR30461:SF3,cd00338,SM00857,G3DSA:1.10.10.2600,IPR036162, PF13408,PS51737,G3DSA:3.40.50.1390,IPR025827,IPR006119, IPR038109,PF07508,IPR011109,SSF53041,PTHR30461, PS51736,Coil,PF00239
MKKAIAYMRFSSPGQMSGDSLNRQRRLIAEWLKVNSDYYLDTITYEDLGLSAFKGKHAQSGAFSEFLDAIEHGYILPGTTLLVESLDRLSREKVGEAIERLKLILNHGIDVITLCDNTVYNIDSLNDPYSLIKAILIAQRANEESEIKSSRVKLSWKKKRKDALESGTIMTASCPRWLSLDDKRTAFVPDPDRVKTIELIFKLRMERRSLNAIAKYLNDHAVKNFSGKESAWGPSVIEKLLANKALIGICVPSYRARGKGISEIAGYYPRVISDDLFYAVQEIRLAPFGISNSSKNPMLINLLRTVMKCEACGNTMIVHAVSGSLHGYYVCPMRRLHRCDRPSIKRDLVDYNIINELLFNCSKIQPVENKKDANETLELKIIELQMKINNLIAALSVAPEVTAIAEKIRVLDKELRRASVSLKTLKSKAVSSLGDFHAIDLTSKNGRELCRTLAYKTFEKIIINTDNKTCDIYFMNGIVFKHYPLMKTISAQQVISTLKYMVDGEVYF

SEQ ID NO: 5340 - protein, 508 aa, Unknown
  Description of Unknown: Integrase B5341 sequence
  SM00857,G3DSA:1.10.10.2600,IPR036162,PF13408,PS51737, G3DSA:3.40.50.1390,IPR025827,IPR006119,IPR038109,PF07508, SSF53041,IPR011109,PTHR30461,Coil,cd00338, PF00239
MYGMYLRKSRADDPNETMDETLAKHEKLLFDLAESMHIDRSEIIVLKEVVSGESIANRPEIQRGLKLIMDGVIDQGMFAVDSQRLARGDTLDQGTILRVFSLTKVKIITPLKIINPADEFDEDYFEFDLFMGRREYKMINRRMQRGRHISVQEGYYVGSIAPYGYNRCRYNKSYSLEINQEEYHIFALMKDMAIEGMGTTNIANKLNEMGFKPRKGDRWTTATVRGILINKTNLGLIKWNSRKEVKKFDNNEIVKTRPINKEAEYYPGLHPAIITQEEYDTIIEQMKARNNAPIKKNMKIRNPLAGLIVCADCGRNMVRRPYKKNQDSLICPTSNCKNVASYVSVVEERIIESLKAILNQYKTFVDDYDHSNKDKYVSSKKTRIETLDKEIEKLHGQINKACEMLELGAYSVALFRERKKTLDDKIRSLEKEKATIEKESEDEKVEQYRKAIPKIEKAVSLYFDASIEERNKLLKSVIEKCYYKKEVPGSRWKNDAMKEFKLEIHMKV

SEQ ID NO: 5341 - protein, 508 aa, Unknown
  Description of Unknown: Integrase B5342 sequence
  PTHR30461:SF3,SM00857,G3DSA:1.10.10.2600,IPR036162,PF13408, PS51737,G3DSA:3.40.50.1390,IPR025827,IPR006119,IPR038109, PF07508,IPR011109,SSF53041,PTHR30461,Coil, PS51736,cd00338,PF00239
MKRAVFYGRYSSDRQTEQSIEGQRRVCEEFAKAEQIQIVGEYIDRATSGTSTEHREQFQKMLKDSKNGGWDYVLVYKLDRFARSRYDSAISKQQLKKNGVKVLSATERITDSPEGILIEGLLESMDEYFSRELSRKCKRGIRESIIKGHNFGGRVLYGYDRKDKRFVINEEQAVNVRRIFKSYLSGCTIQSIADQLNADGYRTNYGNEFKRYTVSDILHNDKYTGIHYIDGIEEPETCPAIISQTTFERVKEKLNQSAHRSREHTTGHTYALSGLLQCGVCGRYVCGSSVERKYFYYACRSREHAENSVHIHADKLEQVVIDALQTFFTEEQVSTLAERLYQIYTTDMDGKPDRSKRLNEIEKQIQGTVNALIACPSSKALQEKLTQLEEQKAEIEKMPILQPQLKKEHFENYFRWLALRLEHIEDRQTFFHTVIHKVLVYPEKAVIILNMTDEMADPPKREQVEAFMSNVGEVSLYPCPNCTIVKPSPSRFCDICTAPQRSNAISLI

SEQ ID NO: 5342 - protein, 508 aa, Unknown
  Description of Unknown: Integrase B5343 sequence
  PTHR30461:SF3,IPR036162,PS51737,IPR011109,PTHR30461, PS00397,PF00239,G3DSA:1.10.10.2600,IPR006119,SSF53041, cd00338,SM00857,IPR025827,IPR038109,PS51736, IPR006118,PF13408,G3DSA:3.40.50.1390,PF07508,Coil
MKKEEDTVKTAALYIRVSTDKQEELSPDSQRRLLLDYAKSHNMIVSNQHIYTENGISGRKADKRPKFQQMIAAAKSDEHPFDVILLWKFSRFARNQEESIVYKSMLRNKCHVDVVSISEPLIEGPFGGLIERIIEWMDEFYSIRLSGDGTRGMTENALRGAYQWRPPLGYRIPHHKATPEIIPEEAAIVQLIFDKYVNEKMSLFALTKYLNAQGYKTSRGKPFEKRSLEYIIQNPGYAGDIRWNRTINETNEIRDRSEWIIRPGHHPAIISKELFEQAQERFNKEYTPRNAKPSEVTKHWLSGLLKCSGCGRSLSSCVVHRKSLPDTFYFQCYGYLKGKCSTNCYVNESVIGPAVLNALKDALNNGSVSYSLRQRQTDHAPDAEIKNIEKKLSRLDSKELRAKEAYIDGIDTIEEYRANKERISQERTELEEQLAKLTQVPEEPEDNTRKMLQSISSILDILQSDSFTPQEKNAALKCNVEKITSDRANSHIDVDFYLTENPEMPANP

SEQ ID NO: 5343 - protein, 508 aa, Unknown
  Description of Unknown: Integrase B5344 sequence
  PTHR30461:SF3,IPR036162,PS51737,IPR011109,PTHR30461, PS00397,PF00239,G3DSA:1.10.10.2600,IPR006119,SSF53041, cd00338,SM00857,IPR025827,IPR038109,PS51736, IPR006118,PF13408,G3DSA:3.40.50.1390,PF07508,Coil
MNNVIIYARVSTLIQAEQGYSIDAQLEDCRKKAQELGATNIEEYIDRGKSGKFLERPELQKMLYNIKHSETNYDALIIYKLDRLSRDSMGLAYIIKILQQNNIKIISTDGAHYGTNPQDILIMQMMGSISEFENALRKERSIRGKIEKRRQGKIDKVKKYGFIYNNKKKNFDINKEEAEIIKKIFNWFTEERIGAFKIAKRINKLKIPTPLPSKNIHIWHENTIRGILRDESYAGTMHTMKYKFEKIGIKKIKKTIRPKSEWIDVTVPAIVEKITWEKAQEILDDNKNNKRNTKKLWLLQGLVLCNICKKPMYIKQTITKSKNTSNKVFYFRCRTKIYNHAGLPEKCNARSVQVHVVEDLVWNTLLKIFYSKETLEKYLKRNRKENTENILLEELITKRQTILNKKNTITDWFLDGKLEEDIVNEKLNKLNMELDTLNLRIKMLKKNTIKQPATIENLYNKFHEVNNPDREKKKEIIQSIVDKIYLERLDNTNGKYCVPKIKLNIVLY

SEQ ID NO: 5344 - protein, 508 aa, Unknown
  Description of Unknown: Integrase B5345 sequence
  PTHR30461:SF3,SM00857,G3DSA:1.10.10.2600,IPR036162,PF13408, IPR025827,G3DSA:3.40.50.1390,PS51737,IPR006119,IPR038109, PF07508,SSF53041,IPR011109,PTHR30461,Coil, PS51736,cd00338,PF00239
MTVINEYCDRAISGKTDNRPSFQRLIKDSEKGQFEAVIMYTLDRFARNRYDSAIYKAKLKKHGVRVFYAKQPMPDTPEGIILESVLEGYAEYYSENLSRNIKRGLKENALQCIATGGAGVALGYTVGEDRKYKIDPVGAKIVQEVFEMYADGMSATQIINVCNERGYKTSRGNPFNKNSLRTMLKNDKYIGVYRFMDVVVEGGVPAIISKELFDKVQAKLQHNYTARARNKAKEDYLLTTKLFCGHCGSPMVGESGTSKTGKLHFYYKCIDRKRKHVCTKKVEKKDWIEELVTRFTVQEVLTDENIDRIATKAMEIIEKESADTTYLEGLQNELKEVQKKIKNIMTAIEQGIITSTTKDRLEELESEKNEIEGRIAREEIKKPLLTKERIVYWLLSFKSGDINDMEYRRRVIDTLVNSVYIYDDGDKGRRIVLTFNVSGQNTATISCSDIACSAPPYIEDVVITVARLPREQEERFESGIFYHFWDTYSNFQKLFMGKRTTVFRILRR

SEQ ID NO: 5345 - protein, 508 aa, Unknown
  Description of Unknown: Integrase B5346 sequence
  PTHR30461:SF3,SM00857,G3DSA:1.10.10.2600,IPR036162,PF13408, PS51737,G3DSA:3.40.50.1390,IPR025827,IPR006119,IPR038109, PF07508,SSF53041,IPR011109,PTHR30461,Coil, PS51736,cd00338,PF00239
MPTVTVIQPTIAAEQNTKIRCAAYCRVSSDSEDQLNSFMAQTRYYEKAFEKSDREQLVDIYADEGITGTREDKRDEFQRMIKDCRRGKIDRIYTKSISRFARNTKDCLKNIRELKSLGITVFFEKENIDTAKLTDEMMITIMGGLAQEESISISKNLKWSYQKRFEKGIVNVFSAPFGFKLNNGVLIIDKIQARIVEEIFDMFLNGIGYQRISEICQNKYKAYKDKFSYYGIRYILSNEKYIGDSVYQKTFTTNNLPYRKIQNNGQLNKYYIQNTHEAIISIEIFEKAQKLIESRKHKNIVSESPFRGKLICANCGTKYKRKDSRNKIYWVCRKHDNLAELCMNKRVEEKFIKQSFIRLHNKLWHDYKQILVPLQTALQDLKFRKFSGKTQVMDISKEIAKLREQTHVLARLKTKGFLDEAKYIEQTTEFTAKINKLQAELKKLTRSDDEDETLDKIEILIDFFEKRDSPMTEFEETAFESIVDKIVVKSQHELEFHLIGGLKFEEKI

SEQ ID NO: 5346 - protein, 508 aa, Unknown
  Description of Unknown: Integrase B5347 sequence
  PTHR30461:SF3,cd00338,SM00857,G3DSA:1.10.10.2600,IPR036162, PF13408,PS51737,G3DSA:3.40.50.1390,IPR025827,IPR006119, IPR038109,PF07508,IPR011109,SSF53041,PTHR30461, PS51736,Coil,PF00239
MKKAIAYMRFSSPGQMSGDSLNRQRRLIAEWLKVNSDYYLDTITYEDLGLSAFKGKHAQSGAFSEFLDAIEHGYILPGTTLLVESLDRLSREKVGEAIERLKLILNHGIDVITLCDNTVYNIDSLNEPYSLIKAILIAQRANEESEIKSSRVKLSWKKKRQDALESGTIMTASCPRWLSLDDKRTAFVPDPDRVKTIELIFKLRMERRSLNAIAKYLNDHAVKNFSGKESAWGPSVIEKLLANKALIGICVPSYRARGKGISEIAGYYPRVISDDLFYAVQEIRLAPFGISNSSKNPMLINLLRTVMKCEACGNTMIVHAVSGSLHGYYVCPMRRLHRCDRPSIKRDLVDYNIINELLFNCSKIQPVENKKDANETLELKIIELQMKINNLIVALSVAPEVTAIAEKIRLLDKELRRALVSLKTLKSKGVNSFSDFYAIDLTSKNGRELCRTLAYKIFEKIIINTDNKTCDIYFMNGIVFKHYPLMKVISAQQAISALKYMVDGEVYF

SEQ ID NO: 5347 - protein, 508 aa, Unknown
  Description of Unknown: Integrase B5348 sequence
  PTHR30461:SF3,SM00857,G3DSA:1.10.10.2600,IPR036162,PF13408, PS51737,G3DSA:3.40.50.1390,IPR025827,IPR006119,IPR038109, PF07508,IPR011109,SSF53041,PTHR30461,Coil, PS51736,cd00338,PF00239
MKPLSRPSGLPPKAVIYARFSSHNQREESIEQQVAECRAYAAANDLDVIRIYHDSAKTGKNDNRTQYQRLQRDAKKGEFEFVIAYKSNRIARNMLLALSFEGEMEKLGIRVVYAKEEFGDTAAGRFALRTMMNVNQFYSENMAEDIRRGLRDNAETCKVTGALPYGYQSGENGKPVICEAQAEIVREIFKRVSGGEAFVHIANDLNMRGIKTQKGGFWNKNSFHSILNNERYTGVYIYTDIRIEGGMPQIVEKELFLKVSNRIHNKNNPQGRHRENGDYLLTGKLRCGHCGTFMMGTSGTGKSGKLHYYYACQNARKKEKECDKKNVRRDYIEHEIAAAIKEYILQGTVIDWIADCVVQYQKANREASELDMLKSQLSDTQKSIKNIMTAIENGIFTDTTKSRLLELEQAQKELTNNILIMEAASAPVPRDRVVTWLESFRGGDVDDPSYRKTLFNSFLSTAYLYDDGRCKIVFDIGGKGKELDFSVLSEEDADLSGCSYKLPSNPPT

SEQ ID NO: 5348 - protein, 508 aa, Unknown
  Description of Unknown: Integrase B5349 sequence
  cd00338,SM00857,G3DSA:1.10.10.2600,IPR036162,PS51737, G3DSA:3.40.50.1390,IPR006119,IPR038109,PF07508,IPR011109, SSF53041,PTHR30461,Coil,PF00239
MYAMYLRKSRADDKDIPLEKVLKNHYNMLTELADKLKIQIEEENVFREIETGDSISIRPKMQGLLEKVSEGLYEGVFCTELSRLCRGSKIDQEIVSSTFTAAECKIITPSKTYDLANNEFDEEMVDFGLFMSRREYKTITKRMQRGREQSVKQGKYIGSILPYGYNKEKLEGENGFRLVINEEEAHIVRLIFKWFLEDNAGASIIAKRLNQGGYPTRKGQVWSYSSVKNILTSNVVAGYLKHGERKYKKYIDTKGNVKKSRPVNAAVEYYKGLHEAIIPLSDFEKVQDILNSRKQHKSNFDLPLSNPLAGLIKCSECNRIMVKRRCAQGDFLYCSTTGCKNIGSYLNRVEEHILQALSNTLSDYEYYVDNYEQETIKEKRNVDNDLKRIEKEIEKLNKQFEKCCTFLEQDVYTIEVFKDRTSKIKDKIRILEENKKVLEKEFGSDKVIKIKKLIPKLENVLKNYNTLSIEGKNELLKSIIKEITYTKKKKSKKGSNEDYFELEITLNI

SEQ ID NO: 5349 - protein, 508 aa, Unknown
  Description of Unknown: Integrase B5350 sequence
  cd00338,SM00857,G3DSA:1.10.10.2600,IPR036162, PF13408,IPR025827,G3DSA:3.40.50.1390,PS51737, IPR006119,IPR038109,PF07508,IPR011109, SSF53041,PTHR30461,PS51736,Coil,PF00239
MRVAMYLRKSRQDEELINATVEETLAKHEMQLREFANANNIIVNKVFKEVASAGDIENRPVFNELLLEIEKGLWDAILIVSIDRLTRGNALDLERIKNTFKIMNCKIITPLKIYDPVNDDDEFFLDFNMFISSRELKIIRNRMLKGRRTAIEQGFYTASILPFGYSKTKSETGKGWILVPDEKEAPIVKYIFENYASGKRPADIIHYLNNNGMYTKKGVKWNHAKLKRVLKNNVYIGKLAIDRRKTISKIENGVVIKKLVENPDVKFVDGKHEHLIDQVTWDKVQERIRLNFVDMTPIKSELVNPLAGIVKCPHCGKTMKRNHDKKGYMKPYLICPTLRCPTVSAEFDLVEARILDELKQELKNFNVYLDNYEAEYTIQKENKDNELKLLNDTLVKKQNMYARACEMLEEGIYTKELFLSRTSQINAEIESIKNNISELELKDDNNVEVYKRMIPNLEFCINEYHNLDTQKKNMLLKSLIDEVTYSRTKRSLRNQPKDNFDLVIKLRI

SEQ ID NO: 5350 - protein, 508 aa, Unknown
  Description of Unknown: Integrase B5351 sequence
  PTHR30461:SF3,cd00338,SM00857,G3DSA:1.10.10.2600,IPR036162, PF13408,PS51737,G3DSA:3.40.50.1390,IPR025827,IPR006119, IPR038109,PF07508,IPR011109,SSF53041,PTHR30461, PS51736,Coil,PF00239
MKKAIAYMRFSSPGQMSGDSLNRQRRLIAEWLKVNSDYYLDTITYEDLGLSAFKGKHAQSGAFSEFLDAIEHGYILPGTTLLVESLDRLSREKVGEAIERLKLILNHGIDVITLCDNTVYNIDSLNEPYSLIKAILIAQRANEESEIKSSRVKLSWKKKRQDALESGTIMTASCPRWLSLDDKRTAFVPDPDRVKTIEIIFKLRMERRSLNAIAKYLNDHAVKNFSGKESAWGPSVIEKLLANKALIGICVPSYRARGKGISEIAGYYPRVISDDLFYAVQEIRLAPFGISNSSKNPMLINLLRTVMKCEACGNTMIVHAVSGSLHGYYVCPMRRLHRCDRPSIKRDLVDYNIINELLFNCSKIQPVENKKDANETLELKIIELQMKINNLIVALSVAPEVTAIAEKIRLLDKELRRASVSLKTLKSKGVNSFSDFYAIDLTSKNGRELCRTLAYKTFEKIIINTDNKTCDIYFMNGIVFKHYPLMKVISAQQAISALKYMVDGEIYF

SEQ ID NO: 5351 - protein, 508 aa, Unknown
  Description of Unknown: Integrase B5352 sequence
  cd00338,SM00857,G3DSA:1.10.10.2600,IPR036162,PS51737, G3DSA:3.40.50.1390,IPR006119,IPR038109,PF07508,SSF53041, IPR011109,PTHR30461,Coil,PF00239
MYAMYLRKSRADDKDIPLEKVLKNHYNMLTELADKLKIQIEEENVFREIETGDSISIRPKMQDLLEKVSEGLYEGVFCTELSRLCRGSKIDQEIVSSTFTAAECKIITPSKTYDLANNEFDEEMVDFGLFMSRREYKTITKRMQRGREQSVKQGKYIGSILPYGYNKEKLEGENGFRLVINEEEAHIVRLIFKWFLEDNAGASIIAKRLNQGGYPTRSGRVWSYSSVKNILTSNVVAGYLKHGERKYKKYIDTKGNVKKSRPVNKDAEYYKGLHEAIIPLHEFEKVQDILNSRKQHKSNFDLPLSNPLAGLIKCSECGRVLIKRPCPQGNFLYCPTTGCKNMGSYLNRVEEHILQALSNTLSDYEYYVDNYEQETIKEKRNVDNDLKRIEKEIEKLNKQFEKCCTFLEQDVYTIEVFKDRTSKIKDKIRILEENKKVLEKEFGSDKVIKIKKLIPKLENVLKNYNTLSIEGKNELLKSIIKEITYTKKKKSKKGSNEDYFELEITLNI

SEQ ID NO: 5352 - protein, 508 aa, Unknown
  Description of Unknown: Integrase B5353 sequence
  PTHR30461:SF3,cd00338,SM00857,G3DSA:1.10.10.2600, IPR036162,PF13408,PS51737,G3DSA:3.40.50.1390, IPR025827,IPR006119,IPR038109,PF07508, IPR011109,SSF53041,PTHR30461,PS51736,Coil,PF00239
MKKAIAYMRFSSPGQMSGDSLNRQRRLITEWLKVNSDYYLDTVTYEDLGLSAFNGKHAQSGAFSEFLDAIEHGYILPGTTLLVESLDRLSREKVGEAIERLKLILNHGIDVITLCDNTVYNIDSLNEPYSLIKAILIAQRANEESEIKSSRVKLSWKKKRQDALESGTIMTASCPRWLSLDDKRTAFVPDPDRVKTIELIFKLRMERRSLNAIAKYLNDHAVKNFSGKESAWGPSVIEKLLANKALIGICVPSYRARGKGISEIAGYYPRVISDDLFYAVQEIRLAPFGISNSSKNPMLINLLRTVMKCEACGNTMIVHAVSGSLHGYYVCPMRRLHRCDRPSIKRDLVDYNIINELLFNCSKIQPVENKKDANETLELKIIELQMKINNLIVALSVAPEVTAIAEKIRLLDKELRRASVSLKTLKSKGVSSLGDFHAIDLTSKNGRELCRTLAYKIFEKIIINTDNKTCDIYFMNGIVFKHYPLMKVISAQQAISTLKYMVDGEIYF

SEQ ID NO: 5353 - protein, 508 aa, Unknown
  Description of Unknown: Integrase B5354 sequence
  SM00857,G3DSA:1.10.10.2600,IPR036162,PF13408,PS51737, G3DSA:3.40.50.1390,IPR025827,IPR006119,IPR038109,PF07508, SSF53041,IPR011109,PTHR30461,Coil,PS51736, cd00338,PF00239
MAKPEVSELAVVYARYSSHSQGEQSIEGQLSNARDYAAAHGYTLVHEYVDRAKSGRTDNRAEFQQMLKDTAKRQFSVIILWKVDRFGRNREEIAINKMKCRKNGVRVEYVAETIPDSPEGVILESVLEGFAEYYSLQLSQNIRRGRAESAEKCQSLGGNRPLGYKTGPDKKFVIDENTAPTVKMIFTMYADGKTVTEIVDKLNEMGLRTLRGGPFTKNSLHSILKNKKYIGIYEYQGREIKDGVPRIIEDDVFNKVQEMLKINKRAPAKTWSRADYILTDKLFCGKCGALMFGESGTSKTGAKHNYYICSNKKRFRSCDKKAVRQADIEGTVLNATHELLQDDELLDYIVDRTWEYYLAQDNSQEELRNLQRQLAQTDTAISNLIRAIEAGILTEETKKRMDELTQQKADLKASIADREIARGFHLKKSHIAYYLRSLRDADWSDKEAQKRLIQTFVNAVFVYDDHITLTYNFSGDKNTITLRDMQRFEDGEEFGCRASRSTITGHQF

SEQ ID NO: 5354 - protein, 508 aa, Unknown
  Description of Unknown: Integrase B5355 sequence
  PTHR30461:SF3,cd00338,SM00857,G3DSA:1.10.10.2600,IPR036162, PF13408,IPR025827,PS51737,G3DSA:3.40.50.1390,IPR006119, IPR038109,PF07508,SSF53041,IPR011109,PTHR30461, PS51736,Coil,PF00239
MKKENEIRAVVYARYSSHSQTEQSIEGQISAAQVYAKAKGYTIVKEYVDRAKTGKNDNREAFQQMLSDTAKHEFSVIIVWKVDRFGRNREEITFNKYRCKKNDVRVEYIAEAVPDSPEGVILESVLEGMAEYYSLQLAQNIRRGIRASAEKCQAIGGHCSLGYAIDPRTKKYVIDPDTAPTVQLIFEKYAEGYTGMDIVRLLNEKGLRTVRGKPFTKNSLWTILKNERYAGVYLFKDEVRVEGGIPALVSRETFDKVQEMLEINHRSPVNTWNRATYLLTDKLFCGHCGSKMVGECGTSRTGATYNYYICAGKKRERNCSKKAVRQDWIEKVVLQQIRRVLFDQEFLEFIAHKAYTYYLEEKKKLDQSAAIKAQLSSVESSIDNLIRAMEAGIFSASTKSRLDDLENQKAALTRTLAEIKLSEESFDLTEDRILFFLESMRGLDMDDVDSRKRLVKTFVNAVYLYDDKITLAFNFTDSCEKPEIIELTDIADGVVEKFVHRASCSTMV

SEQ ID NO: 5355 - protein, 508 aa, Unknown
  Description of Unknown: Integrase B5356 sequence
  SM00857,G3DSA:1.10.10.2600,IPR036162,PS51737,G3DSA:3.40.50.1390, IPR006119,IPR038109,PF07508,IPR011109,SSF53041, PTHR30461,Coil,cd00338,PF00239
MYAMYLRKSRADDKDIPLEKVLKNHYNMLTELADKLKIQIEEENVFREIETGDSISIRPKMQDLLEKVSEGLYEGVFCTELSRLCRGSKIDQEIVSSTFTAAECKIITPSKTYDLANNEFDEEMVDFGLFMSRREYKTITKRMQRGREQSVKQGKYIGSILPYGYNKEKLEGENGFRLVINEEEAHIVRLIFKLFLEDNAGASIIAKRLNQGGYPTRSGRVWSYSSVKNILTSNVVAGYLKHGERKYKKYIDTKGNVKKSRPVNAAVEYYKGLHEAIIPLHEFEKVQDILNSRKQHKSNFDLPLSNPLAGLIKCSECNRIMIKRRCAQGDFLYCSTTGCKNIGSYLNRVEEHILQALSNTLSDYEYYVDNYEQEMIKEKRNVDNDLKRIEKEIEKLNKQFEKCCTFLEQDVYTIEIFKDRTSKIKDKIKILEENKKVLEKEFGSDKVIKIKKLIPELENVLKNYNTLSIEGKNELLKSIIKEAIYSKKKKCKKGSNEDYFELEITLNI

SEQ ID NO: 5356 - protein, 508 aa, Unknown
  Description of Unknown: Integrase B5357 sequence
  PTHR30461:SF3,cd00338,SM00857,G3DSA:1.10.10.2600, IPR036162,PF13408,IPR025827,PS51737, G3DSA:3.40.50.1390,IPR006119,IPR038109,PF07508, SSF53041,IPR011109,PTHR30461,PS51736,Coil,PF00239
MYEDIKTACLYVRFSSHNQTEQSIEGQTRVCRDFCKRHNIRIVEIYADRATSASKDIEKRVQFLKMIKDSEKGLFDAVIVYKLDRFARSRYDSATYKYRLKRNGVQLISATENISNDPEGIILESVLEGMAEFYSAELSQKINRGMRESAYKHNSIGGAVPLGYKIEDKKLVIDPKTAPIVKEAFEKYADGETVAEICRQFNARGYKTSKGTAFGKSSFTKIFRNERYIGVYTFHDYRAEDAIPAIIDKDLWDRVQLRVGKIKNAPARNKAKVVYLLSGKIFCGHCGSKMNGNCNAGNYCYYQCYGKKNGNVDCKKKNIRKEFIERLVAQDALSLLTDEYIEQIATIACEKNQHEIELDSALPTIRDRIHQVDLSLNHLLKAIESGSAPDMLVKRMGELEKEKKDLQAQAKKESEDIVELDKAQVIYWLEQFRGGSIEDEEFCRMLIDLFVNSVTVWDEDDNTYKVTVAYNLTSLPTKTYRLNKGGTLSDFASNAPGMKNTDIPYISS

SEQ ID NO: 5357 - protein, 508 aa, Unknown
  Description of Unknown: Integrase B5358 sequence
  cd03768,PTHR30461:SF3,SM00857,IPR036162,PF13408, IPR025827,G3DSA:3.40.50.1390,IPR006119,PF07508,IPR011109, SSF53041,PTHR30461,PS51736,Coil,PF00239
MKNIAIYSRKSRETDKGESISTQIQLCKEYFLRDNIDCKFETFQDEGFSGGNTNRPEFQRMMLLAKHKQFDIIACYKVDRISRNIVDFMNTFDTLEKHNVSLVSISEGFDPTTPVGRIMMTMLAGFAEMERMNTAQRVKDNLKALAKLGRWSGGTPPTGYRSVRVENGDKTAMYLELNNEWKDKIEFMYKSVSEGNSIRHLAKILDMPNKTIANIISNPTYCKSDETSKKYLESIGFEVFGELDGYGYLSYNRRPRGKNGKKKFNSDEKFVAVSRHEGVVDSSLWISANEKVSTRADEAKPRISSNSFLAHIVKCSCGSGMYIEPGNRRKDGTRNYYFCCSRRKINKDLCSNGWLNAANLENDILQILKKSSEDKSILENYIDSKPSPTIDSDISNTKRQILSNTNRLNSLTEKFILLENSAAKLIANKMNEISALNDKLNSELLNLERKKLLNSIDNVNVDKIQIYICDLLSNWETLSIEDKQTAMQNIFDSILWDGKKGFNIKLNI

SEQ ID NO: 5358 - protein, 508 aa, Unknown
  Description of Unknown: Integrase B5359 sequence
  PTHR30461:SF3,cd00338,SM00857,G3DSA:1.10.10.2600,IPR036162, PF13408,PS51737,IPR025827,G3DSA:3.40.50.1390,IPR006119, IPR038109,PF07508,IPR011109,SSF53041, PTHR30461,PS51736,Coil,PF00239
MKKAIAYMRFSSPGQMSGDSLNRQRRLITEWLKVNSDYYLDTVTYEDLGLSAFNGKHAQSGAFSEFLDAIEHGYILPGTTLLVESLDRLSREKVGEAIERLKLILNHGIDVITLCDNTVYNIDSLNEPYSLIKAILIAQRANEESEIKSSRVKLSWKKKRQDALESGTIMTASCPRWLSLDDKRTAFVPDPDRVKTIELIFKLRMERRSLNAIAKYLNDHAVKNFSGKESAWGPSVIEKLLANKALIGICVPSYRARGKGISEIAGYYPRVISDDLFYAVQEIRLAPFGISNSSKNPMLINLLRTVMKCEACGNTMIVHAVSGSLHGYYVCPMRRLHRCDRPSIKRDLVDYNIINELLFNCSKIQPVENKKDANETLELKIIELQMKINNLIVALSVAPEVTAIAEKIRLLDKELRRASVSLKTLKSKGMSSLGDFHAIDLTSKNGRELCRTLAYKIFEKIIINTDNKTCDIYFMNGIVFKHYPLMKVISAQQAISTLKYMVDGEIYF

SEQ ID NO: 5359 - protein, 508 aa, Unknown
  Description of Unknown: Integrase B5360 sequence
  SM00857,G3DSA:1.10.10.2600,IPR036162,PS51737,G3DSA:3.40.50.1390, IPR006119,IPR038109,PF07508,IPR011109,SSF53041, PF00239,PTHR30461,Coil,cd00338
MYAMYLRKSRADDKDIPLEKVLKNHYNMLTELADKLKIQIEEENVFREIETGDSISIRPKMQDLLEKVSEGLYEGVFCTELSRLCRGSKIDQEIVSSTFTAAECKIITPSKTYDLANNEFDEEMVDFGLFMSRREYKTITKRMQRGREQSVKQGKYIGSILPYGYNKEKLDGENGFKLVINEEEAHIVKLIFKWFLKDNVGASIIAKRLNQGGYPTRSGRVWSYSSVKNILTSNVVAGYLKHGERKYKKYIDTKGNVKKSRPVNKDAEYYKGLHEAIIPLHEFEKVQDILNSRKQHKSNFDLPLSNPLAGLIKCSECNRIMVKRPCPQGNFLYCPTTGCKNMGSYLDRVEEHILQALSNTLSDYEYYVDNYEQETIKEKRNVDNDLKRIEKEIEKLNKQFEKCCTFLEQDVYTIEVFKDRTSKIKDKIRILEENKKVLEKEFGDDKVIKIKKLIPELENVLKNYNTLSIEGKNELLKSIIKEAIYSKKKKCKKGSGEDYFELEITLNI

SEQ ID NO: 5360 - protein, 508 aa, Unknown
  Description of Unknown: Integrase B5361 sequence
  SM00857,G3DSA:1.10.10.2600,IPR036162,PS51737, G3DSA:3.40.50.1390,IPR006119,IPR038109,PF07508, IPR011109,SSF53041,PTHR30461,Coil, cd00338,PF00239
MYAMYLRKSRADDKDIPLEKVLKNHYNMLTELADKLKIQIEEENVFREIETGDSISIRPKMQDLLEKVSEGLYEGVFCTELSRLCRGSKIDQEIVSSTFTAAECKIITPSKTYDLANNEFDEEMVDFGLFMSRREYKTITKRMQRGREQSVKQGKYIGSILPYGYNKEKIEGENGFKLVINEEESHIVRLIFKWFLEDNVGASIIAKRLNQRGYPTRKGQVWSYSSVKNILTNNVVSGYLKHNNRKYKKYIDAKGNVKKSRPVNQNAEYYKGLHEAIIPLADFEKVQNILGTRKQHKSNFDLPLSNPLAGLMKCSECNRVMIKRRCAQGDFLYCPTTGCENKGSYLHRVEENILQALSDTLSDYNYYLDNYEQEMIKEKRNVDNDLERIEKEIEKLNKQFEKCCTFLEQDVYTVEVFQDRTKKIKDKIKILEENKKVLEKEFKNDKVVKIKKSIPKLENVLKNYNTLNIEGKNELLKSIIKEVIYSKKKKCKKGSDEDYFELEITLNI

SEQ ID NO: 5361 - protein, 508 aa, Unknown
  Description of Unknown: Integrase B5362 sequence
  PTHR30461:SF3,cd00338,SM00857,G3DSA:1.10.10.2600,IPR036162, PF13408,PS51737,IPR025827,G3DSA:3.40.50.1390,IPR006119, IPR038109,PF07508,IPR011109,SSF53041,PTHR30461, PS51736,Coil,PF00239
MKKAIAYMRFSSPSQMSGDSLNRQRRLITEWLKVNSDYYLDTVTYEDLGLSAFNGKHAQSGAFSEFLDAIEHGYILPGTTLLVESLDRLSREKVGEAIERLKLILNHGIDVITLCDNTVYNIDSLNEPYSLIKAILIAQRANEESEIKSSRVKLSWKKKRQDALESGTIMTASCPRWLSLDDKRTAFVPDPDRVKTIELIFKLRMERRSLNAIAKYLNDHAVKNFSGKESAWGPSVIEKLLANKALIGICVPSYRARGKGISEIAGYYPRVISDDLFYAVQEIRLAPFGISNSSKNPMLINLLRTVMKCEACGNTMIVHAVSGSLHGYYVCPMRRLHRCDRPSIKRDLVDYNIINELLFNCSKIQPVENKKDANETLELKIIELQMKINNLIAALSVAPEVTAIAEKIRVLDKELRRASVSLKTLKSKAVSSLGDFHAIDLTSKNGRELCRTLAYKTFEKIIINTDNKTCDIYFMNGIVFKHYPLMKTISAQQAISTLKYMVDGEVYF

SEQ ID NO: 5362 - protein, 508 aa, Unknown
  Description of Unknown: Integrase B5363 sequence
  PTHR30461:SF3,IPR036162,PS51737,IPR011109,PTHR30461, PS00397,PF00239,G3DSA:1.10.10.2600,IPR006119,SSF53041, cd00338,SM00857,IPR025827,IPR038109,PS51736, IPR006118,PF13408,G3DSA:3.40.50.1390,PF07508,Coil
MKKEEDTVKTAALYIRVSTDKQEELSPDSQRRLLLDYAKSHNMIVSNQHIYTENGISGRKADKRPKFQQMIAAAKSDEHPFDVILLWKFSRFARNQEESIVYKSMLRNKCHVDVVSISEPLIEGPFGGLIERIIEWMDEFYSIRLSGDVTRGMTENALRGAYQCRPPLGYRIPHHKATPEIIPEEAAIVQLIFDKYVNEKMSLFALTKYLNAQGYKTSRGKPFEKRSLEYIIQNPGYAGDIRWNRTISETNEVRDRSEWIIRPGHHPAIISKELFEQAQERFFKEYTPRNAKPSEVTKHWLSGLLKCSGCGRSLSSCVVHRKSLPDTFYFQCYGYLKGKCSTNCYVSESVIGPAVLNALKDALNNGSVSYSLRQRQTDHAPDAEIKNIEKKLSRLDSKELRAKEAYIDGIDTIEEYRANKERINQERVELEEQLSKLTQKPDDPEDNTRKMLQSISSILDILQSDSFTPQEKNAALKSIVEKITYDRANSHIDVDFYLAENPGMPANL

SEQ ID NO: 5363 - protein, 508 aa, Unknown
  Description of Unknown: Integrase B5364 sequence
  PTHR30461:SF3,cd00338,SM00857,G3DSA:1.10.10.2600,IPR036162, PF13408,PS51737,G3DSA:3.40.50.1390,IPR025827,IPR006119, IPR038109,PF07508,IPR011109,SSF53041,PTHR30461, PS51736,Coil,PF00239
MKKAIAYMRFSSPGQMSGDSLNRQRRLIAEWLKVNSDYYLDTITYEDLGLSAFKGKHAQSGAFSEFLDAIEHGYILPGTTLLVESLDRLSREKVGEAIERLKLILNHGIDVITLCDNTVYNIDSLNEPYSLIKAILIAQRANEESEIKSSRVKLSWKKKRQDALESGTIMTASCPRWLSLDDKRTAFVPDPDRVKTIELIFKLRMERRSLNAIAKYLNDHAVKNFSGKESAWGPSVIEKLLANKALIGICVPSYRARGKGISEIAGYYPRVISDDLFYAVQEIRLAPFGISNSSKNPMLINLLRTVMKCEACGNTMIVHAVSGSLHGYYVCPMRRLHRCDRPSIKRDLVDYNIINELLFNCSKIQPVENKKDANETLELKIIELQMKINNLIVALSVAPEVTAIAEKIRLLDKELRRASVSLKTLKSKGVNSFSDFYAIDLTSKNGRELCRTLAYKTFEKIIINTDNETCDIYFMNGIVFKHYPLMKVISAQQAISALKYMVDGEIYF

SEQ ID NO: 5364 - protein, 508 aa, Unknown
  Description of Unknown: Integrase B5365 sequence
  PTHR30461:SF3,IPR036162,PS51737,IPR011109,PTHR30461, PS00397,PF00239,G3DSA:1.10.10.2600,IPR006119,SSF53041, cd00338,SM00857,IPR025827,IPR038109,PS51736, IPR006118,PF13408,G3DSA:3.40.50.1390,PF07508,Coil
MKKEEDTVKTAALYIRVSTDKQEELSPDSQRRLLLDYAKSHNMIVSNQHIYTENGISGRKADKRPKFQQMIAAAKSDEHPFDVILLWKFSRFARNQEESIVYKSMLRNKCHVDVVSISEPLIEGPFGGLIERIIEWMDEFYSIRLSGDVTRGMTENALRGAYQCRPPLGYRIPHHKATPEIIPEEAAIVQLIFDKYVNEKMSLFALTKYLNAQGYKTSRGKPFEKRSLEYIIQNPGYAGDIRWNRTINETNEIRDRSEWIIRPGHHPAIISKELFEQAQERFNKEYTPRNAKPSEVTKHWLSGLLKCSGCGRSLSSCVVHRKSLPDTFYFQCYGYLKGKCSTNCYVNESVIGPAVLNALKDALNNGSVSYSLRQRQTDHAPDAEIKNIEKKLSRLDSKELRAKEAYIDGIDTIEEYRANKERINQERTELEEQLEKLTRKPENPEDNTRKMLQSISSILDILQSDAFTPQEKNAALKSIVEKITYDRANSHIDVDFYLAENPEMPANP

SEQ ID NO: 5365 - protein, 508 aa, Unknown
  Description of Unknown: Integrase B5366 sequence
  PTHR30461:SF3,SM00857,G3DSA:1.10.10.2600,IPR036162,PF13408, PS51737,IPR025827,G3DSA:3.40.50.1390,IPR006119,IPR038109, PF07508,IPR011109,SSF53041,PTHR30461,Coil, cd00338,PF00239
MKAVIYARYSPGPNQKDKSVEEQIADCRQFARENDIMIVGDYADRKKTGRNDNRAEFQKMLKDSAKGLFDAVIVWKIDRFGRNREEIAINKVKLRRNGVRVMYAKEHIPDGPEGIILESTLEGLAEYYSANLSQNIMRGMRGVAMKGQSTGGGGHSLGYYVDQDKYFQIDEHGAQIVRQIFEMYSSGKQASEIIKELNGRGLKTANGKPFNHNSIARILSNRRYIGEYRWHDILIPDGMPRIIDDETFERVQKRLEKNKKAPARKIQAGSEEEFLLTTKLFCGHCGATMIGDSGTGKSGKKYSYYTCSTRKRKDGRKCDKKSVRKDELERYIVEQTVAHVLVDDVIEYIADKVVELQRKELQDTSMLDYYKSSLRDTEKSLKNIVTAIEQGIFTPTTKDRLLELEAEKADLEECIQKEEIARPTFSKEQIIFFLERFKGGDVNDQSYQRQIIDTFVSRIWIYDDKTVITYNYSGEGNTITLEAAEKAADEAAGGCSAQLPPSPPRKSG

SEQ ID NO: 5366 - protein, 508 aa, Unknown
  Description of Unknown: Integrase B5367 sequence
  PTHR30461:SF3,SM00857,G3DSA:1.10.10.2600,IPR036162,PS51737, G3DSA:3.40.50.1390,IPR006119,IPR038109,PF07508,SSF53041, IPR011109,PTHR30461,Coil,PS51736,cd00338, PF00239
MICAMYLRKSRADLTAEARGEGETLARHRETLMRVAVQQNLIVTDVYAEVVSGDTIAERPEMQRLLRAIERGDYDAVLCMDIDRLGRGDGGDQSIILKALKYSGTIVITPYKNYDTRREMDEEFFEYSQFLARGEYKRIKRRMWAGRVAAAKEGKWLSPKAPFGYRRVRLEHTKGWTLVPDPAEADAVRSMFEWYGSGEVGKNIIANRINAMGFRTLSGVNFTSSTIANILNNPVYLGKIRWCNRRKRVDMVNGMEVVTRPRSDECMIIDGLHPALIDNDAWDAVQARLATHQDSHVKKSANIVNPLASIMVCGICGKSMLFTPEYTRNDIVATYRCRTAGCPTSGINVQCVYDALLYTLKSWSAYVKEDEPSASKSPKNQSAIVAATAQLAQLNKQLTRLQDLLETGVYSAETYLARSKVLNDRINDTISEIDRLKQLQATDERAAIIRLKPKIDHVLDVWDISTAEDQNTLLRQVLRKVVYHKTHRCFRNDNPADFLSLDFFPVLE

SEQ ID NO: 5367 - protein, 508 aa, Unknown
  Description of Unknown: Integrase B5368 sequence
  PTHR30461:SF3,SM00857,G3DSA:1.10.10.2600,IPR036162,PF13408, PS51737,G3DSA:3.40.50.1390,IPR025827,IPR006119,IPR038109, PF07508,IPR011109,SSF53041,PTHR30461,Coil, PS51736,cd00338,PF00239
MYEDIKTACLYVRFSSHNQTEQSIEGQTRVCQEFCQRHNIKIVEIYADRATSASKNTEKRVSFLKMIKDSEKGLFDAVVVYKLDRFARSRYDSATYKYRLKKNGVQLISATENITNSPEGIILESVLEGMAEFYSAELSQKINRGMRESAYKHNSIGGALPLGYKTVDKKLVIDEKTAPIVREAFTMYAEGHSVAEICRIFNARGYKTSKGTEFGKNSFSKIFRNERYIGTYTYHDYRAEDAIPAIIDRDLWDRVQLRLKKVKNSPGRNKAKRVYLLSGKLFCGHCGESMNGNCNGNKYAFYECYGKKSKYNGCQKRNLRKEYIERLIAQDALSLLTDENIEHLATVACERNDYEIETGSPIPVIRDRIHQTEVSINNLTKAIETGATPDALVKRMVELEREKKDLSAQLKKEEELIVPLEKEQVIFWLEKFKDGDIEDEEFCRLLIDLFVNSVTVWDEDNDMLKVTIAYNLTSLPTKTYRLTKDGTLSDFTGNAPALQLVQLGVFLL

SEQ ID NO: 5368 - protein, 508 aa, Unknown
  Description of Unknown: Integrase B5369 sequence
  SM00857,G3DSA:1.10.10.2600,IPR036162,PS51737,G3DSA:3.40.50.1390, IPR006119,IPR038109,PF07508,IPR011109,SSF53041, PTHR30461,Coil,cd00338,PF00239
MYAMYLRKSRADDKDIPVEKVLKNHYNMLTELADKLKIQIEEENVFREIETGDSISIRPKMQDLLEKVSEGLYEGVFCTELSRLCRGSKIDQEIVSSTFTAAECKIITPSKTYDLANNEFDEEMVDFGLFMSRREYKTITKRMQRGREQSVKQGKYIGSILPYGYNKEKLEGENGFKLVINEEEAHIVKLIFKWFLEDNVGASIIAKRLNQGGYPSRSGRVWSYSSVKNILTSNVVAGYLKHGERKYKKYIDTKGNVKKSRPVNKDAEYYKGLHEAIIPLHEFEKVQDILNSRKQHKSNFDLPLSNPLAGLIRCSECNRIMVKRRCAQGDFLYCSTTGCKNIGSYLNRVEENILHALSSTLSDYEYYVDNYEQEMIKEKRNVDNDLKRIENEINKLNKQFEKCCTFLEQDVYTIEIFKDRTSKIKDKIKILEENKKVLEKEFGSDKVIKIKKLIPELENVLKNYNTLSIEGKNELLKSIIKEITYTKKKKSKKGSNEDYFELEITLNI

SEQ ID NO: 5369 - protein, 508 aa, Unknown
  Description of Unknown: Integrase B5370 sequence
  PTHR30461:SF3,SM00857,G3DSA:1.10.10.2600,IPR036162,PS51737, G3DSA:3.40.50.1390,IPR006119,IPR038109,PF07508,IPR011109, SSF53041,PTHR30461,PS51736,cd00338,PF00239
MKKAIAYMRFSSPGQMSGDSLNRQRRLIDEWLKVNSDYYLDTITYEDLGLSAFKGKHAQSGAFSEFLDAIEHGYILPGTTLLVESLDRLSREKVGEAIERLKLILNHGIDVITLCDNTVYNIDSLNDPYSLIKAILIAQRANEESEIKSSRVKLSWKKKRQDALESGTIMTASCPRWLSLDDKRTAFIPDPDRVKTIELIFKLRMERRSLNAIAKYLNDHAVKNFSGKESAWGPSVIEKLLANKALIGICVPSYRARGKGISEIAGYYPRVISDDLFYAVQEIRLAPFGISNSSKNPMLINLLRTVMKCEACGNTMIVHAVSGSLHGYYVCPMRRLHRCGRPSIKRDLVDYNIINELLFNCSKIQPVENKKDANETLELKIIELHMKINNLIAALSVAPEVTAIAEKIRVLDKELRRASVSLKTLKSKAVSSLGDFHAIDLTSKNGRELCRTLAYKTFEKIIINTDNKTCDIYFMNGIVFKHYPLMKVISAQQAISALKYMVDGEVYF

SEQ ID NO: 5370 - protein, 508 aa, Unknown
  Description of Unknown: Integrase B5371 sequence
  PTHR30461:SF3,cd00338,SM00857,G3DSA:1.10.10.2600,IPR036162, PF13408,PS51737,IPR025827,G3DSA:3.40.50.1390,IPR006119, IPR038109,PF07508,IPR011109,SSF53041,PTHR30461, PS51736,Coil,PF00239
MKKAIAYMRFSSPGQMSGDSLNRQRRLIAEWLKVNSDYYLDTITYEDLGLSAFKGKHAQSGAFSEFLDAIEHGYILPGTTLLVESLDRLSREKVGEAIERLKLILNHGIDVITLCDNTVYNIDSLNEPYSLIKAILIAQRANEESEIKSSRVKLSWKKKRQDALESGTIMTASCPRWLSLDDKRTAFVPDPDRVKTIELIFKLRMERRSLNAIAKYLNDHAVKNFSGKESAWGPSVIEKLLANKALIGICVPSYRARGKGISEIAGYYPRVISDDLFYAVQEIRLAPFGISNSSKNPMLINLLRTVMKCEACGNTMIVHAVSGSLHGYYVCPMRRLHRCDRPSIKRDLVDYNIINELLFNCSKIQPVENKKDANETLELKIIELQMKINNLIVALSVAPEVTAIAEKIRLFDKELRRASVSLKTLKSKGVNSFSDFYAIDLTSKNGRELCRTLAYKTFEKIIINTDNKTCDIYFMNGIVFKHYPLMKVISAQQAISALKYMVDGEIYF

SEQ ID NO: 5371 - protein, 508 aa, Unknown
  Description of Unknown: Integrase B5372 sequence
  PTHR30461:SF3,SM00857,G3DSA:1.10.10.2600,IPR036162,PS51737, G3DSA:3.40.50.1390,IPR006119,IPR038109,PF07508,SSF53041, IPR011109,PTHR30461,Coil,PS51736,cd00338, PF00239
MICAMYLRKSRADLTAEARGEGETLARHRETLMRVAVQQNLIVTDVYAEVVSGDTIAERPEMQRLLRAIERGDYDAVLCMDIDRLGRGDGGDQSIILKALKYSGTIVITPYKNYDTRREMDEEFFEYSQFLARGEYKRIKRRMWAGRVAAAKEGKWLSPKAPFGYRRMRLEHTKGWTLVPDPAEADAVRSMFEWYGSGEVGKNIIANRINAMGFRTLSGVNFTSSTIANILNNPVYLGKIRWCNRRKRVDMVNGMEVVTRPRSDECMIIDGLHPALIDNDAWDAVQARLATHQDSHVKKSANIVNPLASIMVCGICGKSMLFTPEYTRNDIVATYRCRTAGCPTSGINVQCVYDALLYTLKSWSAYVKEDEPSASKPPKNQSAIVAATTQLAQLNKQLTRLQDLLETGVYSAETYLARSKVLNDRINDTISEIDRLKQLQATDERAAIIRLKPKIDHVLDVWEISTPEDQNTLLRQVLRKVVYHKTHRCFRNDNPADFLSLDFFPVLE

SEQ ID NO: 5372 - protein, 508 aa, Unknown
  Description of Unknown: Integrase B5373 sequence
  PTHR30461:SF3,SM00857,G3DSA:1.10.10.2600,IPR036162,PF13408, IPR025827,G3DSA:3.40.50.1390,PS51737,IPR006119,IPR038109, PF07508,SSF53041,IPR011109,PTHR30461,Coil, PS51736,cd00338,PF00239
MKKAIAYMRFSSPGQMSGDSLNRQRRLIAEWLKVNSDYYLDTITYEDLGLSAFKGKHAQSGAFSEFLDAIEHGYILPGTTLLVESLDRLSREKVGEAIERLKLILNHGIDVITLCDNTVYNIDSLNEPYSLIKAILIAQRANEESEIKSSRVKLSWKKKRQDALESGTIMTASCPRWLSLDDKRTAFVPDPDRVKTIELIFKLRMERRSLNAIAKYLNDHAVKNFSGKESAWGPSVIEKLLANKALIGICVPSYRARGKGISEIAGYYPRVISDDLFYAVQEIRLAPFGISNSSKNPMLINLLRTVMKCEACGNTMIVHAVSGSLHGYYVCPMRRLHRCDRPSIKRDLVDYNIINELLFNCSKIQPVENKKDANETLELKIIELQMKINNLIVALSVAPEVTAIAEKIRLLDKELRRASVSLKTLKSKGVNSFSDFYTIDLTSKNGRELCRTLAYKTFEKIIINTDNKTCDIYFMNGIVFKHYPLMKVISAQQAISALKYMVDGEIYF

SEQ ID NO: 5373 - protein, 508 aa, Unknown
  Description of Unknown: Integrase B5374 sequence
  SM00857,G3DSA:1.10.10.2600,IPR036162,PS51737,G3DSA:3.40.50.1390, IPR006119,IPR038109,PF07508,IPR011109,SSF53041, PF00239,PTHR30461,Coil,cd00338
MEEILIYLRKSRQDEPSETIEQVLARHEKQLQEYAVKTYGYRIKEENIYREVVSGETIDDRPKINELFKRMEDESVTGVLVIEPQRLTRGDMLDCGTVVHIFRYTNTLVVTPSKTYNLADKYDRKFFEMELTRGNDYLEYVKEILARGRNASVHEGNYIASVAPFGYDKVKEGKSYTLAINEKESEYVRMIFDLYIQGNGASRIAKTINDLGARTKTGNIFKESAIRDILKNEIYIGKIRWGHKLVVKAYENGKIVKKRPRNEDYELIQGKHAPIISEETFEKAKIRKGKTTREGYSTELTNQFAGLIKCKKCGKAIAMRPQNKHREKSLSNRYYCKSGIYCTTKSCNEDVVVNMVISSLKATLNDFRTKIDNYAAEHETGLETLINALENDLKKLEVKQNELYDFLESGIYTKDVFIMRNEKLGQERERLQKALEKAKTEIPTLKEMKTKYTNLHTAIDMIQDDSINAKTKNNFLKEVIDVIYYTKDTATPNHGDDSKNIKLEIILK

SEQ ID NO: 5374 - protein, 508 aa, Unknown
  Description of Unknown: Integrase B5375 sequence
  PTHR30461:SF3,IPR036162,PS51737,IPR011109, PTHR30461,PS00397,PF00239,G3DSA:1.10.10.2600, IPR006119,SSF53041,cd00338,SM00857,IPR025827,IPR038109 ,PS51736,IPR006118,PF13408,G3DSA:3.40.50.1390,PF07508,Coil
MNNVIIYARVSTLIQAEQGYSIDAQLEDCRKKAQELGATNIEEYIDRGKSGKFLERPELQKMLYNIKHSEMKYDALIIYKLDRLSRDSMGLAYIIKILQQNNIKIISTDGAHYGTNPQDILIMQMMGSISEFENALRKERSIRGKIEKRRQGKIDKVKKYGFIYNDKKKNFDINKEEAEIIKKIFNWFTEERIGAFKIAKRINKLKIPTPLPSKNIHIWHENTIRGILRDESYAGTMHTMKYKFEKISIKKIKKTIRPKSEWIDVSVPAIVEEITWEKAQEILNDNKNNKRNTKNIWLLQGLVLCNICKKPMYIKQTITKSKNTNNKVFYFRCRTKIYNHAGLPEKCDARSVQVNVVEDLVWNTLLKIFYSKETLEKYLKRNRKENTENILLEELITKRQTLLNKKNTITDWFLDGKLEEDIATEKLNKLNMELDTLNLRIKMLKKNATKQPATIESLYNKFHEVNNPDREKKKEIIQSIVDKIYLERLDDTNGKYCVPKLKLNIILY

SEQ ID NO: 5375 - protein, 508 aa, Unknown
  Description of Unknown: Integrase B5376 sequence
  cd00338,SM00857,G3DSA:1.10.10.2600,IPR036162,PS51737, G3DSA:3.40.50.1390,IPR006119,IPR038109,PF07508,IPR011109, SSF53041,PTHR30461,Coil,PF00239
MYAMYLRKSRADDKDIPLEKVLKNHYNMLTELADKLKIQIEEENVFREIETGDSISIRPKMQDLLEKVSEGLYEGVFCTELSRLCRGSKIDQEIVSSTFTAAECKIITPSKTYDLANNEFDEEMVDFGLFMSRREYKTITKRMQRGREQSVKQGKYIGSILPYGYNKEKLEGENGFRLVINEEEAHIVRLIFKWFLEDSAGASIIAKRLNQGGYPSRSGRVWSYSSVKNILTSNVVAGYLKHGERKYKKYIDTKGNVKKSRPVNAAVEYYKGLHEAIIPLSDFEKVQDILNSRKQHKSNFDLPLSNPLAGLIRCSECNRVMVKRRCAQGDFLYCSTTGCKNIGSYLNRVEEHILQALSNTLSDYEYYVDNYEQETIKEKRNVDNDLKRIEKEIEKLNKQFEKCCTFLEQDVYTIEVFKDRTSKIKDKIRILEENKKVLEKEFGDDKVIKIKKLIPELENVLKNYNTLSIEGKNELLKSIIKEAIYSKKKKCKKGSNEDYFELEITLNI

SEQ ID NO: 5376 - protein, 508 aa, Unknown
  Description of Unknown: Integrase B5377 sequence
  PTHR30461:SF3,SM00857,G3DSA:1.10.10.2600,IPR036162, PF13408,PS51737,IPR025827,G3DSA:3.40.50.1390, IPR006119,IPR038109,PF07508,IPR011109, SSF53041,PTHR30461,Coil,PS51736,cd00338,PF00239
MPTVTVIQPTIAEEKAVKKRCAAYCRVSSDSEDQLNSFMAQMRYYSQVFDNSETEELVDVYADEGITGTREDKRDEFQRMIKDCRKGKIDRIYTKSISRFARNTRDCLKNVRELKSLGITIFFEKENIDTANMTDEMMITIMGGLAQEESVSISRNLKWSYQKRFEEGTINVFSAPFGYKLSNGSLIINETQAQIVKEIFEMFLNGIGYQRISEICQNKYSSYKDNFSYYGIRYILSNEKYIGDSKYQKTFTTDTLPYRKLPNKGELIQYYIQATHKAIISKETFEKAQALIECRKHKNIVSESPFSGKIICANCGTKYKRKCSGDKIYWVCRRHDNLAQLCTNKRIEEKFIRQSFIILHNKLLFNYKQILIPLQTALQDLKLKKFSGKTQVMDIHKEIAKLREQAHVLARLKTKGFLDEAKYIEQTTELTAKINKLQSELKKLTRSDYEDETLDQIEILIDFFEKRDKPITEFEESTFESIVEKIVVIDQHELEFHLIGGLKFKENI

SEQ ID NO: 5377 - protein, 507 aa, Unknown
  Description of Unknown: Integrase B5378 sequence
  PTHR30461:SF3,cd00338,SM00857,G3DSA:1.10.10.2600,IPR036162, PF13408,IPR025827,G3DSA:3.40.50.1390,PS51737,IPR006119, IPR038109,PF07508,IPR011109,SSF53041,PTHR30461, PS51736,Coil,PF00239
MSSVETTAVVYARYSSHGQTEQSIEGQIAAAQKYAEQHGYTIIHIYADRAMTGRNDDREEFQKMLSDTAMRQFGVILLWKIDRFGRNREEIAFNRYRCKKNGVRVERVAEDVPDGPEGVILDSVLEGMAEYYSLQLAQNVRRGQRESAKKSQTVGGCKIIGYNVNPDTKRYEVDPKTAPFVTEVFKRYANGETISEIVAWLNAQGVRTTRGGEFTVNSLHRLLKNEKYTGVYIFHDIRNEGGMPALIDRATFDKAQEMLKVNRRAPARVWSKTEYLLTDKLFCGHCGTMMVGESGHGRNGTKHNYYTCWNRKKKKTCDKKPIRQDVIEPLVLRAIGKLLENPATLENIADQVWAAYERSDTSGDTIKALDKQIADVDRALSNVMKAIEMGIINEMTKARMDELTDQKQALSAARAEAGLAGGFKLTRDMILFFLQDMAALDRSNRDCQKRLIKTFVNAIYLYDDHFDIAFNYTSNGKMVVKMQEINDTTSGEVFGRCAQSPAKRPSV

SEQ ID NO: 5378 - protein, 507 aa, Unknown
  Description of Unknown: Integrase B5379 sequence
  PTHR30461:SF3,cd00338,SM00857,G3DSA:1.10.10.2600,IPR036162, PS51737,G3DSA:3.40.50.1390,IPR006119,IPR038109,PF07508, SSF53041,IPR011109,PTHR30461,PS51736,Coil, PF00239
MRKKVAYLRKSRADIELENTTGEDTLKRHREIIKKLAKQNSVILDAYFEEVVSGETIQARPKIQELLKEVENNEIEEVYVVDVDRLARGDTEDQGRISKTFKFGNTKIVTPGKTYDPNNEFDEDFFEFGLFMSRREYKIINKRLNRGRLSSINEGKFIGSVCPYGYSKEKLKGQKGYKLIINEEEAKIVKIIFNLALSGIGASNIANHLNRIGSKPRKAEIWVSASIRDIIHNPVYYGMIKWNYRKTIKTMKNGIIYKSRPKQKEYILVEGLHEAIIDEETWKIANKNSKIKEGKSVKKDLTLQNPLAGLVECGICHRTMQRRNYRSGHIDGLICPLPHCKNVGSHLHMVENAILDSLQRYLNQYEETLASYKKDEQVHELDTNNVELIEKEIEKTKNQLNKAFDLLEQEIYDNTTFIERSKSLKIRIDELKKEKEKYSIKTKQEKIEKIKDIIPKLRNAINTYSASLPATDRNELLKSVINKVYYIKSVRGKGHEEEFELQINIKL

SEQ ID NO: 5379 - protein, 507 aa, Unknown
  Description of Unknown: Integrase B5380 sequence
  SM00857,G3DSA:1.10.10.2600,IPR036162,PF13408,IPR025827, G3DSA:3.40.50.1390,PS51737,IPR006119,IPR038109,PF07508, IPR011109,SSF53041,PTHR30461,Coil,PS51736, cd00338,PF00239
MKECIEYLRKSQFDRDFADLSIEETLAKHEQSLNEFIEKTDYTVTEVLKEVVSGETLAQRPQMMLLLDKINSGNYYGVICKDIDRLSRGNSLDSGYIMQVLKINNCKIITPEKVYDLNDDQDEQFTDLKFLFSRFELSTIKKRLNAGRIGAVKQGLWVGSHAPYGYERYKLVGEKGYSLKPIPAQAEIVRLIYDMYVNQHLGYVSIAEKLKDIDKSRTWTKVGVAGVINNPVYAGYVRYGYAKYEKVISDGKIITVKKHNDPDKTPRYKGRHEAIISKELYDKATAIRQNRIHPSVKVHRPLHDPLAGILFCAKCGKAIRVHRPAKDRKNQRERYDCVNTSCDCRSSYSDDIESAILNELRKWLKGYTVTVKAPADDITNYQFLLDNARNELTALETKQNKLCELLESGVYTTALFQQRNAILTQQIDETIECITELEKRLETQNKRVSERSQIVPTVKHILDDYDKLDTETKNKLLKQVLHRVTYYRQRGTDDVQIKIYPVLSSCK

SEQ ID NO: 5380 - protein, 507 aa, Unknown
  Description of Unknown: Integrase B5381 sequence
  PTHR30461:SF3,cd00338,SM00857,G3DSA:1.10.10.2600,IPR036162, PS51737,G3DSA:3.40.50.1390,IPR006119,IPR038109,PF07508, IPR011109,SSF53041,PTHR30461,PS51736,Coil, PF00239
MRKKVAYLRKSRADIELENTTGEDTLKRHREIIKKLAKQNSVILDTYFEEVVSGETIQARPKIQELLKEVENNEIDEVYVVDVDRLARGDTEDQGRISKTFKFGNTKIVTPGKTYDPNNEFDEDFFEFGLFMSRREYKIINKRLNRGRLSSINEGKFIGSVCPYGYSKEKLKGQKGYKLIINEEEAKIVKIIFNLALSGIGASNIANHLNRIGSKPRKAEIWVSASIRDIIHNPVYYGMIKWNYRKTIKTMKNGIIYKSRPKQKEYILVEGLHEAIIDEETWKIANNNSKIKEGKSVKKDLTLQNPLAGLVECGICHRTMQRRNYRSGHIDGLICPLPHCKNVGSHLHMVENAILDSLQRYLNQYEETLASYKKNEQVHELDTNNVELIEKEIEKTKNQLNKAFDLLEQEIYDNTTFIERSKSLKIRIDELKKEKEKYSIKTKQEKIEKIKDIIPKLRNAINTYSTSLPATDRNELLKSVINKVYYIKSVRGKGHEEEFELQINIKL

SEQ ID NO: 5381 - protein, 507 aa, Unknown
  Description of Unknown: Integrase B5382 sequence
  IPR036162,PS51737,PS00398,IPR011109,PTHR30461, PF00239,G3DSA:1.10.10.2600,IPR006119,SSF53041,cd00338, SM00857,IPR025827,IPR038109,PS51736,IPR006118, PF13408,G3DSA:3.40.50.1390,PF07508,Coil
MKRVISYIRFSSERQAKGDSLRRQSKMVTDWLKAHPEYYLDQDLSFRDLGVSGFTGKHLKGGLGDFLTAIEKGLVKAGDTLLIESLDRLSRQNVDRASELLRNILRSGVDVVTLSDGEHYTRESLKDPLALIKSILIMQRSHEESLRKSERIQAAWNRKKELISEGIKISKRCPAWLRLNDDRKTFSVIPEKVETVKRCFQLRLEGKSIWEIVRTLNAEGHRSMNQYKPGKFGQTSVQDLLKNRSVIGYFTPKGCEEISGYYPAIIDETTFYKVQQLSHSRYGKRSVSDKPLSVNLFKGVIRCSECGHALIITGFSDTRSGIYRCPLRNENRCSAKGLSRKQTDGTLLTLLSRLDRFDSDTTNIIDMLRLHREHISSNIEKLVQLSLEIEDLNAITSKLKQLKGELSQVDADIEKETQRLKSIDVGCLSDCDLTTKAGRIEAQLIIKSAVKEVVLNTAKRRCKVTFHNGKTITLSITENPSEDVTEAIQSLSEVTERGLIDVDEVII

SEQ ID NO: 5382 - protein, 507 aa, Unknown
  Description of Unknown: Integrase B5383 sequence
  cd03768,PTHR30461:SF3,SM00857,IPR036162,PF13408, IPR025827,G3DSA:3.40.50.1390,IPR006119,PF07508,IPR011109, SSF53041,PTHR30461,PS51736,Coil,PF00239
MSRIAIYSRKSKDTDTGESIKNQIQMCKDYFLRKDANHTFEIFQDEGFSGGNTNRPEFKRMMLLAKNGQFDIIACYKVDRIGRNIVDFMNTFSELEKNNITLVSVTEGFDPSTPAGRMMMTMIAGFAEMERMNIAQRIKDNMESLAKMGRWSGGTCPTGYRSIKISNSGKYAMYLELIPEWKEKLLDIFKYAADGKTCSSIGKLVSMSSKSIANIISNPVYCKSDLPSKKFLESLGYDVYGDCNGNGYIAYNRRPKAKNGKKLFNSKNMFVAVSTHEAPIHSSEWIKANLNIKSRAQEKRPRISQYSWLAHLVKCKCGSGMYLTPGRFRKDGSRYYYFCCSARKYNKSCSAKRINANHLEEDILEILEAVSKNKTLLKSYISPPSNNEIKSKIIKIKNEIKKNNKIMESLASKLALLEDYAASVIIEKMNSISLSIENLNTELLQLQREDLLNNLDELNEDVLFNSIQEMLTNWDFLDMEEKQDCVKNIINEIHLLDNSKFKIKFNL

SEQ ID NO: 5383 - protein, 507 aa, Unknown
  Description of Unknown: Integrase B5384 sequence
  IPR036162,PS51737,PS00398,IPR011109, PTHR30461,PF00239,G3DSA:1.10.10.2600,IPR006119, SSF53041,cd00338,SM00857,IPR025827,IPR038109,PS51736 ,IPR006118,PF13408,G3DSA:3.40.50.1390,PF07508,Coil
MKRAISYIRFSSEKQSRGDSLRRQSKMVNDWLKAHPEYYLDQDLSFRDLGVSGFTGKHLKGGLGDFLTAIEKGLVKAGDTLLIESLDRLSRQDVDQASELLRNILRSGVDVVTLSDGEHYTKESLKDPLALIKSILIMQRSHEESLRKSERIQAAWDAKKEAAKAGIKIYKRCPAWLKLNDDRKTFSVIPEKVETVKRCFQLRLEGKSIWEIVRTLNDEGHQTLNQYKAGKFGQTSVQDLLKNRSVIGYFTPKGCEEIAGYFPPIIPETDFYKVQQLSYSRYGRKPASDKPLSVNLFKGVIRCSECGHALIITGFSDTRNGIYRCPLRNENRCSAKGLSRKQTDGTLLALLSRIDRFDSDMTNTIDTLKLHREHISSNIEKLVQLSLEIEDLSAITSKLKQLKGELSQVDADIEKETQRLKSIDVGCLSDCDLTTKAGRIEAQLIIKSAVKEVILNTAKRRCKVTFHNSKSITLPITETPSEDVTEAIQSLSEVTERGLIDVDEVII

SEQ ID NO: 5384 - protein, 507 aa, Unknown
  Description of Unknown: Integrase B5385 sequence
  cd00338,SM00857,G3DSA:1.10.10.2600,IPR036162,PS51737, SSF90257,G3DSA:3.40.50.1390,IPR006119,IPR038109,PF07508, SSF53041,IPR011109,PTHR30461,PS51736,Coil, PF00239
MPYCMYLRKSRKDSDHPGQADEDVLARHEMLLRETAKRLGLNVTAIYREVVSGDSIAGRPVMQQLLREVSAGDWDGVLVVEIERLARGDTQDQGMVAKAFQYSGTKIVTPMKVYDPNDEFDEEYFEFGLYMSRRELKTINRRLIRGREASAKQGKYIGGVPPFGYDKQKLPDQKGYTLVPNADADTVRLIYDLYLSSSEMGTGDLATVLNNSGYRTQKNHFWTATNILKILSNPVYMGKIKMGYRPKVKIFEDGIQKVIRPVKAFGEYTLIDGLHDGLISEERWYQAAEKVKSSALVNTPKKYTPQNPFSGLMKCQLCGYAVKRQTNARGGSIYCVTPGCPCQYTDISELELQLIASLGQILSEFQKTESERTVIHHEITTIEQQLTQLKREQERLQRQLDNLFDLLEQGIYDKSTFTSRRTHLEQQLAETEETLAQLTTNRDEIQHKQARAAAMIPRIQSVLDTYLYLDSALEKNRMLKTILRRIDYLRLDRDTPPSLTLYLNWED

SEQ ID NO: 5385 - protein, 507 aa, Unknown
  Description of Unknown: Integrase B5386 sequence
  PTHR30461:SF3,cd00338,SM00857,G3DSA:1.10.10.2600,IPR036162, PF13408,PS51737,IPR025827,G3DSA:3.40.50.1390,IPR006119, IPR038109,PF07508,SSF53041,IPR011109,PTHR30461, PS51736,Coil,PF00239
MNTKQSMGVYCVRKGVYRMEQYCIYLRKSRADAEAEARGEGETLARHEHALLGLAKSQKLAIVKIYREIVSGDSIAARPQMQQMLQDVTDKKYTGVLVMEIERLARGDTIDQGVVAQAFRESNTKIVTPIKTYDPSNEFDEEYFEFSLFMSRREYKTIKRRMQAGRIASIKEGNYIGTNPPYGYKKIQPEPKVKTLEIVPDEADAVRMMFDMYLSGMGAKAIATRLNQLQIPPRKSPAWEPVSIRKILQSPIYAGKIEWHTKKDGTILADGLHPEIISWEEFQQVQERRKRKTSPVPTGYTTQNYYHNILFCANCGHQMKRRPAPNGSSHMLCVRQQCRGKVVSAPTSRVDEAVLEAIRYRIQELKLSKEKIEKEDYHTKENEEKQRTRLKKALEKLQKQKEKLHTLLETDVYSVETFLERSKVLEQQKLDLETELAELNDAQKEVHLSPKQALLWLQHTLDHFETANPEQKNKMLQRVIKRIEYSKTERMCYRKQTSDLALHVEFL

SEQ ID NO: 5386 - protein, 507 aa, Unknown
  Description of Unknown: Integrase B5387 sequence
  cd03768,PTHR30461:SF3,SM00857,IPR036162,PF13408, IPR025827,G3DSA:3.40.50.1390,IPR006119,PF07508,SSF53041, IPR011109,PTHR30461,PS51736,Coil,PF00239
MSRIAIYSRKSKETDTGESIKNQIQICKDYFLRKDANHTFEIFQDEGFSGGNTNRPEFKRMMLLAKNGQFDIIACYKVDRIGRNIVDFMNTFSELEKNNITLVSVTEGFDPSTPAGRMMMTMIAGFAEMERMNIAQRIKDNMESLAKMGRWSGGTCPTGYRSIKISNSGKYAMYLELIPEWKEKLLDIFKYAADGKTCSSIGKLVSMSSKSIANIISNPVYCKSDLPSKKYLESLGYDVYGECNGNGYIAYNRRPKAKNGKKLFNSKNMFVAVSTHEAPIHSSEWIKANLNIKARAQEKRPRISQYSWLAHLVKCKCGSGMYLTPGRFRKDGSRNYYFCCSSRKYNKSCSAKRINANHLEEDILEILEAFSKNKTLLKSYISPPSNNEIKSKIIKIKSEIKKNNKIMESLASKLALLEDYAASVIIEKMNSISLSIENLNTELLQLQREDLLNNLDEFNEDILFNSIQEMLTNWDFLDMEEKQDYVKNIITEIDLLDNGKFKIKFNL

SEQ ID NO: 5387 - protein, 507 aa, Unknown
  Description of Unknown: Integrase B5388 sequence
  IPR036162,PS51737,PS00398,IPR011109, PTHR30461,PF00239,G3DSA:1.10.10.2600,IPR006119, SSF53041,cd00338,SM00857,IPR025827,IPR038109,PS51736 ,IPR006118,PF13408,G3DSA:3.40.50.1390,PF07508,Coil
MKRVISYIRFSSERQAKGDSLRRQSKMVNDWLKAHPEYYLDQDLSFRDLGVSGFTGKHLKGGLGDFLTAIEKGLVKAGDTLLIESLDRLSRQDVDQASELLRNILRSGVDVVTLSDGEHYTKESLRDPLSLIKSILIMQRAHEESLRKAERIQAAWDAKKEAAKAGIKISRRCPAWLKLNDDRKSFSVIPEKVETVKRCFQLRLEGKSIWEIVRTLNAEGHQTLNQYKAGKFGQTSVQDLLKNRSVIGYFTPKGCEEISGYYPAIIDETTFYKVQQLSYARYGRKPASDKPLSVNLFKGVIRCSECGHALIITGFSDTRSGIYRCPLRNENRCNAKGLSRKQTDSTLLALLSRLDRFDSDMTNTVDTLKLHREHISSNIEKLVQLSLEIEDLSAITSKLKQLKGELSQVDADIEKETQRLKSIDVGCLSDCDLTTKAGRIEAQLIIKSAVKEVVLNTAKRRCKVTFHNGKVIDLPITENPSEDVTEAIQSLSEVTERGLIDVDEVII

SEQ ID NO: 5388 - protein, 507 aa, Unknown
  Description of Unknown: Integrase B5389 sequence
  SM00857,G3DSA:1.10.10.2600,IPR036162,PS51737,G3DSA:3.40.50.1390, IPR006119,IPR038109,PF07508,IPR011109,SSF53041, PF00239,PTHR30461,PS51736,Coil,cd00338
MSYCIYLRKSRADLELEAMGEMETLARHQNILIDLAKRNHLTITKIYKEIVSGETIEARPEIQEMLNEVEDGKWDGVLVMEVERLARGDTIDQGIVARAFKRGKAKIVTPNKTYDPDNEFDEEYFEFGLFMSRREYKTINRRIQRGRIAAVQEGKFISSVPPYGYDKVKIVNGSGYTLKPNNESDVVKKIFSLYLSGIGMQRICGQLDQLCIKPRYRNTWSKSTVSDILTNPVYTGKIRWQYRPYEKSGGNYASRRKSNDCILVKGLHPAIINDEDFEKAQLIMKKHYRAPVKSNLSLKNSLSGLGYCKKCGTMLTRLGASSKNKVDKIICPNRNCNTVSAPLDMVEKTIVRELQDWLHDYIVRGKQEGVLPDTKILEKSLSKLKSDLSKIEKQISKTYDLLEQGVYTTEVFQSRHKVLEENKSDLLQKINNISGKLNDNRLMTLEKLEQTQHILDAYFLLETPEEKNSLLKSILDRFEYQKDERNTKGNLYNNNFTVDIFPSLPQI

SEQ ID NO: 5389 - protein, 507 aa, Unknown
  Description of Unknown: Integrase B5390 sequence
  PTHR30461:SF3,SM00857,G3DSA:1.10.10.2600,IPR036162,PF13408, PS51737,G3DSA:3.40.50.1390,IPR025827,IPR006119,IPR038109, PF07508,IPR011109,SSF53041,PF00239, PTHR30461,PS51736,Coil,cd00338
MKGVIYARYSPGPNQTDQSIEGQLRECKQFAEENNITIVNTYADKKQTGRNDNRVQFQKMLQDSKKKQFDYVIVWKIDRFGRNREEIAKNKAILRMSGVKVLFAKEHIPDGPEGIILESVLEGLAEYYSANLSQNIIRGMRESAMKCKCNGSGLPLGYNVDKEHNYIRNDEEATLIKMIFKMYDDGSKINDICKYLNAHNYKTKRNSKFTHTGVSRILHNRQYIGEYRWKDIITPNGMPRIIDDELFERVAKRLERTKRAPSASRGDVKFLLTGKLFCGYCKSTMIGDSGTGKSGRKFYYYNCRIKKNKHTCKKKTVRKDWLEYEVARITANIVLQDKIIDYVSDKVVEIQKKEHEDKSNLNYYTVKLKETNSAIKNIMKVIESGIFTESMRERLLKLEDERSTYETEIAKEEIMRPTITKEQVVFFLKQFKNGNIEDKDYQAKLIDIFVNKVILYDDKIIITYNYSGEHNETSAKIIEEAAEELINEQEKCSDKLLSSPPRYDKSA

SEQ ID NO: 5390 - protein, 507 aa, Unknown
  Description of Unknown: Integrase B5391 sequence
  PTHR30461:SF3,SM00857,G3DSA:1.10.10.2600,IPR036162,PF13408, IPR025827,PS51737,G3DSA:3.40.50.1390,IPR006119,IPR038109, PF07508,SSF53041,IPR011109,PTHR30461,Coil, PS51736,cd00338,PF00239
MPEALNAVIYARYSSDRQTEQSIEGQLRECYAFAKANDIAVIDTYIDRAISGKTDNRPAFQKMIEDSAKRQFQAVIVYRLDRFTRNRYDSAIYKARLKKNGVKVLSAMENLNGSPESIIMESLLEGMAEYYSVELSQKITRGMRENALKGKALGGQRVLGYKVNSDCYFEIDETTAPVVVDIFKLYSSGKTVKEICDILNARGVKTARGGAFNKNSLHTILTNKKYIGIYKTKYGEIVGGIPAIIDKELFEMVALRMEQNKKAPARAKAEINYLLSTKLFCGKCRSAMVGESGTSKTGKKYYYYACVKKKREKACDKSNVKKDWIEDLVIQRTVTDILKDDVIEKIADRLVELQKAEAAESGTMLYLENSLAEIQVSIKNIMTAIEKGIITESTKTRLTELEDEKRNVEIEIAKESIARRIISREQIIYWISSFKDGDITSEKYRQQLIDTFVHAVFVYDDKIVITYNYSGENNTATISDLDLSSPPNRYWTNTYFFSGGFAVKCSL

SEQ ID NO: 5391 - protein, 507 aa, Unknown
  Description of Unknown: Integrase B5392 sequence
  cd00338,SM00857,G3DSA:1.10.10.2600,IPR036162,PF13408, PS51737,G3DSA:3.40.50.1390,IPR025827,IPR006119,IPR038109, PF07508,SSF53041,IPR011109,PTHR30461,PS51736, Coil,PF00239
MYEDIKTACLYVRFSSHNQTEQSIEGQTRVCRDFCKRHNIRIVEIYADRATSASKDIEKRVQFLKMIKDSEKGLFDAVIVYKLDRFARSRYDSATYKYRLKRNGVQLISATENISNDPEGIILESVLEGMAEFYSAELSQKINRGMRESAYKHNSIGGAVPLGYKIEDKKLVIDPKTAPLVKEAFEKYADGETVAEICRQFNARGYKTSKGTAFGKSSFTKIFRNERYIGVYTFHDYRAEGAVPAIIDKDLWDRVQLRVGKIKNAPARNKAKVVYLLSGKLFCGHCGSRMNGNCNASNYCYYQCYGKKNGHVDCNKKNIRKEFIERLVAQDALSLLTDEYIEQIAAIACEKNQHEIELDSALPTIRDRIHQVDLSLNNLLKAIESGSAPDMLVKRMGELEKEKKDLQAQAKKESEDIVELDKAQVIYWLEQFRGGSIEDEEFCRMLIDLFVNSVTVWDEDDDTYKVTVAYNLTSLPTKTYRLSKGGTLSDFASNAPARKSRKTLVHN

SEQ ID NO: 5392 - protein, 507 aa, Unknown
  Description of Unknown: Integrase B5393 sequence
  PTHR30461:SF3,SM00857,G3DSA:1.10.10.2600,IPR036162,PF13408, IPR025827,G3DSA:3.40.50.1390,PS51737,IPR006119,IPR038109, PF07508,IPR011109,SSF53041,PTHR30461,Coil, PS51736,cd00338,PF00239
MKGWYFFMANGVIYARYSSNHQREESIEGQLRECNAFAKAQNIDIINTYIDRALSAKTDDRPGFLKMIADSSKQAFDYVIVYQLDRFARNRYDSAFYKMKLKKNGVKVLSAKENITNDPAGIILESVLEGMAEYYSVELAQKVKRGMTENALAARWASGRIPFGYKVDAQKHLIPDPVAGRAVTAIFIRFARGEKIKSIVDYLNSLNYKTSLRNKFNRSSFQRMIVNPVYIGTFRWNDIVLENAVPPLIDQLTFETCQRRIAAKKRDKNAVNRKSDMFLLTTKLKCAECGGNMVGISGTSRNSQKYYYYGCYNTRRHNTACKIGYINRDELEDAVFEAAMDVLSSDENIDIIAEQAFKISQQQEENPRIKELEMQKKETEKKLANCVKALESGLFSETLANAIKKNEDELKSINLALAHENLSSASFEITKQHIAFFLSQFRHMEPTKAREAVLNTLLREAVIKKESDSNYLVTVRFNYTATPTLSDTKEVSVRIMNDWWRQAGSNR

SEQ ID NO: 5393 - protein, 507 aa, Unknown
  Description of Unknown: Integrase B5394 sequence
  PTHR30461:SF3,SM00857,G3DSA:1.10.10.2600,IPR036162,PF13408, PS51737,G3DSA:3.40.50.1390,IPR025827,IPR006119,IPR038109, PF07508,SSF53041,IPR011109,PTHR30461,Coil, PS51736,cd00338,PF00239
MPEALNAVIYARYSSDRQTEQSIEGQLRECYAFAKANDIAVIDTYIDRAISGKTDNRPAFQKMIEDSAKRQFQAVIVYRLDRFTRNRYDSAIYKARLKKNGVKVLSAMENLNGSPESIIMESLLEGMAEYYSVELSQKITRGMRENALKGKALGGQRVLGYKVNSDCYFEIDETTAPVVVDIFKLYSSGKTVKEICDILNARGVKTARGGAFNKNSLHTILTNKKYIGIYKTKYGEIVGGIPAIIDKELFEMVALRMEQNKKAPARAKAEINYLLSTKLFCGKCRSAMVGESGTSKTGKKYYYYACVKKKREKACDKSNVKKDWIEDLVIQRTVTDILKDDVIEKIADRLVELQKAEAAESGTMLYLENSLAEIQVSIKNIMTAIEKGIITESTKTRLTELEDEKRNVEIEIAKESIARRIISREQIIYWISSFKDGDITSEKYCQQLIDTFVHAVFVYDDKIVITYNYSGENNTATISDLDLSSPPNRYWTNTYFFSGGFAVKCSL

SEQ ID NO: 5394 - protein, 507 aa, Unknown
  Description of Unknown: Integrase B5395 sequence
  IPR036162,PS51737,PS00398,IPR011109,PTHR30461, PF00239,G3DSA:1.10.10.2600,IPR006119,SSF53041,cd00338, SM00857,IPR025827,IPR038109,PS51736,IPR006118, PF13408,G3DSA:3.40.50.1390,PF07508,Coil
MKRAISYIRFSSEKQSRGDSLRRQAKMVTDWLKAHPEYYLDESLTFRDLGVSGFTGKHLKGGLGDFLTAIEKGLVKAGDTLLIESLDRLSRQDVDQASELLRNILRSGVDVVTLSDGEHYTRESLKDPLALIKSILIMQRAHEESLRKAERIQAAWDAKKEAAKAGIKISRRCPAWLKLNDDRKSFSVIPEKVETVKRCFQLRLEGKSIWEIVRTLNAEGHQTLNQYKAGKFGQTSVQDLLKNRSVIGYFTPKGCEEISGYYPAIIDETTFYKVQQLSYARYGRKPASDKPMAVNLFKGVIRCSECGHALIITGFSDTRNGIYRCPLRNENRCSAKGLSRKQTDGTLLALLSRLDRFDSDMTNTIDTLKLHREHISSNIEKLVQLSLEIEDLSAITSKLRQLKNELSQVDADIEKETQRLKSIDVACLSDCDLTTKAGRIEAQLIIKSAVKEVVLNTAKRRCKVTFHNGKAITLPITENPSDNVTEAIQSLSEVTERGLIDVDEVII

SEQ ID NO: 5395 - protein, 507 aa, Unknown
  Description of Unknown: Integrase B5396 sequence
  cd00338,SM00857,G3DSA:1.10.10.2600,IPR036162,PF13408, PS51737,IPR025827,G3DSA:3.40.50.1390,IPR006119,IPR038109, PF07508,IPR011109,SSF53041,PTHR30461,PS51736, Coil,PF00239
MQKNTTVETTTKAVIYARYSSDRQREESIEGQLRVCEDFAKRNGMTILHVYADRALSGRSDQRPEFQMMIQAAATQAFDTVLVYKLNRFARNRYDSAKYKHKLKKYGVKVVSAMENIANDPSGILLESVIEGMAEYYSAELAENVMRGMTENALECKWPGGTVPLGYKLDAAHHLIIDEPAAKTVRWIYQMALEGRQPSSIIRELNAAGCRTAFGRPFGRTSLNTILKNERYIGAFVWNDIKKPNAIPAIVNPEDWQKVQEITKAKKKCIAKSRGENYLLTGRLFCGQCGGSMVGTAGTSKMQRVYHYYDCGNHLKKKGCTTKAIRADKLEDIICNTTTQLLSNQEAISAIAKQAISAQKEQGPSLVLQSLQNQRTEISRKLQNCIKAVEKGLISQTVTNHIQDYEKQLQTLNDDIRKEELMNQVPRLTEKHIEFFFWSISQQIKKADKYKSILLSSLVRSVIIYGDFIEIQYNYKKELPILQNPVKIKSSYLNKMVIHPGFEPGTP

SEQ ID NO: 5396 - protein, 507 aa, Unknown
  Description of Unknown: Integrase B5397 sequence
  PTHR30461:SF3,SM00857,G3DSA:1.10.10.2600,IPR036162,PS51737, G3DSA:3.40.50.1390,IPR006119,IPR038109,PF07508,IPR011109, SSF53041,PF00239,PTHR30461,PS51736,Coil, cd00338
MRKKVAYLRKSRADIELENTTGEDTLKRHREIIKKLAKQNSVILDVFFEEVVSGETIQARPKIQELLKEVENNEIDEVYVVDVDRLARGDTEDQGRISKTFKFGNTKIVTPGKTYDPNNEFDEDFFEFGLFMSRREYKIINKRLNRGRLSSINEGKFIGSVCPYGYSKEKLKGQKGYKLIINEEEAKIVKIIFNLALSGIGASNIANHLNRIGSKPRKAEIWVSASIRDIIHNPVYYGMIKWNYRKTIKTMKNGIIYKSRPKQKKYILVEGLHEAIIDEETWKIANKNSKIKEGKSVKKDLTLQNPLAGLVECGICHRTMQRRNYRSGHIDGLICPLPHCKNVGSHLHMVENAILDSLQRYLNQYEETLASYKKDEQVHELDTNNVELIEKEIEKTKNQLNKAFDLLEQEIYDNTTFIERSKSLKIRIDELKKEKEKYSIKTKQEKIEKIKDIIPKLRNAINTYSASLPATDRNELLKSVINKVYYIKSVRGKGHEEEFELQINIKL

SEQ ID NO: 5397 - protein, 507 aa, Unknown
  Description of Unknown: Integrase B5398 sequence
  PTHR30461:SF3,SM00857,G3DSA:1.10.10.2600,IPR036162,PF13408, IPR025827,G3DSA:3.40.50.1390,PS51737,IPR006119,IPR038109, PF07508,SSF53041,IPR011109,PTHR30461,Coil, PS51736,cd00338,PF00239
MNTVIYARYSAGPRQTDQSIEGQLRVCTDFCKQRGLTVIDTYCDRHISGRTDERPEFQRLITDAKRKKFEAVVVYKTDRFARNKYDSAVYKRELKRNGIQIFYAAEAIPDGPEGIILESLMEGLAEYYSAELAQKIKRGMHESALKCQSTGSGRPLGYRVDEQKHFQIDPESAQTVQTIFEQYIKGESNAAICELLNSRGLRTAQGKPFNKNSINRIIKNRKYIGEYRYHDIVVEGGMPAIISKDTFNLAQAEMERRRTRKAPKSPKAEYLLAGRLFCGHCKGPMQGVSGTGKSGNKWYYYYCGNTRGENKTCDKKQVSRDRLERAVVDFTVRYILQEEVLEELARKVHAAQERQNDTASEIAFYEKKLADNKKSIANVLRAIESGAMTQTLPARLQELENEQAVILGEISFLKGKRLAFTEDQIFFALMKHLEPYPGESEQDYRRRIISDFVSEVYLYDDRLLIYFNISSEDGKLKSTDLSNIEGGEFDEGLVSSTITRKDELFIL

SEQ ID NO: 5398 - protein, 507 aa, Unknown
  Description of Unknown: Integrase B5399 sequence
  PTHR30461:SF3,SM00857,G3DSA:1.10.10.2600,IPR036162,PF13408, PS51737,IPR025827,G3DSA:3.40.50.1390,IPR006119,IPR038109, PF07508,IPR011109,SSF53041,PTHR30461,Coil, PS51736,cd00338,PF00239
MNAVIYARYSSDNQREESIEGQLRECREYAERNGMNVVATYIDRALSAKTDDRPQFQQMIRDSNTHKFEVVLVWKLDRFSRNRYDSANYKRKLAQNHVRVVSATEPISNTPEGIMLESLLEGMAEYYSAELSEKVSRGHKENALKAKFNGGTIPLGYRIDENQHYQIDPATAPLVLETFERYADGECVRKIVESFNARGLRTSRGAPFSINSFQAILKNRRYLGEYRYKDTVIPDAIPAIITPEVFEKVQRRCEQNKKAPAHTKTDVNYMLTTKLFCGKCGAMMAGESGKSHTGAWHYYYKCGNHKRHGRSVCDLKAVRKEPLERFVVKVAIEKVLKTDTLELLAQKLLEYQNKENTRLPVLQAGLKDISKRINNIVSAIEQGIFTPATKQRLDELEEQRKELEASILQEQIAKPLLTREQILFWFERFRQGDPSDPAYQQKIIDCFVNSVYIFDDHLVINFNYRDGDKLVSLQEVKSSFLGGNRSPIFKPHCIAKNGLTVRFFFIL

SEQ ID NO: 5399 - protein, 507 aa, Unknown
  Description of Unknown: Integrase B5400 sequence
  IPR036162,PS51737,PS00398,IPR011109,PTHR30461, PF00239,G3DSA:1.10.10.2600,IPR006119,SSF53041,cd00338, SM00857,IPR025827,IPR038109,PS51736,IPR006118, PF13408,G3DSA:3.40.50.1390,PF07508,Coil
MKRVISYIRFSSERQAKGDSLRRQSKMVNDWLKAHPEYYLDQDLSFRDLGVSGFTGKHLKGGLGDFLTAIEKGLVKAGDTLLIESLDRLSRQDVDQASELLRNILRSGVDVVTLSDGEHYTRESLKDPLALIKSILIMQRSHEESLRKSERIQAAWNRKKELISEGIKISKRCPAWLKLNDDRKSFSVIPEKVETVKRCFQLRLEGKSIWEIVRTLNDEGHQTLNQYKAGSFGQTSVQDLLKNRSVIGYFTPKGCEEIAGYYPAIIDETTFYKVQQLSYSRYGRKPASDKPMAVNLFKGVIRCSECGHALIITGFSDTRSGIYRCPLRNENRCSAKGLSRKQTDGTLLTLLSRLDRFDSDMTNTIDTLKLHREHISSNIEKLVQLSLEIEDLSAITIKLKQLKGELSQVDADIEKETQRLKSIDVGCLSDCDLTTKAGRIEAQLIIKSAVKEVVLNTAKRRCKVSFHNGKVIDLSITENPSEDVTEAIQSLSEVTERGLIDVDEVII

SEQ ID NO: 5400 - protein, 507 aa, Unknown
  Description of Unknown: Integrase B5401 sequence
  PTHR30461:SF3,SM00857,G3DSA:1.10.10.2600,IPR036162,PS51737, G3DSA:3.40.50.1390,IPR006119,IPR038109,PF07508,SSF53041, IPR011109,PTHR30461,Coil,PS51736,cd00338, PF00239
MPNILNNNVVYDDNTKQLLYQSEDENGNTRVSTEMQPQSALDSQEAVACEFAKCNNIDIIKVFSDKGISGTTDNRPNFQEMIKYVENQNNDIQLIIVYKLDRLFRQEQLFNVYEYRLNKCGVFVLSATEETYKNDIGSRVLKAVTLINNEFEAKKIRENVKRGQTYTAKQGKTNGGIAPLGYDINADGKYVVNPEEAKIVKKIFEMKSNGVTYEQMADTLNKQNYRTKIGRKFTKNSFHEILTNPKYKGVFVYNRSALATEYNKSPNRHKYKSADNIITVKGKIERIVSESLWDSVQPKKNLSGKTNKGKYLLSGLVKCPICHNSYHVDTKGNVQYLRHNKNKTDKCINSIPMDNVKEKVILKVINKIFSKYNVEYFTNNFDTISQTQTASIEQHIKKLKFKINALKVKYDNLLNTLSETTDENIKTSITDKLTSINTEISTYTNSIEKLKNSIPQPPTKDNIRTSKKKLKAFLTNPNNILDSKKLIHSIIDSVYITENDIKVIFKE

SEQ ID NO: 5401 - protein, 507 aa, Unknown
  Description of Unknown: Integrase B5402 sequence
  PTHR30461:SF3,cd00338,SM00857,G3DSA:1.10.10.2600,IPR036162, PF13408,IPR025827,PS51737,G3DSA:3.40.50.1390,IPR006119, IPR038109,PF07508,IPR011109,SSF53041,PTHR30461, PS51736,Coil,PF00239
MYEEIKEVALYVRYSSANQTEQSIEGQIRVCTDFCQRHGFRIVEIYADRATSASKDIEKRVEFLRMIKDSEKKNFQAVIVYKLDRFARSRYDSANYKYRLRKNGVQLISATENISNDPEGIILESVLEGMAEFYSAELSQKINRGMKESAYKHNSIGGVIPLGYKSEGKKLVIDEETAPIVRQAFEMYAEGHSVAEICRLFNARGYKTSKGTRFGKSSFSRMFHNERYIGVYQYHDYRAEDAIPAIIDKKLFYQVQARMKSNNRSPGQHKAKHFYLLSGKLYCGHCGSKMNASSNTTSGYTYYECYGKKNLHVDCHKRNLRQDFIEDVVIRDAMSLLTDENIEQIAEVAIRTNLHDVEGNTDIPAIKDRLHETTLSLSNLVKAIESGLAPETLVKRMMELEKDKKTLEEELKREEKKVIYLDKEQVIFWLEQFKGGDIEDDDFRRLLVNLFVNSVTVWDEEDDHFKVTIAYNLSSLNEKTYHLKRGGRQSDFNLNAPKSIPDNFLSL

SEQ ID NO: 5402 - protein, 507 aa, Unknown
  Description of Unknown: Integrase B5403 sequence
  IPR036162,PS51737,PS00398,IPR011109,PTHR30461, PF00239,G3DSA:1.10.10.2600,IPR006119,SSF53041,cd00338, SM00857,IPR025827,IPR038109,PS51736,IPR006118, PF13408,G3DSA:3.40.50.1390,PF07508,Coil
MKRAISYIRFSSEKQSRGDSLRRQSKMVNDWLKAQPEYYLDQDLSFRDLGVSGFTGKHLKGGLGDFLTAIEKGLVKAGDTLLIESLDRLSRQAVDRASELLRNILRSGVDVVTLSDGEHYTKESLRDPLSLIKSILIMQRAHEESLRKAERIQAAWDAKKEAAKAGIKISRRCPAWLRLNDDRKSFSVIPEKVETVKRCFQLRLEGKSIWAIVRTLNDEGHQTLNQYKAGKFGQTSVQDLLKNRSVIGYFTPKGCEEIAGYYPAIIDETTFYKVQQLSHSRYGKRSVSDKPLSVNLFKGVIRCSECGHALIITGFSDTRNGIYRCPLRNENRCSAKGLSRKQTDGTLLTLLSRLDRFDSDTTNTIDMLRLHREHISSNIEKLVQLSLEIEDLSAITIKLKQLKGELSQVDADIEKETQRLKSIDVGCLSDCDLTTKAGRIEAQLIIKSAVKEVVLNTAKRRCKVTFHNGKSITLSITENPSEDVTEAIQSLSEVTERGLIDVDVVEI

SEQ ID NO: 5403 - protein, 506 aa, Unknown
  Description of Unknown: Integrase B5404 sequence
  PTHR30461:SF3,cd00338,SM00857,G3DSA:1.10.10.2600,IPR036162, PS51737,G3DSA:3.40.50.1390,IPR006119,IPR038109,PF07508, IPR011109,SSF53041,PTHR30461,PS51736,Coil, PF00239
MKVCMYLRKSRQDEELEKRENTDTLARHRSTLLEVAKKQHLDIIEVHEEIVSGGSIASRPKMLKLLEEVRNNMYDAVLCMDLDRLGRGGMQDQGLILDTFKETNTLIVTPDKTYDLNNELDEEMTEFKSFFARRELKMITKRMQRGRIKSIEEGKFIASNAPFGYKFEYDREGKRLLIIDEDKAAIVKEIFALYISNYGSYKIKVYLDTIGVKTNSGKPFSEQAIRRILKNSIYCGYVSWNKVKRKGTKSIVNSKDKIIYAKGRHQAIISEDMFNLAQNILEGNQVPSVSQNKKMINPLAGLIKCACCNHTMIVSKSTYKNNDIVLFLKCAHCNKNSSSKLESVENTILGYMQQFLNEYQNEILKKDISDNNNDRISNLKHTLSLLEKETIELQKQKNKLHDFLERGVYDIDTYLERTNVLRVKTEKNETAINNLKELIEKEMKIDLNYSELIPRVEKIINSYKNTQNILDKNILLKSVIEEVIYYKEKGIRNGKFELDIKLRLPI

SEQ ID NO: 5404 - protein, 506 aa, Unknown
  Description of Unknown: Integrase B5405 sequence
  cd00338,SM00857,G3DSA:1.10.10.2600,IPR036162,PF13408, PS51737,IPR025827,G3DSA:3.40.50.1390,IPR006119,IPR038109, PF07508,IPR011109,SSF53041,PTHR30461,PS51736, Coil,PF00239
MYGMYLRKSRSDDPNEDINDTLAKHEKILFDLADSLNINRKEIMQFKEVVSGENIQNRPEMKKLLEYVMEGVLEGVLVVDSQRLARGDTVDQGTIIRAFSINNTKIITPMKTIDPQNEYDQEYFEFDLFMGRREYKMITRRMQRGRHIAAQEGYYVGSIAPYSYSRIKLEKGYSLEIYEEENIVFNIMKKKALEDEGSTNISNHLNELGYKPRKGEYWTKSAVEAILLNETNLGLIKWNSRKEVKVFKDGKIVKTRPRNPNYELYPGKHPAIMTQDEYDRIKFLMKKRSHPVKKDKTLQNPLAGLIVCGFCNHKMARRPYKNGRVETILCTTSRCKNVASDIHVVEQRIIDTLKDTLKNYTNYVNNYSVSVNKTYDDNKKLQLEECDKELEKLNKQIIKACEMLELGAYTVELFKERKNTLENKINTVNKRKDILAKETEAMKIEQYKKAIPQLQNAIDLYWKSSTEEKNKILKSIIDKCIYKKEKGGRWDPDAIKQFKLEIYLKV

SEQ ID NO: 5405 - protein, 506 aa, Unknown
  Description of Unknown: Integrase B5406 sequence
  cd00338,SM00857,G3DSA:1.10.10.2600,IPR036162,PF13408, IPR025827,G3DSA:3.40.50.1390,PS51737,IPR006119,IPR038109, PF07508,SSF53041,IPR011109,PTHR30461,PS51736, Coil,PF00239
MNAVIYARYSSDKQTEQSIEGQLREGYAYAERAGMTIVGAYIDRAISGISDQRPDFQRMIADSAKRQFEAVIVWKLDRFARNRYDSAIYKSKLKKNGVRVFSVTEGIGDGDESIILEAVLEAMAEMYSKQLGQNAARGMRETARKGLCTGGQIPLGYVVGEDHKLHIDSKTAPAVQLIYTLFADGKTKTQIAKELNARGFRTKNGKLYTSNSFFRILTNPMYYGDYTYKGDIPRECPAIISRALYDKCQERNEATKRSRGMKTSEVEWLLRGKLFCGHCGTQMTGDSGTGRANEKHYYYTCHKRKRYKDCDKKSEKKEQLERAVCQKTVEYVLREDRIGYIAERVVEQYEKEFDASIIKEKEMSLVKLDAELDKCAESLMHTTVRSVVDRINARAKELEAAKSELEHELAQLRITSKARITVDEIITFLRGFCSGDVEDIQFRRKIVDTFINAVYVFDDKYVVYYNVRDCKQVTYSDMLASIHAPSDMSAHGSDCLLYGEPLLNVP

SEQ ID NO: 5406 - protein, 506 aa, Unknown
  Description of Unknown: Integrase B5407 sequence
  cd00338,SM00857,G3DSA:1.10.10.2600,IPR036162,PF13408, PS51737,IPR025827,G3DSA:3.40.50.1390,IPR006119,IPR038109, PF07508,IPR011109,SSF53041,PTHR30461,PS51736, Coil,PF00239
MYGMYLRKSRSDDPNEDINDTLAKHEKILFDLADSLNINRKEIMQFKEVVSGENIQNRPEMKKLLEYVMEGVLEGVLVVDSQRLARGDTVDQGTIIRAFSINNTKIITPMKTIDPQNEYDQEYFEFDLFMGRREYKMITRRMQRGRHIAAQEGYYVGSIAPYSYSRIKLEKGYSLEIYEEENIVFNIMKKKALEDEGSTNISNHLNELGYKPRKGEYWTKSAVEAILLNETNLGLIKWNSRKEVKVFKDGKIVKTRPRNPNYELYPGKHPAIMTQDEYDRIKFLMKKRSHPVKKDKTLQNPLAGLIVCGFCNHKMARRPYKNGRVETILCTTSRCKNVASDIHVVEQRIIDTLKDTLKNYTNYVNNYSVSVNKTYDDNKKLQLEECDKELERLNKQIIKACEMLELGAYTVELFKERKNTLENKINTVNKRKDILAKETEAMKIEQYKKAIPQLQNAIDLYWKSSTEEKNKILKSIIDKCIYKKEKGGRWDPDAIKQFKLEIYLKV

SEQ ID NO: 5407 - protein, 506 aa, Unknown
  Description of Unknown: Integrase B5408 sequence
  PTHR30461:SF3,SM00857,G3DSA:1.10.10.2600,IPR036162,PF13408, IPR025827,PS51737,G3DSA:3.40.50.1390,IPR006119,IPR038109, PF07508,SSF53041,IPR011109,PTHR30461,Coil, PS51736,cd00338,PF00239
MKAVIYARYSAGSGQTELSIEGQLRECKKYIEKKGYALGEVYADRHVSGLSTKGREEFKRLMDDAKAHKFDVVVCYDTSRFARDKFDAVVYKTELRKRLGIAIEWATMNVEGPEGVLLEAIMEGWNQYFSEELSRKTKRGMAEAASKGLSLGSRPPLGYTLKDRRFVVNEAGAEAVREVFKAYTGGASFADCARMLNGQGFRTATGKLFNGSAVRYMLTNKKYLGIHGGASGVVPAIVDPEVFQAARDRIGERPPKSVKHDFALVGKLTCGCCGSRMTGTSTLSKGRRYYYYKCSNKCAGQPVRQDKLDSFVAACAQEVLSKPETVKEVAARLFAYQKKENPLESKIEALGKSLKSLDMKIDNLTTALAERPASKALLTRLDDLEEQREQVQRAIEAEPEQEPCRILSEQAIADGLTGLLAPLSDPDRIHSQERWILDSLVEAVELTPDEVLITYATDSIVKRDQEGQVSKKVLIGTPDSTFFETMELYTAPGAVILSCSRSAASF

SEQ ID NO: 5408 - protein, 506 aa, Unknown
  Description of Unknown: Integrase B5409 sequence
  PTHR30461:SF3,SM00857,G3DSA:1.10.10.2600,IPR036162,PF13408, IPR025827,G3DSA:3.40.50.1390,PS51737,IPR006119,IPR038109, PF07508,SSF53041,IPR011109,PF00239,PTHR30461, PS51736,Coil,cd00338
MTNTKDLQTGVIYARYSSDKQRDESIEGQIRECTEYAQREGILITKIYTDRALSARTDNRPEFLQMIRDSAHQSFNYVIVYQLDRFSRSREDSAKYKGILRRNGVRVLSAKEHITNEPAGIILESMLEGMAEYYSVELSQKVKRGMTENALKGKMNGAAIPLGYDLTESHHLAVNAHEAKAVRLIYDLYLKQHSIAKISDILHSKGYLTKKGRKISPSVIKNILSNEKYIGVYSWGDIRIEDSIPPIISRKVFDEVQTIMPTRIRNKGRRSEMYNLCGKLICGECGGHYMGSTATSRNKEKHYYYVCTNRRKYHTCAAPNIRRDELEDLVINRTLEILNQPSNIARIVDLVMSGYDNTTQEAKTAIQGINNKIKAIDTELNNCMNAIKQGFITERLKGEIENLENERNNLLEQKANHESAIIPIKFTADHIEYFLERMTKENPTTKAGRSRILDTFIKSVTIYSDRVEIVFNYKHELPEFNDRCETGSHFSVLVGPPGIEPGTDRL

SEQ ID NO: 5409 - protein, 506 aa, Unknown
  Description of Unknown: Integrase B5410 sequence
  cd09606,PTHR30461:SF3,cd00338,SM00857,G3DSA:1.10.10.2600, IPR036162,PS51737,G3DSA:3.40.50.1390,IPR006119,IPR038109, PF07508,SSF53041,IPR011109,PTHR30461,PS51736, Coil,PF00239
MVLMYLRKSRSDNPYETVEEVLSRHETMLQEYAEKSYGYRIPESQIYREVVSGEKIHTRPEMQILLKRIESSNVKSVLVVDPQRLSRGDLMDCGRLMQAFKYSRTTIVTPMKIFDLWDKFDEKMFQDELLRGRDYLEYAKEVMARGRKLSASEGWYLGSVPPFGYDIDYVMDGKRRRKTLKPNQIEAPIVDKIFSWFVDLKMSLYGIAAKLNNMGIKPRKAEHFSTDAVRHILSNPIYIGKISVGRRPMVEKLVDGKVVVSRPRTAPQRIFDGKQPAITQEERFYAAQERLGNLPKTKMGKGVTNPLVGILKCSCGRAMIYHTGRGEARLMCANRRYCGSRSVPFEEIYNAIIDALKENARDFQIKIDSGIDIALQRYNEEVSEIKGNLQELDVQQERLFSFLESGTYDEMTFRKRNSILMEKQEKLKKQYEEILANEPETIDYKEKIGTLYQAIDAMKSEELTAKQKNDFLKNIIGSIVYTQLEILDNGTRWGKNQYRLDIFLKN

SEQ ID NO: 5410 - protein, 506 aa, Unknown
  Description of Unknown: Integrase B5411 sequence
  PTHR30461:SF3,IPR036162,PS51737,IPR011109,PTHR30461, PS00397,PF00239,G3DSA:1.10.10.2600,IPR006119,SSF53041, cd00338,SM00857,IPR025827,IPR038109,PS51736, IPR006118,PF13408,G3DSA:3.40.50.1390,PF07508,Coil
MTKIITAGIYVRVSTSEQAEQGYSIQTQIRACKDKAYELGAIDILEYADEGFSGAKLDRPAMAKLRDDIRKDKLDIIICYDPDRLARNLAHQLLITDEIEKYCREGLIFVSVSFENSPEGRLFYSMRGAFSAYEREKILERIIRGKKGKLLAGRLGNNHLYGYDFDKDTQMYVINENEAKIIRKIFEWYISGISSEQITDKLNANNIPKIWQGKRYKWSGSTVRTILKNEKYTGIFHGWQYLQVINKCGGYSIKKKDKSQWIDIEIPAIISNEIFEKAQKQIIKNRTYNTRKEKEVHLLTGLAYCGSCGNKIYNHHNIRRKYYVCSILYDKRITDKKICKPKFLHIPEVDELVWNALTKICSSPKLIKEYMTDINNHENTFLNYKEKLCMLDKKLTKLKNSQNDILEWFSDGLIDKETTQKKLENNKQKIEQLNSNKKELLINISNLKEKHTPEDIYNIFKKSTKISIDDKRNILRSILDKIYLTKLDKSKGCKSKLSLKIVFVFK

SEQ ID NO: 5411 - protein, 506 aa, Unknown
  Description of Unknown: Integrase B5412 sequence
  SM00857,G3DSA:1.10.10.2600,IPR036162,PF13408,PS51737, G3DSA:3.40.50.1390,IPR025827,IPR006119,IPR038109,PF07508, IPR011109,SSF53041,PTHR30461,Coil,PS51736, cd00338,PF00239
MAKPEVSELAVVYARYSSHSQGEQSIEGQLSNARDYAAAHGYTIVHEYVDRAKSGRTDNRAEFQQMLKDTAKRQFSVIILWKVDRFGRNREEIAINKMKCRKNGVRVEYVAETIPDSPEGVILESVLEGFAEYYSLQLSQNIRRGRAESAEKCQSLGGNRPLGYKTGPDKKFVIDENTAPTVKMIFTMYADGKTVTEIVDKLNEMGLRTLRGGPFTKNSLHSILKNKKYIGVYEYQGREIKDGVPRIIEDDVFNKVQEMLKINKRAQAKTWSRADYILTDKLFCGKCGALMFGESGTSKTGVKHNYYICSNKKRFRSCDKKAVRQADIEDTVLNATHELLQDDELLDYIVDRTWEYYLAQDNSQEELRNLQRQLAQTDTAISNLIRAIEAGILTEETKKRMDELTQQKADLKASIADREIARGFHLQKSHIAFYLRSLRDADWSDKEAQKRLIQTFVNAVFVYDDHITLTYNFSGDKSTITLHDMQRFEDGEEFGCRASRSTISPP

SEQ ID NO: 5412 - protein, 506 aa, Unknown
  Description of Unknown: Integrase B5413 sequence
  cd00338,SM00857,G3DSA:1.10.10.2600,IPR036162,PF13408, PS51737,G3DSA:3.40.50.1390,IPR025827,IPR006119,IPR038109, PF07508,IPR011109,SSF53041,PTHR30461,PS51736, Coil,PF00239
MYGMYLRKSRSDDPNEDINDTLAKHEKILFDLADSLNINRKEIMQFKEVVSGENIQNRPEMKKLLEYVMEGVLEGVLVVDSQRLARGDTVDQGTIIRAFSINNTKIITPMKTIDPQNEYDQEYFEFDLFMGRREYKMITRRMQRGRHIAAQEGYYVGSIAPYSFSRIKLDKGYSLEIYEEENIVFNIMKKKALEDEGSTNISNHLNELGYKPRKGEYWTKSAVEAILLNETNLGLIKWNSRKEVKVFKDGKIVKTRPRNPNYELYPGKHPAIMTQDEYDRIKFLMKKRSHPVKKDKTLQNPLAGLIVCGFCNHKMARRPYKNGRVETILCTTSRCKNVASDIHVVEQRIIDTLKDTLKNYTNYVNNYSVSVNKTYDDNKKLQLEECDKELEKLNKQIIKACEMLELGAYTVELFKERKNTLENKINTVNKRKDILAKETEAMKIEQYKKAIPQLQNAIDLYWKSSTEEKNKILKSIIDKCIYKKEKGGRWDPDAIKQFKLEIYLKV

SEQ ID NO: 5413 - protein, 506 aa, Unknown
  Description of Unknown: Integrase B5414 sequence
  cd00338,SM00857,G3DSA:1.10.10.2600,IPR036162,PF13408, IPR025827,G3DSA:3.40.50.1390,PS51737,IPR006119,IPR038109, PF07508,SSF53041,IPR011109,PTHR30461,PS51736, Coil,PF00239
MNAVIYARYSSDKQTEQSIEGQLREGYAYAERAGMTIVGAYIDRAISGTSDQRPDFQRMIADSAKRQFEAVIVWKLDRFARNRYDSAIYKSKLKKNGVRVFSVTEGIGDGDESIILEAVLEAMAEMYSKQLGQNAARGMRETARKGLCTGGQIPLGYVVGEDHKLHIDSKTAPAVQLIYTLFADGKTKTQIAKELNARGFRTKNGKLYTSNSFFRILTNPMYYGDYTYKGDIPRECPAIISRALYDKCQERNEATKRSRGMKTSEVEWLLRGKLFCGHCGTQMTGDSGTGRANEKHYYYTCHKRKRYKDCDKKSEKKEQLERAVCQKTVEYVLREDRIGYIAERVVEQYEKEFDASIIKEKEMSLVKLDAELDKCAESLMHTTVRSVVDRINARAEELEAAKSELEHELAQLRITSKARITVDEIITFLRGFCSGDVEDIQFRRKIVDTFINAVYVFDDKYVVYYNVRDCKQVTYSDMLASIHAPSDMSAHGSDCLLYGEPLLNVP

SEQ ID NO: 5414 - protein, 506 aa, Unknown
  Description of Unknown: Integrase B5415 sequence
  SM00857,G3DSA:1.10.10.2600,IPR036162,PS51737,G3DSA:3.40.50.1390, IPR006119,IPR038109,PF07508,IPR011109,SSF53041, PF00239,PTHR30461,PS51736,Coil,cd00338
MVLMYLRKSRADNPYETVEEVLSRHETILQEYAERKYGERIPESQIYREVVSGEKIETRPEMKSVLRRMEAPDVDAVLVVDPQRLSRGDLIDCGTLMQAFKYSYTKIETPMKVFDLWDKFDEKMIRDELMRGREYLEYAKEVMARGRKLSTSEGWYVSSIIPFGYDVDYVMDGKRRRKTLKPNPIESVIVQNIFEWFVNDKLSMYAISDRLNAAGIKTRKDKEFATDAVRGILKNPVYIGKIAIGRRDTKENMVDGKVVKSRPRTEPKKIFDGRHPAIVSEEIFNAAQERIGTLPKVKRSTEFRNPFSGIARCSCGRALAYNIGRGEVRLICGGRKKCGARSVPLDDFTNKVIKALKETASDFSVQIDSGIDIDIQRHAEETKQAEATLRDLEIQQERLYSFLESGTYSEETFRKRNAMLEEKKEKAQNHYEYLLDNEPVKIDYEKKVGTLYQAIDNIASDKLTPKQKNDFLKTIISKIIYTPLPPIDDGTRFGKHQYRLDIFLKD

SEQ ID NO: 5415 - protein, 506 aa, Unknown
  Description of Unknown: Integrase B5416 sequence
  PTHR30461:SF3,SM00857,G3DSA:1.10.10.2600,IPR036162,PF13408, IPR025827,PS51737,G3DSA:3.40.50.1390,IPR006119,IPR038109, PF07508,IPR011109,SSF53041,PF00239, PTHR30461,Coil,cd00338
MRTVITYLRFSSAIQGAEGADSTRRQNDLFKQWLKKNSDAQVVASFSDEGLSGYKGKHLTGQFGDMLARIESGEFPEGTILLVESIDRIGRLEHLETEALMNRILGNGLEIHTLQDGLIYTKDALADDLGISIIQRVKAYIAHQESKQKSFRVSQKWEQRAKLALAGEQRLTKMVPGWIDPDTFKLNEHAETVRLIFKLLLSGESLHNIARHLQSNGIKSFSRRKDANGFSVHSVRTILRSETTIGTLPASQRNDRPAIPNYYEAAIDASTFNKAQEILGKNRIGRTPASDNPLTINIFKGLFRCQCGASVHPTGTKNKYQGVYRCNNHLDGRCDVPPLKRKPFDKWMLENFLGMIDVGNDGEAEGKIASLQHEVEIVTTRIKKATALLLEMDDIDELKIQIKELNQRRTELQTTIDNMRRKASLTDKELPQLKDIDLTTKAGRVECQLILSKHLKGLTLGKDSVIVTLQNDTEITIPTNPLPLNDGTSIFEIAEKELLEIDAYQL

SEQ ID NO: 5416 - protein, 506 aa, Unknown
  Description of Unknown: Integrase B5417 sequence
  cd00338,SM00857,G3DSA:1.10.10.2600,IPR036162,PF13408, IPR025827,G3DSA:3.40.50.1390,PS51737,IPR006119,IPR038109, PF07508,SSF53041,IPR011109,PTHR30461,PS51736, Coil,PF00239
MNAVIYARYSSDKQTEQSIEGQLREGYAYAERAGMTIVGAYIDRAISGTSDQRPDFQRMIADSAKRQFEAVIVWKLDRFARNRYDSAIYKSKLKKNGVRVFSVTEGIGDGDESIILEAVLEAMAEMYSKQLGQNAARGMRETARKGLCTGGQIPLGYVVGEDHKLHIDSKTAPAVQLIYTLFADGKTKTQIAKELNARGFRTKNGKLYTSNSFFRILTNPMYYGDYTYKGDIPRECPAIISRALYDKCQERNEATKRSRGMKTSEVEWLLRGKLFCGHCGTQMTGDSGTGRANEKHYYYTCHKRKRYKDCDKKSEKKEQLERAVCQKTVEYVLREDRIGYIAERVVEQYEKEFDASIIKEKEMSLVKLDAELDKCAESLMHTTVRSVVDRINARAEELEAAKFELEHELAQLRITSKARITVDEIITFLRGFCSGDVEDIQFRRKIVDTFINAVYVFDDKYVVYYNVRDCKQVTYSDMLASIHAPSDMSAHGSDCLLYGEPLLNVP

SEQ ID NO: 5417 - protein, 506 aa, Unknown
  Description of Unknown: Integrase B5418 sequence
  PTHR30461:SF3,IPR036162,PS51737,IPR011109,PTHR30461, PS00397,PF00239,G3DSA:1.10.10.2600,IPR006119,SSF53041, cd00338,SM00857,IPR025827,IPR038109,PS51736, IPR006118,PF13408,G3DSA:3.40.50.1390,PF07508,Coil
MTKIITAGIYVRVSTSEQAEQGYSIQTQIKACKDKAYELGAIDILEYADEGFSGAKLDRPAMTRLRDDIRNHKLDIIICYDPDRLARNLAHQLLITDEIEKYCREGLIFVSVSFENSPEGRLFYSMRGAFSAYEREKILERIIRGKKGKLQAGRLGNNHLYGYDFDKDTQMYVINENEAKIIRQIFEWYISGISSEQITDKLNANNIPKIWQGKRYKWSGSTVRTIIKNEKYTGIFHGWQYLQVINKCGGYSIKKKDKSQWIDIEIPAIISNEIFEKAQKQIIKNRTYNTRKEKEVHLLTGLAYCGSCGNKIYNHHNVRRKYYVCSILYDKRITDKKICKPKFLHIPEVDELVWNALTKICSSPKLIKEYMTDINNHENTFLNYKEKLCMLDKKLTKLKNSQNDILEWFSDGLIDKETAQKKLENNKQKIEQLNSNKKELLINISNLKEKHTPEDIYNIFKKSAKISIDDKRNILRSILDKIYLTKLDKSKECKSKLSLKIVFVFK

SEQ ID NO: 5418 - protein, 506 aa, Unknown
  Description of Unknown: Integrase B5419 sequence
  cd00338,SM00857,G3DSA:1.10.10.2600,IPR036162,PF13408, PS51737,IPR025827,G3DSA:3.40.50.1390,IPR006119,IPR038109, PF07508,IPR011109,SSF53041,PTHR30461,PS51736, Coil,PF00239
MYGMYLRKSRSDDPNEDINDTLAKHEKILFDLADSLNINRKEIMQFKEVVSGENIQNRPEMKKLLEYVMEGVLEGVLVVDSQRLARGDTVDQGTIIRAFSINNTKIITPMKTIDPQNEYDQEYFEFDLFMGRREYKMITRRMQRGRHIAAQEGYYVGSIAPYSFSRIKLDKGYSLEIYEEENIVFNIMKKKALEDEGSTNISNHLNELGYKPRKGEYWTKSAVEAILLNETNLGLIKWNSRKEVKVFKDGKIVKTRPRNPNYELYPGKHPAIMTQDEYDRIKFLMKKRSHPVKKDRTLQNPLAGLIVCGFCNHKMARRPYKNGRVETILCTTSRCKNVASDIHVVEQRIIDTLKDTLKNYTNYVNNYSVSVNKTYDDNKKLQLEECDKELERLNKQIIKACEMLELGAYTVELFKERKNTLENKINTVNKRKDILAKETEAMKIEQYKKAIPQLQNAIDLYWKSSTEEKNKILKSIIDKCIYKKEKGGRWDPDAIKQFKLEIYLKV

SEQ ID NO: 5419 - protein, 506 aa, Unknown
  Description of Unknown: Integrase B5420 sequence
  PTHR30461:SF3,cd00338,SM00857,G3DSA:1.10.10.2600,IPR036162, PS51737,G3DSA:3.40.50.1390,IPR006119,IPR038109,PF07508, SSF53041,IPR011109,PTHR30461,PS51736,Coil, PF00239
MPRQTKKFQATATKGIIWARVSSREQEDGYSLDAQIENSKSYAARKGIDIIKIFEIIESSTQGDRKQFHDMINWVKRQKQRIAIISDKVDRLQRRVSEVPVLEELRKAGKIELHFSRENKVIEKDTNGSDLACYRMIVVMAENYTDCISDNVKRSFKQMRKEGKWAHKAPVGYRNVKDSKGNSDVVIDPDRGFLITALFKEYASGIYNLEQMTKKAQEIGLTMPGSKKLYKQTIRNILSNRFYAGEMYGYGEYYKHQYKTLIDWKTFNRCQEVLEGRMNHKEQKHEHLFKGIMKCKECGTMISPYISIHAAKKKGGEKIAYKYLFCPKCKGTHINEEKGIEKIKQALGSLKSLPNGVLEKMMHCLQDLVYEDHRIELEHKKYLERKLLECDTKQERWHELYAEASITRNIHSKKIKELAQEKEKIAEQLLGYNHIAQQNFITLNYLTRLYFHADQIWDFPKNEQKQKILKLLCSEILLDGKNIVISIRKPILELAKIGSCQIWQGQ

SEQ ID NO: 5420 - protein, 506 aa, Unknown
  Description of Unknown: Integrase B5421 sequence
  cd09606,PTHR30461:SF3,SM00857,G3DSA:1.10.10.2600,IPR036162, PS51737,G3DSA:3.40.50.1390,IPR006119,IPR038109,PF07508, SSF53041,IPR011109,PF00239,PTHR30461,PS51736, Coil,cd00338
MVLMYLRKSRSDNPYETVEEVLSRHETLLQEYAEKVYGYRIPESQIYREVVSGEKIHTRPEMQILLKRIESSDVKSVLVVDPQRLSRGDLMDCGRLMQAFKYSRTTIVTPMKIFDLWDKFDEKMFQDELLRGRDYLEYAKEVMARGRKLSASEGWYLGSVPPFGYDIDYVMDGKRRRKTLKPNQIEAPIVDKIFSWFVDLKMSLYGIAAKLNNMGIKPRKAEHFSTDAVRHILSNPIYIGKISVGRRPMVEKLVDGKVVVSRPRTAPQRIFDGKQPAITQEERFYAAQERLGNIPKTKMGKGVTNPLVGILKCSCGRAMIYHPGRGEARLMCANRRYCGSRSVPFEEIYNAIIDALKENARDFQIKIDSGIDIALQRYNEEVSEIKGNLQELDVQQERLFSFLESGTYDEMTFRKRNSILMEKQEKLKKQYEEILANEPETIDYKEKIGTLYQAIDAMKSEELTAKQKNDFLKNIIGSIVYTQLEILDNGTRWGKNQYRLDIFLKN

SEQ ID NO: 5421 - protein, 506 aa, Unknown
  Description of Unknown: Integrase B5422 sequence
  PTHR30461:SF3,cd00338,SM00857,G3DSA:1.10.10.2600,IPR036162, PF13408,PS51737,G3DSA:3.40.50.1390,IPR025827,IPR006119, IPR038109,PF07508,IPR011109,SSF53041,PTHR30461, PS51736,Coil,PF00239
MRKKCYIYTRVSTAAQTEGYSLEAQTERLRKYAEYKEMEVVREYCDAGRSGMSIKGRPAFMEMMDDISCEKDEISCVLVFKLSRFGRNAADILKSVQLLMDFDVDLVCVEDAIDSSTQGGRLTLAILSAVAEMEHENITVQFMAARMQKLMNGGWPGGGVPYGYVSVNKELVVVPEAADLVRMIYQKYLEPDMMLNTVVGWMNENGYKRVAKGEDKVITSDFVSSVLGNPVYYGMIVYNRRTNSEEIKRNPKEIISVMGKHEAIIPKDVWMRVQEKRKRLRRPQKKVDDPERISLLSGLVKCPVCGTGMITKKNKRKNNNHGGYYKIVYSYGCRNYRKSAGRVCNCSWTYNQEKLDGAVMEIVRKVTKTREFRQAVMDVVGDRSSLDACEEDLKRTRRELHSQEHLKYKLGMELDNLDVFSENYDSEYEAVQLKIDGVYDNIETLEEKIRKLKKRMDALKKGVRSSDNIQKILDNFDLLFERMNCEERRELCRQFVEKIDVFPEER

SEQ ID NO: 5422 - protein, 506 aa, Unknown
  Description of Unknown: Integrase B5423 sequence
  SM00857,G3DSA:1.10.10.2600,IPR036162,PF13408,IPR025827, PS51737,G3DSA:3.40.50.1390,IPR006119,IPR038109,PF07508, SSF53041,IPR011109,PF00239,PTHR30461,PS51736, Coil,cd00338
MAKPEVSELAVVYARYSSHSQGEQSIEGQLSNARDYAAAHGYTIVHEYVDRAKSGRTDNRAEFQQMLKDTAKRQFSVIILWKVDRFGRNREEIAINKMKCRKNGVRVEYVAETIPDSPEGVILESVLEGFAEYYSLQLSQNIRRGRAESAEKCQSLGGNRPLGYKTGPDKKFIIDENTAPTVKMIFTMYADGKTVTEIVDKLNEMGLRTLRGGPFTKNSLHSILKNKKYIGIYEYQGREIMDGVPRIIEDDVFNKVQEMLKINKRAPAKTWSRADYILTDKLFCGKCGALMFGESGTSHTGAKHNYYICSNKKRFRSCDKKAVRQADIEDTVLNATHELLQDDELLDYIVDRTWEYYLAQDNSQEELRNLQRQLAQTDTAISNLIRAIEAGILTEETKKRMDELTQQKADLKASIADREIARGFHLQKSHIAFYLRSLRDADWSDKEAQKRLIQTFVNAVFVYDDHITLTYNFSGDKSTITLRDMQRFEDGEEFGCRASRSTISPP

SEQ ID NO: 5423 - protein, 506 aa, Unknown
  Description of Unknown: Integrase B5424 sequence
  PTHR30461:SF3,IPR036162,PS51737,IPR011109,PTHR30461, PS00397,PF00239,G3DSA:1.10.10.2600,IPR006119,SSF53041, cd00338,SM00857,IPR025827,IPR038109,PS51736, IPR006118,PF13408,G3DSA:3.40.50.1390,PF07508,Coil
MTKIITAGIYVRVSTSEQAEQGYSIQTQIKACKDKAYELGAIDILEYADEGFSGAKLDRPAMTRLRDDIRNHKLDIIICYDPDRLARNLAHQLLITDEIEKYCREGLIFVSVSFENSPEGRLFYSMRGAFSAYEREKILERIIRGKKGKLLAGRLGNNHLYGYDFDKDTQMYVINENEAKIIRQIFEWYISGISSEQITDKLNANNIPKIWQGKRYKWSGSTVRTILKNEKYTGIFHGWQYLQVINKCGGYSIKKKDKSQWIDIEIPAIISNEIFEKAQKQIIKNRTYNTRKEKEVHLLTGLAYCGSCGNKIYNHHNIRRKYYVCSILYDKRITDKKICKPKFLHIPEVDELVWNALTKICSSPKLIKEYMTDINNHENTFLNYKEKLCMLDKKLTKLKNSQNDILEWFSDGLIDKETAQKKLENNKQKIEQLNSNKKELLINISNLKEKHTPEDIYNIFKKSAKISIDDKRNILRSILDKIYLTKLDKSKECKSKLSLKIVFVFK

SEQ ID NO: 5424 - protein, 506 aa, Unknown
  Description of Unknown: Integrase B5425 sequence
  PTHR30461:SF3,SM00857,G3DSA:1.10.10.2600,IPR036162,PF13408, IPR025827,G3DSA:3.40.50.1390,PS51737,IPR006119,IPR038109, PF07508,SSF53041,IPR011109,PTHR30461,Coil, PS51736,cd00338,PF00239
MRTVITYLRFSSATQGAEGADSTRRQNDLFKQWLKKNSDAQVVASFSDEGLSGYKGKHLTGQFGDMLARIEAGEFPGGTILLVESIDRIGRLEHLETEALMNRIIAHGIEIHTLQDGLIYTRDALSDDLGISIIQRVKSYLAHQESKQKSFRVSEKWKQRAKLALAGKQRLTKMVPGWIDPDTLKLNEHAETVRLIFKLLLSGESLHNIARHLQSNGIKSFSRRKDANGFSVHSVRTILRSETTIGTLPASQRNDRPAIPNYYEAAIDAATFNKAQEILDKNRKGRTPASDNPLTINIFKGLFRCQCGASVHPTGTKNKYAGVYRCNNHLDGRCDVPPLKRKPFDRWMIDNFLGMIDVGNDGEAEGKIASLQHEVEIVTARIKKATALLLEMDDITELKAQVKGLNQKRTELQTTIDNMRRKASLTDKELPQLKDIDLTTKAGRVECQLILSKHLKGLTLGKDSVTVTLQNDTEITIPTNPLPLNDGSPIFEIADKELLDIDAYQL

SEQ ID NO: 5425 - protein, 506 aa, Unknown
  Description of Unknown: Integrase B5426 sequence
  PTHR30461:SF3,IPR036162,PS51737,IPR011109,PTHR30461, PS00397,PF00239,G3DSA:1.10.10.2600,IPR006119,SSF53041, cd00338,SM00857,IPR025827,IPR038109,PS51736, IPR006118,PF13408,G3DSA:3.40.50.1390,PF07508,Coil
MTKIITAGIYVRVSTSEQAEQGYSIQTQIRACKDKAYELGAIDILEYADEGFSGAKLDRPAMAKLRDDIRKDKLDIIICYDPDRLARNLAHQLLITDEIEKYCREGLIFVSVSFENSPEGRLFYSMRGAFSAYEREKILERIIRGKKGKLLAGRLGNNHLYGYDFDKDTQMYVINENEAKIIRKIFEWYISGISSEQITDKLNANNIPKIWQGKRYKWSGSTVRTILKNEKYTGIFHGWQYLQVINKCGGYSIKKKDKSQWIDIEIPAIISNEIFEKAQKQIIKNRTYNTRKEKEVHLLTGLAYCGSCGNKIYNHHNIRRKYYVCSILYDKRITDKKICKPKFLHIPEVDELVWNALTKICSSPKLIKEYMTDINNHENTFLNYKEKLCMLDKKLTKLKNSQNDILEWFSDGLIDKETAQKKLENNKQKIEQLNSNKKELLINISNLKEKHTPEDIYNIFKKSAKISIDDKRNILRSILDKIYLTKLDKSKECKSKLSLKIVFVFK

SEQ ID NO: 5426 - protein, 506 aa, Unknown
  Description of Unknown: Integrase B5427 sequence
  cd00338,SM00857,G3DSA:1.10.10.2600,IPR036162,PF13408, IPR025827,G3DSA:3.40.50.1390,PS51737,IPR006119,IPR038109, PF07508,IPR011109,SSF53041,PTHR30461,PS51736, Coil,PF00239
MYGMYLRKSRSDDPNEDINDTLAKHEKILFDLADSLNINRKEIMQFKEVVSGENIQNRPEMKKLLEYVMEGVLEGVLVVDSQRLARGDTVDQGTIIRAFSINNTKIITPMKTIDPQNEYDQEYFEFDLFMGRREYKMITRRMQRGRHIAAQEGYYVGSIAPYSYSRIKLEKGYSLEIYEEENIVFNIMKKKALEDEGSTNISNHLNDLGYKPRKGEYWTKSAVEAILLNETNLGLIKWNSRKEVKVFKDGKIVKTRPRNPNYELYPGKHPAIMTQDEYDRIKFLMKKRSHPVKKDKTLQNPLAGLIVCGFCNHKMARRPYKNGRVETILCTTSRCKNVASDIHVVEQRIIDTLKDTLKNYTNYVNNYSVSVNKTYDDNKKLQLEECDKELERLNKQIIKACEMLELGAYTVELFKERKNTLENKINTVNKRKDILAKETEAMKIEQYKKAIPQLQNAIDLYWKSSTEEKNKILKSIIDKCTYKKEKGGRWDPDAIKQFKLEIYLKV

SEQ ID NO: 5427 - protein, 506 aa, Unknown
  Description of Unknown: Integrase B5428 sequence
  PTHR30461:SF3,SM00857,G3DSA:1.10.10.2600,IPR036162,PF13408, IPR025827,G3DSA:3.40.50.1390,PS51737,IPR006119,IPR038109, PF07508,SSF53041,IPR011109,PF00239,PTHR30461, PS51736,Coil,cd00338
MRSVITYLRFSSATQGAEGADSTRRQNELFKQWLRKNSDAQVVASFNDEGLSGYKGKHLSGQFGDMLSRIESGEFPEGTILLVEAIDRIGRLEHLETEALMNRIIAHGIEIHTLQDGLIYTRDALSDDLGISIIQRVKSYIAHQESKQKSFRVSQKWEQRAKLALAGEQRLTRNVPGWIDPETFKLNEHAETVRLIFKLLLDGESLHNIARHLQSNGIRSFSRRKDANGFSVHSVRTILRSETAIGTLPASQRNDRPAIPNYYEAAIDASTFNKAQEILGKNRIGRTPASDNPLTINIFKGLFRCQCGASVHPTGTKNKYQGVYRCNNHLDGRCDVPPLKRKPFDRWMIDNFLGMIDVVSDGETERRIAALQHEVETVTARIKKATALLLEMDDITELKAQVKELNQKRTELQTTIDTLKRKTSLTDKELPQLKDIDLMTKAGRVECQLILSKHLKGLTLGKDSVTVTLQNDTEITIPTNPLPLNDGTSIFEIADKELLEIDAYQL

SEQ ID NO: 5428 - protein, 506 aa, Unknown
  Description of Unknown: Integrase B5429 sequence
  PTHR30461:SF3,SM00857,G3DSA:1.10.10.2600,IPR036162,PF13408, PS51737,G3DSA:3.40.50.1390,IPR025827,IPR006119,IPR038109, PF07508,IPR011109,SSF53041,PTHR30461,Coil, cd00338,PF00239
MRTAITYLRYSSAIQGAEGADSTRRQNDLFKQWLKKNSDAQIVASFSDEGLSGYKGKHLTGQFGDMLARIEAGEFPAGTILLVESIDRIGRLEHLETEALMNRILCNGIEIHTLQDGLVYTKDALADDLGISIIQRVKAYIAHQESKQKSFRVSQKWGQRAKLALAGKQRLTKMVPGWIDPETFKLNEHAETVRLIFKLLLDGESLHNIARHLQANNISSFSRRKDANGFSVHSVRTVLRSESVIGTLPASQRNDRPAIPNYYEAAIDAATFNKAQEILDKNRKGRTPASDNPLTINIFKGLFRCQCGASVHPTGTKNKYAGVYRCNNHLDGRCDVPPLKRKPFDKWVLENFLGMIDVGNDGESERKIAALQHEVEIVTARIKKATALLLEMDDIDELKIQLKELNQRRTELQTTIDSMRRKTSLTDKELPQLKDIDLTTKAGRVECQLILSKHLKGLTLGKGSVTITLQNDTEITIPTNPLPLNDGSPIFEIADKELLDIDAYQL

SEQ ID NO: 5429 - protein, 506 aa, Unknown
  Description of Unknown: Integrase B5430 sequence
  PTHR30461:SF3,SM00857,G3DSA:1.10.10.2600,IPR036162,PS51736, PS51737,G3DSA:3.40.50.1390,PF13408,IPR025827,IPR006119, IPR038109,PF07508,IPR011109,SSF53041,PTHR30461, mobidb-lite,cd00338,PF00239
MQAAAYARYSTEHQTESSIAYQMRKIEEYCNDHSITVIARYTDEAKSGTNTQRPAFQQLCKDAAQRKFDAVVIYDISRGSRDVSDWFGFRKQMAILGIQVISVEDRIGDILNPSDYLTELITVGLGQHHVLTSRQKSMDSIATKAKTGQFLGGTPNFGYNVVNGRYVINPAEAEIVQKIYRMYAAGKSYGEILAEIGEVRGKRGRVIGKNSLHYLLRNERYIGVYSWCKYHHKIMGKYAGNIPNENAVRIEDSIPAIIDKDTWEAVQIRMNDKKQRACNKAKRSYLLSGLIECTECGANYVGHTSTNKKGYSTRYYCCGNKYRNHTCHAKNLNAEELEIFVVQNLKQYLSDLDFSQMAQQVADEINGASVDLKAERKELADIIFQLNNGTKAILKGIDYPELQEEMFRLRVRKSELEDIIRRGEEKKPVSAEKLEQLFQHAVKQLDTDTKQICKSMVKIYAHPNGDCDLEVGVHISGCGRAKSANRKTEHKQPTRKKKKPKSKETR

SEQ ID NO: 5430 - protein, 506 aa, Unknown
  Description of Unknown: Integrase B5431 sequence
  PTHR30461:SF3,cd00338,SM00857,G3DSA:1.10.10.2600,IPR036162, PS51737,G3DSA:3.40.50.1390,IPR006119,IPR038109,PF07508, SSF53041,IPR011109,PTHR30461,PS51736,Coil, PF00239
MKTAIYLRKSRQDEELEKRENTDTLARHRSTLLSIAKKQHLDIIEVKEEIVSGGSIASRPKMLELLDEVKNNDYDAVLCMDLDRLGRGGMQDQGLILDTFKESHTLIITPDKTYDLNNDLDEEMTEFKSFFARRELKMITKRMQRGRLKSIEEGNYISSQAPFGYKFEYTKDGKRLLVIDEEKASIVKEIFALYISNYGSYRIKVYLDNIGAKTNAGKPFTENAIRRILKNNIYCGYVSWNKVKRKGTKSVNNSKDDIIYAKGKHEAIISENMFKIAKNILEGKQTPSLSLNKNLINPLAGLVKCACCNHTMAVSRTTYKNGDTVLFLKCNHCSKNSSSKLEVVEKSILDYLEVFLYEYKNEILNNKIENHNNDRIDNLKHTLQLLEKESSELNKQKNNLHDLLERGVYDIDTYLERTNILRSKTEDNERAIKNTKELIKNESKVNLSYTELIPKINKIILGYKNTDNVFDKNMLLKSIIDEIIYFKERGNRKGKFELDIKLKLPV

SEQ ID NO: 5431 - protein, 506 aa, Unknown
  Description of Unknown: Integrase B5432 sequence
  PTHR30461:SF3,cd00338,SM00857,G3DSA:1.10.10.2600,IPR036162, PF13408,PS51737,G3DSA:3.40.50.1390,IPR025827,IPR006119, IPR038109,PF07508,SSF53041,IPR011109,PTHR30461, Coil,PF00239
MRSVITYLRFSSAIQGAEGADSTRRQNDLFKQWLKKNSDAQVVASFSDEGLSGYKGKHLTGQFGDMLARIESGEFPEGTILLVESIDRIGRLEHLETEALMNRILGNGLEIHTLQDGLIYTKDALADDLGISIIQRVKAYIAHQESKQKSFRVSEKWKQRAKLALAGEQRLTKMVPGWIDPDTLKLNEHAETVRLIFKLLLSGESLHNIARHLQSNGIKSFSRRKDANGFSVHSVRTILRSETTIGTLPASQRNDRPAIPNYYEAAIDAATFNKAQEILDKNRKGRTPASDNPLTINIFKGLFRCQCGASVHPTGTKNKYAGVYRCNNHLDGRCDVPPLKRKPFDKWMLENFLGMIDVGNDGEAEGKIASLQHEVEIVTTRIKKATALLLEMDDIDELKIQIKELNQRRTELQTTIDNMRRKASLTDKELPQLKDIDLTTKAGRVECQLILSKHLKGLTLGKDSVIVTLQNDTEITIPTNPLPLNDGTSIFEIAEKELLEIDAYQL

SEQ ID NO: 5432 - protein, 506 aa, Unknown
  Description of Unknown: Integrase B5433 sequence
  PTHR30461:SF3,cd00338,SM00857,G3DSA:1.10.10.2600,IPR036162, PF13408,IPR025827,PS51737,G3DSA:3.40.50.1390,IPR006119, IPR038109,PF07508,SSF53041,IPR011109,PTHR30461, PS51736,Coil,PF00239
MRSVITYLRYSSAIQGAEGADSTRRQNDLFKQWLKKNSDAQVVASFSDEGLSGYKGKHLTGQFGDMLARIESGEFSKGTILLVESIDRIGRLEHLETEALMNRIIAHGIEIHTLQDGLIYTRDALSDDLGISIIQRVKSYLAHQESKQKSFRVSQKWGQRAKLALAGKQRLTKMVPGWIDPETFEVNEHAETVRLIFKLLLDGESLHNIARHLQANNISSFSRRKDANGFSVHSVRTILRSETTIGTLPASQRNDRPAIPNYYEAAIDAATFNKAQEILDKNRKGRTPASDNPLTINIFKGLFRCQCGASVHPTGTKNKYAGVYRCNNNPDGRCDVPPLKRKPFDRWMIDNFLGMIDVGNDGESERKIAALQHEVEIVTARIKKATALLLEMDDITELKTQVKGLNQKRTELQTTIDNMRRKASLTDKELPQLKDIDLTTKAGRVECQLILSKHLKGLTLGKDSVTVTLQNDTKITIPTNPLPLNDGSPIFEIADKELLDIDAYQL

SEQ ID NO: 5433 - protein, 506 aa, Unknown
  Description of Unknown: Integrase B5434 sequence
  cd00338,SM00857,G3DSA:1.10.10.2600,IPR036162,PF13408, PS51737,G3DSA:3.40.50.1390,IPR025827,IPR006119,IPR038109, PF07508,IPR011109,SSF53041,PTHR30461,PS51736, Coil,PF00239
MYGMYLRKSRSDDPNEDINDTLAKHEKILFDLADSLNINRKEIMQFKEVVSGENIQNRPEMKKLLEYVMEGVLEGVLVVDSQRLARGDTVDQGTIIRAFSINNTKIITPMKTIDPQNEYDQEYFEFDLFMGRREYKMITRRMQRGRHIAAQEGYYVGSIAPYSFSRIKLDKGYSLEIYEEENIVFNIMKKKALEDEGSTNISNHLNELGYKPRKGEYWTKSAVEAILLNETNLGLIKWNSRKEVKVFKDGKIVKTRPRNPNYELYPGKHPAIMTQDEYDRIKFLMKKRSHPVKKDRTLQNPLAGLIVCGFCNHKMARRPYKNGRVETILCTTSRCKNVASDIHVVEQRIIDTLKDTLKNYTNYVNNYSVSVNKTYDDNKKLQLEECDKELEKLNKQIIKACEMLELGAYTVELFKERKNTLENKINTVNKRKDILAKETEAMKIEQYKKAIPQLQNAIDLYWKSSTEEKNKILKSIIDKCIYKKEKGGRWDPDAIKQFKLEIYLKV

SEQ ID NO: 5434 - protein, 506 aa, Unknown
  Description of Unknown: Integrase B5435 sequence
  PTHR30461:SF3,cd00338,SM00857,G3DSA:1.10.10.2600,IPR036162, PF13408,IPR025827,G3DSA:3.40.50.1390,PS51737,IPR006119, IPR038109,PF07508,IPR011109,SSF53041,PTHR30461, PS51736,Coil,PF00239
MPKKETTAPVKAVLYARYSSDRQREESIEGQIRVCEDYARRNNMVIVHTYADRAMTGRSDQRPEFQMMIQAAATQAFDVVLVYKLNRFARNRYDSAKYKHKLKKYGVHVVSAMENIANDPSGILLESVIEGMAEYYSAELAENVMRGMTENALECKWSGGLVPLGYKLDADHHLVIDEAGAQIVRRIYQMVLDGRTPTGIINELNAANCRTSTGRPFGKSSLTTILRNEKYIGTYTWNHIRKENAIPAIIDRKTFEAVQKTLQYRKNNHVKVCSENFLLTGKLFCGQCGSNMVGTSGTSKYKNTYYYYACTKHLKKDGCTARNIRADKLEELVCSVTTRILSSKEAVHAIARQAVEAQKKQKESLTVQSLKNQSAEINKKLKNCVQAVESGLISVTITNHIKEYEKRLTGLNEAISREELLSGKSKLTEKHIEFFFYSIAQKIKTADKYKSILLSSLVRSVIVYDDYIEIQYNYKNELPLLQNPVRVKSSNLNGMVIHPGFEPGTP

SEQ ID NO: 5435 - protein, 506 aa, Unknown
  Description of Unknown: Integrase B5436 sequence
  cd00338,SM00857,G3DSA:1.10.10.2600,IPR036162,PS51737, G3DSA:3.40.50.1390,IPR006119,IPR038109,PF07508,SSF53041, IPR011109,PTHR30461,PS51736,Coil,PF00239
MVLMYLRKSRSDNPYETVEEVLSRHETILQEYAEKKYGERIPESQIYREVVSGEKIETRPEMKSVLRRMEAPDVDAVLVVDPQRLSRGDLIDCGTLMQAFKYSYTKIETPMKVFDLWDKFDEKMIRDELMRGREYLEYAKEVMARGRKLSTSEGWYVSSIIPFGYDVDYVMDGKRRRKTLKPNPIESVIVQNIFDWFVKDKLSMYAISDRLNAAGIKTRKDKEFATDSVRGILKNPVYIGKIAIGRRDTKENMVDGKIVKSRPRTEQKKIFEGQHPAIISEEIFNAAQDRIGTLPKVKRSTEFRNPFSGIARCSCGRALAYNIGRGEVRLICGGRKKCGARSVTLDDFTSKVIKALKETASDFSVQIDSGIDIDIQKHAEETKQAEATLRDLEIQQERLYSFLESGTYSEEIFRKRNAMLEEKKEKAQNHYEYLLDNEPVKIDYEKKVGTLYQAIDNIASDKLTPKQKNDFLKTIISKIIYTPLPSIYDGTRFGQHQYRLDIFLKD

SEQ ID NO: 5436 - protein, 506 aa, Unknown
  Description of Unknown: Integrase B5437 sequence
  PTHR30461:SF3,cd00338,SM00857,G3DSA:1.10.10.2600,IPR036162, PF13408,PS51737,G3DSA:3.40.50.1390,IPR025827,IPR006119, IPR038109,PF07508,IPR011109,SSF53041, PTHR30461,PS51736,Coil,PF00239
MRSVITYLRFSSAIQGAEGADSTRRQNDLFKQWLKKNSDAQVVASFSDEGLSGYKGKHLTGQFGDMLARIESGEFPEGTLLLVEAIDRIGRLEHLETEALMNRIIAHGIEIHTLQDGLIYTRDALSDDLGISIIQRVKSYVAHQESKQKSFRVSQKWKQRAKLALAGEQRLTKMVPGWIDPDTFKCNEHAETVRLIFKLLLDGESLHNIARHLQANNISSFSRRKDANGFSVHSVRTILRSETTRGTLPASQRNDRPAIPNYYEAAIDASTFNKAQEILDKNRKGRTPASDNPLTINIFKGLFRCQCGASVHPTGTKNKYAGVYRCNNHLDGRCDVPPLKRKPFDKWMIDNFLGMIDVGNDGEAEGKIASLQHEVEIVTARIKKATALLLEMDDIDELKIQLKELNQKRTELQTMIDNMRRKASLTDKELPQLKDIDLMTKAGRVECQLILSKHLKGLTLGKDSVTVTLQNDTEIIVPTDPLPLNDGTSIFEIAEKELLEIDAYQL

SEQ ID NO: 5437 - protein, 506 aa, Unknown
  Description of Unknown: Integrase B5438 sequence
  PTHR30461:SF3,SM00857,G3DSA:1.10.10.2600,IPR036162,PF13408, PS51737,G3DSA:3.40.50.1390,IPR025827,IPR006119,IPR038109, PF07508,SSF53041,IPR011109,PF00239,PTHR30461, PS51736,Coil,cd00338
MRSVITYLRFSSAIQGAEGADSTRRQNDLFKQWLKKNSDAQVVASFSDEGLSGYKGKHLTGQFGDMLARIESGEFPEGTLLLVEAIDRIGRLEHLETEALMNRIIAHGIEIHTLQDGLIYTRDALSDDLGISIIQRVKSYLAHQESKQKSFRVSEKWKQRAKLALAGKQRLTKMVPGWIDPDTLKLNEHAETVRLIFKLLLSGESLHNIARHLQSNGIKSFSRRKDANGFSVHSVRTVLRSVSAIGTLPASQRNDRPAIPNYYEAAIDASMFNKAQEILDKNRKGRTPASDNPLTINIFKGLFRCQCGASVHPTGTKNKYQGVYRCNNHLDGRCDVPPLKRKPFDKWMIDNFLGMIDVGNDGEAEGKIASLQHEVEIVTTRIKKATALLLEMDDIDELKIQLKELNQKRTELQTTIDNMRRKASLTDKELPQLKDIDLTTKAGRVECQLILSKHLKGLTLGKGSVTITLQNDTEITIPTNPLPLNDGSPIFEIADKELLDIDAYQL

SEQ ID NO: 5438 - protein, 506 aa, Unknown
  Description of Unknown: Integrase B5439 sequence
  PTHR30461:SF3,SM00857,G3DSA:1.10.10.2600,IPR036162,PF13408, IPR025827,G3DSA:3.40.50.1390,PS51737,IPR006119,IPR038109, PF07508,IPR011109,SSF53041,PTHR30461,Coil, PS51736,cd00338,PF00239
MRAVIYARYSAGSGQTELSIEGQLRECKKYIEKKGYTLGEVYADRHVSGLSTKGREEFKRLMDDAKAHKFDVVVCYDTSRFARDKFDAVVYKTELRKRLGIAIEWATMNVEGPEGVLLEAIMEGWNQYFSEELSRKTKRGMAEAASKGLSLGSRPPLGYTLKDRHFVVDEAGAEAVREVFKAYTGGASFADCARMLNAQGFRTATGKPFNGSAVRYMLTNKKYLGIHGGASGVVPAIVDPEVFQAARDRIGERPPKSVKHDFALVGKLTCGCCGSRMTGTSTLSKGRRYYYYKCSNKCEGQPVRQDKLDSFVAACAQEALSKPKTIKEVASRLFAYQKKESPLESKIEALGKSLKSLDMKIDNLTTALAERPASKALLTRLDDLEEQREQVQRAIEAEPEQEPCRILSEHAIADGLAGLLAPLSDPDRIQSQERWILDSLVEAVELTPDEVLITYATDSIVKRDQEGQVSKKVLIGTPDSTFFETMELYTAPGAVILSCSRSAASF

SEQ ID NO: 5439 - protein, 506 aa, Unknown
  Description of Unknown: Integrase B5440 sequence
  cd09606,PTHR30461:SF3,cd00338,SM00857,G3DSA:1.10.10.2600, IPR036162,PS51737,G3DSA:3.40.50.1390,IPR006119,IPR038109, PF07508,IPR011109,SSF53041,PTHR30461,PS51736, Coil,PF00239
MVLMYLRKSRSDNPYETVEEVLSRHETMLQEYAEKSYGYRIPESQIYREVVSGEKIHTRPEMQILLKRIESSDVKSVLVVDPQRLSRGDLMDCGRLMQAFKYSRTTIVTPMKIFDLWDKFDEKMFQDELLRGRDYLEYAKEVMARGRKLSASEGWYLGSVPPFGYDIDYVMDGKRRRKTLKPNQIEAPIVDKIFSWFVDLKMSLYGIAAKLNNMGIKPRKAEHFSTDAVRHILSNPIYIGKISVGRRPMVEKLVDGKVVVSRPRTDPQRIFDGKQPAITQEERFYAAQERLGNLPKTKMGKGVTNPLVGILKCSCGRAMIYHPGRGEARLMCANRRYCGSRSVPFEEIYNAIIDALKENARDFQIKIDSGIDIALQRYNEEVSEIKGNLQELDVQQERLFSFLESGTYDEMTFRKRNSILMEKQEKLKKQYEEILANEPETIDYKEKIGTLYQAIDAMKSEELTAKQKNDFLKNIIGSIVYTQLEILDNGTRWGKNQYRLDIFLKN

SEQ ID NO: 5440 - protein, 506 aa, Unknown
  Description of Unknown: Integrase B5441 sequence
  PTHR30461:SF3,IPR036162,PS51737,IPR011109,PTHR30461, PS00397,PF00239,G3DSA:1.10.10.2600,IPR006119,SSF53041, cd00338,SM00857,IPR025827,IPR038109,PS51736, IPR006118,PF13408,G3DSA:3.40.50.1390,PF07508,Coil
MTKIITAGIYVRVSTSEQAEQGYSIQTQIKACKDKAYELGAIDILEYADEGFSGAKLDRPAMTRLRDDIRNHKLDIIICYDPDRLARNLAHQLLITDEIEKYCREGLIFVSVSFENSPEGRLFYSMRGAFSAYEREKILERIIRGKKGKLQAGRLGNNHLYGYDFDKNTQMYVINENEAKIIRQIFEWYISGISSEQITDKLNANNIPKIWQGKRYKWSGSTVRTIIKNEKYTGIFHGWQYLQVINKCGGYSIKKKDKSQWIDIEIPAIISNEIFEKAQKQIIKNRTYNTRKEKEVHLLTGLAYCGSCGNKIYNHHNVRRKYYVCSILYDKRITDKKICKPKFLHIPEVDELVWNALTKICSSPKLIKEYMTDINNHENTFLNYKEKLCMLDKKLTKLKNSQNDILEWFSDGLIDKETAQKKLENNKQKIEQLNSNKKELLINISNLKEKHTPEDIYNIFKKSAKISIDDKRNILRSILDKIYLTKLDKSKECKSKLSLKIVFVFK

SEQ ID NO: 5441 - protein, 506 aa, Unknown
  Description of Unknown: Integrase B5442 sequence
  PTHR30461:SF3,SM00857,G3DSA:1.10.10.2600,IPR036162,PF13408, PS51737,G3DSA:3.40.50.1390,IPR025827,IPR006119,IPR038109, PF07508,IPR011109,SSF53041,PTHR30461,Coil, cd00338,PF00239
MRSVITYLRYSSAIQGAEGADSTRRQNDLFKQWLKKNSDAQVVASFSDEGLSGYKGKHLTGQFGDMLARIESGEFPEGTILLVESIDRIGRLEHLETEALMNRILGNGLEIHTLQDGLIYTKDALADDLGISIIQRVKAYIAHQESKQKSFRVSQKWEQRAKLALAGEQRLTKMVPGWIDPDTFKLNEHAETVRLIFKLLLSGESLHNIARHLQANNISSFSRRKDANGFSVHSVRTILRSETTIGTLPASQRNDRPAIPNYYEPAIDASTFNKAQEILDKNRKGRTPASDNPLTINIFKGLFRCQCGASVHPTGTKNKYAGVYRCNNHLDGRCDVQPLKRKPFDRWMIDNFLGMIDVGNDGKSKRKIASLQHEVEIVTARIKKATALLLEMDDITELKTQVRELNQKRTELQTTIDTLKRKTSLTDKELTQLKDIDLMTKAGRVECQLILSKHLKGLTLGKDSVTVTLQNDTEITIPTNPLPLNDGSPIFEIADKELLDIDAYQL

SEQ ID NO: 5442 - protein, 506 aa, Unknown
  Description of Unknown: Integrase B5443 sequence
  PTHR30461:SF3,cd00338,SM00857,G3DSA:1.10.10.2600,IPR036162, PF13408,PS51737,G3DSA:3.40.50.1390,IPR025827,IPR006119, IPR038109,PF07508,IPR011109,SSF53041,PTHR30461, PS51736,Coil,PF00239
MKNAMYLRKSRQDEGGLEETLRKHKEILLDFAVKNNIQISDDDIYEETISGESLYARPEMLKLLQNIDNGMYNAVLCVDVDRLGRGGMSDQGIIFETFKNNDTKIITPRKVYDLNDEFDEDNIEFESFMARRELKIIKRRLKRGTKKSIEEGCYLANAPYGYKNTVVNKKHTLEIVEDEARIVRTIFDLYVNKGMGCQSIAYAINAMGAKPRRTEQFGRTTVMFILKNNVYIGKIVWDKKTHIRKNTRGNSKHIVIYNDKDKWTVCEGLHPPIIDMETWNKAQQIIAERTHPPTNKGEIKNVLSHLIYCGNCGGLMTRTISRGSKNDTRNKKYYYSCKSKGCIKATQCHYVDDIVINTLRYRFKDMVLDIAEQNNVHYIDYSSQIKGIKSELKKLDTQLNSLHDLLEQGIYDIPTFMDRQKTINMKKSELNNQLDIIDKKTSENKMIDEISMMNRIQSVLDVFDRATPQEKNQLLRTIVDKITYYKKPSDPTDKCRLVITLKPVFF

SEQ ID NO: 5443 - protein, 506 aa, Unknown
  Description of Unknown: Integrase B5444 sequence
  PTHR30461:SF3,cd00338,SM00857,G3DSA:1.10.10.2600,IPR036162, PF13408,IPR025827,G3DSA:3.40.50.1390,PS51737,IPR006119, IPR038109,PF07508,SSF53041,IPR011109,PTHR30461, PS51736,Coil,PF00239
MYEDIKTACLYVRFSSHNQTEQSIEGQTRVCRDFCKRHNIRIVELYADRATSASKDIEKRVQFLKMIKDSEKGLFDAVIVYKLDRFARSRYDSATYKYRLKRNGVQLISATENISNDPEGIILESVLEGMAEFYSAELSQKINRGMRESAYKHNSIGGAIPLGYKIEDKKLVIDPKTAPIVKEAFEKYADGETVAEICRQFNARGYKTSKGTAFGKSSFTKIFRNERYIGVYTFHDYRAEDAIPAIIDKDLWDRVQLRVGKIKNAPARNKAKVVYLLSGKIFCGHCGSKMNGNCNAGNYCYYQCYGKKNGNVDCKKKNIRKEFIERLVAQDALSLLTDEYIEQIATIACEKNQHEIELDSALPTIRDRIHQVDLSLNHLLKAIESGLAPDMLVKRMGELEKEKKDLQAQAKKESEDIVELDKAQVIYWLEQFRGGSIEDEEFCRMLIDLFVNSVTVWDEDDNTYKVTVAYNLTSLPTKTYRLNKGGTLSDFASNAPARPPVVYANA

SEQ ID NO: 5444 - protein, 506 aa, Unknown
  Description of Unknown: Integrase B5445 sequence
  PTHR30461:SF3,SM00857,G3DSA:1.10.10.2600,IPR036162,PF13408, IPR025827,G3DSA:3.40.50.1390,PS51737,IPR006119,IPR038109, PF07508,IPR011109,SSF53041,PF00239,PTHR30461, PS51736,Coil,cd00338
MPKKETTAPVKAVLYARYSSDRQREESIEGQIRVCEDYARRNNMVIVHTYADRAMTGRSDQRPEFQMMIQAAATQAFDVVLVYKLNRFARNRYDSAKYKHKLKKYGVHVVSAMENIADDPSGILLESVIEGMAEYYSAELAENVMRGMTENALECKWSGGLVPLGYKLDADHHLVIDEAGAQIVRRIYQMVLDGRTPTGIINELNAANCRTSTGRPFGKSSLTTILRNEKYIGTYTWNHIRKENAIPAIIDRKTFEAVQKTLQYRKNNHVKVCSENFLLTGKLFCGQCGSNMVGTSGTSKYKKTYYYYACTKHLKKDGCTARNIRADKLEELVCSVTTRILSSKEAVHAIARQAVEAQKKQKESLTVQSLKNQAAEINKKLKNCVQAVESGLISVTITNHIKEYEKRLTELNKAISREELLSGKSKLTEKHIEFFFYSIAQKIKTADKYKSILLSSLVRCVIVYNDYIEIQYNYKNELPLLQNPVRVKSSNLNGMVTQEGFEPPTP

SEQ ID NO: 5445 - protein, 506 aa, Unknown
  Description of Unknown: Integrase B5446 sequence
  cd09606,PTHR30461:SF3,cd00338,SM00857,G3DSA:1.10.10.2600, IPR036162,PS51737,G3DSA:3.40.50.1390,IPR006119,IPR038109, PF07508,SSF53041,IPR011109,PTHR30461,PS51736, Coil,PF00239
MVLMYLRKSRSDNPYETVEEVLSRHETMLQEYAEKAYGYRIPESQIYREVVSGEKIHTRPEMQILLKRIESSDVKSVLVVDPQRLSRGDLMDCGRLMQAFKYSRTTIVTPMKIFDLWDKFDEKMFQDELLRGRDYLEYAKEVMARGRKLSASEGWYLGSVPPFGYDIDYVMDGKRRRKTLKPNQIEAPIVDKIFSWFVDLKMSLYGIAAKLNNMGIKPRKAEHFSTDAVRHILSNPIYIGKISVGRRPMVEKLVDGKVVVSRHRTAPQRIFDGKQPAITQEERFYAAQERLGNLPKTKMGKGVTNPLVGILKCSCGRAMIYHPGRGEARLMCANRRYCGSRSVPFEEIYNAIIDALKENARDFQIKIDSGIDIALQRYNEEVSEIKGNLQELDVQQERLFSFLESGTYDEMTFRKRNSILMEKQEKLKKQYEEILANEPETIDYKEKIGTLYQAIDAMKSEELTAKQKNDFLKNIIGSIVYTQLEILDNGTRWGKNQYRLDIFLKN

SEQ ID NO: 5446 - protein, 506 aa, Unknown
  Description of Unknown: Integrase B5447 sequence
  PTHR30461:SF3,cd00338,SM00857,G3DSA:1.10.10.2600,IPR036162, PF13408,IPR025827,PS51737,G3DSA:3.40.50.1390,IPR006119, IPR038109,PF07508,IPR011109,SSF53041,PTHR30461, PS51736,Coil,PF00239
MTNTKDLQTGVIYARYSSDKQRDESIEGQIRECTEYAQREGILITKIYTDRALSARTDNRPEFLQMIRDSANQSFNYVIVYQLDRFSRSREDSAKYKGILRRNGVRVLSAKEHITNEPAGIILESMLEGMAEYYSVELSQKVKRGMTENALKGKMNGAAIPLGYDVTESHHLAVNAHEAKAVRLIYDLYLKHHSIAKISDILHSKGYLTKKGRKISPSVIKNILSNEKYIGVYSWGDVRIENAVPPIISQKVFDEVQQVMPNRIKNKGRRSEMYNLCGKLICGECGGHYMGSTATSRNKEKHHYYVCTNRRKHHTCAAPNIRRDELEDLVINRTLEILNQPSNIARIVDLVMSGYSNTTQEAKTAIHGINNKIKAIDTELDNCMTAIKQGFITDRLKSEIESLENERQDLLEQKTNHESAIIPIKFTADHIEYFLERMAKENPTTKAGRSRILDTFIKSVTIYSDRVEIVFNYKNELPAFSNQCATGSHFKVLVGPPGIEPGTDRL

SEQ ID NO: 5447 - protein, 506 aa, Unknown
  Description of Unknown: Integrase B5448 sequence
  PTHR30461:SF3,cd00338,SM00857,G3DSA:1.10.10.2600,IPR036162, PS51737,G3DSA:3.40.50.1390,IPR006119,IPR038109,PF07508, IPR011109,SSF53041,PTHR30461,Coil,PF00239
MVLMYLRKSRADNPYETVEEVLSRHETILQEYAERKYGERIPESQIYREVVSGEKIETRPEMKSVLRRMEAPDVDAVLVVDPQRLSRGDLIDCGTLMQAFKYSYTKIETPMKVFDLWDKFDEKMIRDEFLRGREYLEYAKEVMARGRKLSTSEGWYVSSIIPFGYDVDYVMDGKRRRKTLKPNPIESVIVQNIFEWFVNDKLSMYAISDRLNAAGIKTRKDKEFATDAVRGILKNPVYIGKIAIGRRDTKENMVDGKVVKSRPRTEPKKIFDGRHPAIVSEEIFNAAQERIGTLPKVKRSTEFRNPFSGIARCSCGRALAYNIGRGEVRLICGGRKKCGARSVPLDDFTNKVIKALKETASDFSVQIDSGIDIDIQRHAEETKQAEATLRDLDIQQERLYSFLESGTYSEEIFRKRNAILEEKKEKAQNHYKYLLDNEPVKIDYEKKVGTLYQAIDNVASDKLTPKQKNDFLKTIISKIIYTPLPSIDDGTRFGQHQYRLDIFLKD

SEQ ID NO: 5448 - protein, 506 aa, Unknown
  Description of Unknown: Integrase B5449 sequence
  PTHR30461:SF3,SM00857,G3DSA:1.10.10.2600,IPR036162,PF13408, IPR025827,G3DSA:3.40.50.1390,PS51737,IPR006119,IPR038109, PF07508,IPR011109,SSF53041,PTHR30461, Coil,PS51736,cd00338,PF00239
MEKQTAVIYARYSSDRQREESIEGQIRECKAFAAANGYRIIGTYIDRAMSARTDQRPDFQRMIHDSDRHLFQFVIVYALDRFSRSRYDSAIYKNRLKKNGVRVLSAKENIRDDPTGVILESLLEGYAEYYSLELAQKVRRGMADNLLEKKWVGTVIPFGYKKGIDSRLYVDESKRQAVIDIFQMYSDRYRLVDIIAYLNAHHFANAQGRPFSRNSLNNILVNSIYTGTFRWAGTVYPGYAPRIISDELFNKVQKIKEGRKRNMVKSASPDYELTGKIFCGRCGRPMVGVSGTGKSGNTYFYYKCSGKTHGRKDCDAKAIRRDAVESAVYNAAVAMLKQPHAIKIITAQAILAQEREQGNSEVDRLKHEKAALDAKIRNISKAVAAGLTADEIISQANEYSDRSKDLEALIRIEELKEKAFTLTPEAVTFFLEKLLEKAETGNATLSTFWDFIRCIKINGYIAEIHFNYIAVPATLDNPIRVKIETNEECSNDDVLVDHQGFEPRTP

SEQ ID NO: 5449 - protein, 506 aa, Unknown
  Description of Unknown: Integrase B5450 sequence
  SM00857,G3DSA:1.10.10.2600,IPR036162,PF13408,PS51737, G3DSA:3.40.50.1390,IPR025827,IPR006119,IPR038109,PF07508, SSF53041,IPR011109,PTHR30461,Coil,PS51736, cd00338,PF00239
MAKPEVSELAVVYARYSSHSQGEQSIEGQLSNARDYAAAHGYTIVHEYVDRAKSGRTDNRAEFQQMLKDTAKRQFSVIILWKVDRFGRNREEIAINKMKCRKNGVRVEYVAETIPDSPEGVILESVLEGFAEYYSLQLSQNIRRGRAESAEKCQSLGGNRPLGYKTGPDKKFVIDENTAPTVKMIFTMYADGKTVTEIVDKLNEMGLRTLRGGPFTKNSLHSILKNKKYIGVYEYQGREIKDGVPRIIEDDVFNKVQEMLKINKRAPAKTWSRADYILTDKLFCGKCGALMFGESGTSKTGVKHNYYICSNKKRFRSCDKKAVRQADIEDTVLNATHELLQDDELLDYIVDRTWEYYLAQDNSQEELRNLQRQLAQTDTAISNLIRAIEAGILTEETKKRMDELTQQKADLKASIADREIARGFHLQKSHIAFYLRSLRDADWSDKEAQKRLIQTFVNAVFVYDDHITLTYNFSGDKSTITLHDMQRFEDGEEFGCRASRSTISQP

SEQ ID NO: 5450 - protein, 506 aa, Unknown
  Description of Unknown: Integrase B5451 sequence
  PTHR30461:SF3,SM00857,G3DSA:1.10.10.2600,IPR036162,PS51737, G3DSA:3.40.50.1390,IPR006119,IPR038109,PF07508,SSF53041, IPR011109,PTHR30461,Coil,PS51736,cd00338, PF00239
MNTVIYLRKSRADEEAEKQGEYETLARHKSTLLKIAKEKKLNIVEIKEELVSGESISNRPKMLELLSEVEKGMYDAVLVMDIDRLGRGNMQDQGLILSTFKESNTKIITPRKIYDLNNEFDEEYSEFEAFMARKELKLITRRMQRGRIKSVEDGKFIAQAAPYGYKVEYNGKDRYLVIDEGKSEVIKIIFDMYSQNIGANRIASHLNELGYRTTTGRTWYDKAIRDIIKNKTYCGYIVWNKVERKKVSQRIKSIDKQIESKGKHEPIISEELWNKCQNIRTKRSISPTPNNIMTNPLSGVVKCNLCGYTLVAKSSTVKQPDGSIGYTKYLVCTNCRNRGTKLAIVEEKILYSLASWLTEYKVLLNNTDFKQENNIENYTKIVDNLKKELDNLNKQKENLHDLLERGIYDVDTFIERSNNIGTRIDSINDTLDSTMNIIENERKKEQAKYNIIPTLENVLEQYYNTDDILLKNKLLKSVLDKVVYTKDHKRRDEYDFDIVLYPKLPH

SEQ ID NO: 5451 - protein, 506 aa, Unknown
  Description of Unknown: Integrase B5452 sequence
  cd00338,SM00857,G3DSA:1.10.10.2600,IPR036162,PF13408, PS51737,IPR025827,G3DSA:3.40.50.1390,IPR006119,IPR038109, PF07508,SSF53041,IPR011109,PTHR30461,PS51736, Coil,PF00239
MYGMYLRKSRSDDPNEDINDTLAKHEKILFDLADSLNINRKEIMQFKEVVSGENIQNRPEMKKLLEYVMEGVLEGVLVVDSQRLARGDTVDQGTIIRAFSINNTKIITPMKTIDPQNEYDQEYFEFDLFMGRREYKMITRRMQRGRHIAAQEGYYVGSIAPYSFSRIKLEKGYSLEIYEEENKVFNIMKKKALEDEGSTNISNHLNELGYKPRKGEYWTKSAVEAILLNETNLGLIKWNSRKEVKVFKDGKIVKTRPRNPNYELYPGKHPAIMTQDEYDRIKFLMKKRSHPVKKDKTLQNPLAGLIVCGFCNHKMARRPYKNGRVETILCTTSRCKNVASDIHVVEQRIIDTLKDTLKNYTNYVNNYSVSVNKTYDDNKKLQLEECDKELERLNKQIIKACEMLELGAYTVELFKERKNTLENKINTVNKRKDILAKETEAMKIEQYKKAIPQLQNAIDLYWKSSTEEKNKILKSIIDKCIYKKEKGGRWDPDAIKQFKLEIYLKV

SEQ ID NO: 5452 - protein, 506 aa, Unknown
  Description of Unknown: Integrase B5453 sequence
  SM00857,G3DSA:1.10.10.2600,IPR036162,PF13408,PS51737, G3DSA:3.40.50.1390,IPR025827,IPR006119,IPR038109,PF07508, SSF53041,IPR011109,PTHR30461,Coil,PS51736, cd00338,PF00239
MAKPEVSELAVVYARYSSHSQGEQSIEGQLSNARDYAAAHGYTIVHEYVDRAKSGRTDNRAEFQQMLKDTAKRQFSVIILWKVDRFGRNREEIAINKMKCRKNGVRVEYVAETIPDSPEGVILESVLEGFAEYYSLQLSQNIRRGRAESAEKCQSLGGNRPLGYKTGPDKKFVIDENTAPTVKMIFTMYADGKTVTEIVDKLNEMGLRTLRGGPFTKNSLHSILKNKKYIGVYEYQGREIKDGVPRIIEDDVFNKVQEMLKINKRAPAKTWSRADYILTDKLFCGKCGALMFGESGTSKTGVKHNYYICSNKKRFRSCDKKAVRQADIEDTVLNATHELLQDDELLDYIVDRTWEYYLAQDNSQEELRNLQRQLAQTDTAISNLIRAIEAGILTEETKKRMDELTQQKADLKASIADREIARGFHLQKSHIAFYLRSLRDADWSDKEAQKRLIQTFVNAVFVYDDHITLTYNFSGDKSTITLHDMQRFEDGEEFGCRASRSTISPP

SEQ ID NO: 5453 - protein, 506 aa, Unknown
  Description of Unknown: Integrase B5454 sequence
  PTHR30461:SF3,SM00857,G3DSA:1.10.10.2600,IPR036162,PF13408, PS51737,G3DSA:3.40.50.1390,IPR025827,IPR006119,IPR038109, PF07508,IPR011109,SSF53041,PF00239,PTHR30461, PS51736,Coil,cd00338
MKNAMYLRKSRQDEGGLEETLRKHKEILLDFAVKNNIQISDDDIYEETISGESLYARPEMLKLLQNIDNGMYNSVLCVDVDRLGRGGMSDQGIIFETFKNNDTKIITPRKVYDLNDEFDEDNIEFESFMARRELKIIKRRLKRGTKKSIEEGCYLANAPYGYKNTVVNKKHTLEIVEDEARIVRTIFDLYVNKGMGCQSIAYAINAMGAKPRRTEQFGRTTVMFILKNNVYIGKIVWDKKTHIRKNTRGNSKHIVIYNDKDKWTVCEGLHPPIIDMETWNKAQQIIAERTHPPTNKGEIKNVLSHLIYCGNCGGLMTRTISRGSRNDTKNKKYYYSCKNKGCIKATQCHYVDDIVINTIRYRFKDMVLDIAEQNNVHYIDYSSQIKGIKSELKRLNTQLNSLHDLLEQGIYDIPTFMDRQKTINMRKSELNNQLDIIDKKTSENKMVDEISMMSRIQSVLDVFDRATPQEKNQLLRTIIDKITYYKKPSDSTDKCRLVITLKPVFF

SEQ ID NO: 5454 - protein, 506 aa, Unknown
  Description of Unknown: Integrase B5455 sequence
  PTHR30461:SF3,IPR036162,PS51737,IPR011109,PTHR30461, PF00239,G3DSA:1.10.10.2600,IPR006119,SSF53041,cd00338, SM00857,IPR025827,IPR038109,PS51736,mobidb-lite, PF13408,G3DSA:3.40.50.1390,PF07508,Coil
MNVVIYARFSSHSQTEQSIEGQLKVCYEYAESNHYTVVGEYIDRAISGTTDNRAEFQRMISDSDRHTFEGVLVYQLDRFARNRYDSAINKAKLKKNGVRVLSAKENIADDASGILVEGVLESMAEYYSVELSQKIHRGMAINAEKCLSNGSNPGLGFKVDAERRFYVDEEEAAIVREIYERYASGETKAEIIRDLKRRRVKTSLGKEFSPNSLSRLLSNKRYIGVYLYKGKETPGGMPRILDDDLFYRVQSMMNKNKSAPARTHGEGEYLLTTKLFCGHCKEMMVGYGGTSKTGRQYHYYMCKNARRKKCGKKIVSKSYIEDRVVNECLKMLTEEKIRFIAKKVAEECTKSPDNLTAKALKKAIREADTAIENLWKAIEQGQAVEMLTDRLNKRMAEKAELEAQLAIEENKKITLTEAQILAFLDYVCEMPADDVNKRRAIINIFVHSIYLYDDHFTLIINASKKPLSIDNIPLDDIETAFEGETGASEGCSSLSTPAPPRYDKSA

SEQ ID NO: 5455 - protein, 506 aa, Unknown
  Description of Unknown: Integrase B5456 sequence
  cd03768,PTHR30461:SF3,SM00857,IPR036162,PF13408, IPR025827,G3DSA:3.40.50.1390,PS51737,IPR006119,PF07508, SSF53041,IPR011109,PTHR30461,PS51736,Coil, PF00239
MAIALYARKSIERENSISCETQIEYCKSVIKPDERSEKTIEFIDNGYSGGNVDRDGFQKMMRQIERGKISKVIVYRLDRISRSLSDFVGILETLKKHNVQFVSSQESFDTSSPYGEMIVKILMVFAEFERKSIIERVKHAYAYRSEMGLYMSGRRPYGFNLKDTVINNVKTKMFEPVTNEIEQIKYIFENYSVPNVTLRRLMDNLIDNNISATTGSWSTAKLSNIIKNPIYVKADNAIYEYYSKRNANIMSDINQFDGLHGIQTYGKSKHTADDMSDIKIVVMPHDGIINSELWLKCQKKIVKNKKLGNSVNNSTSWLGGKIACKQCGRTMTVTKGGKKKDGTQTRYFSCTGKSHNRICNGPKVTLYADSLEDMVYKLIAEKLQSLKGSRKKISTDNSNKINLLKNQLSEIKQSQEKIVNMLLDDSFKSDMKSLLNEKAKKLSEESKAITEKIEDLESEENEIISVINLSQKWKSANTDERKAVCNVLIHKIFICEDGTCEVVWNI

SEQ ID NO: 5456 - protein, 506 aa, Unknown
  Description of Unknown: Integrase B5457 sequence
  PTHR30461:SF3,SM00857,G3DSA:1.10.10.2600,IPR036162,PS51737, G3DSA:3.40.50.1390,IPR006119,IPR038109,PF07508,IPR011109, SSF53041,PF00239,PTHR30461,PS51736,Coil, cd00338
MYCIYLRKSRADMEAERQGIDTLARHEKILTSYAAEHGYSIGKIYREVVSGDTIAARPQVQQMLQDAEAGMWEGVLVMEVERLSRGATIDQGIIAQVFKFSNTKIITPYKVYNPNDEYDEEFFEYGLFQSRREYKAITKRQQRGVLQSCQEGKWVYNKVPYGYERYKLEHEKGYSLRIVPEQGKVVRMIYTLYRDGMGYSSISDYLNNMNIPAPGDHWTYNTVCSILQNPVYNGKIKRGARAVVKTTEGGTLKSSRPRNKHYNIYEGLHEPIIDDILWRTVQDKFATHPSKPVAKALEIRNPLAGLVYCQVCGHKMIRRPQDRCRTMIICPVKSCHNISCYESVLEHTVIDYLCKYLEELKTNTGISIDTTTLEMLKASLQKSNKEIEQLNNQMDNAYDLVEQGVYSADIFMKRQKSINCKLAAEKLKNEGITAQIHKEEKVIRQRDTLIPRIENTLNVYWDLDPAEKNRMLCDIIDHIEYVKKERSKKNGPYNNFQIVVHPRIPV

SEQ ID NO: 5457 - protein, 506 aa, Unknown
  Description of Unknown: Integrase B5458 sequence
  PTHR30461:SF3,SM00857,G3DSA:1.10.10.2600,IPR036162,PF13408, IPR025827,G3DSA:3.40.50.1390,PS51737,IPR006119,IPR038109, PF07508,SSF53041,IPR011109,PTHR30461,Coil, PS51736,cd00338,PF00239
MNAVIYARFSSHNQQEQSIEGQIRYCTEYAKKNDMTIINSYIDRAISGTSDNRPEFLQMIKDSNNHQFNVVLVWKLDRFARNRYDSAIYKNALKKNNVKVVSVTEYLGEGSESVLLEAMLEAMAETYSRQLSENVRRGMRESALKCQVVGGSVPLGFDTVDKKYVINEKEAEIVRFIFDEYVSGTSKKEIVNKLNAKGWRTKNGSTFVFNSLNKILSNRKYIGEYKYEDIVVEHGIPAIIDERTFNLAQKQLAKNKRTAGRKKAKVEYLLSGKIFCGYCGENMLGESATNRHGKKYHYYICNSKKKYKNCKKKRESKETLEKYLVQQTILFFSDKNNIDKVAKKVVKLYNSELHNGHIDSMIANKKELEKQLDNLTNSLIKTSNDRVLNTINEKINSIDTQLSDLEIEIAREKSLASIEMTVSDVVCFINDLINGDINDVIFKKQIIDTLINAIYIYDDKIIVYFNGSEDAKTITYDDLCSDLEKIDNGGEFVFQPLTSTNKLNCT

SEQ ID NO: 5458 - protein, 506 aa, Unknown
  Description of Unknown: Integrase B5459 sequence
  PTHR30461:SF3,cd00338,SM00857,G3DSA:1.10.10.2600,IPR036162, PF13408,IPR025827,PS51737,G3DSA:3.40.50.1390,IPR006119, IPR038109,PF07508,SSF53041,IPR011109,PTHR30461, PS51736,Coil,PF00239
MYEDIKTACLYVRFSSHNQTEQSIEGQTRVCRDFCKRHNIRIVEIYADRATSASKDIEKRVQFLKMIKDSEKGLFDAVIVYKLDRFARSRYDSATYKYRLKRNGVQLISATENISNDPEGIILESVLEGMAEFYSAELSQKINRGMRESAYKHNSIGGAIPLGYKIEDKKLVIDPKTAPIVKEAFEKYADGETVAEICRQFNARGYKTSKGTAFGKSSFTKIFRNERYIGVYTFHDYRAEDAIPAIIDKDLWDRVQLRVGKIKNAPARNKAKVVYLLSGKIFCGHCGSKMNGNCNAGNYCYYQCYGKKNGNVDCKKKNIRKEFIERLVAQDALSLLTDEYIEQIATIACEKNQHEIELDSALPTIRDRIHQVDLSLNHLLKAIESGSAPDMLVKRMGELEKEKKDLQAQAKKESEDIVELDKAQVIYWLEQFRGGSIEDEEFCRMLIDLFVNSVTVWDEDDNTYKVTVAYNLTSLPTKTYRLNKGGTLSDFASNAPAWRGRKTASQ

SEQ ID NO: 5459 - protein, 506 aa, Unknown
  Description of Unknown: Integrase B5460 sequence
  PTHR30461:SF3,SM00857,G3DSA:1.10.10.2600,IPR036162,PF13408, IPR025827,G3DSA:3.40.50.1390,PS51737,IPR006119,IPR038109, PF07508,SSF53041,IPR011109,PTHR30461,Coil, PS51736,cd00338,PF00239
MKAVIYARYSAGSGQTELSIEGQLRECKKYIEKKGYTLGEVYADRHVSGLSTKGREEFKRLMGDAKAHKFDVVVCYDTSRFARDKFDAVVYKTELRKRLGIAIEWATMNVEGPEGVLLEAIMEGWNQYFSEELSRKTKRGMAEAASKGLSLGSKPPLGYTLKDRHFVVDEAGAEAVREVFEAYTGGASFADCARMLNEQGFRTATGKLFNGSAVRYMLTNKKYLGIHGGASGVVPAIVDPEVFQAARDRIGERPPKSVKHDFALVGKLTCGCCGSRMTGTSTLSKGRRYYYYKCSNKCAGQPVRQDKLDSFVAACAQEALSKPETVKEVAARLFAYQKKENPLESKIEALGKSLKSLDMKIDNLTTALAERPASKALLTRLDDLEEQREQVQRAIEAEPEQEPCRILSEQAIADGLAGLLAPLSDPDRIQSQERWILDSLVEAVELTPDEVLITYATDSIVKRDQEGQVSKKVLIGTPDSTFFETIEIYTAPGAVILSCSRSAASF

SEQ ID NO: 5460 - protein, 506 aa, Unknown
  Description of Unknown: Integrase B5461 sequence
  PTHR30461:SF3,SM00857,G3DSA:1.10.10.2600,IPR036162,PF13408, IPR025827,G3DSA:3.40.50.1390,PS51737,IPR006119,IPR038109, PF07508,SSF53041,IPR011109,PTHR30461,PS51736, cd00338,PF00239
MNGVIYARYSSENQREESIDGQLRECTAFAQHNDIQIVGEYIDRAFSAKTDNRPSFQKMIKDSAKGEFDVIIVWKLDRFARNRYDSAHYKNILKKNGVKVVSATEAISSGAEGIILESVLEGMAEYYSAELAEKVSRGMKENALKCKYNGGSVPLGYYIDESKHFQIDSSVAPFVVECFEHYADGMTMKQLRDELNMKGVKNSRGGKLSIDVISRMLTNRKYLGEYTFQDITIKDGIPAIVSTSLFEKVQDRLTKTKKVPSSHKADDDYILTTKLFCGKCKSFMVGESGTNAQGKKYRYYKCVNHKKHQGCDMKSIRKDLIENMTIKYIREFLNDEDLINTLIDLAYDAQHKENEQLPLLRKQLAQTEKGIKNIVDAIEQGISTKSTRERLLDLEQRKNDIEMSISKESIENPMLTKKQFKFWFDQLKKLDISKSEQRQKLVDLFVNSIIIYDDHIKFFFNYKEHTETITFDELNNCSDLPDSPRPKGLPNGSPYFLPKIAKNRII

SEQ ID NO: 5461 - protein, 506 aa, Unknown
  Description of Unknown: Integrase B5462 sequence
  SM00857,G3DSA:1.10.10.2600,IPR036162,PF13408,IPR025827, G3DSA:3.40.50.1390,PS51737,IPR006119,IPR038109,PF07508, SSF53041,IPR011109,PTHR30461,Coil,PS51736, cd00338,PF00239
MAKPEVSELAVVYARYSSHSQGEQSIEGQLSNARDYAAAHGYTIVHEYVDRAKSGRTDNRAEFQQMLKDTAKRQFSVIILWKVDRFGRNREEIAINKMKCRKNGVRVEYVAETIPDSPEGVILESVLEGFAEYYSLQLSQNIRRGRAESAEKCQSLGGNRPLGYKTGPDKKFVIDENTAPTVKMIFTMYADGKTVTEIVDKLNELGLRTLRGGPFTKNSLHSILKNKKYIGIYEYQGREIKDGVPRIIEDDVFNKVQEMLKINKRAPAKTWSRADYILTDKLFCGKCGALMFGESGTSKTGAKHNYYICSNKKRFRSCDKKAVRQADIEDTVLNATHELLQDDELLDYIVDRTWEYYLAQDNSQEELRNLQRQLAQTDTAISNLIRAIEAGILTEETKKRMDELTQQKADLKASIADREIARGFHLQKSHIAFYLRSLRDADWSDKEAQKRLIQTFVNAVFVYDDHITLTYNFSGDKNTITLRDMQRFEDGEEFGCRASRSTISPP

SEQ ID NO: 5462 - protein, 506 aa, Unknown
  Description of Unknown: Integrase B5463 sequence
  PTHR30461:SF3,SM00857,G3DSA:1.10.10.2600,IPR036162,PS51737, G3DSA:3.40.50.1390,IPR006119,IPR038109,PF07508,IPR011109, SSF53041,PTHR30461,Coil,PS51736,cd00338, PF00239
MTHSNDGLFALYLRRSRADIEREKFEKFDTLKSHEQELTKSAKAQGIILDTPYYKELASGEHIADRPVFQELMQKVSDGKYQGIMVHEISRLGRGEPREYGHILFTIKSLGIKIATLYRVFDPSNPDDYRQIKTEMFLSNMEFDNIVWRLDRGSKTKAEMGCFIKPTPPFGYDRYKRPQDGYWSLIPNSDAPLVKQIFDYAAEGRSLGYIARTLNESGIRTPTGKYWTASRIRTIITNPHYKGFIRYGYYKRKEVPSEGYKTKKIYSFNNNCILVKGLHEGIVSDEEWEKANSFLNSSPVKKDRELKNPLAGLLVCKKCGHPMVRFLNKVRSNGNLIEHYRHPQFNGCKMHGSRMSIVIDLLCDALKEVSSDLEVKIQNDHKDNTQELKESLEAQLSIIENKTKKIMELYFSDAIPVEEVKEMRLEADRRKKQLEEELSKLSKPKKTPKEIRLSIHKAIDLLKDENVSAEVKNSFLKSFISKIEYENTAERNDHSPGKIKLTIILK

SEQ ID NO: 5463 - protein, 505 aa, Unknown
  Description of Unknown: Integrase B5464 sequence
  PTHR30461:SF3,IPR036162,PS51737,IPR011109,PTHR30461, PF00239,G3DSA:1.10.10.2600,IPR006119,SSF53041,cd00338, SM00857,IPR025827,IPR038109,PS51736,mobidb-lite, PF13408,G3DSA:3.40.50.1390,PF07508,Coil
MNAVIYARFSSHSQREQSIEGQLRDCYEYAKRYDINIVGEYIDRAISGMTDDRPDFQRMIADAPKKQFERIIVWKLDRFARNRYDSALYKHKLKQYGIRVISAMENVGEGDESILLEALLEASAEYYSLDLKKKILRGQRETIAKGRWCGGPIPYGYKAVDGKLVADEKTAPIIRYVFEQYAQGVPMKEIIDELKRRGVRSSRGGELTYTTFSRALTNPVYIGNFMYKGELVPGVADALIDEDTYNKVQIIVKANAHAPAANKAKVEYLLQGKAFCGHCGSHMVGESGKSRNGDVYYYYSCAARKKAHKCRKKNEKKDFIEWYVVEQTLQYVLTPARMRDIAKAVVAEYDKEFAGSRVEEYEKAIKQYERELDKLVDALVDAPKVAHKRIYEKMETLETQKASMENELVKLRIASEIRFTEEEVRAWLRRFCTGDLFDPEFRRNIIDTFINCIYLYDDRIIIFYNIKGGKQVSFVDLAESLDNESESSGSDLNANAPRMVKVEKP

SEQ ID NO: 5464 - protein, 505 aa, Unknown
  Description of Unknown: Integrase B5465 sequence
  PTHR30461:SF3,SM00857,G3DSA:1.10.10.2600,IPR036162,PF13408, IPR025827,G3DSA:3.40.50.1390,PS51737,IPR006119,IPR038109, PF07508,SSF53041,IPR011109,PTHR30461,Coil, PS51736,cd00338,PF00239
MAKPEVSELAVVYARYSSHSQGEQSIEGQLSNARDYAAAHGYTIVHEYVDRAKSGRTDNRAEFQQMLKDTAKRQFSVIILWKVDRFGRNREEIAINKMKCRKNGVRVEYVAETIPDSPEGVILESVLEGFAEYYSLQLSQNIRRGRAESAEKCQSLGGNRPLGYKTGADKKFVIDENTAPTVKMIFTMYADGKTVTEIVDKLNELGLRTLRGGPFTKNSLHSILKNKKYIGIYEYQGREIKDGVPRIIEDDVFNKVQEMLKINKRAPAKTWSRADYILTDKLFCGKCGALMFGESGTSKTGVKHNYYICSNKKRFRSCDKKAVRQADIEDAVLNATHELLQDDELLDYIVDRTWEYYLAQDNSQEELRNLQRQLAQTDTAISNLIRAIEAGILTEETKKRMDELTQQKADLKASIADREIARGFHLQKSHIAFYLRSLRDADWSDKEAQKRLIQTFVNAVFVYDDHITLTYNFSGDKSTITLHDMQRFEDGEEFGCRASRSTNTI

SEQ ID NO: 5465 - protein, 505 aa, Unknown
  Description of Unknown: Integrase B5466 sequence
  cd00338,SM00857,IPR006118,G3DSA:1.10.10.2600,IPR036162, PS51737,G3DSA:3.40.50.1390,IPR006119,IPR038109,PF07508, IPR011109,SSF53041,PTHR30461,PS00397,PS51736, Coil,PF00239
MMNENVLKTAALYIRVSTDKQEELSPDSQKRLLLEYARNHNMVVPPEHIYMENGISGRRADKRPKFQQMISAAKLSSHPFDVILVWKFSRFARNQEESIVYKSMLRNKCHVDVVSISEPLIEGPFGGLIERIIEWMDEFYSIRLSGDVTRGMTENALRGSYQCRPPLGYRIPYHKATPEIVPEEAEIVRLIFEKYVNGMSIFALTKYLNSHGFKTSHGKLFEKRSLEYILQNPAYAGDIRWNRCNNTTKEIRDPSEWIVRSGHHPAIISKELYEKAQARWKSEYKPRNAKPSEVTKHWLAGLVKCPSCGRSLSSCVMHRKSLPDTFSFQCGGYLKGKCYHNCYVRAESLVPAVLNALEEALACGTVKYDLKQTDSIQDQSQDEIQSLKRRLERVDQKELRAREAYMEGIDTKEDYRKNKELLNREREELTERISQLEDLPQKGYDDTVMLDRISNVLDILHSDKFSVSEKNSALKSIIDKIIYDKEQNHIDVYYYMMKAPENLVK

SEQ ID NO: 5466 - protein, 505 aa, Unknown
  Description of Unknown: Integrase B5467 sequence
  PTHR30461:SF3,cd00338,SM00857,G3DSA:1.10.10.2600,IPR036162, PF13408,PS51737,G3DSA:3.40.50.1390,IPR025827,IPR006119, IPR038109,PF07508,IPR011109,SSF53041,PTHR30461, PS51736,Coil,PF00239
MSSVDKIAVIYARYSSHGQTEQSIEGQIAAAQKYAEQHGYTIIHIYADRAMTGRNDDREQFQKMLSDTAMHQFGVILLWKIDRFGRNREEIAFNRYRCKKNGVRVERVAEDVPDGPEGVILDSVLEGMAEYYSLQLAQNVRRGQRESAKKSMSIGGNKMLGYVVNPETKRYESDPKTASYVTEIFKRYANGETISEIVAWLNAQGIRTTRGSEFTVNSLHRLLKNEKYTGVYIFHDIRNEGGMPALTDRATFDKVQEMLKVNRRAPVRVWSKTEYLLTDKLFCGHCGAIMVGESGHGRNGTKHSYYTCLNRKKKKSCDKKPVRQDVIEPLVLRAIGKLLENPATLENIADQVWAAYERSDTSGDTIKALDKQIADVDRALSNVMKAIEMGIINEMTKTRMDELTNQKQALSQSRAEAGLTGGFKLTRDMILFFLQEMAALDMADRDSQKRLIKTFVNAIYLYDDHFDIAFNYTDNGKVAVRMQEINDAASGEVFGCCAQSPTIRL

SEQ ID NO: 5467 - protein, 505 aa, Unknown
  Description of Unknown: Integrase B5468 sequence
  SM00857,G3DSA:1.10.10.2600,IPR036162,PS51737,G3DSA:3.40.50.1390, IPR006119,IPR038109,PF07508,SSF53041,IPR011109, PTHR30461,Coil,PS51736,cd00338,PF00239
MAYAIYLRKSRADAEMEALGEMETLARHEKILTELAKRQELPIGRIYKEIVSGESIADRPQMKQLLDDVYLKKWEGVLVMEVERLARGDTRDQGDVAEAFKYSNTKIITPIKTYDPNNEYDEEYFEFGLFMSRREYKTIKRRLDRGRKISVQEGNYIGGCAPYGYDIWRRGKKDITLKPNEDAKIVKMIYEWYANDNLGASKIASKLSLMGVTSPSGNKEWNHSCIIDILKNPHYIGKIRWKNREMKKEFVDGKMKKMNVRNKVNFEIYDGKHEAIIDEELYERVQNRIGKNSKTQISRELQNPLAGILCCKSCGKKLVYQGYSTRPNMSPRYVHVHSVFCKMKSSSAKEVIDAVIIGLKAHIEDFELKMTNEFEIENKKKQDDVIEFIEKELIKLKKSRTKLFDYLEDGIYTKEEFIERKGILTVKIEELEKQLEAEKLKVGEEVNYEEKIVTLKQIIESLKDDSIGAKYKNDFLKEVIDHIDYECEDFGRGRGGQIYLDIFLK

SEQ ID NO: 5468 - protein, 505 aa, Unknown
  Description of Unknown: Integrase B5469 sequence
  cd03768,PTHR30461:SF3,SM00857,G3DSA:1.10.10.2600, IPR036162,PF13408,IPR025827,G3DSA:3.40.50.1390, PS51737,IPR006119,IPR038109,PF07508, SSF53041,IPR011109,PTHR30461,PS51736,Coil,PF00239
MCPIDALYARQSLDKKDSISIENQLEFCKYETRGAEYETYIDKGFSGKNTNRPAFAKMMEDIRAGKIKRVIVYKLDRISRSILDFSNMMEIFQQYHVEFVSSTEKFDTSTPIGNAMLNISIVFAQLERETIQKRIADAYATKSQKGYYMGGRVPYGFQLEKTIINGIHTSVFVPEPNEMKQIRLIYQLYSEPDMTLGAVMRELLRQGFTEKRGAPWSTARISEILRNPVYAKADIDIYNFFESQGANMINPASDYVGTNGIFLYKGINGDKTKKKQYDLVDRDVVIAPHLGVIESDVWLKCRLKIMKNRQSARTNKGKRTWLAGKVKCKKCGYAYTVTRSNTKAGRYFQCSGSRYSIKCKGAGHTIYADVFEDYVLHEMKKQLAKFQYLSDELEAVTQPSSQAEKVRIAEIEQEIGNLLAKVPEANKTVMEYINRRIEELDKEKQSLQQKLVEQSTNQTSGKMDKITNYVAKWDELDNDDKQRVADILIDRIDIDEDVIEITWNI

SEQ ID NO: 5469 - protein, 505 aa, Unknown
  Description of Unknown: Integrase B5470 sequence
  cd00338,SM00857,IPR006118,G3DSA:1.10.10.2600,IPR036162, PS51737,G3DSA:3.40.50.1390,IPR006119,IPR038109,PF07508, IPR011109,SSF53041,PTHR30461,PS00397,PS51736, Coil,PF00239
MMHENVLKTAALYIRVSTDKQEELSPDSQKRLLLEYARNHNMVVPPEHIYMENGISGRRADKRPKFQQMISAAKLSSHPFDVILVWKFSRFARNQEESIVYKSMLRNKCHVDVVSISEPLIEGPFGGLIERIIEWMDEFYSIRLSGDVTRGMTENALRGSYQCRPPLGYRIPYHKATPEIVPEEAEIVRLIFEKYVNGMSIFALTKYLNSHGFKTSHGKLFEKRSLEYILQNPAYAGDIRWNRCNNTTKEIRDPSEWIVRSGHHPAIISKELYEKAQARWKSEYKPRNAKPSEVTKHWLAGLVKCPSCGRSLSSCVMHRKSLPDTFSFQCGGYLKGKCYHNCYVRAESLVPAVLNALEEALACGTVKYDLKQTDSIQDQSQDEIQSLKRRLERVDQKELRAREAYMEGIDTKEDYRKNKELLNREREELTERISQLEDLPQKGYDDTVMLDRISNVLDILHSDKFSVSEKNSALKSIIDKIIYDKEQNHIDVYYYMMKAPENLVK

SEQ ID NO: 5470 - protein, 505 aa, Unknown
  Description of Unknown: Integrase B5471 sequence
  SM00857,G3DSA:1.10.10.2600,IPR036162,PS51737,G3DSA:3.40.50.1390, IPR006119,IPR038109,PF07508,IPR011109,SSF53041, PTHR30461,Coil,cd00338,PF00239
MASAVIYARYSSSGQREESIEDQVRVCTEEAHRNGDRIVRVYADRATSGTTTNHRAAFAEMVADSARGWFEKVYVYKTDRFARNRYDSAIYKTKLKRNGVRVVSATERIEDGPDGILLEAVLEGMAEYYSANLAENVKRGLHGNALKCKHNGVMVYGFDRGEDGYYHVNEEQARVVRTMFEMYDAGSGFPEIEDALKPWRTSYGKPFTMKTISKMLRNEKYAGVYKYGGQRVEGGMPSIVPPELFERVQRRLALRTRKRRGTVEYLLSGKLFDIDGNRYQSSSGHGKSGRKYTYYRCPATGHIVPQEKLERAVAEEVQAFLSSDHVAGIIADLVMEEQEVALSDDLDAMDALRKRLADNEREQARMVDLAAKTGATDAVAAKLDELVAERQAVADELAELEKGTPVFDRDHVEFWVHEVVGKKDPLEVIALFVKRVVLDREGERFHVEFIIDGGDDGGNETNPLPDAPDGGSCKSQLAGYVRVSTNTYAYGIRRGFALLVTDVAL

SEQ ID NO: 5471 - protein, 505 aa, Unknown
  Description of Unknown: Integrase B5472 sequence
  PTHR30461:SF3,cd00338,SM00857,G3DSA:1.10.10.2600, IPR036162,PF13408,PS51737,IPR025827, G3DSA:3.40.50.1390,IPR006119,IPR038109,PF07508, IPR011109,SSF53041,PTHR30461,Coil,PF00239
MYEEIKTACLYLRYSSSNQTEQSIEGQMHVCQDFCKRHNIRIVEMYIDRATSASKDIEKRVEFLKMIKDSEKGNFNAVIVYKLDRFARSRYDSATYKYRLKRNGVQLISATENITQDPEGIILESVLEGMAEFYSAELSQKINRGMRESAMKHNSIGGAIPLGYKTVDKKLVIDETTAPIVREAFQMYADGESVAEICRTFNNRGYKTSKGTRFGKSSFTKIFRNEKYIGVYKYHDYRAEDVIPPIIDKDLWDRVQVRVGKIKKAPARNKARHTYLLTGKLFCGHCGSAMNADGNSQGYLYYRCYGKKNLDKQCNKRNMEKNLIERLVAQDAMSFLTDEYIEKIATIACDRNKQEIESDSPIPVIRDRIRQVDVSLNNLLKAIETGSAPDMLVKRMGELETEKKDMEVQLKKEMAHQVYIDKEQVIFWLEKFREGDINDEEFCQTVIDLFVNSVTVWDEPDDKFRITIAYNLTSIPQKTYRLSKDGRLSDYASNTPVEQWQQMNG

SEQ ID NO: 5472 - protein, 505 aa, Unknown
  Description of Unknown: Integrase B5473 sequence
  PTHR30461:SF3,cd00338,SM00857,G3DSA:1.10.10.2600,IPR036162, PF13408,PS51737,G3DSA:3.40.50.1390,IPR025827,IPR006119, IPR038109,PF07508,IPR011109,SSF53041,PTHR30461, PS51736,Coil,PF00239
MTKNAVIYARFSSDKQREESIDGQIRECRTFAEANEITIINTYIDRAMSARTDQRPSFLQMVKDSAKHLFDYVIVYQLDRFSRSRYDSAIYKHRLKKNGVKVLSAKENIKDDPSGILLESVIEGMAEYYSAELSQKVKRGMTENLLEGKWIGGIVPFGYELTSENKLAISPATGHLVPEIYDKYLSGIKTTDILSKLNSLGIKTQRGCNFTRNSLNRILKNQIYTGTFTWAGTSYPDYAPALITQEQYTAMQNLFESRKRKSNTARRVSPQYALTGKIYCGTCGLPMTGYCGKSHTGTTYYYYQCSSKNNKSEKAARSQIACDAKNISRDKLEKLVLDTTISILKNKDAVKCIADQCMAIQKAELEHKPAEQLRLESQIKEIEKRLKNSVKAVENGLISQTITNNIETYEKQLTELNAQLDGLKLETHIIPITEEAVIYYLNQLTERANKKDGYSLDTFDDFIRRVVVTGKRVDIYYNYTAVPNILENPAVKMLRGSSEDCLVTR

SEQ ID NO: 5473 - protein, 505 aa, Unknown
  Description of Unknown: Integrase B5474 sequence
  PTHR30461:SF3,cd00338,SM00857,G3DSA:1.10.10.2600,IPR036162, PF13408,PS51737,IPR025827,G3DSA:3.40.50.1390,IPR006119, IPR038109,PF07508,IPR011109,SSF53041,PTHR30461, PS51736,Coil,PF00239
MPKTEEKQAVKAVIYARYSSDRQREESIEGQLRVCEDYASRNNMTILHTYADRAMTGRSDQRPEFQMMIRDAATMAFDVVLVYKLNRFARNRYDSAKYKHKLKKYGIKVVSAMENIADDPSGILLESVIEGMAEYYSAELAENVMRGMTENALEGKWTGGVVPLGYKLDEQHHLVIDGPKAEVVRLIYQMALEGHNQKYIIDELNRRHYTNSAGGPFSYNTLRTILRNEKYIGVFTWGTVRRENACPAILDKATFEAVQEHLKFRTKHHIRSCNEDFLLTGKLFCGCCHSKMVGVSGTSKTGAIYYYYACAAHLKKKCKTRNIRKDAIEDLVCEVTTRILSSKEAVEAIARQAIEMQKNKKDSLELQAIKNQIADINKKLQNCVKAVENGLISDTITNHINEYEKELTRLKDDAARVKLLDGDIELTQQHIEFFFWSIAQKIKAADKYKSILLSSIVRSVIVYKDYIEIQYNYKNELPILQNPVKVESSYLNQMVIHPGFEPGTP

SEQ ID NO: 5474 - protein, 505 aa, Unknown
  Description of Unknown: Integrase B5475 sequence
  cd03768,PTHR30461:SF3,SM00857,G3DSA:1.10.10.2600,IPR036162, PF13408,IPR025827,G3DSA:3.40.50.1390,PS51737,IPR006119, IPR038109,PF07508,SSF53041,IPR011109,PTHR30461, PS51736,Coil,PF00239
MCPIDALYARQSLDKKDSISIENQLEFCKYETRGAEYETYIDKGFSGKNTNRPAFAKMMEDIRAGKIKRVIVYKLDRISRSILDFSNMMEIFQQYHVEFVSSTEKFDTSTPIGNAMLNISIVFAQLERETIQKRIADAYATKSQKGYYMGGRVPYGFQLEKTIINGIHTSVFVPEPNEMKQIRLIYQLYSEPDMTLGAVMRELLRQGFTEKRGAPWSTARISEILRNPVYAKADIDIYNFFESQGTNMINPASDYVGTNGIFLYKGINGDKTKKKQYDLVDRDVVIAPHLGVIESDVWLKCRLKIMKNRQSARTNKGKRTWLAGKVKCKKCGYAYTVTRSNTKAGRYFQCSGSRYSIKCKGAGHTIYADVFEDYVLEEMKKQLAKFQYLSDELETVTQPSSQAEKVRIAEIEQEIGNLLAKVPEANKTVMEYINRRIEELDKEKQSLQQKLVEQSTNQTSGKMDKITNYVAKWDELDNDDKQRVADILIDRIDIDEDIIEITWNI

SEQ ID NO: 5475 - protein, 505 aa, Unknown
  Description of Unknown: Integrase B5476 sequence
  PTHR30461:SF3,cd00338,SM00857,G3DSA:1.10.10.2600,IPR036162, PF13408,PS51737,G3DSA:3.40.50.1390,IPR025827,IPR006119, IPR038109,PF07508,IPR011109,SSF53041,PTHR30461, PS51736,Coil,PF00239
MNNTDLQTGVIYARYSSDKQRDESIEGQIRECTEYAQREGILITKIYTDRALSARTDNRPEFLQMIRDSANQTFNYVIVYQLDRFSRSREDSAKYKGILRRNGVRVLSAKEHITNEPAGIILESMLEGMAEYYSVELSQKVKRGMTENAIKGKMNGSAIPLGYDLTESHHLAVNAHEAKAVRLIYDLYLKQYSLAKIADILHSKGYTTKRGGKISYSVIRNILSNEKYIGVYQWGDIRIEDSIPPIIARDVFDEVQQVLPTRIKNKGRRSEMYNLCGRLICGQCGGHYMGSTATSRNGEKHRYYVCTNRRKHHTCSAPNIRRDELEDLVINRTLEILKQPQIITRIVDLVMNGYNHTTQEAKTAIQGIQGKIKAIDIELNNCMTAIKQGFINDRLKAEIENLEKERQDLLEQKANHESVISPIKFTAEHIEYFLERMANENPTTKAGRSRILDTFIKSVTIHSDRVEIVFNYKNEMPEFGVQSASGSHFSVLVGPPGIEPGTDRL

SEQ ID NO: 5476 - protein, 505 aa, Unknown
  Description of Unknown: Integrase B5477 sequence
  SM00857,G3DSA:1.10.10.2600,IPR036162,PF13408,PS51737, G3DSA:3.40.50.1390,IPR025827,IPR006119,IPR038109,PF07508, SSF53041,IPR011109,PTHR30461,Coil,PS51736, cd00338,PF00239
MAKPEVSELAVVYARYSSHSQGEQSIEGQLSNARDYAAAHGYTIVHEYVDRAKSGRTDNRAEFQQMLKDTAKRQFSVIILWKVDRFGRNREEIAINKMKCRKNGVRVEYVAETIPDSPEGVILESVLEGFAEYYSLQLSQNIRRGRAESAEKCQSLGGNRPLGYKTGPDKKFVIDENTAPTVKMIFTMYADGKTVTEIVDKLNEMGLRTLRGGPFTKNSLHSILKNKKYIGVYEYQGREIKDGVPRIIEDDVFNKVQEMLKINKRAPAKTWSRADYILTDKLFCGKCGALMFGESGTSKTGVKHNYYICSNKKRFRSCDKKAVRQADIEDTVLNATHELLQDDELLDYIVDRTWEYYLAQDNSQEELRNLQRQLAQTDTAISNLIRAIEAGILTEETKKRMDELTQQKADLKASIADREIARGFHLQKSHIAFYLRSLRDADWSDKEAQKRLIQTFVNAVFVYDDHITLTYNFSGDKSTITLHDMQRFEDGEEFGCRASRSTNAR

SEQ ID NO: 5477 - protein, 505 aa, Unknown
  Description of Unknown: Integrase B5478 sequence
  PTHR30461:SF3,cd00338,SM00857,G3DSA:1.10.10.2600,IPR036162, PF13408,PS51737,G3DSA:3.40.50.1390,IPR025827,IPR006119, IPR038109,PF07508,IPR011109,SSF53041,PTHR30461, PS51736,Coil,PF00239
MSTNAVIYARFSSDKQREESIDGQIRECTKFAEDQGLEVIGTYIDRAMSARSDNRPDFLRMIADSARGQFQYVIVYQLDRFSRSRYDSAIYKNKLKKNGVRVLSAKERIGDDPSSIILESMLEGYAEYYSAELSQKVKRGMTENVLEHKWTGGYVPLGYSLVPDKTLQIDPVGAEAVKIIYDKWLAGCRIMDIIRYLNDHNYVTSRKAKFRYSSLNRILNNPIYTGLYRWGSIEVADYAPAIITQKQFALAQEKIHHIKAHPRAKRRSANYALTGVIYCGVCGSPMTGQSGHSKSGALYHYYRCSTKNNYHDRGKKLNIKCANRNISRDKLEDLVLQTTINILMNPEAVHMIAKQAVAVQQNDPASMELARIREDKKIIQKKLNNSIKAVEAGIISTTLAANISQYEKEITELDIKMEKIKLSSAPVKIDEIAVEFFLKSLLLNKKEHDKYRLDMFQTFIRRVIVYPDKVEIQYNYTATPILENPVTKMMTGNSGCSRCERLVTR

SEQ ID NO: 5478 - protein, 505 aa, Unknown
  Description of Unknown: Integrase B5479 sequence
  SM00857,G3DSA:1.10.10.2600,IPR036162,PF13408,PS51737, G3DSA:3.40.50.1390,IPR025827,IPR006119,IPR038109,PF07508, SSF53041,IPR011109,PTHR30461,Coil,PS51736, cd00338,PF00239
MAKPEVSELAVVYARYSSHSQGEQSIEGQLSNARDYAAAHGYTIVHEYVDRAKSGRTDNRAEFQQMLKDTAKRQFSVIILWKVDRFGRNREEIAINKMKCRKNGVRVEYVAETIPDSPEGVILESVLEGFAEYYSLQLSQNIRRGRAESAEKCQSLGGNRPLGYKTGPDKKFVIDENTAPTVKMIFTMYADGKTVTEIVDKLNEMGLRTLRGGPFTKNSLHSILKNKKYIGVYEYQGREIKDGVPRIIEDDVFNKVQEMLKINKRAPAKTWSRADYILTDKLFCGKCGALMFGESGTSKTGVKHNYYICSNKKRFRSCDKKAVRQADIEDTVLNATHELLQDDELLDYIVDRTWEYYLAQDNSQEELRNLQRQLAQTDTAISNLIRAIEAGILTEETKKRMDELTQQKADLKASIADREIARGFHLQKSHIAFYLRSLRDADWSDKEAQKRLIQTFVNAVFVYDDHITLTYNFSGDKSAITLHDMQRFEDGEEFGCRASRSTNTI

SEQ ID NO: 5479 - protein, 505 aa, Unknown
  Description of Unknown: Integrase B5480 sequence
  PTHR30461:SF3,cd00338,SM00857,G3DSA:1.10.10.2600,IPR036162, PF13408,IPR025827,G3DSA:3.40.50.1390,PS51737,IPR006119, IPR038109,PF07508,IPR011109,SSF53041,PTHR30461, PS51736,Coil,PF00239
MYEEIKTACLYLRYSSSNQTEQSIEGQMHVCQDFCKRHNIKIVEMYIDRATSASKDIEKRVEFLKMIKDSEKENFDAVIVYKLDRFARSRYDSATYKYRLKRNGVQLISATENITQDPEGIILESVLEGMAEFYSAELSQKINRGMRESAMKHNSIGGAIPLGYKTVDKKLIVDETTAPIVREAFQMYADGESVAEICRTFNSRGYKTSKGTRFGKSSFTKIFRNEKYIGVYKYHDYRAEDVIPPIIDKDLWDRVQVRVGKIKKAPARNKAKHTYLLTGKLFCGHCGSSMNADGNSQGYLYYRCYGKKNLDKQCNKRNMEKNLIERLVAQDAMSFLTDEYIEKIATIACDRNKQEIESDSPIPVIRDRIRQVDVSLNNLLKAIETGSAPDMLVKRMGELETEKKDMEVQLKKEMAHQVYIEKEQVIFWLEKFREGDINDEEFCQTVIDLFVNSVTVWDEPDDKFRITIAYNLTSIPQKTYRLSKDGRLSDYASNTPLLNLPHKRS

SEQ ID NO: 5480 - protein, 505 aa, Unknown
  Description of Unknown: Integrase B5481 sequence
  PTHR30461:SF3,cd00338,SM00857,G3DSA:1.10.10.2600,IPR036162, PF13408,IPR025827,G3DSA:3.40.50.1390,PS51737,IPR006119, IPR038109,PF07508,SSF53041,IPR011109,PTHR30461, PS51736,Coil,PF00239
MYEDIKTACLYVRFSSHNQTEQSIEGQTRVCRDFCKRHNIRIVEIYADRATSASKDIEKRVQFLKMIKDSEKGLFDAVIVYKLDRFARSRYDSATYKYRLKRNGVQLISATENISNDPEGIILESVLEGMAEFYSAELSQKINRGMRESAYKHNSIGGAIPLGYKIEDKKLVIDPKTAPIVKEAFEKYADGETVAEICRQFNARGYKTSKGTAFGKSSFTKIFRNERYIGVYTFHDYRAEDAIPAIIDKDLWDRVQLRVGKIKNAPARNKAKVVYLLSGKIFCGHCGSKMNGNCNAGNYYYYQCYGKKNGNVDCKKKNIRKEFIERLVAQDALSLLTDEYIEQIATIACEKNQHEIELDSALPTIRDRIHQVDLSLNNLLKAIESGSAPDMLVKRMGELEKEKKDLQAQAKKESEDIVELDKAQVIYWLEQFRGGSIEDEEFCRMLIDLFVNSVTVWDEDDNTYKVTVAYNLTSLPTKTYRLNKGGTLSDFTSNAPALRRSITVR

SEQ ID NO: 5481 - protein, 505 aa, Unknown
  Description of Unknown: Integrase B5482 sequence
  PTHR30461:SF3,SM00857,G3DSA:1.10.10.2600,IPR036162,PF13408, IPR025827,G3DSA:3.40.50.1390,PS51737,IPR006119,IPR038109, PF07508,IPR011109,SSF53041,PTHR30461,Coil, PS51736,cd00338,PF00239
MTMESKRAVIYARYSSSRQREESIERQIEICNDYAVAHNMLVIGSYVDRKKTGKTDTRPDFQRMIYESSKHLFDVVLVWRYDRFARNLDDHGAYERLLHQNSVDLISATEEIPEGSHSAIIKAVILGGNESYSVELAAKVSDGMHRAAMQGQTSGGPRVFGYRVVDKHYVLDEGEAQIIRQIFTWYDQGKSMTEIVNQLNAQGAVNAAGKPFIISVMRRILTNQMYIGIRLYKGEDIGIRVPAIIDKELFDRVQIQVGKNKCAPARNKPLNDQYLLTTKLFCAQCGSTMSGISGISKNGSKYQYYSCTNRSNKKGCTKHYIGKEVLETAVVDAVKKVLLANNIPELAKAVVKCCNDAQDNGNLLKLESELREVNKGINNLLDLIEAGRNSQAMADRLEQREQQKKLLEQNIAKEKVLHRIPTEDEVIFFFNNFIQGNIDSLEYNRYLIDILVNSIYLSDEEDGTQKMTVLLNTQNGQETVTLNDLTQCSSNVHMVHHRGLEPRTH

SEQ ID NO: 5482 - protein, 505 aa, Unknown
  Description of Unknown: Integrase B5483 sequence
  PTHR30461:SF3,IPR036162,PS51737,IPR011109,PTHR30461, PF00239,G3DSA:1.10.10.2600,IPR006119,SSF53041,cd00338, SM00857,IPR025827,IPR038109,mobidb-lite,PS51736, cd18688,PF13408,G3DSA:3.40.50.1390,PF07508,Coil
MNGEIKNVVLYLRYSSAAQNEQSIEGQRHVCQEYCRRAGYQVMDEYIDRATSASHNVEKRLNFQRMLRDAERGRFDAVVVYKLDRFARNRYDSVNAKYRLKKAGVVLLSATENLSDSPESIILESVLEGMAEFYSAELSQKITRGMKETAQKHLSTGGTVPLGYRIENRRLVIDPTTAPIVKQAFEMYAAGHTVTAIAKQFNASGYRTSKGTAFNRSSFKSMFHNERYIGIYKYGAYKAENAVPAIIDKQLWDAVQSRLSHPAPPSQGKAQVPFLLAGKLFCGHCGAKMNGDSGKGRSGEPYYYYTCYNRKREHTCHKKSVRKEWIEKVVVQDAMHLLTDDYIEELADIAVQENQRQIAATTKIPLLKEKIVETEKSINNIITAIEKGVASDTLMHRITGLERQKKDYENQLAAEETSAIQLDKYMVIYWLDQFKHGDVDDERFRRNLINLLVNSVTIWDDPDGGFRITTAYNLTDAPTKTFRVEALPGSDMGSSSPPQRPVREI

SEQ ID NO: 5483 - protein, 505 aa, Unknown
  Description of Unknown: Integrase B5484 sequence
  PTHR30461:SF3,SM00857,G3DSA:1.10.10.2600,IPR036162,PF13408, PS51737,G3DSA:3.40.50.1390,IPR025827,IPR006119,IPR038109, PF07508,SSF53041,IPR011109,PF00239,PTHR30461, PS51736,Coil,cd00338
MRRAAIYARYSSDLQRSESIDAQIRACKYYAQRFDLEVVRIYADAAKSGKSTKKREDFLDMMEDAARDIFDVLLVHKLSRFSRRGTDTLNNKERLDSLGVELISVTERLDDTPEGRLMLYVITGMNEFYSANLAAETMKGLRENAYNGKHTGGLPPLGYDVDPVTKKLTINPSEEEAVRMIFSMYLSGCGYGEIVDTLNAHGYLTKRGAPFGRNSIHDILVNEKYTGLLTYDKIASKTPDGRMNRRKFKAEYLKIEDGCPQIITKEDFERVKETMAQNKRAPKTTAVENYLLSGKLFCGECGARMCGERHKVRDTAYSYYICNEGKRCKTHRLSVRKEIVENMVFDALNRMVLSEASVDAIAHAAVGSYETQKHAADTLEAEIAECEVKIANLVKAIATGLDEPELREEMARLKQRKAECHAMMETLRDNADQRKSVAEWKAYLRRFCDINALPDEDKKALIAVFVDRILLFLDGGPGPKGTYRIEVELNPNHVEPREGNGLPLP

SEQ ID NO: 5484 - protein, 505 aa, Unknown
  Description of Unknown: Integrase B5485 sequence
  SM00857,G3DSA:1.10.10.2600,IPR036162,PF13408,IPR025827, PS51737,G3DSA:3.40.50.1390,IPR006119,IPR038109,PF07508, IPR011109,SSF53041,PTHR30461,Coil,PS51736, cd00338,PF00239
MAKPEVSELAVVYARYSSHSQGEQSIEGQLSNARDYAAAHGYTIVHEYVDRAKTGRTDNRAEFQQMLKDTAKRQFSVIILWKVDRFGRNREEIAINKMKCRKNGVRVEYVAETIPDSPEGVILESVLEGFAEYYSLQLSQNIRRGRAESAEKCQSLGGNRPLGYKTGPDKKFVIDENTAPTVKMIFTMYADGKTITEIVDKLNEMGLRTLRGGPFTKNSLHSILKNKKYIGIYEYQGREIKDGVPRIIEDDVFNKVQEMLKINKRAPAKTWSRADYILTDKLFCGKCGALMFGESGTSKTGVKHNYYICSNKKRFRSCDKKAVRQADIEDAVLNATHELLQDDELLDYIVDRTWEYYLAQDNSQEELRNLQRQLAQTDTAISNLIRAIEAGILTEETKKRMDELTQQKADLKASIADREIARGFHLQKSHIAFYLRSLRDADWSDKEAQKRLIQTFVNAVFVYDDHITLTYNFSGDKSTITLRDMQRFEDGEEFGCRASRSTKTI

SEQ ID NO: 5485 - protein, 505 aa, Unknown
  Description of Unknown: Integrase B5486 sequence
  PTHR30461:SF3,cd00338,SM00857,G3DSA:1.10.10.2600,IPR036162, PF13408,IPR025827,PS51737,G3DSA:3.40.50.1390,IPR006119, IPR038109,PF07508,IPR011109,SSF53041,PTHR30461, PS51736,Coil,PF00239
MTKNAVIYARFSSDKQREESIDGQIRECRTFAEANEITIINTYIDRAMSARTDQRPSFLQMVKDSAKHLFDYVIVYQLDRFSRSRYDSAIYKHRLKKNGVKVLSAKENIKDDPSGILLESVIEGMAEYYSAELSQKVKRGMTENLLERKWIGGVLPFGYKLNENSQLEIDASTGPLVPKIFDACLHGKKITEIISYMNEHGYHTARGNKFSRNSLSRIINNLIYTGTFTWSNTEYPNYAPALITKEQYTAMQNLLESQKKSHNHARVVSPHYALTGKIYCGECGLPMTGYCGKSHTGATYYYYRCSSKNNKKEKSNRENISCNMKNINRDKLEKLVLDTTVSILKNPDAVKCIAEQCMAVQKAELENKPTEQLRLESQIKDIEKRLKNCVNAVENGLISQTITNNIATYEKQLAELHSQIDTIKLENRIIPITEEAVIYYLNELTKRATKKDGCSLETFDDFIRRVVVKDGQIDIYYNYTPVPNILENPAVKMLRGSSENHLVTR

SEQ ID NO: 5486 - protein, 505 aa, Unknown
  Description of Unknown: Integrase B5487 sequence
  PTHR30461:SF3,cd00338,SM00857,G3DSA:1.10.10.2600,IPR036162, PF13408,IPR025827,G3DSA:3.40.50.1390,PS51737,IPR006119, IPR038109,PF07508,SSF53041,IPR011109,PTHR30461, PS51736,Coil,PF00239
MYEDIKTACLYVRFSSHNQTEQSIEGQTRVCRDFCKRHNIRIVEIYADRATSASKDIEKRVQFLKMIKDSEKGLFDAVIVYKLDRFARSRYDSATYKYRLKRNGVQLISATENISNDPEGIILESVLEGMAEFYSAELSQKINRGMRESAYKHNSIGGAVPLGYKIEDKKLVIDPKTAPIVKEAFEKYADGETVAEICRQFNARGYKTSKGTAFGKSSFTKIFRNERYIGVYTFHDYRAEDAIPAIIDKDLWDRVQLRVGKIKNAPARNKAKVVYLLSGKIFCGHCGSKMNGNCNAGNYYYYQCYGKKNGNVDCKKKNIRKEFIERLVVQDALSLLTDEYIEQIATIACEKNQHEIELDSALPTIRDRIHQVDLSLNNLLKAIESGSTPDMLVKRMGELEKEKKDLQVQAKKESEDIIELDKVQVIYWLEQFRGGNIEDEEFCRMLIDLFVNSVTVWDEDDNTYKVTVAYNLTSLPTKTYRLNKGGTLSDFTSNAPALRRSITAR

SEQ ID NO: 5487 - protein, 505 aa, Unknown
  Description of Unknown: Integrase B5488 sequence
  PTHR30461:SF3,cd00338,SM00857,G3DSA:1.10.10.2600,IPR036162, PF13408,IPR025827,G3DSA:3.40.50.1390,PS51737,IPR006119, IPR038109,PF07508,IPR011109,SSF53041,PTHR30461, PS51736,Coil,PF00239
MKTAVIYARYSSDKQTEQSIEGQLYDCYNYAKANNITVIGEYIDRAMTGRNDDRPDFQRMISDSAKHTFELVLVWKLDRFARSTEDAAYNRGKLKRNGVRLLSVKEDFGDSSAGDLMMHVMESFNEFYSADLREKTVRGMHQSALKCQSTGGQIPIGYKIEGKKYAIDEATRFIPETVFRMYAEGKRLAEIARYLNEKGYRTRMGRKFTTGSFYTMLSNEKYIGVYKYRDVRIEGGYEAMIDPVLFDAVQKKLVENKKRAPKVSERENFYLTGKLFCGHCGEPMNGMSGNSAKGKHLYYRCNGVRKHTGCDKRTERKEELENEIIGAIQRAFANADPEELTRKVIENYEKNSRPADQVKVMKAELQKITNKVDNVVNAIAEMGGNETLYTQLRQLTEQKEQKETEIRIAEHKADDMPTVELVKKILDLIQNADTMTDEGRQLLIDGAVSRIYVYDDSLDIYFKGGKNTEIPLNPANKDDVSDNSFACCKEWGAKAILSTNHREKV

SEQ ID NO: 5488 - protein, 505 aa, Unknown
  Description of Unknown: Integrase B5489 sequence
  cd00338,SM00857,G3DSA:1.10.10.2600,IPR036162,PS51737, G3DSA:3.40.50.1390,IPR006119,IPR038109,PF07508,IPR011109, SSF53041,PTHR30461,PS51736,Coil,PF00239
MTLAFSYVRFSTKHQASGTSLERQVNASKLFCSQNGLTLSNQSYHDLGISGFKNVRRPELEQMLEAIQTGDIPSGSYILIEAIDRLSRKGISHTQDILKKILQYDVKVAFVGEDAKTLQGHILNKDSLNDLSSVILVALAADLAHKESLRKSKLVKASKAIARDKAADGEILPGKSVFYLDYDKKNKKYVFNKRVDLARKIIQMRLEGKGPRKIARLLNEENIPGPTGKQWYQMSVKRLLKSPVLYGAYQTHQIIEEKYIPVSLIENYYPALIDYQTFSQIQFDDKRVSKGRPSRHKFSGVLYCECGAVLCRKVNTYETKQGPKEYQYFNCFGAFEGRCKNNKAIKDLHIPLEKAIDKLQIKTRSVKNIKNEQIIAKREKIDQLNKMLLELEMPPVSVLKTISTLEKELQELLEQPDIQPPKSADVKTLVAIKDAEQYNLYLKRLVKRITIFQLNGPKNIRIKIEKTDGHYQSFIVNNGKIMFNADTKALQEHLRKLKEGTSDED

SEQ ID NO: 5489 - protein, 505 aa, Unknown
  Description of Unknown: Integrase B5490 sequence
  cd03768,PTHR30461:SF3,SM00857,G3DSA:1.10.10.2600, IPR036162,PF13408,IPR025827,G3DSA:3.40.50.1390, PS51737,IPR006119,IPR038109,PF07508, IPR011109,SSF53041,PTHR30461,PS51736,Coil,PF00239
MLKYDAIYARQSVDRMDSISIESQIDFCKFEVRGGEYRVFQDKGYSGKNTDRPNFKMMLEAIRRGDVKRVIVYKLDRISRSILDFATMMAEFQDNGVEFVSCTEKFDTSTPMGRAMFNICIVFAQLERETIQQRVTDAYISRSRKGFYMGGRVPYGYQLETYTIDGKKTSRYTIVPEEAKIVKVIFSMYAVPQTSFGDIVHYLVDNGIPNARGKGQVWDRARISDMIKNPIYVKADLDIYQFYKDQGSIVHDDPCLFIGTNGCYLYSEKGAGRKTIHLEGQHVVLAPHEGIVPSDIWLKARCKCLNNKQVAKPLKAKNTWLAGKIKCGKCGYALTIRKSNTQIGRYFICSRRMQTNFCEGVGGIDATAFETLILSEMKKKVEQFDVLNAPPQMQNNPRIVELGTQIEQIEAEIEKLLDRVSEADSVLMGYINKKVSELHNQSSELKREMNELEQAIIQPKLNVKQIRNCMQHWEKLEFDDKRAVVDQLIAVIKATENTCEITWKV

SEQ ID NO: 5490 - protein, 505 aa, Unknown
  Description of Unknown: Integrase B5491 sequence
  SM00857,G3DSA:1.10.10.2600,IPR036162,PF13408,IPR025827, G3DSA:3.40.50.1390,PS51737,IPR006119,IPR038109,PF07508, IPR011109,SSF53041,PTHR30461,Coil,PS51736, cd00338,PF00239
MAKPEVSELAVVYARYSSHSQGEQSIEGQLSNARDYAAAHGYTIVHEYVDRAKSGRTDNRAEFQQMLKDTAKRQFSVIILWKVDRFGRNREEIAINKMKCRKNGVRVEYVAETIPDSPEGVILESVLEGFAEYYSLQLSQNIRRGRAESAEKCQSLGGNRPLGYKTGADKKFVIDENTAPTVKMIFTMYADGKTVTEIVDKLNELGLRTLRGGPFTKNSLHSILKNKKYIGIYEYQGREIKDGVPRIIEDDVFNKVQEMLKINKRAPAKTWSRADYILTDKLFCGKCGALMFGESGTSHTGAKHNYYICSNKKRFRSCDKKAVRQADIEDTVLNATHELLQDDELLDYIVDRTWEYYLAQDNSQEELRNLQRQLAQTDTAISNLIRAIEAGILTEETKKRMDELTQQKADLKASIADREIARGFHLQKSHIAFYLRSLRDADWSDKEAQKRLIQTFVNAVFVYDDHITLTYNFSGDKSTITLHDMQRFEDGEEFGCRASRSTNAR

SEQ ID NO: 5491 - protein, 505 aa, Unknown
  Description of Unknown: Integrase B5492 sequence
  PTHR30461:SF3,cd00338,SM00857,G3DSA:1.10.10.2600,IPR036162, PF13408,PS51737,IPR025827,G3DSA:3.40.50.1390,IPR006119, IPR038109,PF07508,IPR011109,SSF53041,PTHR30461, PS51736,Coil,PF00239
MSSVDKTAVIYARYSSHGQTEQSIDGQIAAAQKYAEGKGYTIIHIYADRAMTGRNDDREQFQKMLSDTATHQFGVILLWKIDRFGRNREEIAFNRYRCKKNGVRVERVAEDVPDGPEGVILDSVLEGMAEYYSLQLAQNVRRGQRESAKKSQSNGGTRMIGYKVNPDTKRYEIDPDTAPFITEVFRRYAGGQTMAEIAAWLNAQGLRATRGGMFTVNSLHRLLKNEKYTGVYIFRDIRNEGGMPALIDRATFDKVQEMLKVNRRAPSRVWSRAEYLLTDKLFCGHCGAPMAGVSGHGHTGVKHNYYTCLNRKRKKSCTKKSVRQDVLEPLVLKSIRNLLQDDATLKYIADRVWAEYERSDTSGDTIRALDRQIADVDRALSNVMKAIEMGIINEMTKARMDELTEQKQALSAARADAGLARGFKLTRNMILYFLRKMAAMDISDRDSQKRLIKTFVNAIYLYDDHFDIAFNYTENGKVIVKMQEIDDASTGGAFGCCAQCPTITI

SEQ ID NO: 5492 - protein, 505 aa, Unknown
  Description of Unknown: Integrase B5493 sequence
  cd00338,SM00857,G3DSA:1.10.10.2600,IPR036162,PS51737, G3DSA:3.40.50.1390,IPR006119,IPR038109,PF07508,SSF53041, IPR011109,PTHR30461,PS51736,Coil,PF00239
MDKYAIYLRKSRADLEAEKLGEGETLARHKKILTELASRKGLYVEKIYHEIVSGETIANRPEIQKLIADAYEGKYRGIIVVDVDRLSRGNQADMQTIMDCLKYANNRNGLLVVTPTKTYDVSHNYDDEEYIEFVLFMSRREYKTILKRLERGRRQAVVEGNFLGSYRPYGYDILKNRTGRTLIPNAEEAPIVKKIFEWTVDDHMTPGKIAKKLTAMGVPTYRGDTDWNLSTIKTILSNPVYCGKVRWNDRMRIKKMVDGKMVSSRPRSNHTEHYMLHDGKHQALVSEEMFMKTSSRFHADKTKGDLKLKNPLAGLLFCKKCEKAMVYQSYPSRPNTEPRFCHRFGKSCNVKSATYRDVMDALTSALDTYIDDFELKIDNLPDVDENSIQDQITALENEIRKTEKKLSKLFDSWEDGIIDNNEFVQRKEVHNLKIDAIKRQIEDLEKAVPEKEEYQEKIMSMSDALSALKDDALDADIKNEYLKKNIEKIEFSRDNDDEFILDIYF

SEQ ID NO: 5493 - protein, 505 aa, Unknown
  Description of Unknown: Integrase B5494 sequence
  PTHR30461:SF3,SM00857,G3DSA:1.10.10.2600,IPR036162,PF13408, IPR025827,G3DSA:3.40.50.1390,PS51737,IPR006119,IPR038109, PF07508,SSF53041,IPR011109,PTHR30461, Coil,PS51736,cd00338,PF00239
MRCAIYLRKSRADEEAENKGEFETLSRHRSTLLKVAKEQQLNIVEIKEELVSGESIQYRPKMLELLDEVKQGLYDAVLVMDIDRLGRGNMQDQGLILETFKKSKTKIITPRKTYDLTNEFDEEYSEFEAFMARKELKLITRRMQRGRIKSVEDGKFIASKPPYGYKFVFNESGNKSMVIDQDKADVVKLIFNLYINGNGANKVANHLNALGLKTTTGRTWYDKGVRDIIKNKVYCGYVVWNRVERTKEYYRNRPAGEVLESKGIHEPIISEETWNKAQKMLKGNAISPTAVFKEITNPLAGLVVCKCCGHTMIARSASTTKTGYEKFLRCVNCSDNRGIKLDIVEEEIINNLNQFVINYKADFNGIEYSNSNNDNLASLNKILRTFENEASTLVSQKENLHNLLEQGVYDIDTYLDRSKVLSDKIEKNKTNINNIKNEILNEEESSLLIEGTIPLIEHVLELYYTETSFAQRNKLLKSIIDKVIYYRKPGSKKSKVEITIHPKIE

SEQ ID NO: 5494 - protein, 505 aa, Unknown
  Description of Unknown: Integrase B5495 sequence
  PTHR30461:SF3,cd00338,SM00857,G3DSA:1.10.10.2600,IPR036162, PF13408,IPR025827,G3DSA:3.40.50.1390,PS51737,IPR006119, IPR038109,PF07508,IPR011109,SSF53041,PTHR30461, PS51736,Coil,PF00239
MDNVVIYARYSSDKQTEQSIEGQLRYCYQYAEQHDYRVVGEYIDRAISGTSDRRPQFQQMISDAEKKQFKYVLVWKLDRFARNRYDSAIYKTKLKKSGVKVLSVTEGIGDGDESIILEAVLEAMAETYSRQLSQNVKRGMHESALKGLSTGGTVPYGYKLRDGRLVIDEPAAKNVKFIFEQYAAGVGKKAIADALNAKGCKTATGRDFSVVSLAHIFKNRKYIGIYHYNGEVEIEGGCPAIVDKALFDRCTLRAEQNRRAPAKGKGEVDYILTGKLFCGICGSPMVGDSGKGKTGAVYYYYTCSNRKKNGGVKACPKKREDKGFIEWYVVEQTLKYVLDPERIALIAERVVAAYNKDFSADAVADLERQLAAAGREMDKLADSLINAASPRLVESINKKAEQLDAQIAELEDELSKLRICAAARLTVEQVTAWLKSFCNGDPLDLDFRRRIIDVLVNAVYLYDDKVFIFFNVKNGKQISYIDFCADFADDPPEGESSDFNACGSP

SEQ ID NO: 5495 - protein, 505 aa, Unknown
  Description of Unknown: Integrase B5496 sequence
  SM00857,G3DSA:1.10.10.2600,IPR036162,PF13408,PS51737, G3DSA:3.40.50.1390,IPR025827,IPR006119,IPR038109,PF07508, IPR011109,SSF53041,PTHR30461,Coil,PS51736, cd00338,PF00239
MAKPEVSELAVVYARYSSHSQGEQSIEGQLSNARDYAAAHGYTIVHEYVDRAKSGRTDNRAEFQQMLKDTAKRQFSVIILWKVDRFGRNREEIAINKMKCRKNGVRVEYVAETIPDSPEGVILESVLEGFAEYYSLQLSQNIRRGRAESAEKCQSLGGNRPLGYKTGPDKKFVIDENTAPTVKLIFTMYADGKTVTEIVDELNEMGLRTLRGGPFTKNSLHSILKNKKYIGVYEYQGREIKDGVPRIIEDDVFNKVQEMLKINKRAPAKTWSRADYILTDKLFCGKCGALMFGESGTSKTGAKHNYYICSNKKRFRSCDKKAVRQADIEDTVLNATHELLQDDELLDYIVDRTWEYYLAQDNSQEELRNLQRQLAQTDTAISNLIRAIEAGILTEETKKRMDELTQQKADLKASIADREIARGFHLKKSHIAYYLRSLRDADWSDKEAQKRLIQTFVNAVFVYDDHITLTYNFSGDKNTITLRDMQRFEDGEEFGCRASRSTNAR

SEQ ID NO: 5496 - protein, 505 aa, Unknown
  Description of Unknown: Integrase B5497 sequence
  PTHR30461:SF3,cd00338,SM00857,G3DSA:1.10.10.2600,IPR036162, PF13408,IPR025827,G3DSA:3.40.50.1390,PS51737,IPR006119, IPR038109,PF07508,IPR011109,SSF53041,PTHR30461, PS51736,Coil,PF00239
MKKFPIDLSCLTEEEISQFQEDPYTLYNGDQDVALYLRYSSTGQSDQSIEGQLRDCRTFCKANHYRIVAIYVDRATTARKDVEKRVHLMEMVADSAKQNWEYVIVWKLDRFARNRNDSAIMKMRLRKNGVKVLSATEHLTDSPESIILESVLEGMAEFFSAELSQKVTRGMRESALKCHSVGGHIPLGYKVENHKLVVDPDTAHIVQEAFSLYANGESVADICRKFNSAGYKTAKNTEFNRSSFKAMFRNTRYIGTYTYKDIVIENGIPAIIDKELFETVQRRLSKTATAPARGKAKVDYLLSGKLFCGHCGASMNGESGAGRHGKVYHYYSCYTKKRKLGCDKRPLKKDYIEGIVARDALNLLTDQLIDEIADMAIRQSEQDLINDTHIPQLTAQLSEVEKSITNITAAIEKGIASETLMNRLVQLEHEKKTINKEIKAEEKFVYRIDRDQIVFWLSQFKYGNIEDENFRRRLIDLLVNSVTVWDEPDGYKITTAYNLTSCKTE

SEQ ID NO: 5497 - protein, 505 aa, Unknown
  Description of Unknown: Integrase B5498 sequence
  PTHR30461:SF3,cd00338,SM00857,G3DSA:1.10.10.2600,IPR036162, PF13408,IPR025827,G3DSA:3.40.50.1390,PS51737,IPR006119, IPR038109,PF07508,SSF53041,IPR011109,PTHR30461, PS51736,Coil,PF00239
MKIEKIAIYARRSEEKETGESIKNQINICRNYIERIYKNPLIDEYFDDDYSGRNMIRPDFNKMMILVKKGYYKAIVFWKLDRVARNALDFLKLHKELDKLGVNLISVTEGFDPSTPAGKLMMTMLAAVAEMERKNISQRVISNMNEMAKKGKWTGGITPYGYKTITIKKEKYLKEDNDTIKTVKEIFDKYLETESLFQVSKWLKQSYNIKKSPTSIKRILTNLVYVKSDNEISKYLTNRGINLYGQLNGNGLVSYGKANKTNDEGVEFRNISEWIVAIGKHKGIISGLEYIKVQHILKSKNNSGRRGTGDVTFLNGLCRCSYCGSYMRTKQKKKTNGGYYKYFACAKKDTGLEHCKNKMIKISDVEETVLNALYNYKINNIHTNNTPIDTSKLRNDLNKKQKQIKNLVLKLSLDDELEDIFLEQIRELKKEVNELQKNIEEKEKENLLNNVSNYNKDSFIKQLSNFKNIFINCKDIDSKRKLIKNLVKEIRIDGINKKTELETYF

SEQ ID NO: 5498 - protein, 505 aa, Unknown
  Description of Unknown: Integrase B5499 sequence
  PTHR30461:SF3,cd00338,SM00857,G3DSA:1.10.10.2600,IPR036162, PS51737,G3DSA:3.40.50.1390,IPR006119,IPR038109,PF07508, SSF53041,IPR011109,PTHR30461,PS51736,Coil, PF00239
MNNSVLSAMYLRKSRADDPHEAVMETLHRHESILRAVAKRGKYLVPEDCIYREVVSGENIFSRPQMVRLLEDVTNGKFQSVIVVDIDRLGRGDMRDQGLILETFKNSDTLIITPEKVYDLNDEMDEELTEFKGFMARREYKMITKRLKRGREQTVKAGGFVAEPPYGWKRSKINNLPSLEPHEAEGPIMQMIVEMYGNQEPISAIQQRLAAMGVYNRKGVPFCRSSIRHIATNPVNAGLIQWNRYKNVRKGENGSPTGYQIENSPDQVILVKGVHQPQVSVEAYQKCINVCRSRSTPSVKKGIHGIVRNPLAGIVICSNCGNRMQMQHSTTKGSSTLLCTTPRCMAGVDIGRAEIALLDILRAKLEEIRTGQGKKQQDSALAELQKSVQATEKNIQSLKKQQNKLYTLLEQEVYSIEVFKERNQVLTQKLTHTKEQLKTLQDQIDDISNRKAERLAQNIEHVLANYEGSSPKEKNRLLKTVVEKALYFRQSRTSPFAFDVTFINM

SEQ ID NO: 5499 - protein, 505 aa, Unknown
  Description of Unknown: Integrase B5500 sequence
  cd00338,SM00857,IPR036162,PS51737,G3DSA:3.40.50.1390, IPR006119,PF07508,IPR011109,SSF53041,PTHR30461, PS51736,Coil,PF00239
MELAFSYARFSTKSQSTGTSLERQLNASRLFCSERGLTLSPKGYHDLGVSGFKQVKRPELEQMLQAIQSGDIPSGSYILIEAIDRLSRKGISHTQDVLKQILQYKVKVAFVGEDAKTLAGQVLDENSLNDLSSVILVALAADLAHKESVRKSKLVKAAKSIIRKKGTEGHKVRGHTMFWIDWSDKKQDFVLNDRVKDVHKIIQLRREGQGPRKIAKTLNELNIPGPRGNPWNHMTVTVVLRSPVLYGAYQTHQIIDGQKVPDVLLENHYPAVITQEEFVTIQADSSKSNKGRPSKANPFSGVLRCECGQAMLFSKRTNLNKDGEPLEYEYHFCLGYAEGRCKNNKRIRDLVPLLVQLMDKLVINQAPKKNLNVELIKQKEQKIEQLNKMLIELDSPPLSVLKTIQTLEAELDILLNTHVEEPVQADVQTLSSITDAQEYNQHLKRLVKKIVVYQKNGPKNLRIKVYKTDGHYQNFLVKDGTVLFKSDTKALKELIDGFNKERRER

SEQ ID NO: 5500 - protein, 505 aa, Unknown
  Description of Unknown: Integrase B5501 sequence
  cd03768,PTHR30461:SF3,SM00857,G3DSA:1.10.10.2600, IPR036162,PF13408,IPR025827,G3DSA:3.40.50.1390, PS51737,IPR006119,IPR038109,PF07508, IPR011109,SSF53041,PTHR30461,PS51736,Coil,PF00239
MCPIDALYARQSLDKKDSISIENQLEFCKYETRGAEYETYIDKGFSGKNTNRPAFAKMMEDIRAGKIKRVIVYKLDRISRSILDFSNMMEIFQQYHVEFVSSTEKFDTSTPIGNAMLNISIVFAQLERETIQKRIADAYATKSQKGYYMGGRVPYGFQLEKTIINGIHTSVFVPEPNEMKQIRLIYQLYSEPDMTLGAVMRELLRQGFTEKRGAPWSTARISEILRNPVYAKADIDIYNFFESQGANMINPASDYVGTNGIFLYKGINGDKTKKKQYDLVDRDVVIAPHLGVIESNVWLKCRLKIMKNRQSARTNKGKRTWLAGKVKCKKCGYAYTVTRSNTKAGRYFQCSGSRYSIKCKGAGHTIYADVFEDYVLEEMKKQLAKFQYLSDELEAVTQPSSQAEKVRIAEIEQEIGNLLAKVPEANKTVMEYINRRIEELDKEKQSLQQKLVEQSTNQTSGKMDKITNYVAKWDELDNDDKQRVADILIDRIDIDEDIIEITWNI

SEQ ID NO: 5501 - protein, 505 aa, Unknown
  Description of Unknown: Integrase B5502 sequence
  cd03768,PTHR30461:SF3,SM00857,G3DSA:1.10.10.2600,IPR036162, PF13408,IPR025827,G3DSA:3.40.50.1390,PS51737,IPR006119, IPR038109,PF07508,IPR011109,SSF53041,PTHR30461, PS51736,Coil,PF00239
MCPIDALYARQSLDKKDSISIENQLEFCKYETRGAEYETYIDKGFSGKNTNRPAFARMMEDIRTGKIKRVIVYKLDRISRSILDFSNMMEIFQQYHVEFVSSTEKFDTSTPIGNAMLNISIVFAQLERETIQKRIADAYATKSQKGYYMGGRVPYGFQLEKTIINGIHTSVFVPEPNEMKQIRLIYQLYSEPDMTLGAVMRELLRQGFTEKRGAPWSTARISEILRNPVYAKADIDIYNFFESQGANMINPASDYVGTNGIFLYKGINGDKTKKKQYDLVDRDVVIAPHLGVIESDVWLKCRLKIMKNRQSARTNKGKRTWLAGKVKCKKCGYAYTVTRSNTKAGRYFQCSGSRYSIKCKGAGHTIYADVFEDYVLEEMKKQLAKFQYLSDELEAVTQPSSQAEKVRIAEIEQEIGNLLAKVPEANKTVMEYINRRIEELDKEKQSLQQKLVEQSTNQTSGKMDKITNYVAKWDELDNDDKQRVADILIDRIDIDEDVIEITWNI

SEQ ID NO: 5502 - protein, 505 aa, Unknown
  Description of Unknown: Integrase B5503 sequence
  PTHR30461:SF3,SM00857,G3DSA:1.10.10.2600,IPR036162,PF13408, PS51737,G3DSA:3.40.50.1390,IPR025827,IPR006119,IPR038109, PF07508,IPR011109,SSF53041,PTHR30461,PS51736, cd00338,PF00239
MNGVIYARYSSENQREESIDGQLRECTAFAQHNDIQIVGEYIDRAFSAKTDNRPSFQKMIKDSAKGEFDVIIVWKLDRFARNRYDSAHYKNILKKNGVKVVSATEAISSGAEGIILESVLEGMAEYYSAELAEKVSRGMKENALKCKYNGGSVPLGYYIDESKHFQIDSSVAPFVVECFEHYADGMTMKQLRDELNMKGVKNSRGGKLSIDVISRMLTNRKYLGEYTFQDITIKDGIPAIVSTSLFEKVQDRLTKTKKAPSSHKADDDYILTTKLFCGKCKSFMVGESGTNAQGKKYRYYKCVNHKKHQGCDMKSIRKDLIENMTIKYIREFLNDEDLINTLIDLAYDAQHKENEQLPLLRKQLAQTEKGIKNIVDAIEQGISTKSTRERLLDLEQRKNDIEMSISKESIENPMLTKKQFKFWFDQLKKLDISKSEQRQKLVDLFVNSIIIYDDHIKFFFNYKEHTETITFDELNNCSDLPDSPRPKKEIPDERYLFLFISMYKT

SEQ ID NO: 5503 - protein, 505 aa, Unknown
  Description of Unknown: Integrase B5504 sequence
  cd00338,SM00857,G3DSA:1.10.10.2600,IPR036162,PS51737, G3DSA:3.40.50.1390,IPR006119,IPR038109,PF07508,SSF53041, IPR011109,PTHR30461,PS51736,Coil,PF00239
MNNSVLSAMYLRKSRADDPHEAVMETLHRHESILRAVAKRGKYLVPEDCIYREVVSGENIFSRPQMVRLLEDVTNGKFQSVIVVDIDRLGRGDMRDQGLILETFKNSDTLIITPEKVYDLNDEMDEELTEFKGFMARREYKMITKRLKRGREQTVKAGGFVAEPPYGWKRSKINNLPSLEPHETEGPIMQMIVEMYGNQEPISAIQQRLAAMGVYNRKGVPFCRSSIRHIATNPVNAGLIQWNRYKNVRKGENGSPTGYQIENSPDQVILVKGVHQPQVSVEAYQKCINVCRSRSTPSVKKGIHGIVRNPLAGIVICSNCGSRMQMQHSTTKGSSTLLCTTPRCMAGVDISRAEIALLDILRAKLEEIRTGQGKKQQDSALAELQKSVQATEKNIQSLKKQQNKLYTLLEQEVYSIEVFKERNQVLTQKLTHTKEQLKTLQDQIDDISNRKAERLAQNIEHVLANYEGSSPKEKNRLLKTVVEKALYFRQSRTSPFAFDVTFINM

SEQ ID NO: 5504 - protein, 505 aa, Unknown
  Description of Unknown: Integrase B5505 sequence
  PTHR30461:SF3,SM00857,G3DSA:1.10.10.2600,IPR036162,PF13408, IPR025827,PS51737,G3DSA:3.40.50.1390,IPR006119,IPR038109, PF07508,IPR011109,SSF53041,PTHR30461, Coil,PS51736,cd00338,PF00239
MAQKKARAPEVLIPAVIYARYSSSGQREESIEGQLRECHEFARRNGLTVVGEYIDKALTGRTDRRPDFQRMLRDCERGVFKAVICWKMDRFARNRYDSAMYKYKLKKNGVRIFYAKESIPEGPEGIILESVMEGYAEYYSENLSQNVKRGYYDSALELKTLGQTVLGLRKGADGRFELDPATAPVVRRIFEEYAAGDSAKEIYTRLNAEGYRTSRGGLFNKNSLRRILQNEKYVGVYEFKDIRVEGAIPAIVERELFEKCQSMVERHHRAPAALRETSFLLTAKLFCGHCGEPMTGDGGTSRTGRVYYYYTCNGRRAHKCKKERAPKAWIEQLVIDELVALIHSDDFVNEVADKCMEYQQRTKDDSALRGLEARQKENERAIQNMLAAIEAGIITPSTKSRLMELEAERAQIEKGIAQQLISEPELERDQVVYFLERFRSGDVNDEGYRAFLVDTFLNAVYLYDDDKLVLVLNYTGERCKVTLELVEAAVEGDPGGSCFAPSGAS

SEQ ID NO: 5505 - protein, 505 aa, Unknown
  Description of Unknown: Integrase B5506 sequence
  cd00338,SM00857,G3DSA:1.10.10.2600,IPR036162,PF13408, IPR025827,G3DSA:3.40.50.1390,PS51737,IPR006119,IPR038109, PF07508,SSF53041,IPR011109,PTHR30461,PS51736, Coil,PF00239
MNAVIYARYSSDKQTEQSIEGQLREGYAYAERMGITVVGEYIDRAVSGTSDQRPDFQRMISDSIKRQFEAVIVWKLDRFARNRYDSAIYKSKLKKNGVRVFSVTEGIGDGDESIILEAVLEAMAEVYSKQLGQNAARGMRETAMKGLCTGGQIPLGYAVGEDHKLHIDSKTAPAVQLIYTLYADGQSKTQIANELNSRGFRTKTGKPYNCNSFYRILTNPMYYGNYTYKGEVLRECPAIISKALYDKCQERNDAVKRSRGMKISEVEWLLRGKLYCGHCGTQMTGDSGTSRTNEKYYYYTCHKHKRYKDCDKKSEKKEQLERAVCQKTVEYVLREDRIEYIAERVVEQYEKEFDASTIKEKETSLSKLNIELDKCAESLMNTTVRSVVDRINARAEELEAAKSELEHELAQLRITSKARITVDEIMTFLRGFCSGDVDDIQFRRKIIDTFINAVYVFDDKYVIYYNVRDCKQVTYSDMLASIHAPSDMSVHGSDCLLYGEPEKSP

SEQ ID NO: 5506 - protein, 505 aa, Unknown
  Description of Unknown: Integrase B5507 sequence
  PTHR30461:SF3,cd00338,SM00857,G3DSA:1.10.10.2600,IPR036162, PF13408,PS51737,G3DSA:3.40.50.1390,IPR025827,IPR006119, IPR038109,PF07508,IPR011109,SSF53041,PTHR30461, PS51736,Coil,PF00239
MSSVDKIAVIYARYSSHGQTEQSIEGQIAAAQKYAEQHGYTIIHIYADRAMTGRNDDREQFQKMLSDTAMHQFGVILLWKIDRFGRNREEIAFNRYRCKKNGVRVERVAEDVPDGPEGVILDSVLEGMAEYYSLQLAQNVRRGQRESAKKSMSIGGNKMLGYVVNPETKRYESDPKTASYVTEIFKRYANGETISEIVAWLNAQGIRTTRGSEFTVNSLHRLLKNEKYTGVYIFHDIRNEGGMPALTDRATFDKVQEMLKVNRRAPVRIWSKTEYLLTDKLFCGHCGAIMVGESGHGRNGTKHSYYTCLNRKKKKSCDKKPVRQDVIEPLVLRAIGKLLENPATLENIADQVWAAYERSDTSGDTIKALDKQIADVDRALSNVMKAIEMGIINEMTKTRMDELTNQKQALSQSRAEAGLTGGFKLTRDMILFFLQEMAALDMADRDSQKRLIKTFVNAIYLYDDHFDIAFNYTDNGKVAVRMQEINDAASGEVFGCCAQSPTKRL

SEQ ID NO: 5507 - protein, 505 aa, Unknown
  Description of Unknown: Integrase B5508 sequence
  PTHR30461:SF3,SM00857,G3DSA:1.10.10.2600,IPR036162,PF13408, IPR025827,G3DSA:3.40.50.1390,PS51737,IPR006119,IPR038109, PF07508,IPR011109,SSF53041,PF00239,PTHR30461, PS51736,Coil,cd00338
MNPVDKIAVVYARYSSHGQTEQSIEGQIAAAQKYAEQHGYTIIHVYADRAMTGRNDDREQFQKMLSDTAMHQFGVILLWKIDRFGRNREEIAFNRYRCKKNGVRVERVAEDVPDGPEGVILDSVLEGMAEYYSLQLAQNVRRGQRESAKKSMSIGGNKMLGYIVNPETKRYESDPKTASYVTEIFKRYANGETISEIVAWLNAQGIRTTRGSEFTVNSLHRLLKNEKYTGVYIFHDIRNEGGMPALTDRATFDKVQEMLKVNRRAPARVWSKTEYLLTDKLFCGYCGEMMVGESGHGRNGIKHSYYTCLNRKKKKSCDKKPVRQDVIEPLVLRAIGKLLENPATLENITDQVWAAYERSDTSGDTIKALDKQIADVDRALSNVMKAIELGIINEMTKTRMDELTNQKQALSTARAEAGLAEGFKLTRDMILFFLQELSALDMADRDGQKRLIKTFVNAIYLYDDHFDIAFNYTDNGNVVVRIQEINDAARGEVFGHCAQSPTKSL

SEQ ID NO: 5508 - protein, 505 aa, Unknown
  Description of Unknown: Integrase B5509 sequence
  PTHR30461:SF3,SM00857,G3DSA:1.10.10.2600,IPR036162,PF13408, IPR025827,G3DSA:3.40.50.1390,PS51737,IPR006119,IPR038109, PF07508,IPR011109,SSF53041,PF00239,PTHR30461, PS51736,Coil,cd00338
MRVVLYMRYSSDRQTEQSIEGQNRVCTAFCEQQGYEIVDRYIDRATSAFKDTDKRTEFQRMIRDSEKQLWEGIVVYKLDRFARNRYDSATYKARLKKNGVRVISATENISDNPEGVILEAVLEGMAEFYSKELSQKITRGMFESANKCHSIGGHIPLGYKIENKKLVIDEAGAAIVREAFDLYANGATVAEICETFNTKGYRTAKNAEFNKNSFRSMFKNERYIGIYKYKDLRIEGGVPAIVDKDTFAIVQKKLSKNAEAPSRGKAKIDYLLSQKLFCGHCGSLMTGESGTGKGGTTYFYYTCGKRKREHTCDKKPLKKDFIERAVVEDALTLLTPETIDELADIAVNESIREMEENSIIPALKDQLHDTERSINNLVKMVEKGVESDTIADRLKELEKEKRAIEKRLVVAQDDYVLLEKDHIVWWLSEFCNGDIEDEEFRRHIIDLLVNSVTVWDEPDGWYKITSVYNLTSNKTKTFRCSDLSGQAPPKVKIRTLSSMVIRSDF

SEQ ID NO: 5509 - protein, 505 aa, Unknown
  Description of Unknown: Integrase B5510 sequence
  SM00857,G3DSA:1.10.10.2600,IPR036162,PF13408,IPR025827, G3DSA:3.40.50.1390,PS51737,IPR006119,IPR038109,PF07508, IPR011109,SSF53041,PTHR30461,Coil,PS51736, cd00338,PF00239
MAKPEVSELAVVYARYSSHSQGEQSIEGQLSNARDYAAAHGYTIVHEYVDRAKSGRTDNRAEFQQMLKDTAKRQFSVIILWKVDRFGRNREEIAINKMKCRKNGVRVEYVAETIPDSPEGVILESVLEGFAEYYSLQLSQNIRRGRAESAEKCQSLGGNRPLGYKTGADKKFVIDENTAPTVKMIFTMYADGKTVTEIVDKLNELGLRTLRGGPFTKNSLHSILKNKKYIGIYEYQGREIKDGVPRIIEDDVFNKVQEMLKINKRAPAKTWSRADYILTDKLFCGKCGALMFGESGTSHTGAKHNYYICSNKKRFRSCDKKAVRQADIEDTVLNATHELLQDDELLDYIVDRTWEYYLAQDNSQEELRNLQRQLAQTDTAISNLIRAIEAGILTEETKKRMDELTQQKADLKASIADREIARGFHLQKSHIAFYLRSLRDADWSDKEAQKRLIQTFVNAVFVYDDHITLTYNFSGDKSTITLRDMQRFEDGEEFGCRASRSTNTI

SEQ ID NO: 5510 - protein, 505 aa, Unknown
  Description of Unknown: Integrase B5511 sequence
  PTHR30461:SF3,cd00338,SM00857,G3DSA:1.10.10.2600,IPR036162, PF13408,PS51737,G3DSA:3.40.50.1390,IPR025827,IPR006119, IPR038109,PF07508,IPR011109,SSF53041,PTHR30461, PS51736,Coil,PF00239
MTKNAVIYARFSSDKQREESIDGQIRECQAFAEANEINIINTYIDRAMSARTDQRPSFLQMVKDSAKHLFDYVIVYQLDRFSRSRYDSAIYKHRLKKNGVKVLSAKENIKDDPSGILLESVIEGMAEYYSAELSQKVKRGMTENLLEGKWIGGIVPFGYELTSENKLAISPATGHLVPEIYDKYLSGIKTTDILSKLNSLGIKTQRGCNFTRNSLNRILKNQIYTGTFTWAGTSYPDYAPALITQEQYTAMQNLFESRKRKSNTARRVSTQYALTGKIYCGTCGLPMTGYCGKSHTGTTYYYYQCSSKNNKSEKAARSQIACDAKNISRDKLEKLVLDTTISILKNKDAVKCIADQCMTIQKAELEHKPAEQLRLESQIKEIEKRLKNSVKAVENGLISQTITNNIETYEKQLTELNAQLDGLKLETHIIPITEEAVIYYLNQLTERANKKDGYSLDTFDDFIRRVVVTGKRVDIYYNYTAVPNILENPAVKMLRGSSEDYLVTR

SEQ ID NO: 5511 - protein, 504 aa, Unknown
  Description of Unknown: Integrase B5512 sequence
  cd03768,PTHR30461:SF3,SM00857,IPR036162,PF13408, IPR025827,G3DSA:3.40.50.1390,PS51737,IPR006119,PF07508, SSF53041,IPR011109,PTHR30461,PS51736,Coil, PF00239
MEDFIYARQSVDKEDSISIESQIELCLREVGNNPHRVFRDKGYSGKNTERPDFQDMMAAVRAGGARRIIVYRLDRISRSVLDFANVISELQKYGVEFVSITERFDTSTPIGKAMLMIVMVFAQLERETIQQRVMDAYRSRSRKGFYMGGRVPYGFELENTVMEGIKTCMYKPIPEQIQVVQLIFSLYAMPQVSFADVVRYLSQNGIKNPNGKNFSRMRIRDIITNPVYAKADASIYEFFHGQGTEIINDISQFIGTNGAYLYTGNKAAKRKSISLDGHVLVLAPHAGCIDADTWIRCRRKCLNVRQIAKPVKAKNTWLAGKIKCIDCGHALSLKSYPRKRSADARYYICNSKYVSASCDGVGAIQASGIEDIVFDEMSRKLKEFNKLSYKEKHGDPIELTKLKIRAEEIEKEIATLIDKIVSASTATMEYINERIDALDEEKKTVKEKIAQMSAEMYDRQNIGVISDYMSKWNDISIDDKLTVVDTLIESIHVGHGKVKIAWKI

SEQ ID NO: 5512 - protein, 504 aa, Unknown
  Description of Unknown: Integrase B5513 sequence
  PTHR30461:SF3,SM00857,G3DSA:1.10.10.2600,IPR036162,PF13408, IPR025827,G3DSA:3.40.50.1390,PS51737,IPR006119,IPR038109, PF07508,IPR011109,SSF53041,PTHR30461,Coil, PS51736,cd00338,PF00239
MNYNDSKGIYLMYLRKSRADEYNQDVENILKRHEEELQSLAKREFGELIPEKYIFREVVSGGTIKDRPLMKEILKMMESGIIAGVLVVDPQRLSRGDLLDQGHIINAFKYTNTLIITPYKTYDLNDTTGTDMKLLKMELNHGADYLDYYKMVQARGKLASVRAGNFIQPIPPFGYRKVRYGKVTTLEPIEDEARIVRIIFQKYAEGKTICGVTNELNAEGYIPPSKQIWTKGSVKRILSNPVYDGKIRWGFTPNKTVMEDGKLRKYRPERHDYLLFDGKHDAIVNHGLFMSVQERLSKNKSFTNDRSLKNPLYGIMYCKRCGRKISRLNVAESRGGHRYACPNKLCDVQSSRYDLVIEAVIDTIQCAIDDFDITFHNCNSSGSDEKIRELRQELTRLNNKEDTLFELLETKVYSTSVFTQRHAELEKKRQEIIGKINTLSLIPPPESCNDKKMRFKDALLALKDESMPPKEKNHLLKKCIERIDYDIEGVRYHSKVKLDVYFKF

SEQ ID NO: 5513 - protein, 504 aa, Unknown
  Description of Unknown: Integrase B5514 sequence
  cd03768,PTHR30461:SF3,SM00857,IPR036162,PF13408, IPR025827,G3DSA:3.40.50.1390,PS51737,IPR006119,PF07508, IPR011109,SSF53041,PTHR30461,PS51736,Coil, PF00239
MEDFIYARQSVDKEDSISIESQIELCLREVGNNPHRVFRDKGYSGKNTERPDFQDMMAAVRAGGAGRIIVYRLDRISRSVLDFANVISELQKYGVEFVSITERFDTSTPIGKAMLMIVMVFAQLERETIQQRVMDAYRSRSRKGYYMGGRVPYGFELENTVMEGIKTCMYKPIPEQIQVVQLIFSLYAMPQVSFADVVRYLSQNGIKNPNGKNFSRMRIRDIITNPVYAKADASIFEFFHGQGTEIINDISQFIGTNGAYLYTGNKAAKRKSISLDGHVLVLAPHAGCIDADTWIRCRRKCLNVRQIAKPVKAKNTWLAGKIKCIDCGHALSLKSYPRKRSADARYYICNSKYVSASCDGVGAIQASGIEDIVFDEMSHKLKEFNKLSFKEKHGDPIELTKLKIRAEEIEKEIATLIDKIVSASTATMEYINERIDALDEEKKTVKEKIAQMSAEMYDRQNIGVISDYMSKWNDISIDDKLTVVDTLIESIHVGHGKVKIAWKI

SEQ ID NO: 5514 - protein, 504 aa, Unknown
  Description of Unknown: Integrase B5515 sequence
  cd03768,PTHR30461:SF3,SM00857,IPR036162,PF13408, IPR025827,G3DSA:3.40.50.1390,PS51737,IPR006119,PF07508, SSF53041,IPR011109,PTHR30461,PS51736,Coil, PF00239
MEDFIYARQSVDKEDSISIESQIELCLREVGNNPHRVFRDKGYSGKNTERPDFQDMMAAVRAGGARRIIVYRLDRISRSVLDFANVISELQKYGVEFVSITERFDTSTPIGKAMLMIVMVFAQLERETIQQRVMDAYRSRSRKGFYMGGRVPYGFELENTVMEGIKTCMYKPIPEQIQVVQLIFSLYAMPQVSFADVVRYLSQNGIKNPNGKNFSRMRIRDIITNPVYAKADASIFEFFHGQGTEIINDISQFIGTNGAYLYTGNKAAKRKSISLDGHVLVLAPHAGCIDADTWIRCRRKCLNVRQIAKPVKAKNTWLAGKIKCIDCGHALSLKSYPRKRSADARYYICNSKYVSASCDGVGAIQAAGIEDIVFDEMSRKLKEFNKLSYKEKHGDPIELTKLKIRAEEIEKEIATLIDKIVSASTATMEYINERIDALDEEKKTVKEKIAQMSAEMYDRQNIGVISDYMSKWNDISIDDKLTVVDTLIESIHVGHGKIKIAWKI

SEQ ID NO: 5515 - protein, 504 aa, Unknown
  Description of Unknown: Integrase B5516 sequence
  PTHR30461:SF3,SM00857,G3DSA:1.10.10.2600,IPR036162,PF13408, IPR025827,PS51737,G3DSA:3.40.50.1390,IPR006119,IPR038109, PF07508,IPR011109,SSF53041,PTHR30461,Coil, PS51736,cd00338,PF00239
MNYNDSKGIYLMYLRKSRADEYNQDVENILKRHEEELQSLAKREFGELIPEKYIFREVVSGGTIKDRPLMKEILKMMESGIIAGVLVVDPQRLSRGDLLDQGHIINAFKYTNTLIVTPYKTYDLNDTTGTDMKLLKMELNHGADYLDYYKMVQARGKLASVRAGNFIQPIPPFGYRKVRYGKVTTLEPIEDEARIVRIIFQKYAEGKTICGVTNELNAEGYIPPSKQIWTKGSVKRILSNPVYDGKIRWGFTPNKTVMEDGKLKKYRPERHDYLLFDGKHDAIVNHGLFMSVQERLSKNKSFTNDRSLKNPLYGIMYCKRCGRKISRLNVAESRGGHRYACPNKLCDVQSSRYDLVIEAVIDTIQCAIDDFDITFHNCNSSGSDEKIRELRQELTRLNNKEDTLFELLETKVYSTSVFTQRHAELEKKRQEIIGKINTLSLIPPPESCNDKKMRFKDALLALKDESMPPKEKNHLLKKCIERIDYDIEGVRYHSKVKLDVYFKF

SEQ ID NO: 5516 - protein, 504 aa, Unknown
  Description of Unknown: Integrase B5517 sequence
  PTHR30461:SF3,SM00857,G3DSA:1.10.10.2600,IPR036162,PF13408, PS51737,G3DSA:3.40.50.1390,IPR025827,IPR006119,IPR038109, PF07508,IPR011109,SSF53041,PTHR30461,Coil, PS51736,cd00338,PF00239
MTVINEYCDRAISGKTDNRPSFQRLIKDSEKGQFEAVIMYTLDRFARNRYDSAIYKAKLKKHGVRVFYAKQPMPDTPEGIILESVLEGYAEYYSENLSRNIKRGLKENALQCIATGGAGVALGYTVGEDRKYKIDPVGAKIVQEVFEMYADGMSATQIINVCNERGYKTSRGNPFNKNSLRTMLKNDKYIGVYRFMDVVVEGGVPAIISKELFDKVQAKLQHNFTARARNKAKEDYLLTTKLFCGHCGSPMVGESGTSKTGKLHFYYKCIDRKRKHVCTKKVEKKDWIEELVTRFTVQEVLTDENIDRIATKAMEIIEKESADTTYLEGLQNELKEVQKKIKNIMTAIEQGIITSTTKDRLEELESEKNEIEGRISREEIKKPLLTKERIVYWLLSFKSGDINDIEYRRRVIDTLVNSVYIYDDGDKGRRIVLTFNVSGQNTATISCSDIACSAPPNKHRNFDTKRIRIAVLSFCLKALISRAFWLLRYLLLPSRTIAHRQSRP

SEQ ID NO: 5517 - protein, 504 aa, Unknown
  Description of Unknown: Integrase B5518 sequence
  PTHR30461:SF3,SM00857,G3DSA:1.10.10.2600,IPR036162,PF13408, IPR025827,G3DSA:3.40.50.1390,PS51737,IPR006119,IPR038109, PF07508,IPR011109,SSF53041,PTHR30461,Coil, PS51736,cd00338,PF00239
MNYNDSKGIYLMYLRKSRADEYNQDVENILKRHEEELQSLAKREFGELIPEKYIFREVVSGGTIKDRPLMKEILKMMESGIIAGVLVVDPQRLSRGDLLDQGHIINAFKYTNTLIITPYKTYDLNDTTGTDMKLLKMELNHGADYLDYYKMVQARGKLASVRAGNFIQPIPPFGYRKVRYGKVTTLEPIEDEARIVRIIFQKYAEGKTICGVTNELNAEGYIPPSKQIWTKGSVKRILSNPVYDGKIRWGFTPNKTVMEDGKLKKYRPERHDYLLFDGKHDAIVNHVLFMSVQERLSKNKSFTNDRSLKNPLYGIMYCKRCGRKISRLNVAESRGGHRYACPNKLCDVQSSRYDLVIEAVIDTIQCAIDDFDITFHDCNSSGSDEKIRELRQELTRLNNKEDTLFELLETKVYSTSVFTQRHAELEKKRQEIIGKINTLSLIPPPESCNDKKMRFKDALLALKDESMPPKEKNHLLKKCIERIDYDIEGVRYHSKVKLDVYFKF

SEQ ID NO: 5518 - protein, 504 aa, Unknown
  Description of Unknown: Integrase B5519 sequence
  cd03768,PTHR30461:SF3,SM00857,IPR036162,PF13408, PS51737,G3DSA:3.40.50.1390,IPR025827,IPR006119,PF07508, IPR011109,SSF53041,PTHR30461,PS51736,Coil, PF00239
MEDFIYARQSVDKEDSISIESQIELCLREVGNNPYRVFRDKGYSGKNTERPDFQDMMAAVRAGGARRIIVYRLDRISRSVLDFANVISELQKYGVEFVSITERFDTSTPIGKAMLMIVMVFAQLERETIQQRVMDAYRSRSRKGFYMGGRVPYGFELENTVMEGIKTCMYKPIPEQIQVVQLIFSLYAMPQVSFADVVRYLSQNGIKNPNGKNFSRMRIRDIITNPVYAKADASIYEFFHGQGTEIINDISQFIGTNGAYLYTGNKAAKRKSISLDGHVLVLAPHAGCIDADTWIRCRRKCLNVRQIAKPVKAKNTWLAGKIKCIDCGHALSLKSYPRKRSADARYYICNSKYVSASCDGVGAIQASGIEDIVFDEMSRKLKEFNKLSYKEKHGDPIELTKLKIRAEEIEKEIATLIDKIVSASTATMEYINERIDALDEEKKTVKEKIAQMSAEMYDRQNIGVISDYMSKWNDISIDDKLTVVDTLIESIHVGHGKVKIAWKI

SEQ ID NO: 5519 - protein, 504 aa, Unknown
  Description of Unknown: Integrase B5520 sequence
  cd03768,PTHR30461:SF3,SM00857,IPR036162,PF13408, IPR025827,G3DSA:3.40.50.1390,PS51737,IPR006119,PF07508, SSF53041,IPR011109,PTHR30461,PS51736,Coil, PF00239
MEDFIYARQSVDKEDSISIESQIELCLREVGNNPHRVFRDKGYSGKNTERPDFQDMMAAVRAGGARRIIVYRLDRISRSVLDFANVISELQKYGVEFVSITERFDTSTPIGKAMLMIVMVFAQLERETIQQRVMDAYRSRSRKGFYMGGRVPYGFELENTVMEGIKTCMYKPIPEQIQVVQLIFSLYAMPQVSFADVVRYLSQNGIKNPNGKNFSRMRIRDIITNPVYAKADASIYEFFHGQGTEIINDISQFIGTNGAYLYTGNKATKRKSISLDGHVLVLAPHAGCIDADTWVRCRRKCLNVRQIAKPVKAKNTWLAGKIKCIDCGHALSLKSYPRKRSADARYYICNSKYVSASCDGVGAIQASGIEDIVFDEMSRKLKEFNKLSYKEKHGDPIELTKLKIRAEEIEKEIATLIDKIVSASTATMEYINERIDALDEEKKTVKEKIAQMSAEMYDRQNIGVISDYMSKWNDISIDDKLTVVDTLIESIHVGHGKVKIAWKI

SEQ ID NO: 5520 - protein, 504 aa, Unknown
  Description of Unknown: Integrase B5521 sequence
  cd03768,PTHR30461:SF3,SM00857,IPR036162,PF13408, IPR025827,G3DSA:3.40.50.1390,PS51737,IPR006119,PF07508, SSF53041,IPR011109,PTHR30461,PS51736,Coil, PF00239
MEDFIYARQSVDKEDSISIESQIELCLREVGNNPHRVFRDKGYSGKNTERPDFQDMMAAVRAGGARRIIVYRLDRISRSVLDFANVISELQKYGVEFVSITERFDTSTPIGKAMLMIVMVFAQLERETIQQRVMDAYRSRSRKGFYMGGRVPYGFELENTVMEGIKTCMYKPIPEQIQVVQLIFSLYAMPQVSFADVVRYLSQNGIKNPNGKNFSRMRIRDIITNPVYAKADASIFEFFHGQGTEIINDISQFIGTNGAYLYTGNKAAKRKSISLDGHVLVLAPHAGCIDADTWIRCRRKCLNVRQIAKPVKAKNTWLAGKIKCIDCGHALSLKSYPRKRSADARYYICNSKYVSASCDGVGAIQAAGIEDIVFDEMSRKLKEFNKLSYKEKHGDPIELTKLKIRAEEIEKEIATLIDKIVSASTATMEYINERIDALDEEKKTVKEKIAQMSAEMYDRQNIGVISDYMSKWNDISIDDKLTVVDTLIESIHVGHGKVKIAWKI

SEQ ID NO: 5521 - protein, 504 aa, Unknown
  Description of Unknown: Integrase B5522 sequence
  PTHR30461:SF3,SM00857,IPR036162,PF13408,IPR025827, G3DSA:3.40.50.1390,IPR006119,PF07508,IPR011109,SSF53041, PF00239,PTHR30461,PS51736,Coil,cd00338
MKRIAIYSRKSKETDTGESIKNQINICKEYFLRQYDECNFEIFEDEGFSGGNTNRPAFKRMMQLAEHKQFDIIAAYKIDRISRNTLDFLTMFEKLKLNDIELVSVTEGFDANTPAGRMMMSMISSIAEMERANIAQRVKDNMFELAKLGRWSGGTPPTGYRSVKTIEGGKSAVYLEVIEEYVPLIKKIFYMASKGYTTYQIANEVNMSSKTISNILKNPTYMISDEQGSLFLKSIGYNIFGVENGNGYLTYNRRPRKNGKKLTKSTSMIASISLHKGIVTSNEWIEAYTKVNSRFTEAKPRVSQLTFLSHLVKCKCGSGMFVAPGHKRKDGTRTLYFRCSNKKNGGKCDCGFLKILDVEDTLLNTFYDISLDKSLINNYLKSQDPLEYDSEINILKKNIENNNKSINSLTEKLILIEGAAINIISEKINALHFENENLNKQLFDLERKKLLSRNNSNIDLIYNSIVFLLSNWDNLDISDKQLYVRKIVDSITWDGADGIDINLK

SEQ ID NO: 5522 - protein, 504 aa, Unknown
  Description of Unknown: Integrase B5523 sequence
  cd03768,PTHR30461:SF3,SM00857,IPR036162, PF13408,IPR025827,G3DSA:3.40.50.1390,IPR006119, PF07508,SSF53041,IPR011109,PTHR30461, PS51736,Coil,PF00239
MKRIAIYSRKSKETDTGESIKNQINICKEYFLRQYDQCTFEIFEDEGFSGGNTNRPAFKRMMQLADYKQFDIIAAYKVDRISRNTLDFLTMFEKLKLNDIELVSVTEGFDANTPAGRMMMSMISSIAEMERANIAQRVKDNMFELAKLGRWSGGTPPTGYKSVKITDNGKSIVYLEIIKEYIPIIKNIFHMAGKGYTSYQIANEMNMSSKTINNILKNPTYMISDEKGSLFLKSIGYNIFGIENGNGYLAYNRRPRKNGKKLTKSSNMIASVSLHKGIVTSNEWIEAYIKVNSRFTEAKPRVSQLTFLSHLVKCKCGSGMFVSPGRRRKDGTRTLYFRCSNKKNGGNCNSGFLKILDVEESLLNTFYDISLDKSLINNYIKVNDQFKYDTEINILKKTIENNTKSINSLTEKLILIEGAAINIISEKINLLHFENEDLNKQLFDLERKKLLSLNTSNIDAIYDSIIFILSKWDKLNITDKQIYMQKIIDCIVWDGADGLNINLK

SEQ ID NO: 5523 - protein, 504 aa, Unknown
  Description of Unknown: Integrase B5524 sequence
  PTHR30461:SF3,IPR036162,PS51737,IPR011109,PTHR30461, PS00397,PF00239,G3DSA:1.10.10.2600,IPR006119,SSF53041, SM00857,IPR025827,IPR038109,PS51736,cd03768, IPR006118,PF13408,G3DSA:3.40.50.1390,PF07508,Coil
MYKASNGSGELMENKVIRVGGYIRVSTQEQAKEGYSIPAQTKCLKSYCSARNWILHELYIDPGYSGAKMERPALQKMLSDIKKGLVDLVLVYKLDRLSRSQKDTLYLIEDVFLKNEVAFVSINENFDTSSAFGRAMIGILSVFAQLEREQIKERTQMGLAERAKNGMWHGSGITPIGYDYDPASNQLIVNEYEAMQIREAFDLFVNQNYAFTKIVKTFRNKGYSHKHGVWAHSSKLRYILSNKTYIGRINWNGEDYPGKHDPIIPSSLFEAAQKKLAEKDWKLTDKPAKSPFDATQLLSGVLFCGNCGGRYYGAGCYRGSHDPNSPKRRYEHIYSCYSRTKTKLEMIKDPSCKNKNWKTETLDNYVITRIKNLRLEGEIENLIAKERPKNPGIDQRKALEKQIDDIDRQISRLLTLYQLEDVPTAEIGLRLSDLTRKKKTVEEAIENIPLYEPELSVAKAKSLLADAEEIFNCGTTEEKRSLIHALIRKIILTRNDVVIEWAFI

SEQ ID NO: 5524 - protein, 504 aa, Unknown
  Description of Unknown: Integrase B5525 sequence
  PTHR30461:SF3,SM00857,G3DSA:1.10.10.2600,IPR036162,PF13408, PS51737,IPR025827,G3DSA:3.40.50.1390,IPR006119,IPR038109, PF07508,IPR011109,SSF53041,PTHR30461,Coil, PS51736,cd00338,PF00239
MDRAVIYARYSSDNQREESIDAQVRACREYCKRKDYFVTHIYKDEAKSGTKLAGRDAYKQMLADVKENLFDVIIFHKIDRNARNELDYYLTKDMLEKNNVRYEYAVQNIDGSPEGQMMENMLVGFAAYYSRNLSKETKKGLNENAHKCLFNGGVPPLGYDIDQNQRYVINTKEAEIVKLIFKLYIEGIGYKKIAEKLDELGYKTKTGGDFGKNSLFDIIGNEKYCGIYSYNKHPRAKNGKGRNMHAKSFPEDYITIDNAIPAIISMELYEAAQARRRQNKSRPGIYNGKRQYLLTGKIFCGHCGSAMGGHTNTPRKKSYSYYGCLDKDRTPAHKCTQKQINTEIVDTAVINKIKHTFLNSEALLRIADKMRQQYATLKDDVEDEIHSKTSQMAGAIKRRNNLYCLVEQGINDDYTLSRISAVNAEVEKLKAQIDNLKDKKNLKVLTDEAIIKAFKLFESKICSLDTNSAKKLLVELFLIKVIVTDKNIDIILDADKITNMVMGQ

SEQ ID NO: 5525 - protein, 504 aa, Unknown
  Description of Unknown: Integrase B5526 sequence
  cd03768,PTHR30461:SF3,SM00857,IPR036162,PF13408, IPR025827,G3DSA:3.40.50.1390,PS51737,IPR006119,PF07508, SSF53041,IPR011109,PTHR30461,PS51736,Coil, PF00239
MEDFIYARQSVDKEDSISIESQIELCLREVGNNPHRVFRDKGYSGKNTERPDFQDMMAAVRAGGARRIIVYRLDRISRSVLDFANVISELQKYGVEFVSITERFDTSTPIGKAMLMIVMVFAQLERETIQQRVMDAYRSRSRKGFYMGGRVPYGFELENTVMEGIKTCMYKPIPEQIQVVQLIFSLYAMPQVSFADVVRYLSQNGIKNPNGKNFSRMRIRDIITNPVYAKADASIFEFFHGQGTEIINDISQFIGTNGAYLYTGNKAAKRKSVSLDGHVLVLAPHAGCIDADTWIRCRRKCLNVRQIAKPVKAKNTWLAGKIKCIDCGHALSLKSYPRKRSADARYYICNSKYVSASCDGVGAIQAAGIEDIVFDEMSRKLKEFNKLSYKEKHGDPIELTKLKIRAEEIEKEIATLIDKIVSASTATMEYINERIDALDEEKKTVKEKIAQMSAEMYDRQNIGVISDYMSKWNDISIDDKLTVVDTLIESIHVGHGKVKIAWKI

SEQ ID NO: 5526 - protein, 504 aa, Unknown
  Description of Unknown: Integrase B5527 sequence
  cd03768,PTHR30461:SF3,SM00857,IPR036162,PF13408, PS51737,G3DSA:3.40.50.1390,IPR025827,IPR006119,PF07508, IPR011109,SSF53041,PTHR30461,PS51736,Coil, PF00239
MEDFIYARQSVDKEDSISIESQIELCLREVGNNPYRVFRDKGYSGKNTERPDFQDMMAAVRAGGARRIIVYRLDRISRSVLDFANVISELQKYGVEFVSITERFDTSTPIGKAMLMIVMVFAQLERETIQQRVMDAYRSRSRKGFYMGGRVPYGFELENTVMEGIKTCMYKPIPEQIQVVQLIFSLYAMPQVSFADVVRYLSQNGIKNPNGKNFSRMRIRDIITNPVYAKADASIFEFFHGQGTEIINDISQFIGTNGAYLYTGNKAAKRKSISLDGHVLVLAPHAGCIDSDTWIRCRRKCLNVRQIAKPVKAKNTWLAGKIKCIDCGHALSLKSYPRKRSADARYYICNSKYVSASCDGVGAIQASGIEDIVFDEMSRKLKEFNKLSFKEKHGDPIELTKLKIRAEEIEKEIATLIDKIVSASTATMEYINERIDALDEEKKTVKEKIAQMSAEMYDRQNIGVISDYMSKWNDISIDDKLTVVDTLIESIHVGHGKVKIAWKI

SEQ ID NO: 5527 - protein, 504 aa, Unknown
  Description of Unknown: Integrase B5528 sequence
  cd03768,PTHR30461:SF3,SM00857,IPR036162,PF13408, IPR025827,PS51737,G3DSA:3.40.50.1390,IPR006119,PF07508, IPR011109,SSF53041,PTHR30461,PS51736,Coil, PF00239
MEDFIYARQSVDKEDSISIESQIELCLREVGSNPHRVFRDKGYSGKNTERPDFQDMMAAVRAGGARRIIVYRLDRISRSVLDFANVISELQKYGVEFVSITERFDTSTPIGKAMLMIVMVFAQLERETIQQRVMDAYRSRSRKGFYMGGRVPYGFELENTVMEGIKTCMYKPIPEQIQVVQLIFSLYAMPQVSFADVVRYLSQNGIKNPNGKNFSRMRIRDIITNPVYAKADASIFEFFHGQGTEIINDISQFIGTNGAYLYTGNKAAKRKSISLDGHVLVLAPHAGCIDADTWIRCRRKCLNVRQIAKPVKAKNTWLAGKIKCIDCGHALSLKSYPRKRSADARYYICNSKYVSASCDGVGAIQAAGIEDIVFDEMSRKLKEFNKLSYKEKHGDPIELTKLKIRAEEIEKEIATLIDKIVSASTATMEYINERIDALDEEKKTVKEKIAQMSAEMYDRQNIGVISDYMSKWNDISIDDKLTVVDTLIESIHVGHGKVKIAWKI

SEQ ID NO: 5528 - protein, 504 aa, Unknown
  Description of Unknown: Integrase B5529 sequence
  cd03768,PTHR30461:SF3,SM00857,IPR036162,PF13408, IPR025827,G3DSA:3.40.50.1390,PS51737,IPR006119,PF07508, SSF53041,IPR011109,PTHR30461,PS51736,Coil, PF00239
MEDFIYARQSVDKEDSISIESQIELCLREVGNNPHRVFRDKGYSGKNTERPDFQDMMAAVRAGGARRIIVYRLDRISRSVLDFANVISELQKYGVEFVSITERFDTSTPIGKAMLMIVMVFAQLERETIQQRVMDAYRSRSRKGFYMGGRVPYGFELENTVMEGIKTCMYKPIPEQIQVVQLIFSLYAMPQVSFADVVRYLSQNGIKNPNGKNFSRMRIRDIITNPVYAKADASIYEFFHGQGTEIINDISQFIGTNGAYLYTGSKAAKRKSISLDGHVLVLAPHAGCIDADTWIRCRRKCLNVRQIAKPVKAKNTWLAGKIKCIDCGHALSLKSYPRKRSADARYYICNSKYVSASCDGVGAIQASGIEDIVFDEMSRKLKEFNKLSYKEKHGDPIELTKLKIRAEEIEKEIATLIDKIVSASTATMEYINERIDALDEEKKTVKEKIAQMSAEMYDRQNIGVISDYMSKWNDISIDDKLTVVDTLIESIHVGHGKVKIAWKI

SEQ ID NO: 5529 - protein, 504 aa, Unknown
  Description of Unknown: Integrase B5530 sequence
  PTHR30461:SF3,cd00338,SM00857,G3DSA:1.10.10.2600,IPR036162, PS51737,G3DSA:3.40.50.1390,IPR006119,IPR038109,PF07508, IPR011109,SSF53041,PTHR30461,PS51736,Coil, PF00239
MAYAMYLRKSRKDDDTGIEDTLARHEKMLQELADRMGILVCEQDVYREVVSGESIEARPQMQRLLKHVELGEYDGVLCVELERLSRGNGEDQSRILKAFQFSDTKIITLNKTYDLAGEDEFDEEFFEFGLFMSRREYKMIKRRLLRGRMQSQQDGYFIGATPPFGYDKMKNPDGKGWILVPNEQTPIVQMIFERYASGESAASIMHELNRMGIQPSKVYDTAWTSHRVRDIIKNRVYLGEINVKIKRTEKRIEDGKIIESRVRNLNHGTVKGKHEPIVSVETFNKCQELLAMRSTRQAVSKQLSNPLASFLHCSKCGKVMRRTTYTWKGVTTEHLQCSTFKCETRNSSLPMVENMILDALKDELSRQLTVLAEYGGVEADDTDEKALEIVESEIEKKDKMLDRVDELYELGDYSRAKYLDRSQKLQSQKADLLRQKSMLEDKIAQRESKQKKAVPILTKVLDEYHSLDTADKNRLLKMIIERVDYTKTESGSHIEPQLEYTLRI

SEQ ID NO: 5530 - protein, 504 aa, Unknown
  Description of Unknown: Integrase B5531 sequence
  PTHR30461:SF3,SM00857,G3DSA:1.10.10.2600,IPR036162,PF13408, PS51737,G3DSA:3.40.50.1390,IPR025827,IPR006119,IPR038109, PF07508,IPR011109,SSF53041,PTHR30461,Coil, PS51736,cd00338,PF00239
MNAVIYARYSCDRQTEQSIEGQLRECKAFAASEGIHIIGEYIDRAISGTTANRPEFQRMIADSRYKTFQAVIVYKLDRFARNRYDSAMYKSKLKANGVRVLSAKEHITDSPEGIILEGLLEAMNEYYSAELSQKIKRGMRENAIKGKTTGGNVALGYRIGADKQMEIDPAGASLVRRIFTGYDSGMTFTEICDDLNHAGYTTSRGKQFRIDTISRILANQRYTGTFQCAGEDAHCPPIIEPELFRSVQERLTESRHKHRHTQSPHEYVLTGKAICGTCGRRLTGRAGTSKTDKRYYYYCCPNKCCGWLPAAELEHAVLDAIAQYTTPEACEQIANATYALYQQSTHENADLTAAQRRLQETEKKLENAVNAVLNGITSAALQATMQQLEQQKAALETEVRLLQTDAPELKLEHFQYFAHRLLEVQAEDTEKILQLLVNQVIVYKEQITVLVNLTDKTKTPPLEQVTAALRESSCSVACGGGSATKCELTILTPSLLAISNIFKK

SEQ ID NO: 5531 - protein, 504 aa, Unknown
  Description of Unknown: Integrase B5532 sequence
  PTHR30461:SF3,SM00857,G3DSA:1.10.10.2600,IPR036162,PF13408, IPR025827,PS51737,G3DSA:3.40.50.1390,IPR006119,IPR038109, PF07508,IPR011109,SSF53041,PTHR30461,Coil, PS51736,cd00338,PF00239
MNYNDSKGIYLMYLRKSRADEYNQDVENILKRHEEELQSLAKREFGELIPEKYIFREVVSGGTIKDRPLMKEILKMMESGIIAGVLVVDPQRLSRGDLLDQGHIINAFKYTNTLIITPYKTYDLNDTTGTDMKLLKMELNHGADYLDYYKMVQARGKLASVRAGNFIQPIPPFGYRKVRYGKVTTLEPIEDEARIVRIIFQKYAEGKTICGVTNELNAEGYIPPSKQIWTKGSVKRILSNPVYDGKIRWGFTPNKTVMEDGKLKKYRPERHDYLLFDGKHDAIVNHGLFMSVQERLSKNKSFTNDRSLKNPLYGIMYCKRCGRKISRLNVSESRGGHRYACPNKLCDVQSSRYDLVIEAVIDTIQCAIDDFDITFHDCNSSGSDEKIRELRQELTRLNNKEDTLFELLETKVYSTSVFTQRHAELEKKRQEIIGKINTLSLIPPPESCNDKKMRFKDALLALKDESMPPKEKNHLLKKCIERIDYDIEGVRYHSKVKLDVYFKF

SEQ ID NO: 5532 - protein, 504 aa, Unknown
  Description of Unknown: Integrase B5533 sequence
  cd03768,PTHR30461:SF3,SM00857,G3DSA:1.10.10.2600,IPR036162, PF13408,PS51737,IPR025827,G3DSA:3.40.50.1390,IPR006119, IPR038109,PF07508,IPR011109,SSF53041,PTHR30461, PS51736,Coil,PF00239
MEDLIYARQSVDKEDSISIESQIELCLREVGGYPHKVFRDKGYSGKNTERPDFQEMMATVRSGGVRRIIVYRLDRISRSVLDFANVISELQKYGVEFVSITERFDTSTPIGKAMLMIVMVFAQLERETIQQRVVDAYRSRSRKGFFMGGRIPYGFELENIVIDGIKTCMYKPVPEQIRIVRLIYQLYSAPQTSFSDIMKYLSQNKIKNQIGKNFSRMRIRDIVTNPVYAKADAALFEFFRGQGTEIVNDVSQFIGTNGAYLYTGSKAEKRKSICLNGQVLVLAPHEGIIDSDTWIQCRRKCLNVRQIAKPVKAKNTWLAGKIKCIKCGRALSLKTYPRKRSGDARYYICNSKYISASCDGVGAIQADEVEDIVFDEMLRKLGEFNELSYQEKQGDPIELTKLKLRAEEIDKEIASLIDKIISANEATMEYINKRVEILDEEKKELKEKIAQLSAEMYDRKNIGVISGYMNKWEEISIEDKLTVVDTLIESIKVGQGNVQIAWKI

SEQ ID NO: 5533 - protein, 504 aa, Unknown
  Description of Unknown: Integrase B5534 sequence
  cd03768,PTHR30461:SF3,SM00857,IPR036162,PF13408, PS51737,G3DSA:3.40.50.1390,IPR025827,IPR006119,PF07508, SSF53041,IPR011109,PTHR30461,PS51736,Coil, PF00239
MEDFIYARQSVDKEDSISIESQIELCLREVGNNPHRVFRDKGYSGKNTERPDFQDMMAAVRAGGARRIIVYRLDRISRSVLDFANVISELQKYGVEFVSITERFDTSTPIGKAMLMIVMVFAQLERETIQQRVMDAYRSRSRKGFYMGGRVPYGFELENTVMEGIKTCMYKPIPEQIQVVQLIFSLYAMPQVSFADVVRYLSQNGIKNPNGKNFSRMRIRDIITNPVYAKADASIYEFFHGQGTEIINDISQFIGTNGAYLYTGNKAAKRKSISLDGHVLVLAPHAGCIDADTWIRCRRKCLNVRQIAKPVKAKNTWLAGKIKCIDCGHALSLKSYPRKRSADARYYICNSKYVSASCDGVGAIQANGIEDIVFDEMSRKLKEFNKLSYKEKHGDPIELTKLKIRAEEIEKEIATLIDKIVSASTATMEYINERIDALDEEKKTVKEKIAQMSAEMYDRQNIGVISDYMSKWNDISIDDKLTVVDTLIESIHVGHGKVKIAWKI

SEQ ID NO: 5534 - protein, 504 aa, Unknown
  Description of Unknown: Integrase B5535 sequence
  PTHR30461:SF3,SM00857,G3DSA:1.10.10.2600,IPR036162,PF13408, IPR025827,G3DSA:3.40.50.1390,PS51737,IPR006119,IPR038109, PF07508,SSF53041,IPR011109,PTHR30461,Coil, PS51736,cd00338,PF00239
MAKPEVSELAVVYARYSSHSQGEQSIEGQLSNARDYAAAHGYTIVHEYVDRAKSGRTDNRAEFQQMLKDTAKRQFSVIILWKVDRFGRNREEIAINKMKCRKNGVRVEYVAETIPDSPEGVILESVLEGFAEYYSLQLSQNIRRGRAESAEKCQSLGGNRPLGYKTGADKKFVIDENTAPTVKMIFTMYADGKTVTEIVDKLNELGLRTLRGGPFTKNSLHSILKNKKYIGIYEYQGREIKDGVPRIIEDDVFNKVQEMLKINKRAPAKTWSRADYILTDKLFCGKCGALMFGESGTSKTGAKHNYYICSNKKRFRSCDKKAVRQADIEDTVLNATHELLQDDELLDYIVDRTWEYYLAQDNSQEELRNLQRQLAQTDTAISNLIRAIEAGILTEETKKRMDELTQQKADLKASIADREIARGFHLQKSHIAFYLRSLRDADWSDKEAQKRLIQTFVNAVFVYDDHITLTYNFSGDKNTITLRDMQRFEDGEEFGCRASRSTRT

SEQ ID NO: 5535 - protein, 504 aa, Unknown
  Description of Unknown: Integrase B5536 sequence
  PTHR30461:SF3,SM00857,G3DSA:1.10.10.2600,IPR036162,PF13408, PS51737,IPR025827,G3DSA:3.40.50.1390,IPR006119,IPR038109, PF07508,IPR011109,SSF53041,PTHR30461,Coil, PS51736,cd00338,PF00239
MNYNDSKGIYLMYLRKSRADEYNQDVENILKRHEEELQSLAKREFCELIPEKYIFREVVSGGTIKDRPLMKEILKMMESGIIAGVLVVDPQRLSRGDLLDQGHIINAFKYTNTLIITPYKTYDLNDTTGTDMKLLKMELNHGADYLDYYKMVQARGKLASVRAGNFIQPIPPFGYRKVRYGKVTTLEPIEDEARIVRIIFQKYAEGKTICGVTNELNAEGYIPPSKQIWTKGSVKRILSNPVYDGKIRWGFTPNKTVMEDGKLKKYRPERHDYLLFDGKHDAIVNHGLFMSVQERLSKNKSFTNDRSLKNPLYGIMYCKRCGRKISRLNVSESRGGHRYACPNKLCDVQSSRYDLVIEAVIDTIQCAIDDFDITFHNCNSSGSDEKIRELRQELTRLNNKEDTLFELLETKVYSTSVFTQRHAELEKKRQEIIGKINTLSLIPPPESCNDKKMRFKDALLALKDESMPPKEKNHLLKKCIERIDYDIEGVRYHSKVKLDVYFKF

SEQ ID NO: 5536 - protein, 504 aa, Unknown
  Description of Unknown: Integrase B5537 sequence
  PTHR30461:SF3,IPR036162,PS51737,IPR011109,PTHR30461, PS00397,PF00239,G3DSA:1.10.10.2600,IPR006119,SSF53041, SM00857,IPR025827,IPR038109,PS51736,cd03768, IPR006118,PF13408,G3DSA:3.40.50.1390,PF07508,Coil
MYKASNGSGELMENKVIRVGGYIRVSTQEQAKEGYSIPAQTKCLKSYCSARNWILHELYIDPGYSGAKMERPALQKMLSDIKKGFVDLVLVYKLDRLSRSQKDTLYLIEDVFLKNEVAFVSINENFDTSSAFGRAMIGILSVFAQLEREQIKERTQMGLAERAKNGMWHGSGITPIGYDYDPASNQLVVNEYEAMQIREAFDLFVNQNYAFTKIVKTFRNKGYSHKHGVWAHSSKLRYILSNKTYIGRINWNGEDYPGKHDPIIPSSLFEAAQKKLAEKDWKLTDKPAKSPFDATQLLSGVLFCGNCGGRYYGAGCYRGSHDPNSPKRRYEHIYSCYSRTKTKLEMIKDPSCKNKNWKTETLDNYVITRIKNLRLEGEIENLIAKERPKNPGIDQRKALEKQIDDIDRQISRLLTLYQLEDVPTAEIGLRLSDLTRKKKTVEEAIENIPLYEPELSVAKAKSLLADAEEIFNCGTTEEKRSLIHALIRKIILTGNDVVIEWAFI

SEQ ID NO: 5537 - protein, 504 aa, Unknown
  Description of Unknown: Integrase B5538 sequence
  cd03768,PTHR30461:SF3,SM00857,IPR036162,PF13408, IPR025827,G3DSA:3.40.50.1390,PS51737,IPR006119,PF07508, SSF53041,IPR011109,PTHR30461,PS51736,Coil, PF00239
MEDFIYARQSVDKEDSISIESQIELCLREVGNNPHRVFRDKGYSGKNTERPDFQDMMAAVRAGGARRIIVYRLDRISRSVLDFANVISELQKYGVEFVSITERFDTSTPIGKAMLMIVMVFAQLERETIQQRVMDAYRSRSRKGFYMGGRVPYGFELENTVMEGIKTCMYKPIPEQIQVVQLIFSLYAMPQVSFADVVRYLSQNGIKSPNGKNFSRMRIRDIITNPVYAKADASIFEFFHGQGTEIINDISQFIGTNGAYLYTGNKAAKRKSISLDGHVLVLAPHAGCIDADTWIRCRRKCLNVRQIAKPVKAKNTWLAGKIKCIDCGHALSLKSYPRKRSADARYYICNSKYVSASCDGVGAIQAAGIEDIVFDEMSRKLKEFNKLSYKEKHGDPIELTKLKIRAEEIEKEIATLIDKIVSASTATMEYINERIDALDEEKKTVKEKIAQMSAEMYDRQNIGVISDYMSKWNDISIDDKLTVVDTLIESIHVGHGKVKIAWKI

SEQ ID NO: 5538 - protein, 504 aa, Unknown
  Description of Unknown: Integrase B5539 sequence
  cd03768,PTHR30461:SF3,SM00857,IPR036162,PF13408, PS51737,G3DSA:3.40.50.1390,IPR025827,IPR006119,PF07508, SSF53041,IPR011109,PTHR30461,PS51736,Coil, PF00239
MEDFIYARQSVDKEDSISIESQIELCLREVGNNPHRVFRDKGYSGKNTERPDFQDMMAAVRAGGASRIIVYRLDRISRSVLDFANVISELQKYGVEFVSITERFDTSTPIGKAMLMIVMVFAQLERETIQQRVMDAYRSRSRKGFYMGGRVPYGFELENTVMEGIKTCMYKPIPEQIQVVQLIFSLYAMPQVSFADVVRYLSQNGIKNPNGKNFSRMRIRDIITNPVYAKADASIFEFFHGQGTEIINDISQFIGTNGAYLYTGNKAAKRKSISLDGHVLVLAPHAGCIDADTWIRCRRKCLNVRQIAKPVKAKNTWLAGKIKCIDCGHALSLKSYPRKRSADARYYICNSKYVSASCDGVGAIQASGIEDIVFDEMSRKLKEFNKLSYKEKHGDPIELTKLKIRAEEIEKEIATLIDKIVSASTATMEYINERIDALDEEKKTVKEKIAQMSAEMYDRQNIGVISDYMSKWNDISIDDKLTVVDTLIESIHVGHGKVKIAWKI

SEQ ID NO: 5539 - protein, 504 aa, Unknown
  Description of Unknown: Integrase B5540 sequence
  cd03768,PTHR30461:SF3,SM00857,IPR036162,PF13408, IPR025827,G3DSA:3.40.50.1390,PS51737,IPR006119,PF07508, SSF53041,IPR011109,PTHR30461,PS51736,Coil, PF00239
MEDFIYARQSVDKEDSISIESQIELCLREVGNNPHRVFRDKGYSGKNTERPDFQDMMAAVRAGGARRIIVYRLDRISRSVLDFANVISELQKYGVEFVSITERFDTSTPIGKAMLMIVMVFAQLERETIQQRVMDAYRSRSRKGFYMGGRVPYGFELENTVMEGIKTCMYKPIPEQIQVVQLIFSLYAMPQVSFADVVRYLSQNGIKNPNGKNFSRMRIRDIITNPVYAKVDASIFEFFHGQGTEIINDISQFIGTNGAYLYTGNKAAKRKSISLDGHVLVLAPHAGCIDADTWIRCRRKCLNVRQIAKPVKAKNTWLAGKIKCIDCGHALSLKSYPRKRSADARYYICNSKYVSASCDGVGAIQASGIEDIVFDEMSRKLKEFNKLSYKEKHGDPIELTKLKIRAEEIEKEIATLIDKIVSASTATMEYINERIDALDEEKKTVKEKIAQLSAEMYDRQNIGVISDYMSKWNDISIDDKLTVVDTLIESIHVGHGKVKIAWKI

SEQ ID NO: 5540 - protein, 504 aa, Unknown
  Description of Unknown: Integrase B5541 sequence
  cd03768,PTHR30461:SF3,SM00857,IPR036162,PF13408, IPR025827,G3DSA:3.40.50.1390,IPR006119,PF07508,SSF53041, IPR011109,PTHR30461,PS51736,Coil,PF00239
MKRIAIYSRKSKETDTGESIKNQINICKEYFLRQYDQCTFEIFEDEGFSGGNTNRPAFKRMMQLADYKQFDIIAAYKIDRISRNTLDFLTMFEKLKLNDIELISVTEGFDANTPAGRMMMSMISSIAEMERANIAQRVKDNMFELAKLGRWSGGTPPTGYKSVKITDGGKSIVYLEIIEEYIPIIKNIFHMAGKGYTSYQIANEMNMSSKTINNILKNPTYMISDEKGSLFLKSIGYNIFGIENGNGYLAYNRRPRKNGKKLTKSSNMIASVSLHKGIVTSNEWIEAYIKVNSRFTEAKPRVSQLTFLSHLVKCTCGSGMFVSPGRRRKDGTRTLYFRCSNKKNGGNCNSGFLKILDVEESLLNTFYDISLDKSLINNYIKVNDQFKYDTEINILKKTIENNTKSINSLTEKLILIEGAAINIISEKINLLHFENEDLNKQLFDLERKKLLSLNTSNIDSIYDSIIFILSKWDKLNITDKQIYMQKIIDCIVWDGADGLNINLK

SEQ ID NO: 5541 - protein, 504 aa, Unknown
  Description of Unknown: Integrase B5542 sequence
  cd03768,PTHR30461:SF3,SM00857,IPR036162, PF13408,IPR025827,G3DSA:3.40.50.1390,PS51737, IPR006119,PF07508,SSF53041,IPR011109, PTHR30461,PS51736,Coil,PF00239
MEDFIYARQSVDKEDSISIESQIELCLREVGNNPHRVFRDKGYSGKNTERPDFQDMMAAVRAGGARRIIVYRLDRISRSVLDFANVISELQKYGVEFVSITERFDTSTPIGKAMLMIVMVFAQLERETIQQRVMDAYRSRSRKGFYMGGRVPYGFELENTVMEGIKTCMYKPIPEQIQVVQLIFSLYAMPQVSFADVVRYLSQNGIKNPNGKNFSRMRIRDIITNPVYAKADASIFEFFHGQGTEIINDISQFIGTNGAYLYTGNKAAKRKSISLDGHVLVLAPHAGCIDADTWIRCRRKCLNVRQIAKPVKAKNTWLAGKIKCIDCGHALSLKSYPRKRSADARYYICNSKYVSASCDGVGAIQASGIEDIVFDEMSRKLKEFNKLSYKEKHGDPIELTKLKIRAEEIEKEIATLIDKIVSASTATMEYINERIDALDEEKKTVKEKIAQMSAEMYDRQNIGVISDYMSKWNDISIDDKLTVVDTLIESIHVGHGKVKIAWKI

SEQ ID NO: 5542 - protein, 504 aa, Unknown
  Description of Unknown: Integrase B5543 sequence
  cd03768,PTHR30461:SF3,SM00857,IPR036162,PF13408, IPR025827,G3DSA:3.40.50.1390,PS51737,IPR006119,PF07508, SSF53041,IPR011109,PTHR30461,PS51736,Coil, PF00239
MEDFIYARQSVDKEDSISIESQIELCLREVGNNPHRVFRDKGYSGKNTERPDFQDMMAAVRAGGARRIIVYRLDRISRSVLDFANVISELQKYGVEFVSITERFDTSTPIGKAMLMIVMVFAQLERETIQQRVMDAYRSRSRKGFYMGGRVPYGFELENTVMEGIKTCMYKPIPEQIQVVQLIFSLYAMPQVSFADVVRYLSQNGIKNPNGKNFSRMRIRDIITNPVYAKADASIYEFFHGQGTEIINDISQFIGTNGAYLYTGNKAAKRKSISLDGHVLVLAPHAGCIDADTWIRCRRKCLNVRQIAKPVKAKNTWLAGKIKCIDCGHALSLKSYPRKRSADARYYICNSKYVSASCDGVGAIQASGIEDIVFDEMSRKLKEFNKLSYKEKHGDPIELTKLKIRAEEIEKEIATLIDKIASASTATMEYINERIDALDEEKKTVKEKIAQMSAEMYDRQNIGVISDYMSKWNDISIDDKLTVVDTLIESIHVGHGKVKIAWKI

SEQ ID NO: 5543 - protein, 504 aa, Unknown
  Description of Unknown: Integrase B5544 sequence
  SM00857,G3DSA:1.10.10.2600,IPR036162,PS51737,G3DSA:3.40.50.1390, IPR006119,IPR038109,PF07508,IPR011109,SSF53041, PF00239,PTHR30461,PS51736,Coil,cd00338
MTYAIYLRKSRKDDETGYADTLSRHEKMLMDLADRMGIVIHEHDIYREIVSGESIEARPQMQRLLKAVEMRTYTAVLCIELERLSRGNGADQARILKAFQFSNTKIITLNKTYDLASDDEFDEEFFEFGLFMSRREYKTIKRRLLRGRLQSQQEGYFTGSTLPFGYGKMKNPEGKGYILIPNEQTPILQMIFRRYASGDLLADIVQDLNTAGVKTASSLNAEWSTNRVRDMLRNRVYIGEINVNKYAKNRRMEDGRIIETKRRNPDMKTVPGKHEPIIDRETWDKVQARFARFTPRTNIDRSLKNPLASIMRCAECGKMMARRTYTHKGVSIPIIVCQSNRCVTRQSNLEMVENMVIEALKKELERQQTILASYNTEKQDNSDDKTLEFLQAEIAKKDKMMERVDELYELGDYSRSKYLERSQKLQAQKADLMKQLEEVEKRISERDNNRKNAVPILTKVLDEYHTLDVKGKNDLLKMIIETITYRKHESGSDIEPELCFKLLI

SEQ ID NO: 5544 - protein, 504 aa, Unknown
  Description of Unknown: Integrase B5545 sequence
  cd00338,SM00857,G3DSA:1.10.10.2600,IPR036162, PS51737,G3DSA:3.40.50.1390,IPR006119,IPR038109, PF07508,IPR011109,SSF53041,PTHR30461, PS51736,Coil,PF00239
MTYAIYLRKSRKDDETGYADTLSRHEKMLRDLADRMGIMVSEHDIYREIVSGESIEARPQMQRLLKAVEMRTYTGVLCIELERLSRGNGADQARILKAFQFSNTKIITLNKTYDLASDDEFDEEFFEFGLFMSRREYKTIKRRLLRGRLQSQQEGYFTGSTLPFGYGKVKNPEGKGYILVPNEQTPILQMIFKRYAEGDLLADIVQDLNTAGVKTASSLNAEWTTNRVRDMLRNRVYIGEINVNKYAKNRRMEDGRIIETKRRNPDMKTVPGKHEPIIDRETWDKVQARFARFTPRTNIDRSLKNPLASIMRCAECGKMMARRTYTHKGVSIPIIVCQSNRCVTRQSNLEMVENMVIEALKKELERQQTILASYNTEKQDNSDDKTLEFLQAEIAKKDKMMERVDELYELGDYSRSKYLERSQKLQAQKADLMKQLEEVEKRISERDNNRKNAVPILTKVLDEYHTLDVKGKNDLLKMIIETITYRKHESGSDIEPELCFKLLI

SEQ ID NO: 5545 - protein, 504 aa, Unknown
  Description of Unknown: Integrase B5546 sequence
  cd03768,PTHR30461:SF3,SM00857,IPR036162,PF13408, PS51737,IPR025827,G3DSA:3.40.50.1390,IPR006119,PF07508, SSF53041,IPR011109,PTHR30461,PS51736,Coil, PF00239
MEDLIYARQSVDKEDSISIESQIELCLREVGNNPHRVFRDKGYSGKNTERPDFQDMMAAVRAGGVRRIIVYRLDRISRSVLDFANVISELQKYGVEFVSITERFDTSTPIGKAMLMIVMVFAQLERETIQQRVIDAYRSRSRKGFYMGGRVPYGFELENTVMEGIKTCMYKPIPEQIQVVQLIFSLYAMPQVSFADVVRYLSQNGIKNPDGKNFSRMRIRDIITNPVYAKADASIFEFFHGQGTEIINDISQFIGTNGAYLYTGNKAAKRKSISLDGHVLVLAPHAGCIDADTWIRCRRKCLNVRQIAKPVKAKNTWLAGKIKCIDCGHALSLKSYPRKRSADARYYICNSKYVSASCDGVGAIQASGIEDIVFDEMSRKLEEFNKLSYKEKHGDPIELTKLKIRAEEIEKEIATLIDKIVSASTATMEYINERIDALDEEKKTVKEKIAQMSAEMYDRQNIGVISDYMNKWNDISIDDKLTVVDTLIESIHVGHGKVKIAWKI

SEQ ID NO: 5546 - protein, 504 aa, Unknown
  Description of Unknown: Integrase B5547 sequence
  PTHR30461:SF3,SM00857,G3DSA:1.10.10.2600,IPR036162,PF13408, PS51737,G3DSA:3.40.50.1390,IPR025827,IPR006119,IPR038109, PF07508,IPR011109,SSF53041,PF00239,PTHR30461, PS51736,Coil,cd00338
MNYNDSKGIYLMYLRKSRADEYNQDVENILKRHEEELQSLAKREFGELIPEKYIFREVVSGGTIKDRPLMKEILKMMESGIIAGVLVVDPQRLSRGDLLDQGHIINAFKYTNTLIITPYKTYDLNDTTGTDMKLLKMELNHGADYLDYYKMVQARGKLASVRAGNFIQPIPPFGYRKVRYGKVTTLEPIEDEARIVRIIFQKYAEGKTICGVTNELNAEGYIPPSKQIWTKGSVKRILSNPVYDGKIRWGFTPNKTVMEDGKLKKYRPERHDYLLFDGKHDAIVNHGLFMSVQERLSKNKSFTNDRSLKNPLYGIMYCKRCGRKISRLNVAESRGGHRYACPNKLCDVQSSRYDLVIEAVIDTIQCAIDDFDITFHDCNSSGSDEKIRELRQELTRLNNKEDTLFELLETKVYSTSVFTQRHAELEKKRQEIIGKINTLSLIPPPESCNNKKMRFKDALLALKDESMPPKEKNHLLKKCIERIDYDIEGVRYHSKVKLDVYFKF

SEQ ID NO: 5547 - protein, 504 aa, Unknown
  Description of Unknown: Integrase B5548 sequence
  cd03768,PTHR30461:SF3,SM00857,IPR036162,PF13408, IPR025827,G3DSA:3.40.50.1390,PS51737,IPR006119,PF07508, SSF53041,IPR011109,PTHR30461,PS51736,Coil, PF00239
MEDFIYARQSVDKEDSISIESQIELCLREVGNNPHRVFRDKGYSGKNTERPDFQDMMAAVRAGGARRIIVYRLDRISRSVLDFANVISELQKYGVEFVSITERFDTSTPIGKAMLMIVMVFAQLERETIQQRVMDAYRSRSRKGFYMGGRVPYGFELENTVMEGIKTCMYKPIPEQIQVVQLIFSLYAMPQVSFADVVRYLSQNGIKNPNGKNFSRMRIRDIITNPVYAKADASIYEFFHGQGTEIINDISQFIGTNGAYLYTGNKAAKRKSISLDGHVLVLAPHAGCIDADTWIRCRRKCLNVRQIAKPVKAKNTWLAGKIKCIDCGHALSLKSYPRKRSADARYYICNSKYVSASCDGVGAIQASGIEDIVFDEMSRKLKEFNKLSYKEKHGDPIELTKLKIRAEEIEKEIATLIDKIVSASAATMEYINERIDALDEEKKTVKEKIAQMSAEMYDRQNIGVISDYMSKWNDISIDDKLTVVDTLIESIHVGHGKVKIAWKI

SEQ ID NO: 5548 - protein, 504 aa, Unknown
  Description of Unknown: Integrase B5549 sequence
  cd00338,SM00857,G3DSA:1.10.10.2600,IPR036162,PS51737, G3DSA:3.40.50.1390,IPR006119,IPR038109,PF07508,IPR011109, SSF53041,PTHR30461,PS51736,Coil,PF00239
MQKYLMYLRKSRADGEHETIEEILARHEKILQEYAEKNIGKAVPEEDIFREIVSGETIKDRPLMNKLLKCIQNEQITGVLVIEPQRLSRGDLHDCGTIIRAFQYTNTLVYTPTKTYDLSEKYDRKFFEMELMRGNDYLEYVKEILMRGRLASVSDGNYIGSIPPFGYSKEKIDKNYVLVENDESNVVRLIFDLFVNQNMGTSKIANHLNSIGIKPRKNNYWSDSTIRDILRNPVYIGKIRWNWRKTVKTYKDGEIVCSRPKSTPDSWIIIDGKHNGLISEEVFNAAQKRFGQNPRVKKEYEIVNPFAGLVKCECGKSMVYKKFNKSSPRIICPNQPRCENRSVLYSEFESEVIIALKKYINDFKIKISNGDNQSESIQNGILESLIKELKTIENQQDKLYELLEQGIYTNAIFIKRNTALAEKRKKITSEIENLKTSIPNSINYEEKIVQLSNALNTLQNPDIHPKIKNEFLKVIINNIYYTRKNDNRTRNDDSPFTIKIILNL

SEQ ID NO: 5549 - protein, 504 aa, Unknown
  Description of Unknown: Integrase B5550 sequence
  PTHR30461:SF3,SM00857,G3DSA:1.10.10.2600,IPR036162,PF13408, IPR025827,G3DSA:3.40.50.1390,PS51737,IPR006119,IPR038109, PF07508,SSF53041,IPR011109,PTHR30461, Coil,PS51736,cd00338,PF00239
MNAVIYARYSCDRQTEQSIEGQLRECKAFAASEGINVIGEYIDRAISGTTANRPEFQRMIADSKYKTFQAVIVYKLDRFARNRYDSAMYKSKLKANGVRVLSAKEHITDSPEGIILEGLLEAMNEYYSAELSQKIKRGMRENAIKGKTTGGNVALGYRIGADKQMEIDPAGAALVRRIFTSYDSGMTFTEICDDLNHAGYTTSRGKQFRIDTISRILANQRYTGTFQCAGEDAHCPPIIEPELFRSVQERLTESRHKHRHTQSPHEYVLTGKAICGTCGRRLTGRAGTSKTDKRYYYYCCPNKCCGWLPAAELEHAVLDAIAQYTTPEACEQIANATYALYQQSTHENADLTAAQRRLQETEKKLENAVNAVLNGITSAALQATMQQLEQQKAALETEVRLLQTDAPELKLEHFQYFAHRLLEVQAEGTEKILQLLVNQVIVYKEQITVLVNLTDKTKTPPLEQVTAALRESSCSIACGGGNATKCELTILTPSLLAISNIFKK

SEQ ID NO: 5550 - protein, 504 aa, Unknown
  Description of Unknown: Integrase B5551 sequence
  PTHR30461:SF3,IPR036162,PS51737,IPR011109,PTHR30461, PF00239,G3DSA:1.10.10.2600,IPR006119,SSF53041,cd00338, SM00857,IPR025827,IPR038109,PS51736,mobidb-lite, PF13408,G3DSA:3.40.50.1390,PF07508,Coil
MRAFIYCRFSSHKQQELSIEGQRDICQEYADKHNITVIGQYADRARSGKTENRADFRRLMRDAATGVVDCVLVWRYDRFFRNRAESALYRKQLEAAGVHLISVTEYIPEGSAGIITQGMIETVAEYFSAKLSEDVSRGMNKAAQHCQIVGRAPLGYRAGPNKRWQIDPVGAELVRRIFEWYASGKAMGQLAAQLNEEGHRTTNGTLYTRSSFNSILRNEKYIGVYSYGGEVRIEGGCPRIIEDELFFTVQRRLSANRHRPGAYKAEVPYLLSGKLFCGLCGAPMTGTAGTSHTGARHYYYICNNRRAKTCKKKNVRLDLIEEAVLQSALDILTDENIAYISTEVERRCAENSDSAALLASLNAQLEEVQRRLKNIGNAIAQGIITETTKELLEEAETDRTALRQQIDRAKVQAALVVKAEAVACWLDGFRRGDRTDPDFRRQVFGALVHSVFVYDDYLKIIFNVDSAGAAVVPYEAAQAATPSEAPPGSYLDTLGAPKNSLTET

SEQ ID NO: 5551 - protein, 504 aa, Unknown
  Description of Unknown: Integrase B5552 sequence
  PTHR30461:SF3,SM00857,G3DSA:1.10.10.2600,IPR036162,PF13408, PS51737,G3DSA:3.40.50.1390,IPR025827,IPR006119,IPR038109, PF07508,IPR011109,SSF53041,PF00239,PTHR30461, PS51736,Coil,cd00338
MNYNDSKGIYLMYLRKSRADEYNQDVENILKRHEEELQSLAKREFGELIPEKYIFREVVSGGTIKDRPLMKEILKMMESGIIAGVLVVDPQRLSRGDLLDQGHIINAFKYTNTLIITPYKTYDLNDTTGTDMKLLKMELNHGADYLDYYKMVQARGKLASVRAGNFIQPIPPFGYRKVRYGKVTTLEPIEDEARIVRIIFQKYAEGKTICGVTNELNAEGYIPPSKQIWTKGSVKRILSNPVYDGKIRWGFTPNKTVMEDGKLKKYRPERHDYLLFDGKHDAIVNHGLFMSVQERLSKNKSFTNDRSLKNPLYGIMYCKRCGRKISRLNVAESRGGHRYACPNKLCDVQSSRYDLVIEAVIDTIQCAIDDFDITFHDCNSSGSDEKIRELRQELTRLNNKEDTLFELLETKVYSTSVFTQRHAELEKKRQEIIGKINALSLIPPPESCNNKKMRFKDALLALKDESMPPKEKNHLLKKCIKRIDYDIEGVRYHSKVKLDVYFKF

SEQ ID NO: 5552 - protein, 504 aa, Unknown
  Description of Unknown: Integrase B5553 sequence
  cd03768,PTHR30461:SF3,SM00857,IPR036162,PF13408, IPR025827,PS51737,G3DSA:3.40.50.1390,IPR006119,PF07508, SSF53041,IPR011109,PTHR30461,PS51736,Coil, PF00239
MEDFIYARQSVDKEDSISIESQIELCLREVGNNPHRVFRDKGYSGKNTERPDFQDMMAAVRAGGARRIIVYRLDRISRSVLDFANVISELQKYGVEFLSITERFDTSTPIGKAMLMIVMVFAQLERETIQQRVMDAYRSRSRKGFYMGGRVPYGFELENTVMEGIKTCMYKPIPEQIQVVQLIFSLYAMPQVSFADVVRYLSQNGIKNPNGKNFSRMRIRDIITNPVYAKADASIYEFFHGQGTEIINDISQFIGTNGAYLYTGNKAAKRKSISLDGHVLVLAPHAGCIDADTWIRCRRKCLNVRQIAKPVKAKNTWLAGKIKCIDCGHALSLKSYPRKRSADARYYICNSKYVSASCDGVGAIQASGIEDIVFDEMSRKLKEFNKLSYKEKHGDPIELTKLKIRAEEIEKEIATLIDKIVSASTATMEYINERIDALDEEKKTVKEKIAQMSAEMYDRQNIGVISDYMSKWNDISIDDKLTVVDTLIESIHVGHGKVKIAWKI

SEQ ID NO: 5553 - protein, 504 aa, Unknown
  Description of Unknown: Integrase B5554 sequence
  PTHR30461:SF3,cd00338,SM00857,G3DSA:1.10.10.2600,IPR036162, PS51737,G3DSA:3.40.50.1390,IPR006119,IPR038109,PF07508, IPR011109,SSF53041,PTHR30461,PS51736,Coil, PF00239
MAYAMYLRKSRKDDDTGIEDTLARHEKMLQDLADRMGILVCEQDVYREVVSGESIEARPQMQRLLKHVELGEYDGVLCVELERLSRGNGEDQSRILKAFQFSDTKIITLNKTYDLAGEDEFDEEFFEFGLFMSRREYKMIKRRLLRGRMQSQQDGYFIGATPPFGYDKMKNPDGKGWILIPNEQTPIVQMIFERYASGESAASIMHELNRMGIQPSKVYDTAWTSHRVRDIIKNRVYLGEINVKIKRTEKRIEDGKIIESRVRNLNHGTVKGKHEPIVSVETFNKCQELLAMRSTRQAVSKQLSNPLASFLHCSKCGKVMRRTTYTWKGVTTEHLQCSTFKCETRNSSLPMVENMILDALKDELSRQLTVLAEYGGVEADDTDEKALEIVESEIEKKDKMLDRVDELYELGDYSRAKYLDRSQKLQSQKADLLRQKSMLEDKIAQRESKQKKAVPILTKVLDEYHSLDTAYKNRLLKMIIERVDYTKTESGSQIEPQLEYTLRI

SEQ ID NO: 5554 - protein, 504 aa, Unknown
  Description of Unknown: Integrase B5555 sequence
  cd03768,PTHR30461:SF3,SM00857,IPR036162,PF13408, PS51737,G3DSA:3.40.50.1390,IPR025827,IPR006119,PF07508, SSF53041,IPR011109,PTHR30461,PS51736,Coil, PF00239
MEDLIYARQSVDKEDSISIESQIELCLREVGNNPHRVFRDKGYSGKNTERPDFQDMMAAVRAGGVRRIIVYRLDRISRSVLDFANVISELQKYGVEFVSITERFDTSTPIGKAMLMIVMVFAQLERETIQQRVIDAYRSRSRKGFYMGGRVPYGFELENTVMEGIKTCMYKPIPEQIQVVQLIFSLYAMPQVSFADVVRYLSQNGIKNPNGKNFSRMRIRDIITNPVYAKADASIFEFFHGQGTEIINDISQFIGTNGAYLYTGNKAAKRKSISLDGHVLVLAPHAGCIDADTWIRCRRKCLNVRQIAKPVKAKNTWLAGKIKCIDCGHALSLKSYPRKRSADARYYICNSKYVSASCDGVGAIQAAGIEDIVFDEMSRKLKEFNKLSYKEKHGDPIELTKLKIRAEEIEKEIATLIDKIVSASTATMEYINERIDALDEEKKTVKEKIAQMSAEMYDRQNIGVISDYMSKWNDISIDDKLTVVDTLIESIHVGHGKVKIAWKI

SEQ ID NO: 5555 - protein, 504 aa, Unknown
  Description of Unknown: Integrase B5556 sequence
  PTHR30461:SF3,SM00857,IPR036162,PF13408,IPR025827, G3DSA:3.40.50.1390,IPR006119,PF07508,SSF53041,IPR011109, PTHR30461,G3DSA:1.10.10.60,Coil,PS51736,cd00338, PF00239
MKRIAIYSRKSKETDTGESIKNQINICKEYFLRQYDKCNFEIFEDEGFSGGNTNRPAFKRMMQLADHNQFDIIAAYKIDRISRNTLDFLTMFEKLKLNDIELVSVTEGFDANTPAGRMMMSMISSIAEMERANIAQRVKDNMFELAKLGRWSGGTPPTGYRSVKVIEGGKSAVYLEVIEEYVPIIKKIFYMASKGYTTYQIANEVNMSAKTVNNILKNPTYMRSDKQGSLFLKSIGYNIFGDENGNGYLTYNRRPRKNDKKLTHSTSMIASISLHRGIVTSNEWIESYTKINSRFTEAKPRVSQLTFLSHLVKCKCGSGMFVAPGHKRKDGTRTLYFRCSNKKNGGKCDSGFLKILDVEDILLNTFYDISLDKSLINNYLKSQDPLEYDAEINILKKNIDNNNKSINSLTEKLILIEGAAINIISEKINALHFENEKLNKKLFDLERQKLLSRNNSNIDLIYDSIIFILSNWDNLDITDKQLYIRKIIDSITWDGTDGIDINLK

SEQ ID NO: 5556 - protein, 504 aa, Unknown
  Description of Unknown: Integrase B5557 sequence
  PTHR30461:SF3,SM00857,G3DSA:1.10.10.2600,IPR036162,PF13408, PS51737,G3DSA:3.40.50.1390,IPR025827,IPR006119,IPR038109, PF07508,SSF53041,IPR011109,PTHR30461,Coil, PS51736,cd00338,PF00239
MNVVIYARFSSSGQREESIEGQVKVCTEYAENNDYTVIGTYVDRALTGRNDKRPDLQRLLSDSNNNNFQAVIVYSIDRFGRNLQQCLTNENKLKQNGVALFSATEHFTNDPAGIFYRNLMMAHSQYYCDELSQKIRRGMDINAEKCLSTGGNIALGFKVDDKKNFQIDPDTAPIVQYIFESYASGKTVTEIINQLNSQGLKTSRGVPFNKNSLHSMLKNKRYIGIYTYKGTEKIGGMPRIISDELFNKVAEIMDKNRKAPARARAKVEYLLTTKIFCGYCKEMMTGFSGTGKSGKVYRYYVCNGTKKKACKKKKVNKEYIEDLVVNECRKLLTNENIKKIANSISKISESEKDTAHLKFLKKALSENERKHKNALNAIIECDLESVRKSLYEQIPILEKEHSELQKQIALEEKNFPVLTVPMVHFFLRKLKDGNVDDIKYRKTLINVFINKIYLYDDKLTIIFNSGDNPVTINDLLLSEIEDNSKKAEGLFLDGVASPTKYAYF

SEQ ID NO: 5557 - protein, 504 aa, Unknown
  Description of Unknown: Integrase B5558 sequence
  cd03768,PTHR30461:SF3,SM00857,IPR036162,PF13408, IPR025827,G3DSA:3.40.50.1390,PS51737,IPR006119,PF07508, SSF53041,IPR011109,PTHR30461,PS51736,Coil, PF00239
MEDFIYARQSVDKEDSISIESQIELCLREVGNNPHRVFRDKGYSGKNTERPDFQDMMAAVRAGGARRIIVYRLDRISRSVLDFANVISELQKYGVEFVSITERFDTSTPIGKAMLMIVMVFAQLERETIQQRVMDAYRSRSRKGFYMGGRVPYGFELENTVMEGIKTCMYKPIPEQIQVVQLIFSLYAMPQVSFADVVRYLSQNGIKNPNGKNFSRMRIRDIITNPVYAKADASIFEFFHGQGTEIINDISQFIGTNGAYLYTGNKAAKRKSISLDGHVLVLAPHAGCIDADTWIRCRRKCLNVRQIAKPVKAKNTWLAGKIKCIDCGHALSLKSYPRKRSADARYYICNSKYVSASCDGVGAIQASGIEDIVFDEMSRKLKEFNKLSYKEKHGDPIELTKLKIRAEEIEKEIATLIDKIVSASTATMEYINERIDALDEEKKTVKEKIAQLSAEMYDRQNIGVISDYMSKWNDISIDDKLTVVDTLIESIHVGHGKVKIAWKI

SEQ ID NO: 5558 - protein, 504 aa, Unknown
  Description of Unknown: Integrase B5559 sequence
  PTHR30461:SF3,cd00338,SM00857,G3DSA:1.10.10.2600,IPR036162, PF13408,IPR025827,G3DSA:3.40.50.1390,PS51737,IPR006119, IPR038109,PF07508,SSF53041,IPR011109,PTHR30461, PS51736,Coil,PF00239
MKVCMYLRKSRQDEELEKKENTDTLSRHRSALLALARKQHLDIIEVHEEIVSGGSIVSRPKMMKLLEEVRNNMYDAVLCMDLDRLGRGGMQDQGLILDTFKETNTLIITPDKTYDLNNELDEEMTEFKAFFARRELKIITKRMQRGRIKSVEEGKFIASTAPYGYKFEYDKEGKKSLVIDEEKAAIVRNIFDMYINGNGAYKIKVWLDNIGIKTNTGIPFSQQAIGRILRNNIYCGYVTWNNYRRKGTITKKQPKENIIIAKGIHEPIISEEIWNKADEIRQNNQIAPSGNNKNLTNPLAGLVKCACCGHTMTNKLSNYKGEGYVKFMCCKSCNENRGVKMYVLEETILEYLEDILQEFENQILSNKVENKENDRIENLRCTLSLLKKKAVELNKQKNNLHDLLEKGVYDVDTYLERTQVLSKKTDENKNAIDSTLELIESEKNININYNELAISIKLVLENYKKTDDIKLKNFLLKSVIDEIIYFKEKNKRNAKFELDIKLKI

SEQ ID NO: 5559 - protein, 504 aa, Unknown
  Description of Unknown: Integrase B5560 sequence
  PTHR30461:SF3,SM00857,G3DSA:1.10.10.2600,IPR036162,PS51737, G3DSA:3.40.50.1390,IPR006119,IPR038109,PF07508,IPR011109, SSF53041,PTHR30461,PS51736,cd00338,PF00239
MAYAMYLRKSRKDDDTGIEDTLARHEKMLQDLADRMGILVCEQDVYREVVSGESIEARPQMQRLLKHVELGEYDGVLCVELERLSRGNGEDQSRTLKAFQFSDTKIITLNKTYDLAGEDEFDEEFFEFGLFMSRREYKMIKRRLLRGRMQSQQDGYFIGATPPFGYDKMKNPDGKGWILVPNEQTPIVQMIFERYASGESAASIMHELNRMGIQPSKVYDTAWTSHRVQDIIKNRVYLGEINVKIKRTEKRIEDGKIIESRVRNLNHGTVKGKHEPIVSVETFNKCQELLAMRSTRQAVSKQLSNPLASFLHCSKCGKVMRRTTYTWKGVTTERLQCSTFKCETRNSSLPMVENMILDALKDELSRQLTVLAEYGGVEADDTDEKALEIVESEIEKKDKMLDRVDELYELGDYSRAKYLDRSQKLQSQKAYLLRQKSMLEDKIAQRESKQKKAVPILTKVLDEYHSLDTADKNRLLKMIIERVDYTKTESGSHIEPQLEYTLRI

SEQ ID NO: 5560 - protein, 504 aa, Unknown
  Description of Unknown: Integrase B5561 sequence
  cd03768,PTHR30461:SF3,SM00857,IPR036162, PF13408,IPR025827,G3DSA:3.40.50.1390,IPR006119, PF07508,IPR011109,SSF53041,PTHR30461, PS51736,Coil,PF00239
MKKIAIYSRKSKETDTGESIKNQINICKEYFLRQYDQCTFEIFEDEGFSGGNTNRPAFKRMMQLAEHKQFDIIAAYKIDRISRNTLDFLTMFEKLKLNDIELVSVTEGFDANTPAGRMMMSMISSIAEMERANIAQRVKDNMFELAKLGRWSGGTPPTGYRSVKVIEGGKSAVYLEVIEEYVPLIKNVFYMASKGYTTYQIANEVNISSKTISNILKNPTYMISDEQGSLFLKSIGYNIFGVENGNGYLTYNRRPRKNGKKLTNSTSMIASISLHKGIVTSNEWIEAYTKINSRFTEAKPRVSQLTFLSHLVKCKCGSGMYVAPGHKRKDGRRTLYFRCSNKKNGGKCDCGFLKILDVENTLLNTFYDISLDKSLINNYIKSQDPLEYDTEINILKKTIDNNNKSINSLTEKLILIEGPAINIISEKINKLHFENENLNKNLFDLERKKLLSRNTSNIDLIYNSITFLLSKWDDLNITDKQLYIKKIIGSITWDGADGIDINLK

SEQ ID NO: 5561 - protein, 504 aa, Unknown
  Description of Unknown: Integrase B5562 sequence
  PTHR30461:SF3,SM00857,IPR036162,PF13408,IPR025827, G3DSA:3.40.50.1390,IPR006119,PF07508,SSF53041,IPR011109, PF00239,PTHR30461,PS51736,Coil,cd00338
MKKIAIYSRKSKETDTGESIKNQINICKEYFLRQYDQCTFEIFEDEGFSGGNTNRPAFKRMIQLAEHKQFDIIAAYKIDRISRNTLDFLTMFEKLKLNDIELVSVTEGFDANTPAGRMMMSMISSIAEMERANIAQRVKDNMFELAKLGRWSGGTPPTGYRSVKVIEGGKSAVYLEVIEEYVPLIKNIFYMASKGYTTYQIANEVNISSKTISNILKNPTYMISDEQGSLFLKSIGYNIFGVENGNGYLTYNRRPRKNGKKLTNSTSMIASISLHKGIVTSNEWIEAYTKINSRFTEAKPRVSQLTFLSHLVKCKCGSGMYVAPGHKRKDGRRTLYFRCSNKKNGGKCDCGFLKILDVENTLLNTFYDISLDKSLINNYIKSQAPLEYDTEINILKKTIDNNNKSINSLTEKLILIEGPAINIISEKINKLHFENENLNKNLFDLERKKLLSRNTSNIDLIYNSITFLLSKWDDLNITDKQLYIKKIIGSITWDGADGIDINLK

SEQ ID NO: 5562 - protein, 504 aa, Unknown
  Description of Unknown: Integrase B5563 sequence
  cd03768,PTHR30461:SF3,SM00857,IPR036162, PF13408,IPR025827,G3DSA:3.40.50.1390,PS51737, IPR006119,PF07508,SSF53041,IPR011109, PTHR30461,PS51736,Coil,PF00239
MEDFIYARQSVDKEDSISIESQIELCLREVGNNPYRVFRDKGYSGKNTERPDFQDMMAAVRAGGARRIIVYRLDRISRSVLDFANVISELQKYGVEFVSITERFDTSTPIGKAMLMIVMVFAQLERETIQQRVMDAYRSRSRKGFYMGGRVPYGFELENTVMEGIKTCMYKPIPEQIQVVQLIFSLYAMPQVSFADVVRYLSQNGIKNPNGKNFSRMRIRDIITNPVYAKADASIFEFFHGQGTEIINDISQFIGTNGAYLYTGNKAAKRKSISLDGHVLVLAPHAGCIDADTWIRCRRKCLNVRQIAKPVKAKNTWLAGKIKCIDCGHALSLKSYPRKRSADARYYICNSKYVSASCDGVGAIQASGIEDIVFDEMSRKLKEFNKLSFKEKHGDPIELTKLKIRAEEIEKEIATLIDKIVSASTATMEYINERIDALDEEKKTVKEKIAQMSAEMYDRQNIGVISDYMSKWNDISIDDKLTVVDTLIESIHVGHGKVKIAWKI

SEQ ID NO: 5563 - protein, 504 aa, Unknown
  Description of Unknown: Integrase B5564 sequence
  PTHR30461:SF3,SM00857,G3DSA:1.10.10.2600,IPR036162,PF13408, IPR025827,G3DSA:3.40.50.1390,PS51737,IPR006119,IPR038109, PF07508,IPR011109,SSF53041,PF00239,PTHR30461, PS51736,Coil,cd00338
MQRAVIYARYSPGPNQTEQSIEGQVRECTKYAEQHDLRIVGTYVDRKISGKTDNRREFQRMIDDSEKHIFDVIILYHTDRFARNRYDSAIYKHKLKENGVELRYATTDIPKGPEGIILESIMEGWAEYYSAELSRKIKRGMRESALKCHSTGAGRCLGYRTAEDKSLVIEPEDAKAVQTVFDMYIKGKSHADICRYLNDCGFRTAQGKLFNKNSVTHIIRNKRYIGVYTYDDITIEDGIPAIISKDTFHLAQLEAVRRKTVKRPKEPKAEYLLSGKAFCGHCQKPLVGVSGTGKSGNKWYYYYCQESRAKRGCTKRPVKRDWLEREVVKRTIAEVLQPEVIQHIAKKCYDLQMEYRQDNSDVLFYELKLKDVRKAIKNTMHAIESGVKTKTLPARLQELENEEEALEAELAIAKASDFVITADQIEFLLTQFAEPWECESEEEYHRRIIKCFVHKVFLFDDKLLIYYNVSRDGKTREQSEAELLEEALGEGFDKRSSGSTISPP

SEQ ID NO: 5564 - protein, 504 aa, Unknown
  Description of Unknown: Integrase B5565 sequence
  cd03768,PTHR30461:SF3,SM00857,IPR036162,PF13408, IPR025827,G3DSA:3.40.50.1390,PS51737,IPR006119,PF07508, SSF53041,IPR011109,PTHR30461,PS51736,Coil, PF00239
MEDFIYARQSVDKEDSISIESQIELCLREVGNNPHRVFRDKGYSGKNTERPDFQDMMAAVRAGGARRIIVYRLDRISRSVLDFANVISELQKYGVEFVSITERFDTSTPIGKAMLMIVMVFAQLERETIQQRVMDAYRSRSRKGFYMGGRVPYGFELENTVMEGIKTCMYKPIPEQIQVVQLIFSLYAMPQVSFADVVRYLSQNGIKNPNGKNFSRMRIRDIITNPVYAKADASIYEFFHGQGTEIINDISQFIGTNGAYLYTGNKAAKRKSISLDGHVLVLAPHAGCIDADTWIRCRRKCLNVRQIAKPVKAKNTWLAGKIKCIDCGHALSLKSYPRKRSADARYYICNSKYVSASCDGVGAIQASGIEDIVFDEMSRKLKEFNKLSYKEKHGEPIELTKLKIRAEEIEKEIATLIDKIVSASTATMEYINERIDALDEEKKTVKEKIAQMSAEMYDRQNIGVISDYMSKWNDISIDDKLTVVDTLIASIHVGHGKVKIAWKI

SEQ ID NO: 5565 - protein, 504 aa, Unknown
  Description of Unknown: Integrase B5566 sequence
  cd03768,PTHR30461:SF3,SM00857,IPR036162,PF13408, PS51737,G3DSA:3.40.50.1390,IPR025827,IPR006119,PF07508, SSF53041,IPR011109,PTHR30461,PS51736,Coil, PF00239
MEDFIYARQSVDKEDSISIESQIELCLREVGNNPHRVFRDKGYSGKNTERPDFQDMMAAVRAGGARRIIVYRLDRISRSVLDFANVISELQKYGVEFVSITERFDTSTPIGKAMLMIVMVFAQLERETIQQRVMDAYRSRSRKGFYMGGRVPYGFELENTVMEGIKTCMYKPIPEQIQVVQLIFSLYAMPQVSFADVVRYLSQNGIKNPNGKNFSRMRIRDIITNPVYAKADASIFEFFHGQGTEIINDISQFIGTNGAYLYTGNKAAKRKSISLDGHVLVLAPHAGCIDADTWIRCRRKCLNVRQIAKPVKAKNTWLAGKIKCIDCGHALSLKSYPRKRSADARYYICNSKYVSASCDGVGAIQASGIEDIVFDEMSRKLKEFNKLSYKEKHRDPIELTKLKIRAEEIEKEIATLIDKIVSASTATMEYINERIDALDEEKKTVKEKIAQMSAEMYDRQNIGVISDYMSKWNDISIDDKLTVVDTLIESIHVGHGKVKIAWKI

SEQ ID NO: 5566 - protein, 504 aa, Unknown
  Description of Unknown: Integrase B5567 sequence
  cd03768,PTHR30461:SF3,SM00857,IPR036162,PF13408, PS51737,G3DSA:3.40.50.1390,IPR025827,IPR006119,PF07508, SSF53041,IPR011109,PTHR30461,PS51736,Coil, PF00239
MEDFIYARQSVDKEDSISIESQIELCLREVGNNPHRVFRDKGYSGKNTERPDFQDMMAAVRAGGARRIIVYRLDRISRSVLDFANVISELQKYGVEFVSITERFDTSTPIGKAMLMIVMVFAQLERETIQQRVMDAYRSRSRKGFYMGGRVPYGFELENTVMEGIKTCMYKPIPEQIQVVQLIFSLYAMPQVSFADVVRYLSQNGIKNPNGKNFSRMRIRDIITNPVYAKADASIYEFFHGQGTEIINDISQFIGTNGAYLYTGSKATKRKSISLDGHVLVLAPHAGCIDADTWIRCRRKCLNVRQIAKPVKAKNTWLAGKIKCIDCGHALSLKSYPRKRSADARYYICNSKYVSASCDGVGAIQASGIEDIVFDEMSRKLKEFNKLSYKEKHGDPIELTKLKIRAEEIEKEIATLIDKIVSASTATMEYINERIDALDEEKKTVKEKIAQMSAEMYDRQNIGVISDYMSKWNDISIDDKLTVVDTLIESIHVGHGKVKIAWKI

SEQ ID NO: 5567 - protein, 504 aa, Unknown
  Description of Unknown: Integrase B5568 sequence
  PTHR30461:SF3,cd00338,SM00857,G3DSA:1.10.10.2600,IPR036162, PF13408,PS51737,G3DSA:3.40.50.1390,IPR025827,IPR006119, IPR038109,PF07508,SSF53041,IPR011109,PTHR30461, PS51736,Coil,PF00239
MRAKKKPAVIYTRYSSHNQRDCSIEQQVADCEIFARQNNLRVVKVYADRHLSGTTDNRPQFQQMLKDAAHGHWAYVICWKIDRFARNRYDSATYKFRLKKAGVRVLYAKESIPDGPEGILLESVLEGSAEYYSAALAQNIRRGMKYNAEQCKVNSGSIPFGYCKGPDGRFAIHEANAEVVREIFRKAAAGMPFVDIANDLNSRGLKTSRGGRWNKGSFRLLMNEAYIGVYHFSDTRIEGGMPALIDQGTFWAANERLKANSSVRGRHQDGGDYLLTGKLKCAHCGSYMIGFSGTGKSGELHYYYGCQKRRRERACKKANVPREWIERVVVKAALDYVLRPDVMEWIADAVMEYQEREAASAQLAALTAELEENQKATDNVMKAIEAGIITSTTKQRLLDLEAKAQDLKRAIELEKLSHVRLERDQVLFWLDRFRGGSLQSQEFRRKVIDAFVSVVYLSDDHLRIAFNYSGGSNAEADFDLVMDAEAAAGELSKKFAQGHVASTK

SEQ ID NO: 5568 - protein, 504 aa, Unknown
  Description of Unknown: Integrase B5569 sequence
  PTHR30461:SF3,cd00338,SM00857,G3DSA:1.10.10.2600,IPR036162, PS51737,G3DSA:3.40.50.1390,IPR006119,IPR038109,PF07508, IPR011109,SSF53041,PTHR30461,PS51736,Coil, PF00239
MGGRAAIYARFSSHNQRGESIEIQVEKSRAYCAENDLRVVATYCDFAQTGTNTDRAEFQRMMADAKRGLFDFVVIYKVTRIMRNRDEMAMARIMLRRCRVEILYAGEDISDGSAGVLQLGMLEVLAEYESALDGERIRDGIQKNAERCMANGCVRYGWDIVGGRYVVNEEEAAAIRLGVRMVLSGKSVADVVRAWEPYRTKRGGKWRFQTVRRILMRRENGGEYRYAGVVVPGGMPAIVPMDDEERVIRMLEDSHRPRAKTEAWDFPLTGKLYDGRDGGLMTGTSGTGKSGRPYHYYRCRSCGRTVRRDAVEKRVADAVREALGSADSRERIARMLADAEEERADEKPLSETIKGELAKIETAFSNIWAAIESGIAPPGGKERIDALKQRQALLKDELRTAEALEAARLDYDRALFWLEGMAAAEVDDAQLLRTFVARVVLGGPDDDDGLRVAFTFADSAGLGDNPSLPGAIGPGGEVFDRMNASSTNSYKQVEKCLYLLFYYI

SEQ ID NO: 5569 - protein, 504 aa, Unknown
  Description of Unknown: Integrase B5570 sequence
  PTHR30461:SF3,cd00338,SM00857,G3DSA:1.10.10.2600,IPR036162, PF13408,PS51737,G3DSA:3.40.50.1390,IPR025827,IPR006119, IPR038109,PF07508,SSF53041,IPR011109,PTHR30461, PS51736,Coil,PF00239
MSTIAVIYARYSSSNQREESLEGQLRECNAYAKQNDFVVVGEYCDRALSGRTDKRPEFQRLLRDSAKGKFEAVIMYSLDRFSRNRYDSAIYKAKLKRNGVKIYYVTQPIPEGPEGIIFESIMEGYAEYYSVNLARNIKRGLKENALHAQVIGRPCLGYKAGENKQYEIEPIGAKTVHEIFDLYASGLPVSKIIKRLNAKGYTTVNGTAFTNNSLYNILRNRKYTGTYIYDDVVIEDAIPPIVTKEVFDKVQEMLHHNSKCRARAKAKEEYLLTTKLFCGKCGSPMIGDSGTSHTGATHRYYKCNHRKRQRVCDMGAVRKDPIEELVVKTTVERVLTPENIDRIAQSAVEIAAKEAAESEVLAALKQKHKEVSKRIANLMEAIEQGIITSTTKERLEVLEQEQRDLDLQIIKEEMERPTLTVERVKYWLESFRFGNIDSLDYKRKIIDTLVNSVFVYENDGGGKRIVITYNISGSKADVLLSSDIEAIAPVFYGIRVSDSIFCCR

SEQ ID NO: 5570 - protein, 504 aa, Unknown
  Description of Unknown: Integrase B5571 sequence
  SM00857,G3DSA:1.10.10.2600,IPR036162,PS51737,G3DSA:3.40.50.1390, IPR006119,IPR038109,PF07508,IPR011109,SSF53041, PTHR30461,Coil,PS51736,cd00338,PF00239
MTYAIYLRKSRKDDDAGFADTLSRHEKMLTDYADRMGLTVHEQDIYREIVSGESIEARPQMQRLLKAVEMRTYTAVLCIELERLSRGNGADQARILKAFQFSNTKIITLNKTYDLASDDEFDEEFFEFGLFMSRREYKTIKRRLLRGRMQSQQEGYFIGSTLPFGYGKIKNPEGKGHILVPNEQTPILQMIFRRYAAGDLLADIVEDLNAAGVQTASSLNAKWTTNRVRDMLRNRVYIGEINVKKYAKNQRIEDGRIIETKRRNPDMQTVPGKHEPIIDMETWEKVQARFARFEPRTNVDRSLKNPLASIMRCAECGKMMARRTYTHKGVPIPIIVCQSNRCITRQSNLEMVESMVISELKKELARQQTILASYNTEKQDSADEETLSFLQAEISKKDKMLERVDELYELGDYSRTKYLERSQKLQAQKAELMKQLEEVEKRISERDSNRKNAVPILTKVLDEYHTLDVKGKNDLLKMIVDCITYRKHESGSDIEPELDFRLLI

SEQ ID NO: 5571 - protein, 504 aa, Unknown
  Description of Unknown: Integrase B5572 sequence
  SM00857,G3DSA:1.10.10.2600,IPR036162,PF13408, IPR025827,G3DSA:3.40.50.1390,PS51737,IPR006119, IPR038109,PF07508,SSF53041,IPR011109, PTHR30461,Coil,PS51736,cd00338,PF00239
MVKNRAAIYARFSSHNQRSESIEIQVENSRAYCEREGLQVVREYCDYAQTGRNVNRAEFQRMMNDAKLGLFDFVVIYKVTRIMRNRDEMALARIMLRKAGVEILYAGEEIASGSSGVLQLGMLEVLAEWESAIDSERIRDGIQKNAARCLANGHSLYGWDIVDGRYSVNEREAALMRKMKNMLFSGHSVADIVRALEGEKTRNGKPFNQDKVTKLLRRVQNGGTYSYAGHVVEGGMPGLWPQVEQDMIESVLNDRHRPRRKVDSSKEFPLSGKLYCTKCGMPMAGMSGTSKTGKAYHYYRCRKCRRTVRRDLIEDAVVDMTLQAVARDDVRQRIAQGMALYQSEQEETKPKSYYLKKELRRIDAAFERIWQAIEDGIAPPGGKERTDELKCRKAEIEAQLRIAERDESMSFGVDELMLWLDEIATELTPLDILNKFVRFAEIDGKSNRIRVYFAFDKHGDGFSPNSADKGEHLYEERCSPNSTLVELPSTTCLLPERSIHMWIW

SEQ ID NO: 5572 - protein, 504 aa, Unknown
  Description of Unknown: Integrase B5573 sequence
  cd03768,PTHR30461:SF3,SM00857,IPR036162,PF13408, IPR025827,G3DSA:3.40.50.1390,PS51737,IPR006119,PF07508, SSF53041,IPR011109,PTHR30461,PS51736,Coil, PF00239
MEDFIYARQSVDKEDSISIESQIELCLREVGNNPHRVFRDKGYSGKNTERPDFQDMMAAVRAGGARRIIVYRLDRISRSVLDFANVISELQKYGVEFVSITERFDTSTPIGKAMLMIVMVFAQLERETIQQRVMDAYRSRSRKGFYMGGRVPYGFELENTVMEGIKTCMYKPIPEQIQVVQLIFSLYAMPQVSFADVVRYLSQNGIKNPNGKNFNRMRIRDIITNPVYAKADASIYEFFHGQGTEIINDISQFIGTNGAYLYTGNKAAKRKSISLDGHVLVLAPHAGCIDADTWIRCRRKCLNVRQIAKPVKAKNTWLAGKIKCIDCGHALSLKSYPRKRSADARYYICNSKYVSASCDGVGAIQASGIEDIVFDEMSRKLKEFNKLSYKEKHGDPIELTKLKIRAEEIEKEIATLIDKIVSASTATMEYINERIDALDEEKKTVKEKIAQMSAEMYDRQNIGVISDYMSKWNDISIDDKLTVVDTLIESIHVGHGKVKIAWKI

SEQ ID NO: 5573 - protein, 504 aa, Unknown
  Description of Unknown: Integrase B5574 sequence
  SM00857,G3DSA:1.10.10.2600,IPR036162,PS51737,G3DSA:3.40.50.1390, IPR006119,IPR038109,PF07508,IPR011109,SSF53041, PF00239,PTHR30461,PS51736,Coil,cd00338
MQKYLMYLRKSRADGEHETIEEILARHEKILQEYAEKNIRKAVPEENIFREIVSGETIKDRPLMNKLLKCIQNEQITGVLVIEPQRLSRGDLHDCGTIIRAFQYTNTLVYTPTKTYDLSEKYDRKFFEMELMRGNDYLEYVKEILMRGRLASVSDGNYIGSIPPFGYSKEKIDKNYVLVENDESNVVRLIFDLFVNQNMGTSKIANHLNSIGIKPRKNNYWSDSTIRDILRNPVYIGKIRWNWRKTVKTYKDGEIVCSRPKSTPDSWIIIDGKHNGLISEEVFNAAQKRFGQNPRVKKEYEIVNPFAGLVKCECGKSMVYKKFNKSSPRIICPNQPRCENRSVLYSEFESEVIIALKKYINDFKIKISNGDNQSESIQNGILECLIKELKTIENQQDKLYELLEQGIYTNAIFIKRNTALAEKRKKITSEIENLKTSIPNSINYEEKIVQLSNALNTLQNPDIHPKIKNEFLKVIINNIYYTRKNDNRTRNDDSPFTIKIILNL

SEQ ID NO: 5574 - protein, 504 aa, Unknown
  Description of Unknown: Integrase B5575 sequence
  PTHR30461:SF3,cd00338,SM00857,G3DSA:1.10.10.2600,IPR036162, PF13408,IPR025827,PS51737,G3DSA:3.40.50.1390,IPR006119, IPR038109,PF07508,SSF53041,IPR011109, PTHR30461,PS51736,Coil,PF00239
MKVCMYLRKSRQDEELEKKENTDTLSRHRSALLELARKQHLDIIEVHEEIVSGGSIVSRPKMMKLLEEVRNNMYDAVLCMDLDRLGRGGMQDQGLILDTFKETNTLIITPDKTYDLNNELDEEMTEFKAFFARRELKIITKRMQRGRIKSVEEGKFIASTAPYGYKFEYDKEGKKSLVIDEEKAAIVRNIFDMYINGNGAYKIKVWLDNIGIKTNTGIPFSQQAIGRILRNNIYCGYVTWNNYRRKGTITKKQPKENIIIAKGIHEPIISEEIWNKADEIRQNNQIAPSGNNKNLTNPLAGLVKCACCGHTMTNKLSNYKGEGYVKFMCCKSCNENRGVKMYVLEETILEYLEDILQEFENQILSNKVENKGNDRIENLRCTLSLLKKKAVELNKQKNNLHDLLEKGVYDVDTYLERTQVLSKKTDENKNAIDSTLELIESEKNININYNELAISIKLVLENYKKTDDIKLKNFLLKSVIDEIIYFKEKDKRNAKFELDIKLKI

SEQ ID NO: 5575 - protein, 504 aa, Unknown
  Description of Unknown: Integrase B5576 sequence
  PTHR30461:SF3,cd00338,SM00857,G3DSA:1.10.10.2600,IPR036162, PF13408,IPR025827,G3DSA:3.40.50.1390,PS51737,IPR006119, IPR038109,PF07508,IPR011109,SSF53041,PTHR30461, PS51736,Coil,PF00239
MQTAVIYARYSSDKQTEQSIEGQLYDCYNYAKQHGITVVQEYIDRAMTGKNDDRPAFQQMLHDSAQHKWDSVLVWKLDRFARNTIDSAVNRQILAKNGVKLLSVMESFGDDASGQMMTHIIEAINEYYSADLREKTIRGMRQSAMKAQTTGHIPLGYKVVDKKLVIDDETRIIPETVFRMYAEGERLTDIAEYLNAHGYRNRRGRPFTTNSFYNMLANEKYIGIYKYDDIVIEGGIPQMIPNEVFEAVREKLITNRKRAAKNTAKADYYLSGKLYCGHCGEPMSGLSGTGRNGVKHYYYRCNGVQKKSGCHKKLENKYLIEDEVCRAARSAFEQMDKAETAETIYQMYLQTVRNEYAPAELEKELTECTKQAENVVNAIAQTGGNQLLYDKVRELEERKEQLSSALRLSQAMTDNVPSVEQITVFIDDILATDINTTEGKKAIADIMISKVYVYDDKLTVIFKDKDGKSVDIPLSAVSDSSSADCAPSALGSQAILSTNHREKV

SEQ ID NO: 5576 - protein, 504 aa, Unknown
  Description of Unknown: Integrase B5577 sequence
  cd03768,PTHR30461:SF3,SM00857,IPR036162,PF13408, PS51737,G3DSA:3.40.50.1390,IPR025827,IPR006119,PF07508, SSF53041,IPR011109,PTHR30461,PS51736,Coil, PF00239
MEDFIYARQSVDKEDSISIESQIELCLREVGNNPHRVFRDKGYSGKNTERPDFQDMMAAVRAGGARRIIVYRLDRISRSVLDFANVISELQKYGVEFVSITERFDTSTPIGKAMLMIVMVFAQLERETIQQRVMDAYRSRSRKGFYMGGRVPYGFELENTVMEGIKTCMYKPIPEQIQVVQLIFSLYAMPQVSFADVVRYLSQNGIKNPNGKNFSRMRIRDIITNPVYAKADASIFEFFHGQGTEIINDISQFIGTNGAYLYTGNKAAKRKSISLDGHVLVLAPHAGCIDADTWIRCRRKCLNVRQIAKPVKAKNTWLAGKIKCIDCGHALSLKSYPRKRSADARYYICNSKYVSASCDGVGAIQAAGIEDIVFDEMSRKLKEFNKLSYKEKHGDPIELTKLKIRAKEIEKEIATLIDKIVSASTATMEYINERIDALDEEKKTVKEKIAQMSAEMYDRQNIGVISDYMSKWNDISIDDKLTVVDTLIESIHVGHGKVKIAWKI

SEQ ID NO: 5577 - protein, 504 aa, Unknown
  Description of Unknown: Integrase B5578 sequence
  cd03768,PTHR30461:SF3,SM00857,IPR036162,PF13408, IPR025827,G3DSA:3.40.50.1390,IPR006119,PF07508,IPR011109, SSF53041,PTHR30461,PS51736,Coil,PF00239
MKRIAIYSRKSKETDTGESIKNQINICKEYFLRQYDQCTFEIFEDEGFSGGNTNRPAFKRMMQLADYKQFDIIAAYKVDRISRNTLDFLTMFEQLKLNDIELVSVTEGFDANTPAGRMMMSMISSIAEMERANIAQRVKDNMFELAKLGRWSGGTPPTGYKSVKITDNGKSIVYLEIIKEYIPIIKNIFHMAGKGYTSYQIANEMNMSSKTINNILKNPTYMISDEKGSLFLKSIGYNIFGIENGNGYLAYNRRPRKNGKKLTKSSNMIASVSLHKGIVTSNEWIEAYIKVNSRFTEAKPRVSQLTFLSHLVKCKCGSGMFVSPGRRRKDGTRTLYFRCSNKKNGGNCNSGFLKILDVEESLLNTFYDISLDKSLINNYIKVNDQFKYDTEINILKKTIENNTKSINSLTEKLILIEGAAINIISEKINLLHFENEDLNKQLFDLERKKLLSLNTSNIDAIYDSIIFILSKWDKLNITDKQIYMQKIIDCIVWDGADGLNINLK

SEQ ID NO: 5578 - protein, 504 aa, Unknown
  Description of Unknown: Integrase B5579 sequence
  PTHR30461:SF3,SM00857,G3DSA:1.10.10.2600,IPR036162,PF13408, PS51737,G3DSA:3.40.50.1390,IPR025827,IPR006119,IPR038109, PF07508,IPR011109,SSF53041,PTHR30461, PS51736,cd00338,PF00239
MNGVIYARYSSENQREESIDGQLRECTAFAQHNDIQIVGEYIDRAFSAKTDNRPSFQKMIKDSAKGEFDVIIVWKLDRFARNRYDSAHYKNILKKNGVKVVSATEAISSGAEGIILESVLEGMAEYYSAELAEKVSRGMKENALKCKYNGGSVPLGYYIDESKHFQIDSSVAPFVVECFEHYADGMTMKQLRDELNMKGVKNSRGGKLSIDVISRMLTNRKYLGEYTFQDITIKDGIPAIVSTSLFEKVQDRLTKTKKAPSSHKADDDYILTTKLFCGKCKSFMVGESGTNAQGKKYRYYKCVNHKKHQGCDMKSIRKDLIENMTIKYIREFLNDEDLINTLIDLAYDAQHKENEQLPLLRKQLAQTEKGIKNIVDAIEQGISTKSTRERLLDLEQRKNDIEMSISKESIENPMLTKKQFKFWFDQLKKLDISKSEQRQKLVDLFVNSIIIYDDHIKFFFNYKEHTETITFDELNNCSDLPDSPRPKKEIPNERYLFLFSMHKT

SEQ ID NO: 5579 - protein, 504 aa, Unknown
  Description of Unknown: Integrase B5580 sequence
  cd03768,PTHR30461:SF3,SM00857,IPR036162,PF13408, IPR025827,G3DSA:3.40.50.1390,PS51737,IPR006119,PF07508, SSF53041,IPR011109,PTHR30461,PS51736,Coil, PF00239
MEDFIYARQSVDKEDSISIESQIELCLREVGNNPHRVFRDKGYSGKNTERPDFQDMMAAVRAGGARRIIVYRLDRISRSVLDFANVISELQKYGVEFVSITERFDTSTPIGKAMLMIVMVFAQLERETIQQRVMDAYRSRSRKGFYMGGRVPYGFELENTVMEGIKTCMYKPIPEQIQVVQLIFSLYAMPQVSFADVVRYLSQNGIKNPNGKNFSRMRIRDIITNPVYAKADASIYEFFHGQGTEIINDISQFIGTNGAYLYTGNKAAKRKSISLDGHVLVLAPHAGCIDADTWIRCRRKCLNVRQIAKPVKAKNTWLAGKIKCIDCGHALSLKSYPRKRSADARYYICNSKYVSASCDGVGAIQAAGIEDIVFDEMSRKLKEFNKLSYKEKHGDPIELTKLKIRAEEIEKEIATLIDKIVSASTATMEYINERIDALDEEKKTVKEKIAQMSAEMYDRQNIGVISDYMSKWNDISIDDKLTVVDTLIESIHVGHGKVKIAWKI

SEQ ID NO: 5580 - protein, 504 aa, Unknown
  Description of Unknown: Integrase B5581 sequence
  PTHR30461:SF3,SM00857,G3DSA:1.10.10.2600,IPR036162,PF13408, PS51737,IPR025827,G3DSA:3.40.50.1390,IPR006119,IPR038109, PF07508,IPR011109,SSF53041,PF00239,PTHR30461, PS51736,Coil,cd00338
MNYNDSKSIYLMYLRKSRADEYNQDVENILKRHEEELQSLAKREFGELIPEKYIFREVVSGGTIKDRPLMKEILKMMESGIIAGVLVVDPQRLSRGDLLDQGHIINAFKYTNTLIITPYKTYDLNDTTGTDMKLLKMELNHGADYLDYYKMVQARGKLASVRAGNFIQPIPPFGYRKVRYGKVTTLEPIEDEARIVRIIFQKYAEGKTICGVTNELNAEGYIPPSKQIWTKGSVKRILSNPVYDGKIRWGFTPNKTVMEDGKLKKYRPERHDYLLFDGKHDAIVNHGLFMSVQERLSKNKSFTNDRSLKNPLYGIMYCKRCGRKISRLNVAESRGGHRYACPNKLCDVQSSRYDLVIEAVIDTIQCAIDDFDITFHDCNSSGSDEKIRELRQELTRLNNKEDTLFELLETKVYSTSVFTQRHAELEKKRQEIIGKINTLSLIPPPESCNNKKMRFKDALLALKDESMPPKEKNHLLKKCIERIDYDIEGVRYHSKVKLDVYFKF

SEQ ID NO: 5581 - protein, 504 aa, Unknown
  Description of Unknown: Integrase B5582 sequence
  PTHR30461:SF3,SM00857,IPR036162,PF13408,IPR025827, G3DSA:3.40.50.1390,IPR006119,PF07508,IPR011109,SSF53041, PTHR30461,Coil,PS51736,cd00338,PF00239
MKIAIYSRKSKETDTGESIQNQINICKDYFNRQYNNCVFEIFYDEGFSGGNINRPDFQRFMQSIKLKKFDILGVYKIDRVSRNTLEFLTVFEELKQYNIKLVSVTEGFDPSTPGGKMMMDVLASMAEMERANIAQRVKDNMLGLAKMGRWSGGTPPTGYKPKAYINEFGKKEMYLELDEVESDIIYKIFNLSAAGCTTYAIGKEVNKNPKTILNILRNPVYCESNETSKKFLENMGYTIMGELNGNGYMTYNKRPRSNGKKIVSDYMLAVVSKHKAIVTAEMFIKANKNLTDRAPTKRPRKSQGTFLSHLVKCGKCGGGMFVASGNKLKDGSKKLYFRCTNQKYNKTCDAKWIRVDEIERFVLSELYKFSLDKNKLNEYINSNINLDCYDNDIKKLKSQVNKLNIDINNLTEKLLLLDGAAVKIVNDKINQISNERELKKEMLFELESKKIELTVNSINVDELYNNIKKLLVIFDLIPIDEQQILINQLITSIEISDNDKTLIF

SEQ ID NO: 5582 - protein, 504 aa, Unknown
  Description of Unknown: Integrase B5583 sequence
  cd03768,PTHR30461:SF3,SM00857,IPR036162, PF13408,IPR025827,G3DSA:3.40.50.1390,PS51737, IPR006119,PF07508,SSF53041,IPR011109, PTHR30461,PS51736,Coil,PF00239
MEDFIYARQSVDKEDSISIESQIELCLREVGNNPHRVFRDKGYSGKNTERPDFQDMMAAVRAGGARRIIVYRLDRISRSVLDFANVISELQKYGVEFVSITERFDTSTPIGKAMLMIVMVFAQLERETIQQRVMDAYRSRSRKGFYMGGRVPYGFELENTVMEGIKTCMYKPIPEQIQVVQLIFSLYAMPQVSFADVVRYLSQNGIKNPNGKNFSRMRIRDIITNPVYAKADASIYEFFHGQGTEIINDISQFIGTNGAYLYTGNKAAKRKNISLDGHVLVLAPHAGCIDADTWIRCRRKCLNVRQIAKPVKAKNTWLAGKIKCIDCGHALSLKSYSRKRSADARYYICNSKYVSASCDGVGAIQASGIEDIVFDEMSRKLKEFNKLSYKEKHGDPIELTKLKIRAEEIEKEIATLIDKIVSASTATMEYINERIDALDEEKKTVKEKIAQMSAEMYDRQNIGVISDYMSKWNDISIDDKLTVVDTLIESIHVGHGKVKIAWKI

SEQ ID NO: 5583 - protein, 504 aa, Unknown
  Description of Unknown: Integrase B5584 sequence
  PTHR30461:SF3,SM00857,G3DSA:1.10.10.2600,IPR036162,PF13408, PS51737,IPR025827,G3DSA:3.40.50.1390,IPR006119,IPR038109, PF07508,SSF53041,IPR011109,PF00239,PTHR30461, PS51736,Coil,cd00338
MTAVIYARYSSDNQREESIEGQIRECTAYAEKNDITIVKHYIDRAISAKTDNRPQFQQMIKDSDKKLFDIVLVWKLDRFARNRYDSARYKTQLKKNGVKLMSATEIISEGPEGIILESVLEGYAEYYSADLAEKVVRGQTENILKGRCNGGRGTFGYTLDSERKFHIDPLASPFVLESFTKYRDGLTMKEIRDWLNENGIKNPVGGEFTYNSVEHMLKNRRYIGELKFRDVVVPDAIPPIVPLELFDDVQEKIAKNKKAPARRKAEDDYLLTTKLHCGCCGALMFGESGTSRTGEVHRYYKCATAKKKKGCKKKTVRKQWLEDLVVNQTMQLVRDDAAMESIIAKVMELQDRENTNLPLYEKQLRDAESGIQNMLNAIQAGILTSSTKERLEQLEETKRELEARIAEEKLAKPKIKEEFIRFWLMRFRKLDMSLKDQRQALVDTFINSIYLYDDKVLITFNYKEGTQTITFEEAAQAASKENGSDLDCFTAPSKIPRLTVENAV

SEQ ID NO: 5584 - protein, 504 aa, Unknown
  Description of Unknown: Integrase B5585 sequence
  PTHR30461:SF3,cd00338,SM00857,G3DSA:1.10.10.2600,IPR036162, PF13408,PS51737,G3DSA:3.40.50.1390,IPR025827,IPR006119, IPR038109,PF07508,IPR011109,SSF53041,PTHR30461, PS51736,Coil,PF00239
MKIAVIYARYSSDKQTEQSIEGQLYDCYNYAKQHGITVVQEYIDRAMTGKNDDRPAFQQMLHESAMHKWDSVIVWKLDRFARNTIDSAVNRQILAKNGVKLLSVMESFGDDASGQMMTHIIEAINEYYSADLREKTIRGMRQSAMKAQTTGHIPLGYKVVDKKLVIDDETRIIPETVFRMYAEGERLTDIAEHLNAQGYRNRRGRPFTTNSFYNMLANEKYIGIYKYDDIVIEGGIPQMIPNEVFEAVREKLIINRKRAAKNTAKADYYLSGKLYCGHCGEPMSGLSGTGRNGVKHYYYRCNGVQKKSGCHKNLENKYLIEDEVCRAARSAFEQMDKAETAETIYQMYLQTVKNEYAPAELEKELTECTKQAENVVNAIAQTGGNQLLFDKVRELEERKEQLGSALRLSQAMTDNVPSVEQITVFIDDILATDINTIEGKKAIADIMISKVYVYDDKLTVIFKDKDGKSVDIPLSAVSDSSSADCAPSALGSQAILSTNHREKV

SEQ ID NO: 5585 - protein, 504 aa, Unknown
  Description of Unknown: Integrase B5586 sequence
  cd03768,PTHR30461:SF3,SM00857,IPR036162,PF13408, IPR025827,PS51737,G3DSA:3.40.50.1390,IPR006119,PF07508, SSF53041,IPR011109,PTHR30461,PS51736,Coil, PF00239
MEDFIYARQSVDKEDSISIESQIELCLREVGNNPHRVFRDKGYSGKNTERPDFQDMMAAVRAGGARRIIVYRLDRISRSVLDFANVISELQKYGVEFVSITERFDTSTPIGKAMLMIAMVFAQLERETIQQRVMDAYRSRSRKGFYMGGRVPYGFELENTVMEGIKTCMYKPIPEQIQVVQLIFSLYAMPQVSFADVVRYLSQNGIKNPNGKNFSRMRIRDIITNPVYAKADASIYEFFHGQGTEIINDISQFIGTNGAYLYTGNKAAKRKSISLDGHVLVLAPHAGCIDADTWIRCRRKCLNVRQIAKPVKAKNTWLAGKIKCIDCGHALSLKSYPRKRSADARYYICNSKYVSASCDGVGAIQASGIEDIVFDEMSRKLKEFNKLSYKEKHGDPIELTKLKIRAEEIEKEIATLIDKIVSASTATMEYINERIDALDEEKKTVKEKIAQMSAEMYDRQNIGVISDYMSKWNDISIDDKLTVVDTLIASIHVGHGKVKIAWKI

SEQ ID NO: 5586 - protein, 504 aa, Unknown
  Description of Unknown: Integrase B5587 sequence
  cd03768,PTHR30461:SF3,SM00857,IPR036162,PF13408, PS51737,G3DSA:3.40.50.1390,IPR025827,IPR006119,PF07508, SSF53041,IPR011109,PTHR30461,PS51736,Coil, PF00239
MEDFIYARQSVDKEDSISIESQIELCLREVGNNPHRVFRDKGYSGKNTERPDFQDMMAAVRAGGARRIIVYRLDRISRSVLDFANVISELQKYGVEFVSITERFDTSTPIGKAMLMIVMVFAQLERETIQQRVMDAYRSRSRKGFYMGGRVPYGFELENTVMEGIKTCMYKPIPEQIQVVQLIFSLYAMPQVSFADVVRYLSQNGIKNPNGKNFSRMRIRDIITNPVYAKADASIFEFFHGQGTEIINDISQFIGTNGAYLYTGNKAAKRKSISLDGHVLVLAPHAGCIDADTWIRCRRKCLNVRQIAKPVKAKNTWLAGKIKCIDCGHALSLKSYPRKRSADARYYICNSKYISASCDGVGAIQAAGIEDIVFDEMSRKLKEFNKLSYKEKHGDPIELTKLKIRAEEIEKEIATLIDKIVSASTATMEYINERIDALDEEKKTVKEKIAQMSAEMYDRQNIGVISDYMSKWNDISIDDKLTVVDTLIESIHVGHGKVKIAWKI

SEQ ID NO: 5587 - protein, 504 aa, Unknown
  Description of Unknown: Integrase B5588 sequence
  cd03768,PTHR30461:SF3,SM00857,IPR036162,PF13408, PS51737,IPR025827,G3DSA:3.40.50.1390,IPR006119,PF07508, SSF53041,IPR011109,PTHR30461,PS51736,Coil, PF00239
MEDFIYARQSVDKEDSISIESQIELCLREVGNNPHRVFRDKGYSGKNTERPDFQDMMAAVRGGGARRIIVYRLDRISRSVLDFANVISELQKYGVEFVSITERFDTSTPIGKAMLMIVMVFAQLERETIQQRVMDAYRSRSRKGFYMGGRVPYGFELENTVMEGIKTCMYKPIPEQIQVVQLIFSLYAMPQVSFADVVRYLSQNGIKNPNGKNFSRMRIRDIITNPVYAKADASIYEFFHGQGTEIINDISQFIGTNGAYLYTGNKATKRKSISLDGHVLVLAPHAGCIDADTWIRCRRKCLNVRQIAKPVKAKNTWLAGKIKCIDCGHALSLKSYPRKRSADARYYICNSKYVSASCDGVGAIQASGIEDIVFDEMSRKLKEFNKLSYKEKHGDPIELTKLKIRAEEIEKEIATLIDKIVSASTATMEYINERIDALDEEKKTVKEKIAQMSAEMYDRQNIGVISDYMSKWNDISIDDKLTVVDTLIESIHVGHGKVKIAWKI

SEQ ID NO: 5588 - protein, 504 aa, Unknown
  Description of Unknown: Integrase B5589 sequence
  cd03768,PTHR30461:SF3,SM00857,IPR036162,PF13408, IPR025827,G3DSA:3.40.50.1390,PS51737,IPR006119,PF07508, SSF53041,IPR011109,PTHR30461,PS51736,Coil, PF00239
MEDFIYARQSVDKEDSISIESQIELCLREVGNNPHRVFRDKGYSGKNTERPDFQDMMAAVRAGGARRIIVYRLDRISRSVLDFANVISELQKYGVEFVSITERFDTSTPIGKAMLMIVMVFAQLERETIQQRVMDAYRSRSRKGFYMGGRVPYGFELENTVMEGIKTCMYKPIPEQIQVVQLIFSLYAMPQVSFADVVRYLSQNGIKNPNGKNFSRMRIRDIITNPVYAKADASIYEFFHGQGTEIINDISQFIGTNGAYLYTGNKAAKRKSISLDGHVLVLAPHAGCIDADTWIRCRRKCLNVRQIAKPVKAKNTWLAGKIKCIDCGHALSLKSYPRKRSADARYYICNSKYVSASCDGVGAIQASGIEDIVFDEMSRKLKEFNKLSYKEKHGDPIELTKLKIRAEEIEKEIATLIDKIVSASTATMEYINERIDALDEEKKTVKEKIAQMSAEMYDRQNIGVISDYMSKWNDISIDDKLTVVDTLIESVHVGHGKVKIAWKI

SEQ ID NO: 5589 - protein, 504 aa, Unknown
  Description of Unknown: Integrase B5590 sequence
  PTHR30461:SF3,IPR036162,PS51737,IPR011109,PTHR30461, PS00397,PF00239,G3DSA:1.10.10.2600,IPR006119,SSF53041, SM00857,IPR025827,IPR038109,PS51736,cd03768, IPR006118,PF13408,G3DSA:3.40.50.1390,PF07508,Coil
MYKASNGSGELMENKVIRVGGYIRVSTQEQAKEGYSIPAQTKCLKSYCSARNWILHELYIDPGYSGAKMERPALQKMLSDIKKGLVDLVLVYKLDRLSRSQKDTLYLIEDVFLKNEVAFVSINENFDTSSAFGRAMIGILSVFAQLEREQIKERTQMGLAERAKNGMWHGSGITPIGYDYDPASNQLVVNEYEAMQIREAFDLFVNQNYAFTKIVKTFRNKGYSHKHGVWAHSSKLRYILSNKTYIGRINWNGEDYPGKHDPIIPSSLFEAAQKKLAEKDWKLTDKPAKSPFDATQLLSGVLFCGNCGGRYYGAGCYRGSHDPNSPKRRYEHIYSCYSRTKTKLEMIKDPSCKNKNWKTETLDNYVITRIKNLRLEGEIENLIAKERPRNPGIDQRKALEKQIDDIDRQISRLLTLYQLEDVPTAEIGLRLSDLTRKKKTVEEAIENIPLYEPELSVAKAKSLLADAEEIFNCGTTEEKRSLIHALIRKIILTGNDVVIEWAFI

SEQ ID NO: 5590 - protein, 504 aa, Unknown
  Description of Unknown: Integrase B5591 sequence
  PTHR30461:SF3,SM00857,G3DSA:1.10.10.2600,IPR036162,PF13408, PS51737,G3DSA:3.40.50.1390,IPR025827,IPR006119,IPR038109, PF07508,SSF53041,IPR011109,PTHR30461,Coil, cd00338,PF00239
MQRVACREFIDRQKDWTLVDEVLEKGVSGYKTKTADRDALTEIKAKAMAKKFDILLVFMFDRLGRREDETPFVVQWFVENGIEVWSVKEGQQRFDTHVDKLLNYIRFWQASGESEKTSLRIRTKHLQMIQEGLYRGGLVPFGYRLEHLGRTNKKNQPVRDLVIDEAESAIVKEIYYKIISEGWGTNRIANWLNERGIQTKRGKPGAFWRATSIRAIVRNPIYIGKIRFGDELSESFEHLRIIDDFSFNLCEQILEERIPAASRDRTRSLRSTSPALLTGILFCGSCGGRMCFNHNSTVKYLADGTKRAYERDVYRCYRKVSHHGGCSGRSTYPLEKIEEAVLKIVHQYFENIRSVPTVQMLAAARQRSDSMDEIALANAEEALQKAQAEMSALEDEAVKALTGESKLDISFINGLIPKRRAALEKATEELARLRGVIAETEKKNALINQELKIILSWADAFDSASTDVKRSIISALIDRITVYNDCSLDIHFRISAEQFLGKAA

SEQ ID NO: 5591 - protein, 504 aa, Unknown
  Description of Unknown: Integrase B5592 sequence
  cd03768,PTHR30461:SF3,SM00857,IPR036162,PF13408, IPR025827,G3DSA:3.40.50.1390,PS51737,IPR006119,PF07508, SSF53041,IPR011109,PTHR30461,PS51736,Coil, PF00239
MEDFIYARQSVDKEDSISIESQIELCLREVGNNPHRVFRDKGYSGKNTERPDFQDMMAAVRAGGARRIIVYRLDRISRSVLDFANVISELQKYGVEFVSITERFDTSTPIGKAMLMIVMVFAQLERETIQQRVMDAYRSRSRKGFYMGGRVPYGFELENTVMEGIKTCMYKPIPEQIQVVQLIFSLYAMPQVSFADVVRYLSQNGIKNPNGKNFSRMRIRDIITNPVYAKADASIYEFFHGQGTEIINDISQFIGTNGAYLYTGNKAAKRKSISLDGHVLVLAPHAGCIDADTWIRCRRKCLNVRQIAKPVKAKNTWLAGKIKCIDCGHALSLKSYPRKRSADARYYICNSKYVSASCDGVGAIQASGIEDIVFDEMSRKLKEFNKLSYKEKHGDPIELTKLKIRAEEIEKEIATLIDKIVSASTATMEYINERIDALDEEKKTVKEKIAQMSAEMYDRQNIGVISDYMSKWNDISIDDKLTVVDTLIASIHVGHGKVKIAWKI

SEQ ID NO: 5592 - protein, 504 aa, Unknown
  Description of Unknown: Integrase B5593 sequence
  PTHR30461:SF3,SM00857,G3DSA:1.10.10.2600,IPR036162,PF13408, PS51737,G3DSA:3.40.50.1390,IPR025827,IPR006119,IPR038109, PF07508,IPR011109,SSF53041,PTHR30461,Coil, PS51736,cd00338,PF00239
MNAVIYARYSCDRQTEQSIEGQLRECKAFAASEGIHIIGEYIDRAISGTTANRPEFQRMIADSRYKTFQAVIVYKLDRFARNRYDSAMYKSKLKANGVRVLSAKEHITDSPEGIILEGLLEAMNEYYSAELSQKIKRGMRENAIKGKTTGGNVALGYRIGADKQMEIDPAGASLVRRIFTGYDSGMTFTEICDDLNHAGYTTSRGKQFRIDTISRILANQRYTGTFQCAGEDAHCPPIIEPELFRSVQERLTESRHKHRHTQSPHEYVLTGKAICGTCGRRLTGRAGTSKTDKRYYYYCCPNKCCGWLPAAELEHAVLDAIAQYTTPEACEQIANATYALYQQSTHENADLTAAQRRLQETEKKLENAVNAVLNGITSAALQATMQQLEQQKAALEMEVRLLQTDAPELKLEHFQYFAHRLLEVQAEGTEKILQLLVNQVIVYKEQITVLVNLTDKTKTPPLEQVTAALRESSCSVACGGGGATKCELTILTPSLLAISNIFKK

SEQ ID NO: 5593 - protein, 504 aa, Unknown
  Description of Unknown: Integrase B5594 sequence
  PTHR30461:SF3,cd00338,SM00857,G3DSA:1.10.10.2600,IPR036162, PF13408,IPR025827,G3DSA:3.40.50.1390,PS51737,IPR006119, IPR038109,PF07508,SSF53041,IPR011109,PTHR30461, PS51736,Coil,PF00239
MKVCMYLRKSRQDEELEKKENTDTLSRHRSALLALARKQHLDIIEVHEEIVSGGSIVSRPKMMKLLEEVRNNMYDAVLCMDLDRLGRGGMQDQGLILDTFKETNTLIITPDKTYDLNNELDEEMTEFKAFFARRELKIITKRMQRGRIKSVEEGKFIASTAPYGYKFEYDKEGKKSLVIDEEKAAIVRNIFDMYINGNGAYKIKVWLDNIGIKTNTGIPFSQQAIGRILRNNIYCGYVTWNNYRRKGTITKKQPKENIIIAKGIHEPIISEEIWNKADEIRQNNQIVPSGNNKNLTNPLAGLVKCACCGHTMTNKLSNYKGEGYVKFMCCKSCNENRGVKMYVLEETILEYLEDILQEFENQILSNKVENKENDRIENLRCTLSLLKKKAVELNKQKNNLHDLLEKGVYDVDTYLERTQVLSKKTDENKNAIDSTLELIESEKNININYNELAISIKLVLENYKKTDDIKLKNFLLKSVIDEIIYFKEKNKRNAKFELDIKLKI

SEQ ID NO: 5594 - protein, 504 aa, Unknown
  Description of Unknown: Integrase B5595 sequence
  cd03768,PTHR30461:SF3,SM00857,IPR036162,PF13408, IPR025827,G3DSA:3.40.50.1390,PS51737,IPR006119,PF07508, SSF53041,IPR011109,PTHR30461,PS51736,Coil, PF00239
MEDFIYARQSVDKEDSISIESQIELCLREVGNNPHRVFRDKGYSGKNTERPDFQDMMAAVRAGGARRIIVYRLDRISRSVLDFANVISELQKYGVEFVSITERFDTSTPIGKAMLMIVMVFAQLERETIQQRVMDAYRSRSRKGFYMGGRVPYGFELENTVMEGIKTCMYKPIPEQIQVVQLIFSLYAMPQVSFADVVRYLSQNGIKNPNGKNFSRMRIRDIITNPVYAKADASIFEFFHGQGTEIINDISQFIGTNGAYLYTGSKAAKRKSISLDGHVLVLAPHAGCIDADTWIRCRRKCLNVRQIAKPVKAKNTWLAGKIKCIDCGHALSLKSYPRKRSADARYYICNSKYVSASCDGVGAIQAAGIEDIVFDEMSRKLKEFNKLSYKEKHGDPIELTKLKIRAEEIEKEIATLIDKIVSASTATMEYINERIDALDEEKKTVKEKIAQMSAEMYDRQNIGVISDYMSKWNDISIDDKLTVVDTLIESIHVGHGKVKIAWKI

SEQ ID NO: 5595 - protein, 504 aa, Unknown
  Description of Unknown: Integrase B5596 sequence
  cd03768,PTHR30461:SF3,SM00857,G3DSA:1.10.10.2600,IPR036162, PF13408,IPR025827,PS51737,G3DSA:3.40.50.1390,IPR006119, IPR038109,PF07508,SSF53041,IPR011109,PTHR30461, PS51736,Coil,PF00239
MEDFIYARQSVDKEDSISIESQIELCLREVGNNPHRVFRDKGYSGKNTERPDFQDMMAAVRAGGARRIIVYRLDRISRSVLDFANVISELQKYGVEFVSITERFDTSTPIGKAMLMIVMVFAQLERETIQQRVMDAYRSRSRKGFYMGGRVPYGFELENTVMEGIKTCMYKPIPEQIQVVQLIFSLYAMPQVSFTDVVRYLSQNGIKNPNGKNFSRMRIRDIITNPVYAKADASIFEFFHGQGTEIINDISQFIGTNGAYLYTGNKAAKRKSISLDGHVLVLAPHAGCIDADTWIRCRRKCLNVRQIAKPVKAKNTWLAGKIKCIDCGHALSLKSYPRKRSADARYYICNSKYVSASCDGVGAIQAAGIEDIVFDEMSRKLKEFNKLSYKEKHGDPIELTKLKIRAEEIEKEIATLIDKIVSASTATMEYINERIYALDEEKKTVKEKIAQMSAEMYDRQNIGVISDYMSKWNDISIDDKLTVVDTLIESIHVGHGKVKIAWKI

SEQ ID NO: 5596 - protein, 504 aa, Unknown
  Description of Unknown: Integrase B5597 sequence
  PTHR30461:SF3,cd00338,SM00857,G3DSA:1.10.10.2600,IPR036162, PF13408,PS51737,G3DSA:3.40.50.1390,IPR025827,IPR006119, IPR038109,PF07508,SSF53041,IPR011109,PTHR30461, PS51736,Coil,PF00239
MKVCMYLRKSRQDEELEKKENTDTLSRHRSALLALARKQHLDIIEVHEEIVSGGSIVSRPKMMKLLEEVRNNMYDAVLCMDLDRLGRGGMQDQGLILDTFKETNTLIITPDKTYDLNNELDEEMTEFKAFFARRELKIITKRMQRGRIKSVEEGKFIASTAPYGYKFEYDKEGKKSLVIDEEKAAIVRNIFDMYINGNGAYKIKVWLDNIGIKTNTGIPFSQQAIGRILRNNIYCGYVTWNNYRRKGTITKKQPKENIIIAKGIHEPIISEEIWNKADEIRRNNQIAPSGNNKNLTNPLAGLVKCACCGHTMTNKLSNYKGEGYVKFMCCKSCNENRGVKMYILEETILEYLEDILQEFENQILSNKVENKENDRIENLRCTLSLLEKKAVELNKQKNNLHDLLEKGVYDVDTYLERTQVLSKKTDENKNAIDSTLELIESEKNININYNELAISIKLVLENYKKTDDIKLKNFLLKSIIDEIIYFKEKNKRNAKFELDIKLKI

SEQ ID NO: 5597 - protein, 503 aa, Unknown
  Description of Unknown: Integrase B5598 sequence
  PTHR30461:SF3,cd00338,SM00857,G3DSA:1.10.10.2600,IPR036162, PF13408,PS51737,IPR025827,G3DSA:3.40.50.1390,IPR006119, IPR038109,PF07508,IPR011109,SSF53041,PTHR30461, Coil,PF00239
MYEEIKTACLYLRYSSSNQTEQSIEGQMHVCQDFCKRHNIRIVEMYIDRATSASKDIEKRVEFLKMIKDSEKGNFNAVIVYKLDRFARSRYDSATYKYRLKRNGVQLISATENITQDPEGIILESVLEGMAEFYSAELSQKINRGMRESAMKHNSIGGAIPLGYKTVDKKLVIDETTAPIVREAFQMYADGESVAEICRTFNNRGYKTSKGTRFGKSSFTKIFRNEKYIGVYKYHDYRAEDVIPPIIDKDLWDRVQVRVGKIKKAPARNKARHTYLLTGKLFCGHCGSAMNADGNSQGYLYYRCYGKKNLDKQCNKRNMEKNLIERLVAQDAMSFLTDEYIEKIATIACDRNKQEIESDSPIPVIRDRIRQVDVSLNNLLKAIETGSAPDMLVKRMGELETEKKDMEVQLKKEMAHQVYIDKEQVIFWLEKFREGDINDEEFCQTVIDLFVNSVTVWDEPDDKFKITIAYNLTSIPQKTYRLSKDGRLSDYASNTPQWKNRRP

SEQ ID NO: 5598 - protein, 503 aa, Unknown
  Description of Unknown: Integrase B5599 sequence
  PTHR30461:SF3,cd00338,SM00857,G3DSA:1.10.10.2600,IPR036162, PS51737,G3DSA:3.40.50.1390,IPR006119,IPR038109,PF07508, SSF53041,IPR011109,PTHR30461,PS51736,Coil, PF00239
MGGRAAIYARFSSHNQRGESIEIQVEKSRAYCAENDLRVVATYCDFAQTGTNTDRAEFQRMMADAKRGLFDFVVIYKVTRIMRNRDEMAMARIMLRRCRVEILYAGEDISDGSAGVLQLGMLEVLAEYESALDGERIRDGIQKNAERCMANGCVRYGWDIVDGRYVVNEEEAAAIRLGVRMVLSGKSVADVVRAWEPYRTKRGGKWRFQTVRRILMRRENGGEYRYAGVVVPGGMPAIVPMDDEERVIRMLEDSHRPRAKTEAWDFPLTGKLYDGRDGGLMTGTSGTGKSGRPYHYYRCRSCGRTVRRDVMEKRVADAVREALGSADSRERIARMLADAEEERADEKPLSETIKGELAKIETAFSNIWAAIESGIAPPGGKERIDALKQRQALLKDELRTAEALEAARLDYDRALFWLEGMAAAEVDDAQLLRTFVARVVLGGPDDDDGLRVAFTFDDSAGLGDNPSLPGAIGPGGEVFDRMNASSTISNRQVDTHIYLPFYF

SEQ ID NO: 5599 - protein, 503 aa, Unknown
  Description of Unknown: Integrase B5600 sequence
  cd03768,PTHR30461:SF3,SM00857,IPR036162,G3DSA:3.40.50.1390, IPR006119,SSF53041,PTHR30461,PS51736,Coil, PF00239
MVKIRVAIYCRKSVYVEGSVSIETQINLCKDYINRKYSNATFQIFEDEGFSGGNTKRPAFQKMLKLIELNQLDIVICYKIDRIARNTLDFLNTLEKFKKSNVELISVNEGFDPNTQMGKMMLTLLASFAEMERSNIQQRVSDNMLSIAKKGKWTGGSAPTGFINGKNGGLEISNAELIYDLFNMKYNNNLNSEIISYIKDKHNHTFIGTTLASSWRKPIYVQSSKEVTLYLKHKGYTVLGEENLINSYLTYTDKNSKYAVVSDIPGLIAPNIWISVNKKMDKNISREGNRFSSKYWLTKTLRCNCCGKTYCGQTKKTKTKYYKKDGSEKIYESVIDYYMCRDMLQGKLKSCPNTKRIKKAYIEERISNYIYKLKDKKFFRSSYSNNTVNNKKIISSLEKKLKTIDKNINNLTDKLAILSNEASMYIINRIEMLSTEKSKIKDEIIELEMQELNSLSNNYDFVFYNIQSFNRNMNVDEKRSSIMNIFKKIVYDPKTDTFEYYFK

SEQ ID NO: 5600 - protein, 503 aa, Unknown
  Description of Unknown: Integrase B5601 sequence
  cd03768,SM00857,G3DSA:1.10.10.2600,IPR036162, PF13408,PS51737,IPR025827,G3DSA:3.40.50.1390, IPR006119,IPR038109,PF07508,IPR011109, SSF53041,PTHR30461,PS51736,Coil,PF00239
MNNRIDAIYARQSVDKKDSISIESQIEFCKYELKGGNCKEYTDKGYSGKNTDRPKFQELVRDIKRGLIAKVVVYKLDRISRSILDFANMMELFQQYNVEFVSSTEKFDTSTPMGRAMLNICIVFAQLERETIQKRVTDAYYSRSQRGFKMGGKAPYGFHTEPIKMDGINTKKLVVNPDEAANIRLIFEMYAQPTTSYGDITRYFAEQGILFHGKELIRPTLAQMLRNPVYVQADLDVYEFFKSQGTVIVNDAADFTGMNGCYLYQGRDVKPSKKNDLKDQMLVLAPHEGIVPSDIWLTCRKKLMNNMKIQSARKATHTWLAGKIKCGNCGYALMSINNPVRKQYLRCTKRLDNKSCAGCGKIITSELEAVVYQQMVKKLASYKTLTGRKKAAKANPKIAALQVELAHVDSEIEKLVDSLTGANNVLLSYVNVKIAELDGRKQELLARIAELTVEAISPEQVSQISGYLDTWDNVSFDDKRRVVDLMITTIAATSDSLNITWKI

SEQ ID NO: 5601 - protein, 503 aa, Unknown
  Description of Unknown: Integrase B5602 sequence
  cd03768,PTHR30461:SF3,SM00857,IPR036162,G3DSA:3.40.50.1390, IPR006119,PF07508,IPR011109,SSF53041,PTHR30461, PS51736,Coil,PF00239
MIKIRVAIYCRKSVFVEGSVSIETQINLCKDYINKKYSNSTFEIFEDEGFSGGNTNRPAFQKMLKLIELNQLDIVICYKIDRIARNTLDFLNTLEKFKNKNVELISVSEGFDPNTQIGKMMLTLLASFAEMERSNIQQRVSDNMLSIAKKGRWTGGSAPTGFMHGENGGIEISNGELILDIFDMKYHNTLNSKIITHAEEKHNHKFTGVTLANAFRKPIYVKSSESVSLYLKHKGYTVLGEENLTNSYLTYTDKDNKYAVVSNIPGLINPEVWLDINKRMDENITRTGNRFSEKYWLTKTLHCKCCGKTYCGHTKSTKTRYYKKDGTEKIYESTTYYYMCRDMLRGKLKTCTNTKRVKKDYLEVRVSELIYSLKDIDNFNAAYNVNSVDNKKLIASLERKIKSIDKNINNLTDKLSLLSNEASIIFINKIETLVKEKSNIKNEILSLEMHELENINNNHDFVFYNISNFNDNMTVDEKRACCMNIFKEITYDPKEDTFEFSFK

SEQ ID NO: 5602 - protein, 503 aa, Unknown
  Description of Unknown: Integrase B5603 sequence
  cd03768,SM00857,G3DSA:1.10.10.2600,IPR036162, PF13408,PS51737,G3DSA:3.40.50.1390,IPR025827, IPR006119,IPR038109,PF07508,IPR011109, SSF53041,PTHR30461,PS51736,Coil,PF00239
MNNRIDAIYARQSVDKKDSISIESQIEFCKYELKGGNCKEYTDKGYSGKNTDRPKFQELVRDIKRGLIAKVIVYKLDRISRSILDFANMMELFQQYNVEFVSSTEKFDTSTPMGRAMLNICIVFAQLERETIQKRVTDAYYSRSQRGFKMGGKAPYGFHTEPIKMDGINTKKLVVNPEEAANIRLMFEMYAEPTTSYGDITRHFAEQGILFNGKKLIRPTLAQMLRNPVYVQADLDVYEFFKSQGTVIVNDAADFTGMNGCYLYQGRDVKPDKAQNLKDQMLVLAPHEGIVPSDVWLTCRKKLMNNMKIQSARKATHTWLAGKIKCGNCGYALMSIFNPSGKQYLRCTKRLDNKSCPGCGKIITSELEAVTYQQMVKKLDSYKTLTGRKKAAKANPKIAALQVELAHVDSEIEKLVDSLTGANNVLLSYVNVKIAELDGRKQELLAQIAELTVEAISPEQVSQISGYLDTWENVAFDDKRRVVDLMLTTIAATSDSLNITWKI

SEQ ID NO: 5603 - protein, 503 aa, Unknown
  Description of Unknown: Integrase B5604 sequence
  PTHR30461:SF3,SM00857,G3DSA:1.10.10.2600,IPR036162,PF13408, PS51737,G3DSA:3.40.50.1390,IPR025827,IPR006119,IPR038109, PF07508,IPR011109,SSF53041,PF00239,PTHR30461, PS51736,Coil,cd00338
MQRAVIYARYSPGPNQTEQSIEGQVRECTKYAELHDLRIVGTYIDRKISGKTDNRREFQRMIDDSEKHIFDVIILYHTDRFARNRYDSAIYKHKLKENGVELRYATTDIPKGPEGIILESIMEGWAEYYSAELSRKIKRGMRESALKCHSTGAGRCLGYRTAEDKSLVIEPEGAKAVQTVFDMYIKGKSHADICRYLNDCGFRTAQGKLFNKNSVTHIIRNKRYIGVYTYDDITIEDGIPAIISKDTFHLAQLEAARRKTAKRPKEPKAEYLLSGKAFCGHCQKPLVGVSGTGKSGNKWYYYYCQESRAKRGCTKRPVKRDWLEREVVERTVAEVLQPEVIQHIAKKCYDLQMEYRQDNSDVLFYELKLKDVRKAIKNTMHAIESGVKTKTLPARLQELENEEEALEAELAIAKASDFVITTDQIEFLLTQFAEPWECESEEEYHRRIIKCFVHKVFLFDDKLLIYYNVSRDGKTREQSEAELLEEALGEGFDKRSSGSTKTI

SEQ ID NO: 5604 - protein, 503 aa, Unknown
  Description of Unknown: Integrase B5605 sequence
  IPR036162,PS51737,IPR011109,PTHR30461,PS00397, PF00239,G3DSA:1.10.10.2600,IPR006119,SSF53041,cd00338, SM00857,IPR025827,IPR038109,PS51736,IPR006118, PF13408,G3DSA:3.40.50.1390,PF07508,Coil
MQAEHLFYFWLLFLYSFLHTTKQEGDIMAKLRNGALYIRVSTADQTELSPDAQQRLLLDYAKKNGIIISKDYVFEESVSGRHADKRPKFQEMIGIAKQESHPLDVILVWKYSRFARNQEESIVYKSLLKKSDVDVISISEPLIDGPFGTLIERIIEWMDEYYSIRLSGEVIRGMKEKALKHGYQTTPCLGYDAVGGGKPFVINEEEYKIVQYIMDQYDLYDQDATAIARKCNDLGFRSKRGNLFEQRNVDLILKNPFYTGTVVWNGISFEGSHETRLSKERFEKRIALMRARRRPAKARNISTCKHWLSGLLRCSVCGATLSLAGSGSYRYFQCWKYSKGFHTGSQSLSAAKAEAAVCDYFDRILAGADFTYAVRNIPDQKESDELDLLRQELDQIAVKEARVKLAYENGIDTLEEYKENRRRLKESREELLEKIDTATAATQPEDSDSHARETLLKEIQSVSEILKDPAESYERKGLLLRSIVDGITYDKEKNRLYFNFFIS

SEQ ID NO: 5605 - protein, 503 aa, Unknown
  Description of Unknown: Integrase B5606 sequence
  PTHR30461:SF3,cd00338,SM00857,G3DSA:1.10.10.2600,IPR036162, PF13408,PS51737,IPR025827,G3DSA:3.40.50.1390,IPR006119, IPR038109,PF07508,SSF53041,IPR011109,PTHR30461, PS51736,Coil,PF00239
MSKLAVIYARFSSDKQREESIEGQIRECTAFADANDIKIVGTYIDRAMSARTDKRPDFLRMIADSAKGVFEYVLVYQLDRFSRNRYDSAVYKNKLKKNGVRVLSAKENIRDDPSGIILESVIEGYAEYYSAELSQKVTRGMTDNLLEKKWTGGLVPLGYRTKKDGTLAIDPAGAAAVTSSYKQFIAGRTVPQIIDHLNEHNYRTTMGTRFNRNSLSRVLRNKIYTGTFSWGGTEYPDFAPRIISDATYQAAQDIFNARKKKSGQEVVWRRRPDAYALTGKIYCGVCGMAMTGMAGRSRSGEMYHYYRCSSKNNSKEKARREKIVCSSRSVNRDKLESLILDTTVQILSSPEALHCIAEQAVKAQENAPQAEEVKRLELLIGDIEKRLQNSIRAIESGIISDTIARNIRQYEDELAELKTQLETAKLDTGFKITAEAVEYFLKEMVKKNDRYKLDTFQAFIRRIVITGDKVEIYYNYHAVPNILKNPVNKMLTGCSSSIAMVTR

SEQ ID NO: 5606 - protein, 503 aa, Unknown
  Description of Unknown: Integrase B5607 sequence
  cd03768,PTHR30461:SF3,SM00857,IPR036162,PF13408, IPR025827,PS51737,G3DSA:3.40.50.1390,IPR006119,PF07508, IPR011109,SSF53041,PTHR30461,PS51736,Coil, PF00239
MDLIYARQSVDKEDSISIESQIELCLRENTSGEHKIFKDKGYSGKNTERPAFQEMMSWIRRGGVERVIVYRLDRISRSVLDFAGLINEFQRYGVEFVSITERFDTSTPIGKAMLMIVMIFAQLERETIQQRVIDAYKSRSRKGFYMGGRVPYAFKLKGIVMDGIKTSMYEAIPEEIEVVKLIYSLYSEPQTSFSDVMKYLKDNNIKNSSGKAFSRNRIRDIVINPIYVKADDRIFEFFQEQGAEIVNDISQFIGTNGAYFYTGDKTLKRKAISILGHVLVLAPSEGCVDSDTWLKCRTKCLNVRQMAKPVKAKNTWLAGKIKCMNCGYSLSLRENKRKRKESSRYYVCSRKYVAMDCDGIGAVSAEKVEDIVFFEMREKLKEFGELQLHEKPESTLQLTKLKVRADQIEKEIDTLVEKIPTASKATMGYINKKIDELDEEHSRLKKEIADMSADIYGKKDVGVIKNYLNNWESISISDKITVVDALIESVRVNQDTVDIVWKI

SEQ ID NO: 5607 - protein, 503 aa, Unknown
  Description of Unknown: Integrase B5608 sequence
  PTHR30461:SF3,cd00338,SM00857,G3DSA:1.10.10.2600,IPR036162, PF13408,IPR025827,PS51737,G3DSA:3.40.50.1390,IPR006119, IPR038109,PF07508,SSF53041,IPR011109,PTHR30461, PS51736,Coil,PF00239
MLRAALYGRFSSDNQREESIMAQFRDSEEYCKKKNYCIVARYADEAKSGTTTVGRDRYNQMLDDARRGLFDVIVFHKVDRNARNEFDYYMTKHKLQQVGVRYEYSKQDINATTPEGQMMESMLVGMAAYYSRNLSNEIKKGLRENVLQGKHAGGPVPYGFLTDENKKYIINEKEAPAVRMIFNLYVAGVHYGTIRKKLFNAGYRNRAGREFTTAGIYEILRNRKYVGDLYLGKTLFRKGKRNSHRTSADVRYYENVIPAIIPRSLFMEVQEKMNRNRRRTGSGNAKTVYALSGLIFCGRCGSAMVAHSTKNSRGVKNYYYRCPKGRLVGDEKCHQKFVNRDKIEAAVYNLIRDTFTSPNAHDRIKEVISKNKIKINPEDYTEQIKRLKQQEAADVRSLDRLYDIYMAEQEDEFTISKMKKLKEGILRLRNQIEELETRQKIVQSEKFDIDRVIDTFQKQLKQKQSPEFIQTLFQLAIKSVTIYPDKIQVALLVTQERFELPTP

SEQ ID NO: 5608 - protein, 503 aa, Unknown
  Description of Unknown: Integrase B5609 sequence
  PTHR30461:SF3,cd00338,SM00857,G3DSA:1.10.10.2600,IPR036162, PS51737,G3DSA:3.40.50.1390,IPR006119,IPR038109,PF07508, SSF53041,IPR011109,PTHR30461,PS51736,Coil, PF00239
MGGRAAIYARFSSHNQRGESIEIQVEKSRAYCAENDLRVVATYCDFAQTGTNTDRAEFQRMMADAKRGLFDFVVIYKVTRIMRNRDEMAMARIMLRRCRVEILYAGEDISDGSAGVLQLGMLEVLAEYESALDGERIRDGIQKNAERCMANGCVRYGWDIVDGRYVVNEEEAAAIRLGVRMVLSGKSVADVVRAWEPYRTKRGGKWRFQTVRRILMRRENGGEYRYAGVVVPGGMPAIVPMDDEERVIRMLEDSHRPRAKTETWDFPLTGRLYDGRDGGLMTGTSGTGKSGRPYHYYRCRSCGRTVRRDVVEKRVADAVREALGSADSRERIARMLADAEEERADEKPLSETVKGELAKIETAFSNIWAAIESGIAPPGGKERIDALKQRQALLKDELRTAEALEAARLDYDRALFWLEGMAAAEVDDAQLLRTFVARVVLGGPDDDDGLRVAFTFDDSAGLGDNPSLPGAIGPGGEVFDRMNASSTISNRQVDIRIYLSFYF

SEQ ID NO: 5609 - protein, 503 aa, Unknown
  Description of Unknown: Integrase B5610 sequence
  SM00857,G3DSA:1.10.10.2600,IPR036162,PF13408,IPR025827, G3DSA:3.40.50.1390,PS51737,IPR006119,IPR038109,PF07508, IPR011109,SSF53041,PF00239,PTHR30461,PS51736, Coil,cd00338
MYAMYLRKSRADDPHESIEETLRKHEKILFDLANKLNIKRSEIVQFKEVVSGENLKNRPEAQKMLKLVMENAFEGVLVVDSQRLARGDTLDQGTIIRAFSLNNTKIITPGKTINPGDEIDQDYFEFDLFMGRREYKMINKRMQRGRNISVQEGNYVGSIAPYGYKKTKIGKCHTLKINEDEIDCFNKMKELALNGLGCTSISNELNRLGFKPRKSKLWTTNAVRDILLNKTNLGLIKWNTRKSVKLYKNDEIIKSRPRNEEAEYYPGKHPAIITQVEYDAIVENIKNRARPVKKDKKLQNPLAGVVYCGKCGKAMIRRSYNNGYRDGLICTNTHCNNVSSVLEVVEKRVLESLEDTLKEYRQFIDNYHNDKTKTNNDSLIIKTEKEINKIDSQINKACEMLEVGAYSVELFKERKTLLDNQKKALIDKIEALKKEDTDFKLQNYINAVPILENAIKLYWNSSVEEKNKLLKQIVKRCDYLKSERGKRNGKGVYNFKLNIYLKI

SEQ ID NO: 5610 - protein, 503 aa, Unknown
  Description of Unknown: Integrase B5611 sequence
  PTHR30461:SF3,cd00338,SM00857,G3DSA:1.10.10.2600,IPR036162, PS51737,G3DSA:3.40.50.1390,IPR006119,IPR038109,PF07508, IPR011109,SSF53041,PTHR30461,PS51736,Coil, PF00239
MGGRAAIYARFSSHNQRGESIEIQVQKSRAYCAENDLRVVATYCDFAQTGTNTDRAEFQRMMADAKRGLFDFVVIYKVTRIMRNRDEMAMARIMLRRCRVEILYAGEDISDGSAGVLQLGMLEVLAEYESALDGERIRDGIQKNAERCMANGCVRYGWDIVDGRYVVNEEEAAAIRLGVRMVLSGKSVADVVRAWEPYRTKRGGKWRFQTVRRILMRRENGGEYRYAGVVVPGGMPAIVPMDDEERVIRMLEDSHRPRAKTEAWDFPLTGKLYDGRDGGLMTGTSGTGKSGRPYHYYRCRSCGRTVRRDVVEKRVADAVREALGSADSRERIARMLADAEEERADEKPLSETIKGELAKIETAFSNIWAAIESGIAPPGGKERIDALKQRQALLKDELRTAEALEAARLDYDRALFWLEGMAAAEVDDAQLLRTFVARVVLGGPDDDDGLRVAFTFDDSAGLGDNPSLPGAIGPGGEVFDRMNASSTIGNRQVEKCLYLPFYF

SEQ ID NO: 5611 - protein, 503 aa, Unknown
  Description of Unknown: Integrase B5612 sequence
  PTHR30461:SF3,SM00857,G3DSA:1.10.10.2600,IPR036162,PF13408, IPR025827,G3DSA:3.40.50.1390,PS51737,IPR006119,IPR038109, PF07508,IPR011109,SSF53041,PTHR30461,Coil, PS51736,cd00338,PF00239
MNKKINAVGYARYSTEFQTDNSIAYQTTAIQEYCEKHDINLLKVYADEAMTGTNTNRPAFQQMLAAAEQHLFDAVIIYDISRGSRNVVDWFSFRQEMARIDIQVISCNQHLGDILDPNTYLTELITAGIGQHMVLDTRKKSIDGKNERAKKGIFCGGNPPLGYDINDGNYIINPKEAKIVQTIFTMYADGHSYNEILKELDEAVGKAGRPLGKNSLYSILKNERYIGVYTWNKRKIKIMGKWAGGRPNPDIVRIENAIPPIIDETIWRKVEERMKDNSRRATSKSCRHNYLLSGLIQCDKCGATFVGHTSTNQKKISTPYYICGNKYRTHTCYTKNINADRLETFVVMQIKHYLKTADFETLADEICKQVNSAAPDVSAEKKELSEIETKITNGINAILGGVNIPELKDEVDKLRIRKSELEDVITYKEKNKTRTLNRDKLVEMLKESAENIDSTDSNTLIRNFVTKIYAHADGTVTVNLGVHINGCGDTQLIICTLKFFIKK

SEQ ID NO: 5612 - protein, 503 aa, Unknown
  Description of Unknown: Integrase B5613 sequence
  PTHR30461:SF3,cd00338,SM00857,G3DSA:1.10.10.2600,IPR036162, PF13408,IPR025827,G3DSA:3.40.50.1390,PS51737,IPR006119, IPR038109,PF07508,IPR011109,SSF53041,PTHR30461, PS51736,Coil,PF00239
MNEYIDRAISGKTDNRPSFQRLIKDSDKGHFDAVIMYTLDRFARNRYDSAIYKAKLKKNGVRVFYAKQPMPDTPEGIILESVLEGYAEYYSENLARSIKRGMKENALHTIAMGSLGLGYKIGEDRKYEIDPVGAKAVRAIFTMYAEGKSKTEIVNWLNEHGFKTSQGNQFNKNSLSRILRNDKYIGVYRYADVVVENAIPPIIDKRLFDKVQALLKHNFASRARNKAKEDYLLSTKLFCGHCGSPMIGESGTSKLGRVYHYYKCSKRKRERDCSKKVEKKDWLEELVVRYTVHHVLTDENIELIATKAMELVEKDLQDTSVLVGLQGMLKDVNKKIKNLMSAIEQGIITSSTKERLEELELERLNIEGQIAREEMKKPLLSKERIVYWLTSFKSGDIQDIEYQRRIIDTLVNSVFVYDDDGNGRRIVLTFNISGNNTLTIECSDIEGIAPPYIEDVVITVAHLPREQEERFESGIFYHFWGTYSNFQKLFMGKRTTVFRILRR

SEQ ID NO: 5613 - protein, 503 aa, Unknown
  Description of Unknown: Integrase B5614 sequence
  PTHR30461:SF3,cd00338,SM00857,G3DSA:1.10.10.2600,IPR036162, PF13408,PS51737,IPR025827,G3DSA:3.40.50.1390,IPR006119, IPR038109,PF07508,SSF53041,IPR011109,PTHR30461, PS51736,Coil,PF00239
MYNDSKGIYLMYLRKSRADEYNQDVENILKRHEKELQSLAKREFGELIPEKYIFREVVSGGTIKDRPLMKEILKMMESGIIAGVLVVDPQRLSRGDLLDQGHIINAFKYTNTLIITPYKTYDLNDTTGTDMKLLKMELNHGADYLDYYKMVQARGKLASVRAGNFIQPIPPFGYRKVRYGKVSTLEPIEDEARIVQIIFQKYAEGKTICGVTNELNAEGYIPPSKQIWTKGSVKRILSNPVYDGKIRWGFTPNKTVMEDGKLKKYRPERHDYLLFDGKHDAIVNHGLFMSVQERLSKNKSFTNDRSLKNPLYGIMYCKRCGRKISRLNVTESRGGHRYACPNKLCDVQSSRYDLVINAVIDAVQCAIDDFDITVHECNVSDSSEKIRGLRQELTKLNSKEETLFELLETKVYSTSIFTQRHAELEKKRQEILGKINTLSLIPPPESCNDKKMRFKDALLALKDESMPPKEKNHLLKKCIERIDYDIEGVRYHSKVKLDVYFKF

SEQ ID NO: 5614 - protein, 503 aa, Unknown
  Description of Unknown: Integrase B5615 sequence
  PTHR30461:SF3,cd00338,SM00857,G3DSA:1.10.10.2600,IPR036162, PF13408,IPR025827,PS51737,G3DSA:3.40.50.1390,IPR006119, IPR038109,PF07508,SSF53041,IPR011109,PTHR30461, PS51736,Coil,PF00239
MLRAALYARFSSENQREESILAQFRDSTEYCKKHGYAIVAKYADEAKSGTTTIGRDQYKLMLKDAQKGKFDIVVFHKIDRNARNELDYYITKHKLEEAGVKYAYSRQDIDSTSPEGQMMESMLVGMAAYYSRNLSNEIKKGLRENAIQGKCTGGRPPYGFSVDSGKKLIINESEASAVRMIFDWYAAGVHYGVIRERLFNAGYRNRSGKEFTIASMYEILRNRKYVGDLYLGKTLFRKGKRNTHRTSANVQYFENVIPAIVSKEIFWEVQDKLDQNKRRSGTGNAKAIYALSGLIHCGQCGSAMVAHSTKNSRGIKNYYYRCPKGRLIGEEKCPQKFINRDDIESTVYQLIRKLFTAPDAHDQIKRIIAKNNMSVKAPDYIEQIKRLKKQESDASKRLDKLYNLYMTDNEDEFTLQKMTQLKEEILKLRVRIKEAEDRQIIAQSATFDIDKIIDTFQKQLKQKQSPEFIKTLFELAVKNVTVYPDKIKVVLLVTQERFELPTP

SEQ ID NO: 5615 - protein, 503 aa, Unknown
  Description of Unknown: Integrase B5616 sequence
  PTHR30461:SF3,SM00857,G3DSA:1.10.10.2600,IPR036162,PF13408, PS51737,G3DSA:3.40.50.1390,IPR025827,IPR006119,IPR038109, PF07508,IPR011109,SSF53041,PF00239,PTHR30461, PS51736,Coil,cd00338
MIAALYARYSSDSQRAESIVAQIRAGREYCRRKGYHIIKEYADEAYTGTNDNRPAYREMLRDAAAGLFEVVIFHKVDRNGRNEFDYYKNKQELARHNVRVEYSGQAFDSTSPEGALMENQLVGLAAYYSRNLSREVKKGLKENVLAGKITGGRPLFGYSVDKNKKYVINEEEAVAVRYIFERYAAGASYIDILREVNARGYRTRRGAEFGKATLHDMLNNRRYIGTCILGKNQPYLDGRRNSHRPDHDGMIIVPNGCPAIISPELFQAVHERMQENRRRGGRRTAKYPYLLSGLVYCGECGASMSGTRTRTRKKEVREYYRCCQKSNHGDAKCPNRYIYAPALENFIIGRLAAVIDNESLLFRLAQKVQEKYDALVGNAQAQIAALQEQEAKASKSLERLYEVIADGDTFDDFDRAQMKHLKQKILDIRAQREKLEQQPGKTIAPAEIVHYIRDRFLPAIRQRTAPGLTELLQYFVHTVTVFRDKIRVEYWFAACRYASERTI

SEQ ID NO: 5616 - protein, 503 aa, Unknown
  Description of Unknown: Integrase B5617 sequence
  PTHR30461:SF3,cd00338,SM00857,G3DSA:1.10.10.2600,IPR036162, PS51737,G3DSA:3.40.50.1390,IPR006119,IPR038109,PF07508, SSF53041,IPR011109,PTHR30461,PS51736,Coil, PF00239
MGGRAAIYARFSSHNQRGESIEIQVEKSRAYCAENDLRVVATYCDFAQTGTNTDRAEFQRMMADAKRGLFDFVVIYKVTRIMRNRDEMAMARIMLRRCRVEILYAGEDISDGSAGVLQLGMLEVLAEYESALDGERIRDGIQKNAERCMANGCVRYGWDIVDGRYVVNEEEAAAIRLGVRMVLSGKSVADVVRAWEPYRTKRGGKWRFQTVRRILMRRENGGEYRYAGVVVPGGMPAIVPMDDEERVIRMLEDSHRPRAKTEAWDFPLTGKLYDGRDGGLMTGTSGTGKSGRPYHYYRCRSCGRTVRRDVVEKRVADAVREALGSADSRERIARMLADAEEERADEKPLSETIKGELAKIETAFSNIWAAIESGIAPPGGKERIDALKQRQALLKDELRTAEALEAARLDYDRALFWLEGMAAAEVDDAQLLRTFVARVVLGGPDDDDGLRVAFTFDDSAGLGDNPSLPGAIGPGGEVFDRMNASSTIRNRQVDIRIYLPFYF

SEQ ID NO: 5617 - protein, 503 aa, Unknown
  Description of Unknown: Integrase B5618 sequence
  PTHR30461:SF3,SM00857,G3DSA:1.10.10.2600,IPR036162,PF13408, IPR025827,G3DSA:3.40.50.1390,PS51737,IPR006119,IPR038109, PF07508,IPR011109,SSF53041,PTHR30461,Coil, PS51736,cd00338,PF00239
MIAALYARYSSDSQRAESIVAQIRAGREYCRRKGYHIIKEYADEAYTGTNDNRPAYREMLRDAAAGLFEVVIFHKVDRNGRNEFDYYKNKQELARHNVRVEYSGQAFDSTSPEGALMENQLVGLAAYYSRNLSREVKKGLKENVLAGKITGGRPLFGYSVDKNKKYVINEEEAVAVRYIFERYAAGASYIDILREVNARGYRTRRGAEFGKATLHDMLNNRRYIGTCILGKNQPHLDGRRNSHRPDHDGMIIVPNGCPAIISPELFQAVHERMQENRRRGGRRTAKYPYLLSGLVYCGECGASMSGTRTRTRKKEIREYYRCCQKSNHGDAKCPNRYIYAPALENFIIERLAAVIDNENLLFRLAQKVQEKYDALVGNARVQIAALQEQETKASKSLERLYEVIADGDTFDDFDRAQMKHLKQKILDIRAQREKLEQQPGKTISSAEIVRYIRDRFLPAIRQRTASGITELLQYFVHTVTVFRDKIRVEYWFASCRYSSERTT

SEQ ID NO: 5618 - protein, 503 aa, Unknown
  Description of Unknown: Integrase B5619 sequence
  PTHR30461:SF3,cd00338,SM00857,G3DSA:1.10.10.2600,IPR036162, PS51737,G3DSA:3.40.50.1390,IPR006119,IPR038109,PF07508, SSF53041,IPR011109,PTHR30461,PS51736,Coil, PF00239
MVGRAAIYARFSSHNQRGESIEIQVEKSRAYCAENDLRVVATYCDFAQTGTNTDRAEFQRMMADAKRGLFDFVVIYKVTRIMRNRDEMAMARIMLRRCRVEILYAGEDISDGSAGVLQLGMLEVLAEYESALDGERIRDGIQKNAERCMANGCVRYGWDIVDGRYVVNEEEAAAIRLGVRMVLSGKSVADVVRAWEPYRTKRGGKWRFQTVRRILMRRENGGEYRYAGVVVPGGMPAIVPMDDEERVIRMLEDSHRPRAKTEAWDFSLTGKLYDGRDGGLMTGTSGTGKSGRPYHYYRCRSCGRTVRRDAVEKRVADAVREALGSADSRERIARMLADAEEERADEKPLSETIKGELAKIETAFSNIWAAIESGIAPPGGKERIDALKQRQALLKDELRTAEALEAARLDYDRALFWLEGMAAAEVDDAQLLRTFVARVVLGGPDDDDGLRVAFTFDDSAGLGDNPSLPGAIGPGGEVFDRMNASSTISTRQVDTYIYLPFYF

SEQ ID NO: 5619 - protein, 503 aa, Unknown
  Description of Unknown: Integrase B5620 sequence
  PTHR30461:SF3,cd00338,SM00857,G3DSA:1.10.10.2600,IPR036162, PF13408,IPR025827,PS51737,G3DSA:3.40.50.1390,IPR006119, IPR038109,PF07508,SSF53041,IPR011109,PTHR30461, PS51736,Coil,PF00239
MSKLAVIYARFSSDKQREESIEGQIRECTAFADANDIKIVGTYIDRAMSARTDKRPDFLRMIADSAKGVFEYVLVYQLDRFSRNRYDSAVYKNKLKKNGVRVLSAKENIRDDPSGIILESVIEGYAEYYSAELSQKVTRGMTDNLLEKKWTGGLVPLGYRTKKDGTLAIDPAGAAAVTSSYKQFIAGRTVPQIIDYLNEHNYRTTMGTRFNRNSLSRVLRNKIYTGTFSWGGTEYPDFAPRIISDTTYQAAQAIFNARKKNSGKEVVQRRRPDAYALTGKIYCGICGMAMTGMAGRSRSGEMYHYYRCSSKNNSKEKARREKIVCSSRSVNRDKLESLILDTTVQILSSPEALHCIAEQAVKAQENAPQAAEVKRLELLIGDIEKRLQNSIRAVESGIISDTIVRNIRQYEDELAELKTQLETAKLDTGFKITAEAVEYFLKEMVKKNDRYKLDTFQAFIRRIVITGDKVEIYYNYHSVPNILKNPVNKMLTGCSSSIAMVTR

SEQ ID NO: 5620 - protein, 503 aa, Unknown
  Description of Unknown: Integrase B5621 sequence
  PTHR30461:SF3,cd00338,SM00857,G3DSA:1.10.10.2600,IPR036162, PF13408,PS51737,IPR025827,G3DSA:3.40.50.1390,IPR006119, IPR038109,PF07508,IPR011109,SSF53041,PTHR30461, PS51736,Coil,PF00239
MSKLAVIYARFSSDKQREESIEGQIRECTAFADANDIKIVGTYIDRAMSARTDKRPDFLRMITDSAKGVFEYVLVYQLDRFSRNRYDSAVYKNKLKKNGVRVLSAKENIRDDPSGIILESVIEGYAEYYSAELSQKVTRGMTDNLLEKKWTGGLVPLGYRTKKDGTLAIDPAGAEAVTSSYKQFIAGKTVPQIIDYLNEHNYRTTMGTRFNRNSLSRVLKNKIYTGTFSWGGTEYPEFAPRIISDATYQAAQAIFNARKKNSGKEVVHRRCPDVYALTGKIYCGICGMAMTGMVGRSRSGEMYHYYRCSSKNNSKEKARREKIVCSSRSVNRNKLESLVLDTTIQILNTPEALHCIAEQAVKAQENAPQAEEIKRLELIISDTEKRLQNSIRAVESGIISDTIARNINQYEEDLESLKKQLETAKLDTGFKITADAVEYFLKEMVKKNDRYKLDTFQAFIRRIVITGDKVEIYYNYHAVPNILKNPVNKMLTGCSSSIAMVTR

SEQ ID NO: 5621 - protein, 503 aa, Unknown
  Description of Unknown: Integrase B5622 sequence
  PTHR30461:SF3,cd00338,SM00857,G3DSA:1.10.10.2600,IPR036162, PS51737,G3DSA:3.40.50.1390,IPR006119,IPR038109,PF07508, SSF53041,IPR011109,PTHR30461,PS51736,Coil, PF00239
MSKKQKLICAMYLRKSRADSDVDTVEETLTRHEEILKEFLTHHPELELKRTYKDVVSGDSIYARPQMLELMQDIESGLYNAVLCMDIDRLGRGATSEQGFILETFKINNIKIITPRKVYDLNNELDEEYAEFESFMARRELKLIKRRLHTGTLKSISEGCHLCVPPYGYARDYKDKKSTLKIVEEEAKFVRIIFDMYCSGIGAATIAETISNMGAVPHRSDKFCRTSIIKIIKNPNYIGKIVWNTKKSIKKGQNGAKKNYVIYNPQDQWKIVDGLHPPIISEDVFYKANEILKSRYRKPYQDGKLLNPLSQILRCRVCGEFMQRRPYKDRKEPEHLLCPTKGCCCSSRLDRVEMAVIDAVEKKLNELKSNKYNPPKHKDYSAMISSLEHELNTLKNQSERLHDFLEKGVYDIDTFLERRDKLQNRIEQVQDQLIMLKEKNKENNNIDIAEIIKQFENVLNLYWDSTPDSQNKLLNSIIDGGTYYKEKGWKPNQFIIKLRFKNC

SEQ ID NO: 5622 - protein, 503 aa, Unknown
  Description of Unknown: Integrase B5623 sequence
  PTHR30461:SF3,cd00338,SM00857,G3DSA:1.10.10.2600,IPR036162, PF13408,IPR025827,PS51737,G3DSA:3.40.50.1390,IPR006119, IPR038109,PF07508,IPR011109,SSF53041,PTHR30461, PS51736,Coil,PF00239
MLRAALYARFSSENQREESILAQFRDSTEYCKKHNYAIVAKYADEAKSGTTTIGREQYKLMLKDAQKGKFDIVVFHKIDRNARNELDYYITKHKLEEAGVKYAYSRQDIDSTSPEGQMMESMLVGMAAYYSRNLSNEIKKGLRENAIQGKCTGGRPPYGFSIDANKKLIINENEAPAVRVIFDWYSAGVHYGVIRKRLFNAGYRNRAGKEFTIASIYEILRNRKYVGDLYLGKTLFRKGKRNTHQTSANVQYFENVIPAIVSREIFEEVQVKLDRNKRRSGAGKAKAIYALSGLIYCGKCGSAMVAHSTKNSRGIKNYYYRCPKGRLVGDEKCPQKFINRDDIEETVYQLIRKLFTAPDAHDQIKRIIAKNNMGVKVPDYTDQVKRLKKQESDASKRLDKLYDLYMTDREDEFTSAKMAQIKEEILRLRTQIKEAEDRQAIAQSTTFDIDKIIDTFQKQLKQKQSPEFIKTLFELAVKNVTVYPDKIKVVLLVTQERFELPTP

SEQ ID NO: 5623 - protein, 503 aa, Unknown
  Description of Unknown: Integrase B5624 sequence
  cd00338,SM00857,G3DSA:1.10.10.2600,IPR036162,PF13408, IPR025827,G3DSA:3.40.50.1390,PS51737,IPR006119,IPR038109, PF07508,IPR011109,SSF53041,PTHR30461,PS51736, Coil,PF00239
MYAMYLRKSRADDPHESIEETLRKHEKILFDLANKLNIKRSEIVQFKEVVSGENLKNRPEAQKMLKLVMENAFEGVLVVDSQRLARGDTLDQGTIIRAFSLNNTKIITPGKTINPGDEIDQDYFEFDLFMGRREYKMINKRMQRGRNISVQEGNYVGSIAPYGYKKTKIGKCHTLKINEDEIDCFNKMKELALNGLGCTSIANELNRLGFKPRKSKLWTTNAVRDILLNKTNLGLIKWNTRKSVKLYKNDEIIKSRPRNEEAEYYPGKHPAIITQVEYDAIVENIKNRARPVKKDKKLQNPLAGVVYCGKCGKAMIRRSYNNGYRDGLICTNTHCNNVSSVLEVVEKRVLESLEDTLKEYRQFIDNYHNDKTKTNNDSLIIKTEKEINKIDSQINKACEMLEVGTYSVELFKERKTLLDNQKKALIDKIEALKKEDTDFKLQNYINAVPILENAIKLYWNSSVEEKNKLLKQIVKRCDYLKSERGKRNGKGMYNFKLNIYLKI

SEQ ID NO: 5624 - protein, 503 aa, Unknown
  Description of Unknown: Integrase B5625 sequence
  PTHR30461:SF3,SM00857,G3DSA:1.10.10.2600,IPR036162,PF13408, IPR025827,G3DSA:3.40.50.1390,PS51737,IPR006119,IPR038109, PF07508,IPR011109,SSF53041,PF00239,PTHR30461, PS51736,Coil,cd00338
MNGVIYARYSSDRQTEQSIEGQLRECQEYADANNIKIVGTYIDRAKTGRNDNRAGFQKMLRDSKQKFFDAVIVWKIDRFGRNREDIAKNKAILRRNGVSVLYAKEHIPEGAEGIILEGLLESLAEYYSAELREKITRGMRESAYKCQFNGSGLSIGYSVDKEHKFHIDPDGAKIVHLLFDMYDDGKTVAEILRHIKSCGIKTRRGKEFTHFGITRILRNRQYIGEYRWHDIVIPGGMPRIISDEQFERVNREMDKNKKAPARARGEDVSFLLTGKIFCGLCKGTMIGDSGTGKSGNKYYYYSCRAKKTRHTCKKKSVQKEWLEREVVRLTSSVVLQDDVIEYIADRVVDIQQKEREDKSIIDYLNNRLSETESAIRNIMKAIEAGIITETTGARLRELEAEREDLKIEIEREKIARPVISREQAIYFLERFKGGDVDDKEYQRQIIDMFVNKIFLYDDKIIITYNYNGDNNEITSEIVEKSAEEALSSASDRCSDKRTSRPPL

SEQ ID NO: 5625 - protein, 503 aa, Unknown
  Description of Unknown: Integrase B5626 sequence
  SM00857,G3DSA:1.10.10.2600,IPR036162,PF13408,IPR025827, G3DSA:3.40.50.1390,PS51737,IPR006119,IPR038109,PF07508, IPR011109,SSF53041,PF00239,PTHR30461,PS51736, Coil,cd00338
MYAMYLRKSRADDPHESIEETLRKHEKILFDLANKLNIKRSEIVQFKEVVSGENLKNRPEAQKMLKLVMENAFEGVLVVDSQRLARGDTLDQGTIIRAFSLNNTKIITPGKTINPGDEIDQDYFEFDLFMGRREYKMINKRMQRGRNISVQEGNYVGSIAPYGYKKTKIGKCHTLKINEDEIDCFNKMKELALNGLGCTSISNELNRLGFKPRKSKLWTTNAVRDILLNKTNLGLIKWNTRKSVKLYKNDEIIKSRPRNEEAEYYPGKHPAIITQVEYDAIVENIKNRARPVKKDKKLQNPLAGVVYCGKCGKAMIRRSYNNGYRDGLICTNTHCNNVSSVLEVVEKRVLESLEDTLKEYRQFIDNYHNDKTKTNNDSLIIKTEKEINKIDSQINKACEMLEVGAYSVELFKERKTLLDNQKKALIDKIEALKKEDTDFKLQNYINAVPILENAIKLYWNSSVEEKNKLLKQIVKRCDYLKSERGKRNGKGMYNFKLNIYLKI

SEQ ID NO: 5626 - protein, 503 aa, Unknown
  Description of Unknown: Integrase B5627 sequence
  PTHR30461:SF3,SM00857,G3DSA:1.10.10.2600,IPR036162,PF13408, PS51737,G3DSA:3.40.50.1390,IPR025827,IPR006119,IPR038109, PF07508,IPR011109,SSF53041,PF00239,PTHR30461, PS51736,Coil,cd00338
MQQAVIYARYSPGPNQTEQSIEGQVRECTKYAELHDLRIVGTYIDRKISGKTDNRREFQRMIDDSEKHIFDVIILYHTDRFARNRYDSAIYKHKLKENGVELRYATTDIPKGPEGIILESIMEGWAEYYSAELSRKIKRGMRESALKCHSTGAGRCLGYRTAEDKSLVIEPEGAKAVQTVFDMYIKGKSHADICRYLNDCGFRTAQGKLFNKNSVTHIIRNKRYIGVYTYDDITIEDGIPAIISKDTFHLAQLEAARRKTAKRPKEPKAEYLLSGKAFCGHCQKPLVGVSGTGKSGNKWYYYYCQESRAKRGCTKKPVKRDWLEREVVKRTIAEVLQPEVIQHIAKKCYDLQMEYRQDNSDVLFYELKLKDVRKAIKNTMHAIESGVKTKTLPARLQELENEEEALEAELAIAKASDFVITADQIEFLLTQFAEPWECESEEEYHRRIIKCFVHKVFLFDDKLLIYYNVSRDGKTREQSEAELLEEALGEGFDKRSSGSTKTI

SEQ ID NO: 5627 - protein, 503 aa, Unknown
  Description of Unknown: Integrase B5628 sequence
  PTHR30461:SF3,SM00857,G3DSA:1.10.10.2600,IPR036162,PS51737, G3DSA:3.40.50.1390,IPR006119,IPR038109,PF07508,IPR011109, SSF53041,PTHR30461,Coil,PS51736,cd00338, PF00239
MKTCIYLRKSRADEELEKKEDVDTLARHRSTLLEIAKKQDLNVVEIKEEIVSGDSIAKRPKMTQLLEEVKENMYDAVLCMDIDRLGRGDMQDQGKIINTFKESKTLIITPDKTYDLNNDLDEEMTEFKTFFARRELKVITKRMQRGRVKSIEEGNFIGSTAPLGYKFRYDEYGKRHMIIDEETAPAIKLIFDMYLNGEGSFKIMKKLNTLGYRTATGQEFTENAVRRIIKNRTYCGYVTWFEYKRKGTKTRKNKESDMLVCKGKHKPIISEEDWNKAQEIRKNHSIPATKNSRKLVNPLAGIVKCSQCKRTMVNTLSTYKSGNYANFIACKKCYGVGASKLEVVEGEILNALELKLQEIKKELNSTNLEVEKNESLNILEKTLTSLKNEEKELDKQKNKLHDLLERGVYDVDTFLERQQTLAGKKEEIQTAIKGTEKLINTERNNNIDYETLAKNIECALKDYKETDNIELKNKALKSVIKEVIYYKPKERLAQITLEVKFKI

SEQ ID NO: 5628 - protein, 503 aa, Unknown
  Description of Unknown: Integrase B5629 sequence
  SM00857,G3DSA:1.10.10.2600,IPR036162,PF13408,IPR025827, G3DSA:3.40.50.1390,PS51737,IPR006119,IPR038109,PF07508, IPR011109,SSF53041,PTHR30461,Coil,PS51736, cd00338,PF00239
MAKPEVSELAVVYARYSSHSQGEQSIEGQLSNARDYAAAHGYTIVHEYVDRAKSGRTDNRAEFQQMLKDTAKRQFSVIILWKVDRFGRNREEIAINKMKCRKNGVRVEYVAETIPDSPEGVILESVLEGFAEYYSLQLSQNIRRGRAESAEKCQSLGGNRPLGYKTGPDKKFIIDENTAPTVKMIFTMYADGKTVTEIVDKLNEMGLRTLRGGPFTKNSLHSILKNKKYIGIYEYQGREIKNGVPRIIEDDVFNKVQEMLKINKRAPAKTWSRADYILTDKLFCGKCGALMFGESGTSKTGAKHNYYICSNKKRFRSCDKKAMRQADIEDTVLNATHELLQDDELLDYIVDRTWEYYLAQDNSQEELRNLQRQLAQTDTAISNLIRAIEAGILTEETKKRMDELTQQKADLKASIADREIARGFHLQKSHIAFYLRSLRDADWSDKEAQKRLIQTFVNAVFVYDDHITLTYNFSGDKSTVTLRDMQRFEDGEEFGCRASRSTK

SEQ ID NO: 5629 - protein, 503 aa, Unknown
  Description of Unknown: Integrase B5630 sequence
  cd03768,PTHR30461:SF3,SM00857,G3DSA:1.10.10.2600,IPR036162, PF13408,PS51737,G3DSA:3.40.50.1390,IPR025827,IPR006119, IPR038109,PF07508,IPR011109,SSF53041,PTHR30461, PS51736,Coil,PF00239
MNAVYTRQSLDVKDSLSIESQLDACLNENGSAEYQHYNDKGYSGKNTERPAFRQLMADVRKGTIERVIVYRLDRLSRSLLDFAEMIDVFKKKDVEFVSCREKFDTSTPIGNAMLSIIMVFAQLERETIQMRVKDNYATRMERGAYDGVAPYGFDKAITKVGDKQVHTLDVNEVSDTVRSMFNEYAYTGDSLGAIAKKLNAQGIPSPGEAPWDGGKISRILSNPIYVRANADIYAYYNALGMTITNPIEDFLAVNGCITYGGWERSRRKFSQYDRLKLSIGLHPGLVDSDTFLRCQTKLKANRQICNAGKGKHSWLTGMVKCGYCGHSLKVMVDQKGRGIKRFVCSGNTNCGICSQFGSQRVDELEAGVEHELMQMVERRKYIEAKIEMERDTEESRIKIEQTKISEKLNRLVDALAEGEPSSASAVMKKIAELEEKKKLLEVELRSHRAKLPSQQELLQFRDTARLWPHMTIQQKHDVAKLLIDKIEVKCGEIQIYWKYNFEL

SEQ ID NO: 5630 - protein, 503 aa, Unknown
  Description of Unknown: Integrase B5631 sequence
  cd00338,SM00857,G3DSA:1.10.10.2600,IPR036162,PF13408, IPR025827,PS51737,G3DSA:3.40.50.1390,IPR006119,IPR038109, PF07508,IPR011109,SSF53041,PTHR30461,PS51736, Coil,PF00239
MYAMYLRKSRADDPHESIEDTLRKHEKILFDLANKLNIKKDEIVQFKEVVSGENLKNRPQAQKMLKLVMENAFEGVLVVDSQRLARGDTLDQGTIIRAFSLNNTKIITPGKTINPGDEIDQDYFEFDLFMGRREYKMINKRMQRGRNISVQEGNYVGSIAPYGYKKTKIGKCHTLKINEDEIDCFNKMKELALNGLGCTSIANELNRLGFKPRKSKLWTTNAVRDILLNKTNLGLIKWNTRKSVKLYKNDEIIKSRPRNEEAEYYPGKHPAIITQVEYDAIVENIKNRARPVKKDKKLQNPLAGIVYCGKCGKAMIRRSYNNGYRDGLICTNTHCNNVSSVLEVVEKRVLESLEDTLKEYRQFIDNYHNDKTKTNNDSLIIKTEKEINKIDSQINKACEMLEVGAYSVELFKERKTLLDNQKKALIDKIEALKKEDTDFKLQNYINAVPILENAIKLYWNSSVEEKNKLLKQIVKRCDYLKSERGKRNGKGMYNFKLNIYLKI

SEQ ID NO: 5631 - protein, 503 aa, Unknown
  Description of Unknown: Integrase B5632 sequence
  PTHR30461:SF3,SM00857,G3DSA:1.10.10.2600,IPR036162,PF13408, IPR025827,G3DSA:3.40.50.1390,PS51737,IPR006119,IPR038109, PF07508,SSF53041,IPR011109,PTHR30461,Coil, PS51736,cd00338,PF00239
MAKPEVSELAVVYARYSSHSQGEQSIEGQLSNARDYAAAHGYTIVHEYVDRAKSGRTDNRAEFQQMLKDTAKRQFSVIILWKVDRFGRNREEIAINKMKCRKNGVRVEYVAETIPDSPEGVILESVLEGFAEYYSLQLSQNIRRGRAESAEKCQSLGGNRPLGYKTGADKKFVIDENTAPTVKMIFTMYADGKTVTEIVDKLNELGLRTLRGGPFTKNSLHSILKNKKYIGIYEYQGREIKDGVPRIIEDDVFNKVQEMLKINKRAPAKTWSRADYILTDKLFCGKCGALMFGESGTSKTGVKHNYYICSNKKRFRSCDKKAVRQADIEDAVLNATHELLQDDELLDYIVDRTWEYYLAQDNSQEELRNLQRQLAQTDTAISNLIRAIEAGILTEETKKRMDELTQQKADLKASIADREIARGFHLQKSHIAFYLRSLRDADWSDKEAQKRLIQTFVNAVFVYDDHITLTYNFSGDKSTITLHDMQRFEDGEEFGCRASRSTR

SEQ ID NO: 5632 - protein, 503 aa, Unknown
  Description of Unknown: Integrase B5633 sequence
  PTHR30461:SF3,SM00857,G3DSA:1.10.10.2600,IPR036162,PF13408, PS51737,G3DSA:3.40.50.1390,IPR025827,IPR006119,IPR038109, PF07508,IPR011109,SSF53041,PF00239,PTHR30461, PS51736,Coil,cd00338
MQRAVIYARYSPGPNQTEQSIEGQVRECTKYAELHDLRIVGTYIDRKISGKTDNRREFQRMIDDSEKHIFDVIILYHTDRFARNRYDSAIYKHKLKENGVELRYATTDIPKGPEGIILESIMEGWAEYYSAELSRKIKRGMRESALKCHSTGAGRCLGYRTAEDKSLVIEPEGAKAVQTVFDMYIKGKSHADICRYLNDCGFRTAQGKLFNKNSVTHIIRNKRYIGVYTYDDITIEDGIPAIISKDTFHLAQLEAARRKTAKRPKEPKAEYLLSGKAFCGHCQKPLVGVSGTGKSGNKWYYYYCQESRAKRGCTKKPVKRDWLEREVVKRTVAEVLQPEVIQHITKKCYDLQMEYRQDNSDVLFYELKLKDVRKAIKNTMHAIESGVKTKTLPARLQELENEEEALEAELAIAKASDFVITADQIEFLLTQFTEPWECESEEEYHRRIIKCFVHKVFLFDDKLLIYYNVSRDGKTREQSEAELLEDALGEGFDKRSSGSTKTI

SEQ ID NO: 5633 - protein, 503 aa, Unknown
  Description of Unknown: Integrase B5634 sequence
  PTHR30461:SF3,SM00857,G3DSA:1.10.10.2600,IPR036162,PS51737, G3DSA:3.40.50.1390,IPR006119,IPR038109,PF07508,IPR011109, SSF53041,PF00239,PTHR30461,PS51736,Coil, cd00338
MANAVIYARYSSAGQREESIEDQVRVCRQAAERDGAAIARVYHDAATTGRTAEGRDGFLRMVADARRGLFDVVYVYKLDRFARNRYDAAVYKAKLRRCGVELRSATEAVGDGPESILLESMLEGLAEYYSVALAENVKRGQLGNAMKCKHNGVRTYGYDLGEDGYYHVNEEEAAVVRRMFRMYADGASMPEIAAAMPEARTKMGKPLSVGFISKSLRLEKYRGVYSYGQTRVEGGMPAIVDGELFEGVQGMLAARARRRRSTMEYLLSGKLFDAEGHRYQSSSGHGKSGRKYTYYRCPATGHQVPQHVLEDAVAKAAADVIAADDDAVEAIVAMVMAAQAEEMADSIAAADATRKRLEQNAREQSRVVDLAAKTGAVDAVAAKLGQLADEREELEASLAEMELSCAMVDEERAEFWVRRLMGRSDPLEAVRLFVDRVVLDREAGEMRVAFSFDGIKKNPHQAESDGGSRNCRLAGHSLLIANTMVHVTAWGFVAAVRLPMLGA

SEQ ID NO: 5634 - protein, 503 aa, Unknown
  Description of Unknown: Integrase B5635 sequence
  PTHR30461:SF3,SM00857,G3DSA:1.10.10.2600,IPR036162,PF13408, IPR025827,PS51737,G3DSA:3.40.50.1390,IPR006119,IPR038109, PF07508,IPR011109,SSF53041,PF00239,PTHR30461, PS51736,Coil,cd00338
MNNICIYLRKSRADEELEKTLGNGETLIKHRKALLKFAKQKNLNIVEIKEELVSADSIFHRPKMVELLQEVENNQYSGVLVMDIQRLGRGDTEDQGVITRIFKESHTKVITPNKTYDLDDDYDEDYFEFESFMGRKEYKMIKKRMQGGRIRSIEDGNYIATNPPLGYDIHFINRSRTLKINENEAEIIKTIFNMYINGNGASSISNYLNSLGYKTKIGNSFSPSSVLMIIKNPVYIGKVTWKKKEIKKSKDPNKVKDTRTRDKSEWLVADGKHEAIIDIDIWNRTQEILNNRYHIPYQLTNAPVNPFAGLITCGICGKKMTMRKLRGIDRLMCTYKCGNRSIRFEHVEKEVLKSLRSYLEEYKMEVNRKPKKNDIDLYVKQITLLNKELNTLNNQKLKLFDFLERGIYSEDVFLERSKNIESRITTLSNEIENLEKLIKKEEKTISQNSIVVFENIIDAYEKTNDISLKNRLLKQIVYKIEYFKRPDQRNNDFKVVISPKLLR

SEQ ID NO: 5635 - protein, 503 aa, Unknown
  Description of Unknown: Integrase B5636 sequence
  PTHR30461:SF3,SM00857,G3DSA:1.10.10.2600,IPR036162,PF13408, PS51737,G3DSA:3.40.50.1390,IPR025827,IPR006119,IPR038109, PF07508,IPR011109,SSF53041,PF00239,PTHR30461, PS51736,Coil,cd00338
MQQAVIYARYSPGPNQTEQSIEGQVRECTKYAELHDLRIVGTYIDRKISGKTDNRREFQRMIDDSEKHIFDVIILYHTDRFARNRYDSAIYKHKLKENGVELRYATTDIPKGPEGIILESIMEGWAEYYSAELSRKIKRGMRESALKCHSTGAGRCLGYRTAEDKSLVIEPEGAKAVQTVFDMYIKGKSHADICRYLNDCGFRTAQGKLFNKNSVTHIIRNKRYIGVYTYDDITIEDGIPAIISKDTFHLAQLEAARRKTAKRPKEPKAEYLLSGKAFCGHCQKPLVGVSGTGKSGNKWYYYYCQESRAKRGCTKKPVKRDWLEREVVKRTVAEVLQPEVIQHIAKKCYDLQMEYRQDNSDVLFYELKLKDVRKAIKNTMHAIESGVKTKTLPARLQELENEEEALEAELAIAKASDFVITADQIEFLLTQFAEPWECESEEEYHRRIIKCFVHKVFLFDDKLLIYYNVSRDGKTREQSEAELLEEALGEGFDKRSSGSTKTI

SEQ ID NO: 5636 - protein, 503 aa, Unknown
  Description of Unknown: Integrase B5637 sequence
  PTHR30461:SF3,cd00338,SM00857,G3DSA:1.10.10.2600,IPR036162, PF13408,IPR025827,G3DSA:3.40.50.1390,PS51737,IPR006119, IPR038109,PF07508,IPR011109,SSF53041,PTHR30461, Coil,PF00239
MKNGFTIINEYCDRAISGKTDNRPSFQRLIKDSEKGQFEAVIMYTLDRFARNRYDSAIYKAKLKKNGVRVFYAKQPMPDTPEGIILESVLEGYAEYYSENLSRNIKRGMKENALQCVANGGAGMALGYTVGEDRRYVIEPVGAKIVQEIFQMYADGMSATQIINYCNERGYKTSRGNAFNKNSLRTMLKNDKYIGVYRFMDVVVPDGVPPIIDKALFEKVQTMLSHNAKARARTKAKEDYLLTTKLFCGHCGSAMVGESGTSKSGKLHYYYKCIDRKRNRKCTKKVEKKEWIEELVTRFTVERVLTDENIELIATRAMEIIEKESADMSYVDGLREQVKDIKKKIRNLMTAIEQGIITSTTKERLEELETQKNEVEGQIAREEMKKPLLTKERIMYWLLSFKSGDVTNREYQRRVIDTLVNSVYVYDEGDKSRRIVFTFNISGQNTATLSCSDIACSAPPKSANPNVERCSDFAYSAPPKGANPNTLFFVKHCFGFVMIIEEV

SEQ ID NO: 5637 - protein, 503 aa, Unknown
  Description of Unknown: Integrase B5638 sequence
  PTHR30461:SF3,cd00338,SM00857,G3DSA:1.10.10.2600,IPR036162, PS51737,G3DSA:3.40.50.1390,IPR006119,IPR038109,PF07508, SSF53041,IPR011109,PTHR30461,PS51736,Coil, PF00239
MGGRAAIYARFSSHNQRGESIEIQVEKSRAYCAENDLRVVATYCDFAQTGTNTDRAEFQRMMADAKRGLFDFVVIYKVTRIMRNRDEMAMARIMLRRCRVEILYAGEDISDGSAGVLQLGMLEVLAEYESALDGERIRDGIQKNAERCMANGCVRYGWDIVDGRYVVNEEEAAAIRLGVRMVLSGKSVADVVRAWEPYRTKRGGKWRFQTVRRILMRRENGGEYRYAGVVVPGGMPAIVPMDDEERVIRMLEDSHRPRAKTEAWDFPLTGKLYDGRDGGLMTGTSGTGKSGRPYHYYRCRSCGRTVRRDVVEKRVADAVREALGSADSRERIARMLADAEEERADEKPLSETIKGELAKIETAFSNIWAAIESGIAPPGGKERIDALKQRQALLKDELRTAEALEAARLDYDRALFWLEGMAAAEVDDAQLLRTFVARVVLGGPDDDDGLRVAFTFDDSAGLGDNPSLPGAIGPGGEVFDRMNASSTISNRQVDIRIYLPFYF

SEQ ID NO: 5638 - protein, 503 aa, Unknown
  Description of Unknown: Integrase B5639 sequence
  PTHR30461:SF3,cd00338,SM00857,G3DSA:1.10.10.2600,IPR036162, PF13408,IPR025827,G3DSA:3.40.50.1390,PS51737,IPR006119, IPR038109,PF07508,IPR011109,SSF53041,PTHR30461, Coil,PF00239
MYNDSKGIYLMYLRKSRADEYNQDVENILKRHEKELQSLAKREFGELIPEKYIFREVVSGGTIKDRPLMKEILKMMESGIIAGVLVVDPQRLSRGDLLDQGHIINAFKYTNTLIITPYKTYDLNDTTGTDVKLLKMELNHGADYLDYYKMIQARGKLASVRAGNFIQPIPPFGYRKVRYGKVTTLEPIEDEAKIVRIIFQKYAEGKTICGVTNELNAEGYIPPSKQIWTKGSVKRILSNPVYDGKIRWGFTPNETVMEDGKLKKCRPERHDYLLFDGKHDAIVKHGLFMSVQERLSKNKSFTNDRSLKNPLYGIMYCKRCGRKISRQNVTESRGGHRYACPNKLCDVQSSRYDLVINAVIDAVQHAIDDFDITIYDCNTSDSSEKIRDLRQELTKLNNKEETLFELLETKVYSTSVFTQRHAELEKKRQEIIGEINTLSLVVPPESCNDKKMRFKDALLALKDESMPPKEKNRLLKNCIERIDYDIEGVRYHSKVKLDVYFKF

SEQ ID NO: 5639 - protein, 503 aa, Unknown
  Description of Unknown: Integrase B5640 sequence
  PTHR30461:SF3,SM00857,G3DSA:1.10.10.2600,IPR036162,PF13408, IPR025827,G3DSA:3.40.50.1390,PS51737,IPR006119,IPR038109, PF07508,SSF53041,IPR011109,PTHR30461,Coil, PS51736,cd00338,PF00239
MVKLRAAAYCRVSTDRAEQAGSLVSQRAFFREYIDNSDTMTLVKVFYDEGASGTTTAHRRGFNEMIRLALSGEIDIILTKEVSRFARNTVDTLKITRILRDKGIGVIFINDNIDTRDSDGELRLSIMATIAQEESRKISERVKWGQQRKMEQGVVFGRSCLGYDVTGGKIKINERSAATVKRIFTEYTVLHKGADSIANELNSENIPAVNGGKWSGAFIRKVLRNEKYAGDLEQKKTCTPDFLTHKKKCNKDGRIYIRDHHEPIIDRLLWEKTQEELKRRAPTAANRHSDRYLYSGKVYCGVCGNVMVSRIKKLKDGSIYHALRCSGRMNGTKCNNETLNVKAMKICIKRILDSIPCDKARIIKEVTERLSCHEKRPDNAETERRIKALTDKKQRAVDLMLDGLITADELLGQKALYDRQIAQLKATIKAESDVSANDGIIRRTRELLCFTDEFIWCFISRVIYSHGTLTVYFEGIEKPFSTAFRTYGRGETYSVVTGDVVRI

SEQ ID NO: 5640 - protein, 503 aa, Unknown
  Description of Unknown: Integrase B5641 sequence
  PTHR30461:SF3,SM00857,G3DSA:1.10.10.2600,IPR036162,PF13408, PS51737,G3DSA:3.40.50.1390,IPR025827,IPR006119,IPR038109, PF07508,IPR011109,SSF53041,PF00239,PTHR30461, PS51736,Coil,cd00338
MQRAVIYARYSPGPNQTEQSIEGQVRECTKYAELHDLRVVGTYIDRKISGKTDNRREFQRMIDDSEKHIFDVIILYHTDRFARNRYDSAIYKHKLKENGVELRYATTDIPKGPEGIILESIMEGWAEYYSAELSRKIKRGMRESALKCHSTGAGRCLGYRTAEDKSLVIEPEGAKAVQTVFDMYIKGKSHADICRYLNDCGFRTAQGKRFNKNSVTHIIRNKRYIGVYTYDDITIEDGIPAIISKDTFHLAQLEAARRKTAKRPKEPKAEYLLSGKAFCGHCQKPLVGVSGTGKSGNKWYYYYCQESRAKRNCTKKPVKRDWLEREVVKRTVAEVLQPEVIQHIAKKCHNLQMEYRQDNSDVLFYELKLKDVRKAIKNTMHAIESGVKTKTLPARLQELENEEEALEAELAIAKASDFVITADQIEFLLTQFAEPWECESEEEYHRRIIKCFVHKVFLFDDKLLIYYNVSRDGKTREQSEAELLEEALGEGFDKRSSGSTIEV

SEQ ID NO: 5641 - protein, 503 aa, Unknown
  Description of Unknown: Integrase B5642 sequence
  PTHR30461:SF3,cd00338,SM00857,G3DSA:1.10.10.2600,IPR036162, PF13408,PS51737,G3DSA:3.40.50.1390,IPR025827,IPR006119, IPR038109,PF07508,IPR011109,SSF53041,PTHR30461, PS51736,Coil,PF00239
MLRAALYARFSSENQREESILAQFRDSTEYCKKHNYAIVAKYADEAKSGTTTIGREQYKLMLKDAQKGKFDVVVFHKIDRNARNELDYYITKHKLEEAGVKYAYSRQDIDSTSPEGQMMESMLVGMAAYYSRNLSNEIKKGLRENAIQGKCTGGRPPYGFSVDADKKLIINEDEAPAVRMIFDLYAAGVHYGVIRKRLFNAGYRNRAGKEFTLASIYEILRNRKYVGDLYLGKTLFHKGKRNTHQTSANVQYFENVIPAIVSRDIFEEVQVKLDQNKRRSGAGKAKAIYALSGLIHCGQCGSAMVAHSTKNSRGIKNYYYRCPKGRLIGEEKCPQKFINRDDIESAVYQLIRKLFTAPDAHNQIKRIIAKNNMTVKVPDYTDQVKRLKKQESDASKRLDKLYDLYMTDRDDEFTSAKMAQIKEEILRLRTQIKEAEDRQAIAQSTTFDIDKIIDTFQKQLKQKQSPEFIKTLFELAVKNVTVYPDKIKVVLLVTQERFELPTP

SEQ ID NO: 5642 - protein, 503 aa, Unknown
  Description of Unknown: Integrase B5643 sequence
  cd03768,PTHR30461:SF3,SM00857,IPR036162,G3DSA:3.40.50.1390, IPR006119,PF07508,SSF53041,IPR011109,PTHR30461, PS51736,Coil,PF00239
MIKIRVAIYCRKSVFVEGSVSIETQINLCKDYINKKYSNSTFEIFEDEGFSGGNTNRPAFQKMLKLIELNQLDIVICYKIDRIARNTLDFLNTLEKFKNKNVELISVSEGFDPNTQIGKMMLTLLASFAEMERSNIQQRVSDNMLSIAKKGRWTGGSAPTGFMHGENGGLEISNGELILDIFDMKYHNTLNSKIITHAEEKHNHKFTGVTLANAFRKPIYVKSSESVSLYLKHKGYTVLGEENLTNSYLTYTDKDNKYAVVSNIPGLINPEVWLDINKRMDENITRTGNRFSEKYWLTKTLHCKCCGKTYCGHTKNTKTRYYKKDGTEKIYESTTDYYMCRDMLRGKLKTCTNTKRVKKDYLEVRVSELIYSLKDIDNFNAAYNVNSVDNKKLIASLERKIKSIDKNINNLTDKLSLLSNEASIIFINKIETLVKEKSNIKNEILSLEMHELENINNNHDFVFYNISNFNDNMTVDEKRACCMNIFKEITYDPKEDTFEFSFK

SEQ ID NO: 5643 - protein, 503 aa, Unknown
  Description of Unknown: Integrase B5644 sequence
  SM00857,G3DSA:1.10.10.2600,IPR036162,PS51737, G3DSA:3.40.50.1390,IPR006119,IPR038109,PF07508, IPR011109,SSF53041,PF00239,PTHR30461, PS51736,Coil,cd00338
MDRVCIYLRKSRADEELEKTIGKNETLSKHRKALLKFAKEKNLNIVGIKEEVVSGENLLFRPQMLELLKEVENNQYSGVLVMDIQRLGRGDMKDQGIILETFKNSKTKIITPQKTYDLNNDFDEEYTEFEAFMSRKELKMINRRMQGGRIRSVEDGNYIATNAPYGYDISYIGRCRTLKVNNSEASIVKMIFNLYNSGLGASAICNKLNELGFRTKFGNKFTPTSVLFILKNQIYIGKITWKKKEIKKSKIIGKVKDTKTRNVEEWIISEGKHEPLIDLDTWNKTKEILNKRYHIPYQLTNAPVNPLAGLLTCGICGKKMTMRKLRGITRLLCTNKCGNKSARFDFIEKRLLDALEIALQEYKFNIESNPPQTTDDSYKVHLSLLKKENLTLNNQKLKLFDLLEREIYTEDLFLERSKAIDDRINILEKEIQELEKFLNKANDISPKEIVVLFENVIEAYKRSNNITNKNELLKSVLDKIVYKKLPEQRNDEFELIIYSKLLT

SEQ ID NO: 5644 - protein, 503 aa, Unknown
  Description of Unknown: Integrase B5645 sequence
  PTHR30461:SF3,cd00338,SM00857,G3DSA:1.10.10.2600,IPR036162, PS51737,G3DSA:3.40.50.1390,IPR006119,IPR038109,PF07508, SSF53041,IPR011109,PTHR30461,PS51736,Coil, PF00239
MGGRAAIYARFSSHNQRGESIEIQVEKSRAYCEANDLRVVATYCDFAQTGTNTDRAEFQRMMADAKRGLFDFVVIYKVTRIMRNRDEMALARIMLRRCRVEILYAGEDISGGSSGVLQLGMLEVLAEYESALDGERIRDGIQKNAERCMANGCVRYGWDIVDGRYVVNEEEAAAIRLGVRMVLSGKSVADVVRAWEPYRTKRGGKWRFQTVRRILMRRENGGEYRYAGVVVPGGMPAIVPMDDEERVIRMLEDSHRPRAKTEAWDFPLTGKLYDGRDGGLMTGTSGTGKSGRPYHYYRCRSCGRTVRRDAVEKRVADAVREALGSADSRERIARMLADAEEERADEKPLSETIKGELAKIETAFSNIWTAIESGIAPPGGKERIDALKQRQALLKDELRTAEALEAARLDYDRALFWLEGMAAAEVDDAQLLRTFVARVVLGGPDDDDGLRVAFTFDDSAGLGDNPSLPGSIGPGGEVFDRMNASSTNSYRQVDTYIYLPFYF

SEQ ID NO: 5645 - protein, 503 aa, Unknown
  Description of Unknown: Integrase B5646 sequence
  PTHR30461:SF3,cd00338,SM00857,G3DSA:1.10.10.2600,IPR036162, PF13408,PS51737,G3DSA:3.40.50.1390,IPR025827,IPR006119, IPR038109,PF07508,IPR011109,SSF53041,PTHR30461, PS51736,Coil,PF00239
MLRAALYARFSSENQREESILAQFRDSTEYCKKHNYAIVAKYADEAKSGTTTIGREQYKLMLKDAQKGKFDVVVFHKIDRNARNELDYYITKHKLEEAGVKYAYSRQDIDSTSPEGQMMESMLVGMAAYYSRNLSNEIKKGLRENAIQGKCTGGRPPYGFSIDANKKLIINENEAPAVRMIFDWYSAGVHYGVIRKRLFNAGYRNRAGKEFTIASIYEILRNRKYVGDLYLGKTLFRKGKRNTHQTSANVQYFENVIPAIVSRDIFEEVQVKLDQNKRRSGAGKAKAIYALSGLIYCGKCGSAMVAHSTKNSRGIKNYYYRCPKGRLVGDEKCPQKFINRDGIEETVYQLIRRLFTAPDAHDQMKRIIAKNNMSVKVPDYTEQVKRLKKQESDASKRLDKLYDLYMTDREDEFTSAKMAQIKEEILRLRTQIKEAEDRQAIAQSTTFDIDKIIDTFQKQLKQKQSPEFIKTLFELAVKNVTVYPDKIKVVLLVTQERFELPTP

SEQ ID NO: 5646 - protein, 503 aa, Unknown
  Description of Unknown: Integrase B5647 sequence
  SM00857,G3DSA:1.10.10.2600,IPR036162,PF13408,PS51737, IPR025827,G3DSA:3.40.50.1390,IPR006119,IPR038109,PF07508, IPR011109,SSF53041,PTHR30461,Coil,PS51736, cd00338,PF00239
MAKPEVSELAVVYARYSSHSQGEQSIEGQLSNARDYAAAHGYTIVHEYVDRAKSGRTDNRAEFQQMLKDTAKRQFSVIILWKVDRFGRNREEIAINKMKCRKNGVRVEYVAETIPDSPEGVILESVLEGFAEYYSLQLSQNIRRGRAESAEKCQSLGGNRPLGYKTGPDKKFIIDENTAPTVKMIFTMYADGKTVTEIVDKLNEMGLRTLRGGPFTKNSLHSILKNKKYIGVYEYQGREIKDGVPRIIEDDVFNKVQEMLKINKRAPAKTWSRADYILTDKLFCGKCGALMFGESGTSKTGAKHNYYICSNKKRFRSCDKKAVRQADIEDTVLNATHELLQDDELLDYIVDRTWEYYLAQDNSQEELRNLQRQLAQTDTAISNLIRAIEAGILTEETKKRMDELTQQKADLKASIADREIARGFHLQKSHIAFYLRSLRDADWSDKEAQKRLIQTFVNAVFVYDDHITLTYNFSGDKSTITLRDMQRFEDGEEFGCRASRSTR

SEQ ID NO: 5647 - protein, 503 aa, Unknown
  Description of Unknown: Integrase B5648 sequence
  cd00338,SM00857,G3DSA:1.10.10.2600,IPR036162,PF13408, IPR025827,G3DSA:3.40.50.1390,PS51737,IPR006119,IPR038109, PF07508,SSF53041,IPR011109,PTHR30461,PS51736, Coil,PF00239
MSTDSSDQLESYKAQVAYYTDAIAKNPKWRFAGVYADEGLSGTQAAKRDDFLRMIKDCEKGKIDYIITKSVARFARNTVDALKYVRKLKALGIGVYFEEQCLDSLKSESELALGIYSVLAQAESENISANVRWGIQRRMQSGTFKFRYNLIGYRKGEDGQPEIVPEEAKYVKDVFDMYLDGNSVDQIKEYLDSAPIKTATGNDIWSRNAIRNILTNERYVGDMLLQKTYIENCITKRARKNRGEMPKYLVSNNHPAIIDRDTFKQVQAEMAKRRSRPRVSDKTITAKGKFSGKYPFSDLLVCDSCGNRYRRCMWISGGKKKIVWRCITRIEHGGKECESISVGDELIHKAVYRSINRYIQNNSGALDIVLSELSKQFGGNDYTDDLFNIERSINELNKQMEDAAMIEVTTQGNKERIREEIIELSQRIVALRNEKSIIEEKKATAKTRNEELGRFSEELSLYNADCSEITDNKLRRIIQEVRIKKDHTIIIELKNGMLLEEAL

SEQ ID NO: 5648 - protein, 503 aa, Unknown
  Description of Unknown: Integrase B5649 sequence
  PTHR30461:SF3,SM00857,G3DSA:1.10.10.2600,IPR036162,PF13408, IPR025827,PS51737,G3DSA:3.40.50.1390,IPR006119,IPR038109, PF07508,SSF53041,IPR011109,PTHR30461,Coil, PS51736,cd00338,PF00239
MIGAIYARYSNGPNQTDQSIEGQVADCRAYAERNGIQIVEIYADRHISGKSIVGRNEFQRMLHDAEQHRFECVIVWKIDRFGRDRQDIAISKMKLKKAGVRLMYAEEAVPEGPEGIILESVLEGLAEYYSADLRQKILRGMRETAKKGQYCGQPLPIGYAVDEDRHIIIDEEKAAVVREAFRMHIAGAQTKELIELFRKNGITGRRGRPISQAVIYRMLRNEKYLGRFEIQGVEIPAEPIIDQATFDEAARHFKTSRNNAAGRAKVDYLLSCKCFCGYCGAMLNAESGTSKTGKVYHYYKCGAKKRGAKCELKPIQRDHFEDRVIEATVQDMLTDDMIGKLTTRILEIQEQDDAADPAAAYRKQLDSNRKKQRNILDAIEEGTGAKGLAGRLAQLEAEEEELVLEIERAEIKKPRLTEEVVGAWLRSFRDGDVDDAAFRQRLVDTFIARIEVRNGQAMIFYNIKENGPHSKVRVRSEWWSPRSRTRTREPFVADGYIILPIAI

SEQ ID NO: 5649 - protein, 502 aa, Unknown
  Description of Unknown: Integrase B5650 sequence
  cd03768,PTHR30461:SF3,SM00857,G3DSA:1.10.10.2600,IPR036162, PF13408,PS51737,G3DSA:3.40.50.1390,IPR025827,IPR006119, IPR038109,PF07508,IPR011109,SSF53041,PTHR30461, PS51736,PF00239
MMYDALYGRQSIEKKDSISVESQLEYCKYETHGAPYIEYADRGYSGKNTNRPDFERMMTDIKDGKIKRVIVYKLDRISRSILDFANMMETFQDYSVEFVSSTEKFDTSTPIGRAMLNICIVFAQLERETIQKRVTDAYYARCKHGFYMGGRIPYGFRLVDTVIDNVRTSMYEEIPEESEQLKLIYSMYADPSYSLGEIMRYLNNHNIKHLRGKNWNTARLSEMLRNPIYVEADIDVYNFYKSQGANIYNPATDFTGYNACYLYKGTASKTRKQCDLTDKEIVLAPHKGFIPSKTWIACRLRCLNNRQSTRTCKAKNSWLVGKVKCGNCGYALVVRKSKTKHGRYFVCSCVGNSGACKGTGCTIYADVLENYMIDAIRCKLSEFERLSNGNDNGQTPKESKIKIRLTQIDEEINDLLSKVGSANAILMKYINDKISELDTERQTLHKEIVSLTCSQTENKMGQITDHVTKWDNISFEDKQAVVDALIKVIKVANGNIEIVWKI

SEQ ID NO: 5650 - protein, 502 aa, Unknown
  Description of Unknown: Integrase B5651 sequence
  PTHR30461:SF3,SM00857,G3DSA:1.10.10.2600,IPR036162,PF13408, IPR025827,G3DSA:3.40.50.1390,PS51737,IPR006119,IPR038109, PF07508,SSF53041,IPR011109,PTHR30461,PS51736, cd00338,PF00239
MKIAAYCRVSTDKDEQLDSLEHQKQFFSEYAEKNGHRLIRLYADEGISGTSLKKRNEFLRLMKDAKLGLFEAVVVKDISRFARNTVDFLQSIRELRALGINTLFITANMESLGESEFVLTIFGAMAQEESANLSKRVKFGKKINAQKGRVPQRIFGYDRIDNFTLKINYQEAQTVREIYRLYLKEGLGCRTISLRLNQQQRKTKFHCDWNPRGVRRVLTNPIYCGHYVNHKYEIEDYLTGKQIHIPQEEHFHHERPEWAIITPEVFAKAQKQLEERRTKYDCGEPFKGARYSTKHLFSTLIKCEHCGRSFCRKDYTYVKTRVYWKCTTNDQFTAERCDNTIKLEEADLLAEIRAYFGALIHDKDSFIAGILAAVERQAGGEKNPYDKARIERRQGELLAKKERYQEMYANDVMTMAELKEKTALIAEELEELDYDLRQYEHSLEVRQNAGHFVEQYMQEIERFLELETVTNMDLRRIIDHISVNKDGNVRIILKKLDDLDIL

SEQ ID NO: 5651 - protein, 502 aa, Unknown
  Description of Unknown: Integrase B5652 sequence
  cd03768,PTHR30461:SF3,SM00857,IPR036162,PF13408, IPR025827,G3DSA:3.40.50.1390,PS51737,IPR006119,PF07508, IPR011109,SSF53041,PTHR30461,PS51736,Coil, PF00239
MIAIYARQSVDKKDSISIESQIDFCKKEVEEEDYKVYKDKGYSGKNIDRPAFKEMMRDIKKNAITKVVAYKLDRISRSILDFNNLLEEFKKHNIEFVSVTEKFDTSTPMGKAMVNIVVTFAQLEREQIAQRVKDNYYERGKTGRFLGGKVPLGYTNTKVEIQGKKVPTLVINKEEALLIEKMFNMYAYEDISLSKISDYLNEQGLKSAKGTAWDSGKISRIIKNALYVKADVNVYNYYKNLGVEINNPIEDFIGTNGCFVYGKRDRNENRYTNLKDHKLSIGLHEGIVDADTFLKCQYKLSQNQQITRSGSGKHTWLTGLTKCGYCGYSMSAVVNSSGKYFNCRGKTNMKICNGHSRTIKVEEIENIVETEILNRLEELSKVKIKMENSNSKKIKSIETEIKILDENIEKLLDKILESNDITIKYINKKVEELDNKKTELRNELNRITLEGSNNSSLEEVLKDVDKIKNLNFDKKKSIAKSLIDKILIRDDEIDIQWKVFNQ

SEQ ID NO: 5652 - protein, 502 aa, Unknown
  Description of Unknown: Integrase B5653 sequence
  cd03768,PTHR30461:SF3,SM00857,IPR036162,PF13408, IPR025827,G3DSA:3.40.50.1390,IPR006119,SSF53041,PTHR30461, PS51736,Coil,PF00239
MKKVAIYSRKSVYIEGSVSIETQINMCKEYILKKFTNSTFEVFEDEGFSGGNTNRPAFQKLLRLAELKQIDIVVCYKIDRIARNTLDFLNILEMFKENNVELISITEGFDPNTQMGKVMLTLLASFAEMERSNIQQRVKDNLLSIAKKGKWTGGSPPTGFKNNPNGGIEWDNKDMILDVFNMKYEKSKNTDLIQFIQHKYNHKFLGGTLATTLRKPIYVKSSSSVSLYLKSKGYIVQGTEDNIHSYLTYTDKDTKYAIVSNIVGLIEPSIWISVNKDMDKNISREGNRFSEKFWLTKTIRCKCCGQTYCGQTKTTKTKYYNKKGEEKIYVSTYSYYSCRDAVRGKLKTCTNTKRVKQDVLEAKVSALIYSLKDEKIFNSSYSINKVDNSFKIASLNKKVIEIDKTISNLTDKIALLSNDASLIFIDKIENLIKEKSSIKSNIVELELQELNSKIKTDKALIYNNIKAFNNNLSVDDKRKITMSIFKKIVYDPETNDLDVTFM

SEQ ID NO: 5653 - protein, 502 aa, Unknown
  Description of Unknown: Integrase B5654 sequence
  PTHR30461:SF3,IPR036162,PS51737,IPR011109, PTHR30461,PS00397,PF00239,G3DSA:1.10.10.2600, IPR006119,SSF53041,cd00338,SM00857,IPR025827,IPR038109, PS51736,IPR006118,PF13408,G3DSA:3.40.50.1390,PF07508,Coil
MKKKILMAALYIRVSTEKQEELSPDSQKRLLLDYAKSHDMIVSEKHIYIENGISGRKADKRPKFQQMIATAKSSDHPFDVILLWKFSRFARNQEESIVYKSMLRNKYSVDVVSISEPLVDGPFGSLIERIIEWMDEFYSIRLSGDVTRGMTQKALNGGYQCRPPLGYRIPYHKATPEIVPDEAKIVRLIFEKYVYENMSIFAIVKHLNSLGHKTSHGKPFEKRSIEYILQNPGYAGDIRWNRTINETNEIRDPSEWIIRPGHHPAIIEKELFEKAQERYHSEYKRRNAKPSEISKHWLSGLLKCSKCGRSLSSCVVHRKTLPDSFYFQCYGYLKGKCNNDCYVREEEIGPTVIKALEEALRKGTVSYTIKKSSQNQSRGSELEVLYKNLDRLSFKEERAKEAYIDGIDTKEEYKANKLRLQKERQELQEMIDTIEHNSSDTVSNDSRMLSSISNVLDIVQSDKFTMQEKNAALKSIVDQITYDKKINHIDVDYYLIETPEAL

SEQ ID NO: 5654 - protein, 502 aa, Unknown
  Description of Unknown: Integrase B5655 sequence
  PTHR30461:SF3,IPR036162,PS51737,IPR011109,PTHR30461, PS00397,PF00239,G3DSA:1.10.10.2600,IPR006119,SSF53041, cd00338,SM00857,IPR025827,IPR038109,PS51736, IPR006118,PF13408,G3DSA:3.40.50.1390,PF07508,Coil
MTDNTSMRTGALYIRVSTGKQEELSPDAQRRLLLDYASKNNIIISNQYIYEEDGISGRKADKRPQFQDMIAHAKSKEHPFDVILVWKYSRFARNQEESIVYKSMLRKDHVEVISVSEPLVDGPFGSLIERIIEWMDEYYSIRLSGEVVRGMTENALRGRNQARPPLGYKVPHAKETPVIVPEEALIIHTIFDMYTEDGASMFAIAKHLNDLGYLTSHKKPFERRSIGYILSNPTYIGKSVWNRHSNDNKALKDESEWIIRDGSHEPIISTEQYEKAQQRIKAEYTPKYAKPPELHRHWLSGMVKCHTCGRSLSTSIHKDKRYGRTYTNFQCYGYLKGKCNVSHQISARKLEPAVLEGLQEIMEGVRPLQFKIIKSEEPTAQSAHEILTERLHDIEKKEERIRQAYRDGIDTIEEYRDNKAILFKERAEIESRLEELTPAPVPSESDTRELMRNRLKNVYEILSSEDVSTVTKSNALKSIVDKIVYDSEKKELSIYLYCSDTL

SEQ ID NO: 5655 - protein, 502 aa, Unknown
  Description of Unknown: Integrase B5656 sequence
  PTHR30461:SF3,IPR036162,PS51737,IPR011109,PTHR30461, PF00239,PS00430,G3DSA:1.10.10.2600,IPR006119,SSF53041, cd00338,SM00857,IPR025827,IPR038109,IPR010916, PS51736,PF13408,G3DSA:3.40.50.1390,PF07508,Coil
MEKYAMYLRKSRADQDKTLEDTLRRHKETLIAYAISHDLSVQDVYEEVVSGESLYARPQMLKLLEAVSCRAYTGILCMDIDRLGRGGMSDQGVIIETLKQNDTLIVTPQRTYDLNDETDESNVEFSAFFARYEYKQITKRMKAGTRKSVQEGCYLACAPYGYRNTKVNKHSTLEIYEPEAKYVRMMFDLYNNGYGCQTIADRLNAMGVSPHRTDKWGRTSVMSILKNYAYNGKVVWDKITHIKKGTRGNAKHIRIYNPPEKWTITEGLHDAIISDEQWETTQGIIKDRTHPPSFTGDIKNALSGLVYCGNCGSLMSRTPERHRNGKTESARYLCLKRSCIAGTKYELLEKAVINSLQEKLKKYDSLKQTNRIQENNFEEQLKSIAGSISVIKKQQSKLHELLEREIYSVTTFLDRQQTLQLQLDTLNSEYAAVKKQADSIKIVDIEQTKQNISDVLNCYWQADISTRNRLLKTVIEKVVYFKDKKTKPADFTLEIKLKQAFL

SEQ ID NO: 5656 - protein, 502 aa, Unknown
  Description of Unknown: Integrase B5657 sequence
  SM00857,G3DSA:1.10.10.2600,IPR036162,PS51737,G3DSA:3.40.50.1390, IPR006119,IPR038109,PF07508,SSF53041,IPR011109, PF00239,PTHR30461,PS51736,Coil,cd00338
MKTCIYLRKSRADEELEKKEDIDTLARHRSTLLEVAKKQDLNVVEIKEEIVSGDSIAKRPKMTQLLEEVKENMYDAVLCMDIDRLGRGDMQDQGKIINTFKESKTLIITPDKTYDLNNDLDEEMTEFKTFFARRELKVITKRMQRGRVKSIEEGNFIGSTAPLGYKFKYDEYGKRHMIIDEETAPAIKLIFDMYLNGEGAYKIMNHLNALGYKTTAGKCFTECAVRRIIRNRTYCGYVTWFEYKRKGTKTRKNKGNDMIVCKGKHKPIISEDDWEKAQEIRINNQIPAKKSDRKLINPLAGIVKCSNCRHTMVASYNTGKEGPVLYLRCKQCYEVGSSRLDLIEEEIINILKIKLKEIKDELDNTEIEDRENKQLEMLQNTLTTLDKEKTELDKQKDRLHDLLERGIYDVDTFLERQQTLANKKEEIEIAIKGTKKLLEVEISKDIDYKELAQNIECAIESYENTDNIELKNKALKTVIKEILYYKEKKRFAQFTLEVKFKI

SEQ ID NO: 5657 - protein, 502 aa, Unknown
  Description of Unknown: Integrase B5658 sequence
  cd03768,PTHR30461:SF3,SM00857,IPR036162, PF13408,IPR025827,G3DSA:3.40.50.1390,IPR006119, SSF53041,PTHR30461,PS51736,Coil, PF00239
MKRIAIYSRKSVYIEGSISIETQINMCKEYMLKKFKDCEFKIFEDEGFSGGNTNRPAFKKLLRLAELKQIDIVVCYKIDRIARNTLDFLNILEMFKENNVELISITEGFDPNTQMGKVMLTLLASFAEMERSNIQQRVKDNLLSIAKKGKWTGGSPPTGFKNNPNGGIEWDNKDMILDVFNMKYEKSKNTDLIQFIQHKYNHKFLGGTLATTLRKPIYVKSSSSVSLYLKSKGYIVQGTEDNIHSYLTYTDKDTKYAIVSNIVGLVEPSIWISVNKDMDKNISREGNRFSEKFWLTKTIRCKCCGQTYCGQTKTTKTKYYNKKGEEKIYVSTYSYYSCRDAVRGKLKTCNNTKRIKQDVLEAKVSALIYSLKDEKIFNSSYSINKVDNSFKIASLNKKVIEIDKTISNLTDKIALLSNDASLIFIDKIENLVKEKSSIKSNIVELELQELNSKIKTDKALIYNNIKAFNNNLSVDDKRKITMSIFKKIVYDPETTDLDVTFM

SEQ ID NO: 5658 - protein, 502 aa, Unknown
  Description of Unknown: Integrase B5659 sequence
  PTHR30461:SF3,IPR036162,PS51737,IPR011109,PTHR30461, PS00397,PF00239,G3DSA:1.10.10.2600,IPR006119,SSF53041, cd00338,SM00857,IPR025827,IPR038109,PS51736, IPR006118,PF13408,G3DSA:3.40.50.1390,PF07508,Coil
MKKKILMAALYIRVSTEKQEELSPDSQKRLLLDYAKSHDMIVSEKHIYIENGISGRKADKRPKFQQMIATAKSSDHPFDVILLWKFSRFARNQEESIVYKSMLRNKYSVDVVSISEPLVDGPFGSLIERIIEWMDEFYSIRLSGDVTRGMTQKALNGGYQCRPPLGYRIPYHKATPEIVPDEAKIVRLIFEKYVYENMSIFAIVKHLNSLGHKTSHGKPFEKRSIEYILQNPGYAGDIRWNRTINETNEIRDPSEWIIRPGHHPAIIEKELFEKAQERYHSEYKRRNAKPSEISKHWLSGLLKCSKCGRSLSSCVVHRKTLPDSFYFQCYGYLKGKCNNDCYVREEEIGPTVIKALEEALRKGTVSYTIKKSYQNQSRGGELEVLYKNLDRLSFKEERAKEAYMDGIDTKEEYKANKLRLQKERQELQEMIDTIEHNSSDTVSNDSRMLISISNVLDIVQSDKFTMQEKNAALKSIVDQITYDKKTNHIDVDYYLIETPEAL

SEQ ID NO: 5659 - protein, 502 aa, Unknown
  Description of Unknown: Integrase B5660 sequence
  cd03768,SM00857,IPR036162,PF13408,IPR025827, G3DSA:3.40.50.1390,IPR006119,SSF53041,PTHR30461,PS51736, Coil,PF00239
MKKVAIYSRKSVLVEGSVSIETQINMCKDYINNKFPNAKFRVFEDEGFSGGNTNRPAFQKMLRMAQLNEIDIVVCYKVDRIARNTLDFLKILELFKENNVELISISEGFDPNTQMGKVMLTLLASFAEMERTNIQQRVKDNLLSIAKKGKWTGGSPPTGFKNGLNGGLEWNKQDMILDVFNMKYEKEKNSNIIKYIKEKYNHNFLGGTLATTLRKPIYVKSSPSVSLYLKTKGYIVQGDEDNIHSYLTYTDKETKYAIVSDIVGLIEPSVWISINKDMDKNISREGNRFSEKFWLTKTVRCKYCGQTFCGQTKTTKTKHYNKHGEEKIYISTYSYYSCRDAVRGKLKTCTNTKRVKQDILESKVSELIHLLKDKKTFNSSYFSNKIDNSSKIDTIKKQIKSIDKTINNLTDKIALLSNEASLIFISKLEELVKEKSILKDNLLQLELQELNSNTKKDSSLVYNNILTFNDDLSVDDKRKIAMSLFKEIIYDPETDSLDVTFM

SEQ ID NO: 5660 - protein, 502 aa, Unknown
  Description of Unknown: Integrase B5661 sequence
  cd00338,SM00857,G3DSA:1.10.10.2600,IPR036162, PS51737,G3DSA:3.40.50.1390,IPR006119,IPR038109, PF07508,IPR011109,SSF53041,PTHR30461, PS51736,Coil,PF00239
MKTCIYLRKSRADEELEKKEDVDTLARHRSTLLEVAKNQDLNVIEIKEEIKTGDSIAKRPKMIKLLEEIEKNMYDAVLCMDIDRLGRGDMQDQGRIINTFKKTNTLIITPDKTYNLNNDLDEEMTEFKTFFARRELKVITKRMQRGRVKSIEEGNFIGSTAPLGYKFRYDEYGKRHMIIDEETAPAIKLIFDMYLNGEGSFRIMKRLNTLGYKTTAGKDFTECAVRRIIRNQTYCGYVTWFEYRRKGTKTKKNKESDVLIYKGKHKPIISEEDWNKAQEIRKGNQIPSKKNDRKLVNPLAGIVKCSYCKHTMVASYNTVKEGPVLYLRCKNCYEVGSSRLDLVEEEILNTLKVKLKEIKDELNNTEIEDKENKQLEMLQNTLISLDREKTELDKQKNKLHDLLERGIYDVDTFLERQQTLAAKKEEIETAIKGTKKLLEAEVSKDIDYKELAKNIECAIGDYENTDNIELKNKALKTVIKEILYYKEKKRFAQFTLEVKFKI

SEQ ID NO: 5661 - protein, 502 aa, Unknown
  Description of Unknown: Integrase B5662 sequence
  PTHR30461:SF3,SM00857,G3DSA:1.10.10.2600,IPR036162,PF13408, IPR025827,G3DSA:3.40.50.1390,PS51737,IPR006119,IPR038109, PF07508,SSF53041,IPR011109,PTHR30461,Coil, PS51736,cd00338,PF00239
MNVVIYARFSSHSQTEQSIKGQLKVCYEYAESHNYTVVGEYIDRAQSGKFDNRAEFQRMIADSDKHTFDGILVYQLDRFARNRYDSAIYKAKLKKNGVRVLSAKENITDDASGILIEGVLESMAEYYSVELAQKIHRGMSINGEKCLSNGSNPGLGFKVSKADRTFYVDEEEAAIVREIFERYASCETKAEIAKDLQRRKVKTSIGNEFTYNSLSRLLKNKRYIGIYLYKGVETPGGMPRILDDDLFYRVQSLMYKNKSAPARTRGENEYLLTTKLFCGHCKEMMIGYGGTGKTGKQYHYYMCKKARKKKCDNKIIGKQYIEDRVVSECLKMLTYDKIRYIAKRVAEECNKSPDNISVREIKKAIKEVDAAIENLWKGIEQGQSVDMLTERLHKRQAEKEELETQLAIENNKKICLSEAQILAFLDYVCEMPLDDFNKRRAIINIFVQSIYLYDDHFTLIINASKKPLSIDNIPLDDIEEAFEGENTETEGCSSLMTPAPPL

SEQ ID NO: 5662 - protein, 502 aa, Unknown
  Description of Unknown: Integrase B5663 sequence
  PTHR30461:SF3,IPR036162,PS51737,IPR011109,PTHR30461, PS00397,PF00239,G3DSA:1.10.10.2600,IPR006119,SSF53041, cd00338,SM00857,IPR025827,IPR038109,PS51736, IPR006118,PF13408,G3DSA:3.40.50.1390,PF07508,Coil
MTDNTSMRTGALYIRVSTGKQEELSPDAQRRLLLDYASKNNIIISNQYIYEEDGISGRKADKRPQFQDMIAHAKSKEHPFDVILVWKYSRFARNQEESIVYKSMLRKDHVEVISVSEPLVDGPFGSLIERIIEWMDEYYSIRLSGEVVRGMTENALRGRNQARPPLGYKVPHAKETPVIVPEEALIIHTIFDMYTEDGASMFAIAKHLNDLGYLTSHKKPFERRSIGYILSNPTYIGKSVWNRHSNDNKALKDESEWIIRDGSHEPIISTEQYEKAQQRIKAEYTPKYAKPPELHRHWLSGMVKCHTCGRSLSTSIHKDKRYGRTYTNFQCYGYLKGKCNVSHQISARKLEPAVLEGLQEIMEGVRPLQFKIIKSEEPATQSAHEILTERLHDIEKKEERIRQAYRDGIDTIEEYRDNKAILFKERTEIESRLAELTPAPVPSETDTRELMRNRLKNVYEILSSEDVSTVTKSNALKSIVDKIVYDSEKKELSIYLYCSDTL

SEQ ID NO: 5663 - protein, 502 aa, Unknown
  Description of Unknown: Integrase B5664 sequence
  PTHR30461:SF3,SM00857,G3DSA:1.10.10.2600,IPR036162,PF13408, IPR025827,G3DSA:3.40.50.1390,PS51737,IPR006119,IPR038109, PF07508,IPR011109,SSF53041,PF00239,PTHR30461, PS51736,Coil,cd00338
MRGVIYARYSPGPRQTEQSIEGQVADCQQYAEEHGIDIIEIYADRKVSGKSVVGRDEFQRMLRDAEKGRFDCVLVWKIDRFGRDRQDIAMGKMTLKRAGVKLMYARESVPEGPEGIILESVLEGLAEYYSADLRQKVIRGMRETAKKGQYCGQSLPIGYKVDAERHIVVDEREAAVVREAFKLHIAGGQIRDIVQLFADRGIMGRRGKPVSNAVVYRMLRNEKYLGEFYIQDVKLNVEPIIDQATFLEAARHFKTSRNNAAGRAKVNYLLSCKMFCGYCGSMINAETGTGKLGKVYRYYKCGDKKRGKACELKPFPKDQLEDAIILATVNDMLTDDMIEKLTVRILEVQEQENADDPVVGLRRRLDSNKKRQRNLLDAIEEGGARGLVSRLAALEEEEEQLVLEIQRAEIKRPRLTREVVEAWLRSFRVGDVTDDDFRARLVDTFIARVELRNDEALIFYNIREKGPHSRVRVRPEWWSPRDGTRTPKIIVLRDYVVLRIAV

SEQ ID NO: 5664 - protein, 502 aa, Unknown
  Description of Unknown: Integrase B5665 sequence
  PTHR30461:SF3,SM00857,G3DSA:1.10.10.2600,IPR036162,PF13408, IPR025827,G3DSA:3.40.50.1390,PS51737,IPR006119,IPR038109, PF07508,IPR011109,SSF53041,PF00239,PTHR30461, PS51736,Coil,cd00338
MSETTQIGVIYARYSSDKQRDESIDGQIRECMAYAEREGITITNTYIDRALSAKTDDRPEFRQMILDSNKQAFNYVLVYQLDRFSRNRYDSAIYKAKLRKNGIRVISVKENIKDDPSGIILESVLEGMAEYYSAELSQKVMRGMTDNVLQGKWVGTVVPYGYKLSNNRQLEINEHEANVVRKLFDMYLQRHTLSEMASYMNANGHLTHKGKPFNTNSIKAIISNEKYIGVYSWGSERIENAIPPIIDKSIFEKAQHKRNLRAKKKGNRSELYQLCGKLECGRCGGNYVGSTGTSKTGALHHYYVCSNRRRKNACQAQNIRRDALDDIVISQTLAILNKPNVVNKIAKYAASSGKNLQSETVAQIDIIDAHIRDLKKSLDNYMTAIANGFISDVLKHRIEATEQELKDQIEIKTNLENTIIPVELTEDHIRFFLLKMAKENPSTLRGRARIIEAFVHHVTIYEDHIEIVFNYKNELSEFHDKTLESSLLNDLVTQKGFEPLAF

SEQ ID NO: 5665 - protein, 502 aa, Unknown
  Description of Unknown: Integrase B5666 sequence
  PTHR30461:SF3,cd00338,SM00857,G3DSA:1.10.10.2600,IPR036162, PF13408,PS51737,G3DSA:3.40.50.1390,IPR025827,IPR006119, IPR038109,PF07508,IPR011109,SSF53041,PTHR30461, PS51736,Coil,PF00239
MRGVIYARYSPGPHQTEQSIEGQVADCQQYAEEHGIDIIEIYADRHVSGKSVVGRDEFQRMLRDAEKGRFDCVLVWKIDRFGRDRQDIAMGKMALKRAGVKLMYARESVPEGPEGIILESVLEGLAEYYSADLRQKVIRGMKETAKKGQYCGQSLPIGYKVDAERHIVVDEREAAVVREAFKLHIAGGQTRDIVQLFADRGIMGRRGKPVSNAVVYRMLRNEKYLGEFYIQDVKLNVEPIIDQATFMEAAQHFKTSRNNAAGRAKVNYLLSCKMFCGYCGSMISAEAGTGKLGKVYRYYKCGDKKRGKKCELKPFPKDHLEDAIILATVNDMLTDEMIEKLTVRILEVQEQENADDPVVGLRRRLDSNKKRQRNLLDAIEEGGARGLVSRLAALEEEEEQLVLEIQRAEIKRPRLTHEVVEAWLRSFRVGDVTDDDFRARLVDTFIARVELRNDEALIFYNIREKGPHSRVRVRPEWWSPRDGTRTPKIIVLRDYVVLRIAV

SEQ ID NO: 5666 - protein, 502 aa, Unknown
  Description of Unknown: Integrase B5667 sequence
  cd03768,SM00857,G3DSA:1.10.10.2600,IPR036162,PF13408, PS51737,IPR025827,G3DSA:3.40.50.1390,IPR006119,IPR038109, PF07508,IPR011109,SSF53041,PTHR30461,PS51736, Coil,PF00239
MDIIREDCIYARQSVDRKDSISIESQIDFCKYELKGGSCKVFKDKGYSGKNTDRPEFQKLLGEIRKGRVRRVIVYKLDRISRSILDFANMMELFQEYDVEFVSSTEKFDTSTPMGRAMLNICIVFAQLERETIQKRVTDAYYSRCLKGFHMSGQAPYGYQLEPTVVEGIRTKKMVADPETSQYVKLMFEMYSEPETSFGDITRYFEEQNIKVYGKSLFRTFISQLLRNPVYAQADLELYEFFKSQGAAIVNDASDFAGTNGCYLYQGRDVKEDKDRSLKDQILVIAPHEALIPSDVWLKCRKKLMTNKSFQQGRKPKNTWLAGKVKCGCCGYALKATHVPNSEGYFRCSKRTENKGCPGCGKIRKSEFEEFIFSAMRARFKNFQVRHSREEKVNPKLTAHQIELAQVEAEIEKLLDTLTGANATLLAYANKKIEELDTRRQTISKEIAEMSIETMSPQKEQELSYYLDHWDSIEFDDKRKAVDGLIISISATSDHVQVEWKI

SEQ ID NO: 5667 - protein, 502 aa, Unknown
  Description of Unknown: Integrase B5668 sequence
  SM00857,G3DSA:1.10.10.2600,IPR036162,PF13408,PS51737, IPR025827,G3DSA:3.40.50.1390,IPR006119,IPR038109,PF07508, IPR011109,SSF53041,PTHR30461,Coil,PS51736, cd00338,PF00239
MRGVIYARYSPGPRQTEQSIEGQVADCKYYAEEHGIDIIEVYADRKVSGKSVVGRDEFQRMLRDAEKGRFDCVIVWKIDRFGRDRQDIALGKLTLKRAGVKLLYAKESVPEGPEGIILESVLEGLAEYYSADLRQKVIRGMKETAKKGQYCGQSLPIGYKVDAERHIVVDEREAAVVREAFKMHIAGAQIRDLVQLFADRGIMGRRGKPVSNAVIYRMLRNEKYLGEFYIQDVKLNVEPIIDQATFLEAARHFKTSRNNAAGRAKVNYLLSCKMFCGYCGSMINAETGTGKLGKVYRYYKCGDKKRGKKCELKPFPKEQLEDAIILATVNDMLTDDMIEKLTVRILEVQEQETADDPVAGLRRRLDSNRKRQRNLLDAIEEGGARGLVSRLTALEDEEEQLVVEIQRAEIKRPRLTHEVVEAWLRSFRVGDVTDEDFRARLVDTFIARVELRNDEALIFYNIREKGPHSCVRVRPEWWSPRDGTRTPKIIVLRDYVVLRIAV

SEQ ID NO: 5668 - protein, 502 aa, Unknown
  Description of Unknown: Integrase B5669 sequence
  cd03768,PTHR30461:SF3,SM00857,IPR036162,PF13408, IPR025827,G3DSA:3.40.50.1390,PS51737,IPR006119,PF07508, SSF53041,IPR011109,PTHR30461,PS51736,Coil, PF00239
MIAIYARQSVDKKDSISIESQIDFCKKEVGEEDYKVYKDKGYSGKNIDRPAFKEMMRDIKKNAITKVVAYKLDRISRSILDFNNLLEEFKKHNIEFVSVTEKFDTSTPMGKAMVNIVVTFAQLEREQIAQRVKDNYYERGKTGRFLGGKVPLGYTNTKVEIQGKKVPTLVINKEEALLIEKMFNMYAYEDISLSKISDYLNEQGLKSAKGTAWDSGKISRIIKNALYVKADVNVYNYYKNLGVEINNPIEDFIGTNGCFVYGKRDRNENRYTNLKDHKLSIGLHEGIIDADTFLKCQYKLSQNQQITRSGSGKHTWLTGLTKCGYCGYSMSAVVNSSGKYFNCRGKTNMKICNGHSRTIKVEEIENIVETEILNRLEELSKVKVKMENSNSKKIKSIETEIKIIDENIEKLLDKILESNDITIKYINKKVEELDNKKTELRNELNRITLEGSNNSSLEEVLKDANKIKNLSFDKKKSIAKSLIDKVLIRDNEIDIQWKVFNQ

SEQ ID NO: 5669 - protein, 502 aa, Unknown
  Description of Unknown: Integrase B5670 sequence
  PTHR30461:SF3,cd00338,SM00857,G3DSA:1.10.10.2600,IPR036162, PF13408,IPR025827,G3DSA:3.40.50.1390,PS51737,IPR006119, IPR038109,PF07508,IPR011109,SSF53041,PTHR30461, PS51736,Coil,PF00239
MTAVIYARYSSDSQREASIEGQLRDCKDYAEKNGITVVGTYIDRAYSAKTDDRPDFQRMIKDSGKKIFDVVLVWKLDRFARNRFDAVNYKYQLEKNGVHLVSAMEPISQGPEGIMVESMLIGMAEYYSAELALKVARGERENALQCKYNGGVVPLGFTIGKEDRLYHIDPETAPIVQEIFTRYADGEPAEKIAASLNERGLRTRTGKPFVKNSFFQIFRNRRYIGEYRYKDIVTPGGIPAIVDQDLFDRVQQRFEQNRIAHGRPAKEDVSYLLTTKLFCGKCGTLMGGESGTSHMGNTYYYYKCGNAKRHGKAHCDLKAIRKEPLERFVVDTAIKVIFSDEIIERLIDLVMEAQQQENTRLPVLKEQLRDTEKRLANLLEAIEQGILTSTTKQRLDELEARKEALNTSILEEELKKPVLTREWIRFWLEKFRKGDVGSTEHQRQIIDTFVNSVYVFDDRVVLNFNFTDDAKTISREEVLGSSAVDNAPPTKGISSGWCLFCG

SEQ ID NO: 5670 - protein, 502 aa, Unknown
  Description of Unknown: Integrase B5671 sequence
  PTHR30461:SF3,IPR036162,PS51737,IPR011109,PTHR30461, PS00397,PF00239,G3DSA:1.10.10.2600,IPR006119,SSF53041, cd00338,SM00857,IPR025827,IPR038109,PS51736, IPR006118,PF13408,G3DSA:3.40.50.1390,PF07508,Coil
MTDNTSMRTGALYIRVSTGKQEELSPDAQRRLLLDYASKNNIIISNQYIYEEDGISGRKADKRPQFQDMIAHAKSKEHPFDVILVWKYSRFARNQEESIVYKSMLRKDHVEVISVSEPLVDGPFGSLIERIIEWMDEYYSIRLSGEVVRGMTENALRGRNQARPPLGYKVPHAKETPVIVPEEALIIHTIFDMYTENGASMFAIAKHLNDLGYLTSHKKPFERRSIGYILSNPTYIGKSVWNRHSNDNKALKDESEWIIRDGSHEPIISAEQYEKAQQRIKAEYTPKYAKPPELHRHWLSGMVKCHTCGRSLSTSIHKDKRYGRTYTNFQCYGYLKGKCSVSHQISARKLEPAVLEGLKEIMEGVRPLQFKIIKSEEPTAQSAHEILTERLHDIEKKEERIRQAYRDGIDTIEEYRDNKAILFKERAEIESRLEELTPAPVPSETDTRELMRNRLKNVYEILSSEDVSTVTKSNALKSIVDKIVYDSEKKELSIYLYCSDAL

SEQ ID NO: 5671 - protein, 502 aa, Unknown
  Description of Unknown: Integrase B5672 sequence
  PTHR30461:SF3,SM00857,G3DSA:1.10.10.2600,IPR036162,PS51737, G3DSA:3.40.50.1390,IPR006119,IPR038109,PF07508,IPR011109, SSF53041,PTHR30461,Coil,PS51736,cd00338, PF00239
MTNKICIYLRKSRADEELEKTLGEGETLYKHRNALLKFAKEKKLNIVEIKEEIVSGESLFFRPQMLELLKEVEANKYDGVLVMDMQRLGRGDMKDQGIILETFKNSNTKIITPQKTYDLNNDFDEEYTEFEAFMSRKELKMINRRMQGGRVRSIEEGNYIATNPPFGYDISFIKKSRTLKINEHESKAVKLIFKLYIKGNGASFIANELNNLGYKTKLGNNFSSSSVLTIIKNPVYAGKIAWKRKDIKKSRTPGKIKDTKLRDKSEWIISDGKHEAIIDMETWNLAEEILKGRYHIPYQLANAPVNPFAGLITCGVCGKKMVMRKARGINRLMCIYKCGNKSTRFDNVESDCLDALKEYLVNYSAEIKNSTKKEDVDVYSNQISMLKKELSLLNNQKLKLFDLLERNIYDETTFLERSKNINDRIFSINNSLCNLEKLLKKKSIRSYEEDIKLFKSVLDAYNETEDVSKRNTLLKSILYKIEYTKTEKGKDYEIKLFPKLRK

SEQ ID NO: 5672 - protein, 502 aa, Unknown
  Description of Unknown: Integrase B5673 sequence
  cd03768,PTHR30461:SF3,SM00857,IPR036162,PF13408, IPR025827,G3DSA:3.40.50.1390,PS51737,IPR006119,PF07508, SSF53041,IPR011109,PTHR30461,PS51736,PF00239
MIAIYARQSVEKKDSISIESQIEYAKREVFTEDFKIYQDSGYSGKNTNRPAFHEMMADVQSGRIEKVVVYRLDRISRSILDFADFINILESNRISFVSATEKFDTSTPMGRAMLYIIVVFAQLERETIAERVRDNYYARVKKGAWGGGPAAFGFDLVKTTIDGKKATICQPNEQISVVQRIFELYALPYSSLADVQRQLIQDGSVSSGGVNFDNAKLSSILKNPAYVRADTAVYNFYKAKGAILANLPEEFDGVHGCILVGKRDANERKYKDVSDHLLAMGHHEGIVDSTTFLFCQQKLSRNRQIKNTYKGKHSWLTGLVKCAHCGYAFSIRFSRTKEGQVPYFCCSGKYLHKVCTAKQTHRVREIEAEVQASLIQHAASYNLIHRQNTAAAAKEFQSRISEIDAKIENLILSLESVSHVSAQYINQRIEALHHEKQLLLHRYNETISEYNINEVTPFSATDWEQMDIEQKRQLARSLIRTVYLSENGLSVSFNIKNGGHKP

SEQ ID NO: 5673 - protein, 502 aa, Unknown
  Description of Unknown: Integrase B5674 sequence
  PTHR30461:SF3,SM00857,G3DSA:1.10.10.2600,IPR036162,PF13408, PS51737,G3DSA:3.40.50.1390,IPR025827,IPR006119,IPR038109, PF07508,IPR011109,SSF53041,PF00239, PTHR30461,PS51736,Coil,cd00338
MSDTTQIGVIYARYSSDKQRDESIDGQIRECMAYAEREGITITNTYIDRALSAKTDDRPEFRQMILDSNKQAFNYVLVYQLDRFSRNRYDSAIYKAKLRKNGIRVISVKENIKDDPSGIILESVLEGMAEYYSAELSQKVMRGMTDNVLQGKWVGTVVPYGYKLSNNRQLEINEHEANVVRKLFDMYLQRHTLSEMASYMNANGHLTHKGKPFNTNSIKAIISNEKYIGVYSWGSERIENAIPPIIDKNIFEKAQHKRNLRAKKKGNRSELYQLCGKLECGRCGGNYVGSTGTSKTGTLHHYYVCSNRRRKNACQAQNIRRDALDDIVISQTLAILNKPNVVNKIAKYAASSGKNLQSETVAQIDIIDAHIRDLKKSLDNYMTAIANGFISDVLKHRIEATEQELKDQIEIKTNLENTIIPVELTEDHIRFFLLKMAKENPSTLRGRARIIEAFVHHVTIYEDHIEIVFNYKNELSEFHDKTLESSLLNDLVTQKGFEPLAF

SEQ ID NO: 5674 - protein, 502 aa, Unknown
  Description of Unknown: Integrase B5675 sequence
  PTHR30461:SF3,IPR036162,PS51737,IPR011109,PTHR30461, PS00397,PF00239,G3DSA:1.10.10.2600,IPR006119,SSF53041, cd00338,SM00857,IPR025827,IPR038109,PS51736, IPR006118,PF13408,G3DSA:3.40.50.1390,PF07508,Coil
MTDNTSMRTGALYIRVSTGKQEELSPDAQKRLLLDYASKNNIIISNQYIYEEDGISGRKADKRPQFQDMIAHAKSKEHPFDVILVWKYSRFARNQEESIVYKSMLRKDHVEVISVSEPLVDGPFGSLIERIIEWMDEYYSIRLSGEVVRGMTENALRGRNQARPPLGYKVPHAKETPVIVPEEALIIHTIFDMYTENGASMFAIAKHLNNLGYLTSHKKPFERRSIGYILSNPTYIGKSVWNRHSNDNKALKDESEWIIRDGSHEPIISAEQYEKAQQRIKAEYTPKYAKPPELHRHWLSGMVKCHTCGRSLSTSIHKDKRYGRTYTNFQCYGYLKGKCSVSHQISARKLEPAVLEGLKEIMEGVRPLQFKIIKSEEPTAQSAHEILTERLHDIEKKEERIRQAYRDGIDTIEEYRDNKAILFKERAEIESRLEELTPAPVPSETDTRELMRNRLKNVYEILSSEDVSTVTKSNALKSIVDKIVYDSEKKELSIYLYCSDTL

SEQ ID NO: 5675 - protein, 502 aa, Unknown
  Description of Unknown: Integrase B5676 sequence
  PTHR30461:SF3,SM00857,G3DSA:1.10.10.2600,IPR036162,PF13408, PS51737,G3DSA:3.40.50.1390,IPR025827,IPR006119,IPR038109, PF07508,IPR011109,SSF53041,PTHR30461,Coil, PS51736,cd00338,PF00239
MNAVIYARFSSDNQSEESITAQIRACTEYAERNGYEIINTYIDRAFSARSDQRPEFQRMICDSSEKSFNAVIVHKIDRFSRDRYDHAIYRKELKKNGVRLISVLENLDDSPESVVLESVLEGFSEYYSRNLARETRKGLKEVALQAKLTGGRPPFGYDVDENNNYIINKLEADAVRQIFQACLNGQGYTQLIRDFEKRGIKSKMGKPFGKNSFNAILKNEKYMGRYVYYPIGTYREKISEPIIIEDAIPAIIDKKTFMEVQRIMESRKNTGRTIAVEPYLLSGILFCGECGAPMSGHRSKKSERITYAYECSQNSRKKNCEMRSFSRDKLEGIICDYVEKIISPEQLGGIKQYLKENQNIINRQNEGRIANLKKEITALDTKINNTIDLLIETKSDKLKEKLSGLEKRQKDLVYECEKLSVSELEDEKIEKYLIHISDFKTLPRKEKQLFVKKIIKKVTIHKNGDLDVLTTYSDVAAKLGGTTPYQSLAVPFWVRAKLHYFS

SEQ ID NO: 5676 - protein, 502 aa, Unknown
  Description of Unknown: Integrase B5677 sequence
  SM00857,G3DSA:1.10.10.2600,IPR036162,PF13408,PS51737, G3DSA:3.40.50.1390,IPR025827,IPR006119,IPR038109,PF07508, IPR011109,SSF53041,PTHR30461,Coil,PS51736, cd00338,PF00239
MRGVIYARYSPGPHQTEQSIEGQVADCQQYAEEHGIDIIEIYADRHVSGKSVVGRDEFQRMLRDAEKGRFDCVLVWKIDRFGRDRQDIAMGKMTLKRAGVKLMYARESVPEGPEGIILESVLEGLAEYYSADLRQKVIRGMKETAKKGQYCGQPLPIGYKVDSQRHVVIDEREAAVVREAFKLHIAGAQLRDIVQLFADRGVMGRRGKPVSNAVVYRMLRNEKYLGEFYIQDVKLNVEPIIDQATFLEAAQHFKTSRNNAAGRAKVNYLLSCKMFCGYCGSMISAEAGTGKLGKVYRYYKCGDKKRGKKCELKPFPKDHLEDAIILATVNDMLTDEMIEKLTVRILEVQEQENADDPVVGLRRRLDSNKKRQRNLLDAIEEGGARGLVSRLAALEEEEEQLVLEIQRAEIKRPRLTHEVVEAWLRSFRVGDVTDDDFRARLVDTFIARVELRNDEALIFYNIREKGPHSRVRVRPEWWSPRDGTRTPKIIVLRDYVVLRIAV

SEQ ID NO: 5677 - protein, 502 aa, Unknown
  Description of Unknown: Integrase B5678 sequence
  cd03768,SM00857,IPR036162,G3DSA:3.40.50.1390,IPR006119, SSF53041,PTHR30461,PS51736,Coil,PF00239
MKKVAIYSRKSVLVEGSVSIETQINMCKDYINNKFPNAKFKVFEDEGFSGGNTNRPAFQKMLRMAQLNEIDIVVCYKVDRIARNTLDFLKILELFKENNVELISISEGFDPNTQMGKVMLTLLASFAEMERTNIQQRVKDNLLSIAKKGKWTGGSPPTGFKNGLNGGLEWNKQDMILDVFNMKYEKEKNTNIIKYIKEKYNHNFLGGTLATTLRKPIYVKSSPSVSLYLKTKEYIVQGNEDNIHSYLTYTDKETKYAIVSDIVGLIEPSVWISINKDMDKNISREGNRFSEKFWLTKTVRCKYCGQTFCGQTKTTKTKHYNKHGEEKIYISTYSYYSCRDAVRGKLKTCTNTKRVKQEILESKVSELIHLLKDKKTFNSSYFSNKIDNSSKIDTIKKQIKNIDKTINNLTDKIALLSNEASLIFISKLEELVKEKSMLKDNLLQLELQELNSNTKKDSSLVYNNILAFNDDLSVDDKRKIAMSLFKEIIYDPETDSLDVTFM

SEQ ID NO: 5678 - protein, 502 aa, Unknown
  Description of Unknown: Integrase B5679 sequence
  PTHR30461:SF3,SM00857,G3DSA:1.10.10.2600,IPR036162,PF13408, IPR025827,PS51737,G3DSA:3.40.50.1390,IPR006119,IPR038109, PF07508,IPR011109,SSF53041,PF00239, PTHR30461,PS51736,Coil,cd00338
MQRAVIYARYSPGPNQTEQSIEGQVRECTKYAELHDLRIVGTYIDRKISGKTDNRREFQRMIDDSEKHIFDVIILYHTDRFARNRYDSAIYKHKLKENGVELRYATTDIPKGPEGIILESIMEGWAEYYSAELSRKIKRGMRESALKCHSTGAGRCLGYRTAEDKSLVIEPEGAKAVQTVFDMYIKGKSHADICRYLNDCGFRTAQGKLFNKNSVTHIIRNKRYIGVYTYDDIMIEDGIPAIISKDTFHLAQLEAARRKTAKRPKEPKAEYLLSGKAFCGHCQKPLVGVSGTGKSGNKWYYYYCQESRAKRGCTKKPVKRDWLEREVVERTVAEVLQPEVIQHIAKKCYDLQMEYRQDNSDVLFYELKLKDVRKAIKNTMHAIESGVKTKTLPARLQELENEEEALEAELAIAKASDFVITTDQIEFLLTQFAEPWECESEEEYHRRIIKCFVHKVFLFDDKLLIYYNVSRDGKTREQSEAELLEEALGEGFDKRSSGSTKK

SEQ ID NO: 5679 - protein, 502 aa, Unknown
  Description of Unknown: Integrase B5680 sequence
  PTHR30461:SF3,SM00857,G3DSA:1.10.10.2600,IPR036162,PF13408, IPR025827,G3DSA:3.40.50.1390,PS51737,IPR006119,IPR038109, PF07508,SSF53041,IPR011109,PTHR30461,Coil, PS51736,cd00338,PF00239
MANNAVLYTRVSSDEQKKTGFSLDYQEKQGREYAKKNGLNIVKIFSESYTAKKPGRPQFNEMMSYVQKHKVEHLIFLKSDRASRNGVDSAALVYMAERDIYNIHLIQDCICLNRRSRPTDFLVFEMNNIIANFYPRNLSVDVTTKLLEKAEQGYYPERPPIGYMRKPNLKKAYLQINPEKAPFIKRTFELYSTGNYSYQSLAKQLREEGFLISPSTKCGKSNVEDILNNPIYMGDFVFKGKRYYNAKHEPIISRELYSACQKIIEERTGARTTKYDFAFSNLLKCSKCGCYLVAELKKKKYVYYHCTGNRGGTCKSKSYIREEKIEKAVLETFKKFHLDENTLPLAKRAFINQLKEQNGYVEERIESLDSEIAKVKKRSEKLFELLLDGKVSNEIFEKKTAEIETTLDNLILQRSACSKAGLELLRYSENLFELLSMTTMLYFAMSNEKKRQILKMLCSNFYYDGENVIITIKKAFQPLVEIANLKMVGMKRLELPRFRTSS

SEQ ID NO: 5680 - protein, 502 aa, Unknown
  Description of Unknown: Integrase B5681 sequence
  PTHR30461:SF3,cd00338,SM00857,G3DSA:1.10.10.2600,IPR036162, PS51737,G3DSA:3.40.50.1390,IPR006119,IPR038109,PF07508, IPR011109,SSF53041,PTHR30461,PS51736,Coil, PF00239
MNNKICMYLRKSRADEELEKTLGEGETLSKHRNALLKFAKEKNLNIVEIKEEIVSGESLFFRPKMLELLKEVEAQKYDGVLVMDMQRLGRGDMKDQGIILETFKNSNTKIITPQKTYDLNNDFDEEYTEFEAFMSRKELKMINRRMQGGRVRSVEEGNYIATNPPFGYDIDFIKKSRTLKINEDEAPAINLIFKLYIEGNGASAIADELNVLGYKTKLGNKFSQSSVLTIIKNPVYIGKIAWKRKDIKKSKTPGKVKDTRLRDVSEWIIADGKHKAIINTETWEAAQKILKSRYHIPYQLSNSPVNVFAGLITCGICGKKMVMRKARGINRLMCIYKCGNKSTRFDNVESDCLKYLKDYLTDYTAEIKNKIKESDNNIYISQISQLKKELTALNNQRLKLFDLLERNLYDEDTFLERSKNINDRIETVSSTLRSIEKLLNKKSKASYEEDIKFFKSVLDAYDETEDISKKNSLLKSILFKIEYTKTKKGKDYEIKLFPKLRK

SEQ ID NO: 5681 - protein, 502 aa, Unknown
  Description of Unknown: Integrase B5682 sequence
  PTHR30461:SF3,IPR036162,PS51737,IPR011109,PTHR30461, PS00397,PF00239,G3DSA:1.10.10.2600,IPR006119,SSF53041, cd00338,SM00857,IPR025827,IPR038109,PS51736, IPR006118,PF13408,G3DSA:3.40.50.1390,PF07508,Coil
MPDNTSMRTGALYIRVSTGKQEELSPDAQRRLLLDYASKNNIIISNQYIYEEDGISGRKADKRPQFQNMIAHAKSKEHPFDVILVWKYSRFARNQEESIVYKSMLRKDHVEVISVSEPLVDGPFGSLIERIIEWMDEYYSIRLSGEVVRGMTENALRGRNQARPPLGYKVPHAKETPVIVPEEALIIHTIFDMYTENGASMFAIAKHLNNLGYLTSHKKPFERRSIGYILSNPTYIGKSVWNRHSNDNKALKDESEWIIRDGSHEPIISAEQYEKAQQRIKAEYAPKYAKPPELHRHWLSGMVKCHTCGRSLSTSIHKDKRYGRTYTNFQCYGYLKGKCNVSHQISARKLEPAVLEGLQEIMEGVRPLQFKIIKSEEPATQSAHEILTERLHDIEKKEERIRQAYRDGIDTIEEYRDNKAILFKERTEIESRLAELTPAPVPSETDTRELMRNRLKNVYEILSSEDVSTVTKSNALKSIVDKIVYDSEKKELSIYLYCSDTL

SEQ ID NO: 5682 - protein, 502 aa, Unknown
  Description of Unknown: Integrase B5683 sequence
  SM00857,G3DSA:1.10.10.2600,IPR036162,PF13408,IPR025827, G3DSA:3.40.50.1390,PS51737,IPR006119,IPR038109,PF07508, SSF53041,IPR011109,PF00239,PTHR30461,PS51736, Coil,cd00338
MRGVIYARYSPGPRQTEQSIEGQVADCKYYAEENGIDIIEVYADRKVSGKSVVGRDEFQRMLRDAERGLFDCVLVWKIDRFGRDRQDIALGKLTLKRAGVKLMYAKESVPEGPEGIILESVLEGLAEYYSADLRQKVIRGMKETAKKGQYCGQPLPIGYKVDADRHVVIDEERATLVRQAFQMHIAGATMKDLMEHFRSHGVVGQRGRPISHNVIYRMLRNRKYLGEFEVQGVRLPVEPIIDEATFQEAAQHFKTSRNNAAGRAKVDYLLSCKCFCGYCGAMLNAEAGTSKTGKVYHYYKCGDKKRGKKCEMKAIPQDRLEDAVILATVHDMLTDDMIDKLAVRVLEVQEQELADDPVAALRRRLDSVRKRQRNLLDAIEEGGARGLVSRLSALEDEEEALVIEIERAEIKRPRLTREVVEAWLRSFRDGDVTDDDFRARLIDTFVARIEVRNDVALIFYNIREKGPHSKVRVRSEWWSPRSGTRTPEIFVLRDYIVLKIAV

SEQ ID NO: 5683 - protein, 502 aa, Unknown
  Description of Unknown: Integrase B5684 sequence
  PTHR30461:SF3,SM00857,G3DSA:1.10.10.2600,IPR036162,PF13408, IPR025827,G3DSA:3.40.50.1390,PS51737,IPR006119,IPR038109, PF07508,IPR011109,SSF53041,PF00239,PTHR30461, PS51736,Coil,cd00338
MRGVIYARYSPGPRQTEQSIEGQVADCQQYAEEHGIDIIEIYADRKVSGKSVVGRDEFQRMLRDAEKGRFDCVLVWKIDRFGRDRQDIALGKMTLKRAGVKLMYARESVPEGPEGIILESVLEGLAEYYSADLRQKVIRGMRETAKKGQYCGQSLPIGYKVDAERHIVVDEREAAVVREAFKLHIAGGQIRDIVQLFADRGIMGRRGKPVSNAVVYRMLRNEKYLGEFYIQDVKLNVEPIIDQATFLEAARHFKTSRNNAAGRAKVNYLLSCKMFCGYCGSMINAETGTGKLGKVYRYYKCGDKKRGKACELKPFPKDHLEDAIILATVNDMLTDDMIEKLTVRILEVQEQENADDPVVGLRRRLDSNKKRQRNLLDAIEEGGARGLVSRLAALEEEEEQLVLEIQRAEIKRPRLTREVVEAWLRSFRVGDVTDDDFRARLVDTFIARVELRNDEALIFYNIREKGPHSRVRVRPEWWSPRDGTRTPKIIVLRDYVVLRIAV

SEQ ID NO: 5684 - protein, 502 aa, Unknown
  Description of Unknown: Integrase B5685 sequence
  PTHR30461:SF3,IPR036162,PS51737,IPR011109,PTHR30461, PS00397,PF00239,G3DSA:1.10.10.2600,IPR006119,SSF53041, cd00338,SM00857,IPR025827,IPR038109,PS51736, IPR006118,PF13408,G3DSA:3.40.50.1390,PF07508,Coil
MTNNTSMRTGALYIRVSTGKQEELSPDAQRRLLLDYASKNNIIISNQYIYEEDGISGRKADKRPQFQDMIAHAKSKEHPFDVILVWKYSRFARNQEESIVYKSMLRKDHVEVISVSEPLVDGPFGSLIERIIEWMDEYYSIRLSGEVVRGMTENALRGRNQARPPLGYKVPHAKETPVIVPEEALIIHTIFDMYTEDGASMFAIAKRLNNLGYLTSHKKPFERRSIGYILSNPTYIGKSVWNRHSNDNKALKDESEWIIRDGSHEPIISVEQYEKAQQRIKAEYAPKYAKPPELHRHWLSGMVKCHTCGRSLSTSIHKDKRYGRTYTNFQCYGYLKGKCSVSHQISARKLEPAVLEGLKEIMEGVRPLQFKIIKSEEPTAQSAHAILTERLHDIEKKEERIRQAYRDGIDTIEEYRDNKAILFKERAEIESRLEELTPAPVPSETDTRELMRNRLKNVYEILSSEDVSTVTKSNALKSIVDKIVYDSEKKELSIYLYCSDTL

SEQ ID NO: 5685 - protein, 502 aa, Unknown
  Description of Unknown: Integrase B5686 sequence
  cd03768,PTHR30461:SF3,SM00857,IPR036162,PF13408, IPR025827,G3DSA:3.40.50.1390,IPR006119,SSF53041,PTHR30461, PS51736,Coil,PF00239
MKRIAIYSRKSVYIEGSISIETQINMCKEYMLKKFKDCEFKIFEDEGFSGGNTNRPAFQKMLRLAELKQIDIVVCYKIDRIARNTLDFLNILEMFKENNVELISITEGFDPNTQMGKVMLTLLASFAEMERSNIQQRVKDNLLSIAKKGKWTGGSPPTGFKNNPNGGIEWDNKDMILDVFNMKYEKSKNTDLIQFIQHKYNHKFLGGTLATTLRKPIYVKSSSSVSLYLKSKGYIVQGTEDNIHSYLTYTDKDTKYAIVSNIVGLVEPSIWISVNKDMDKNISREGNRFSEKFWLTKTIRCKCCGQTYCGQTKTTKTKYYNKKGEEKIYVSTYSYYSCRDAVRGKLKTCNNTKRIKQDVLEAKVSALIYSLKDEKIFNSSYSINKVDNSFKIASLNKKVIEIDKTISNLTDKIALLSNDASLIFIDKIENLIKEKSSIKSNIVELELQELNSKIKTDKALIYNNIKAFNNNLSVDDKRKITMSIFKKIVYDPETNDLDVTFM

SEQ ID NO: 5686 - protein, 502 aa, Unknown
  Description of Unknown: Integrase B5687 sequence
  cd03768,PTHR30461:SF3,SM00857,IPR036162, G3DSA:3.40.50.1390,IPR006119,SSF53041,PTHR30461, PS51736,Coil,PF00239
MKKVAIYSRKSVLVEGSVSIETQINMCKDYINNKFPNAKFKVFEDEGFSGGNTNRPAFQKMLRMAQLNEIDIVVCYKVDRIARNTLDFLKILELFKENNVELISISEGFDPNTQMGKVMLTLLASFAEMERSNIQQRVKDNLLSVAKKGKWTGGSPPTGFKNGLNGGLEWDKKDMILDTFNIKYEKETNSKILEYIYERYNHRFLDGTLATTLRKPIYVKSSASVSLYLKTKGYIIHGEEDNIHSYLTYTDNDKKYAIVSDIKGLIEPSTWISINKDMDKNICREGNRFSKRFWLTKTIRCKYCGKTFCGQTRTTKTKHYNKYGEEKVYISTHNYYACRNAVSGKFKTCNKIKRIRQEILEGKVSELIYLLKDKDFFNSSYFANKIDNSSKINNINKQIKSIDKTINNLTDKIALLSNEASLIFISKLEELVKEKSILKDNLLQLELQELNSNTKKDSSLVYNNILAFNDDLNVDDKRKIAMSLFKEIIYDPETDSLDVTFM

SEQ ID NO: 5687 - protein, 502 aa, Unknown
  Description of Unknown: Integrase B5688 sequence
  SM00857,G3DSA:1.10.10.2600,IPR036162,PS51737,G3DSA:3.40.50.1390, IPR006119,IPR038109,PF07508,SSF53041,IPR011109, PF00239,PTHR30461,PS51736,Coil,cd00338
MKTCIYLRKSRADEELEKKEDVDTLARHRSTLLEVAKKQDLNIVEIKEEVVSGDSIAKRPKMIQLLEEVEQNTYDAVLCMDIDRLGRGDMQDQGKIINTFKESNTLIVTPDKIYNLNNDLDEEMTEFKTFFARRELKVITKRMQRGRVKSIEEGNFIGSVAPLGYKFEYDKFGKRHMVIDEETAPAIRIIFDMYLNGEGSFRIMKRLNTLGYKTTAGKDFTECAVRRIVRNQTYCGYVTWFEYKRKGTKTRKNKESDVLVCKGKHQAIISEDDWNKAQEIRKGNQITAKKSDRKLINPLAGLIKCSCCKHTMVASYNTVKEGPVLYLRCKQCYEVGSSRLDLIEEEIINILKIKLKEIKDELDNTEIEDRENKQLEMLQNTLTTLDKEKTELDKQKDRLHDLLERGIYDVDTFLERQQTLANKKEEIETAIKGTKKLLEVEVSRDIDYKELAQNIECAIESYENTDNIELKNKALKTVIKEILYYKEKKRFAQFTLEVKFKI

SEQ ID NO: 5688 - protein, 502 aa, Unknown
  Description of Unknown: Integrase B5689 sequence
  PTHR30461:SF3,SM00857,G3DSA:1.10.10.2600,IPR036162,PF13408, IPR025827,G3DSA:3.40.50.1390,PS51737,IPR006119,IPR038109, PF07508,IPR011109,SSF53041,PF00239, PTHR30461,PS51736,Coil,cd00338
MRGVIYARYSPGPRQTEQSIEGQVADCQQYAEEHGIDIIEIYADRKVSGKSVVGRDEFQRMLRDAEKGRFDCVLVWKIDRFGRDRQDIALGKMTLKRAGVKLMYARESVPEGPEGIILESVLEGLAEYYSADLRQKVIRGMRETAKKGQYCGQSLPIGYKVDAERHIVVDEREAAVVREAFKLHIAGGQIRDIVQLFADRGIMGRRGKPVSNAVVYRMLRNEKYLGEFYIQDVKLNVEPIIDQATFLEAARHFKTSRNNAAGRAKVNYLLSCKMFCGYCGSMINAETGTGKLGKVYRYYKCGDKKRGKACELKPFPKDHLEDAIILATVNDMLTDDMIEKLTIRILEVQEQENADDPVVGLRRRLDSNKKRQRNLLDAIEEGGARGLVSRLAALEEEEEQLVLEIQRAEIKRPRLTREVVEAWLRSFRVGDVTDDDFRARLVDTFIARVELRNDEALIFYNIREKGPHSRVRVRPEWWSPRDGTRTPKIIVLRDYVVLRIAV

SEQ ID NO: 5689 - protein, 502 aa, Unknown
  Description of Unknown: Integrase B5690 sequence
  PTHR30461:SF3,cd00338,SM00857,G3DSA:1.10.10.2600,IPR036162, PF13408,PS51737,G3DSA:3.40.50.1390,IPR025827,IPR006119, IPR038109,PF07508,SSF53041,IPR011109,PTHR30461, PS51736,Coil,PF00239
MYEDIKTACLYVRFSSHNQTEQSIEGQTRVCRDFCKRHNIKIVEIYADRATSASKDIEKRVQFLKMIKDSEKGLFDAVIVYKLDRFARSRYDSATYKYRLKRNGVQLISATENISNDPEGIILESVLEGMAEFYSAELSQKINRGMRESAYKHNSIGGAIPLGYKIEDKKLVIDPKTAPIVKEAFEKYADGETVAEICRQFNARGYKTSKGTAFGKSSFTKIFRNERYIGVYSFHDYRAEDAIPAIIDKDLWDRVQLRVGKIKNAPARNKAKVVYLLSGKIFCGHCGSKMNGNCNAGNYYYYQCYGKKNGNVDCKKKNIRKEFIERLVAQDALSLLTDEYIEQIATIACEKNQHEIELDSALPTIRDRIHQVDLSLNNLLKAIESGSAPDMLVKRMGELEKEKKDLQVQAKKESEDIVELDKAQVIYWLEQFRGGSIEDEEFCRMLIDLFVNSVTVWDEDDNTYKVTVAYNLTSLPTKTYRLNKGGTLSDFASNAPAFTRRI

SEQ ID NO: 5690 - protein, 502 aa, Unknown
  Description of Unknown: Integrase B5691 sequence
  PTHR30461:SF3,cd00338,SM00857,G3DSA:1.10.10.2600,IPR036162, PS51737,G3DSA:3.40.50.1390,IPR006119,IPR038109,PF07508, IPR011109,SSF53041,PTHR30461,PS51736,Coil, PF00239
MKTCIYLRKSRADEELEKKEKVDTLSRHRSTLLEVAKKQNLDIVEIKEEIVSGDSIAKRPKMIQLLEEVENNLYDAVLCMDIDRLGRGDMQDQGKIINTFKQSNTYIVTPDKTYNLNNELDEEMTEFKTFFARRELKVITKRMQRGRVKSIEEGNFIGSIAPLGYKFEYDKLGKRHMMIDEETAPAIKLVFDMYLKGEGAYKIMNHLNTLGYKTTAGKCFTECAVRRIIRNKTYCGYVTWFEYKRKGTKTRKNRESDMIACKGKHQAIISEDDWNQAQEIRINNQIPAKKSGRKLINPLAGIVKCSNCKHTMVASYNTGKEGPVLYLRCKQCYEVGSSRLDLIEEEIINVLKIKLKEIKDELDNTEIEDRENKQLEMLQNTLTTLEKEEKELDKQKNKLHDLLERGIYDVDTFLERQQTLANKKEEIEIAIKGTKKLLEAEVSKDIDYKELAENIECAIESYENTDNIELKNKALKTIIKEILYNKEKKRFAQFTLEVKFKI

SEQ ID NO: 5691 - protein, 502 aa, Unknown
  Description of Unknown: Integrase B5692 sequence
  PTHR30461:SF3,cd00338,SM00857,G3DSA:1.10.10.2600,IPR036162, PF13408,PS51737,IPR025827,G3DSA:3.40.50.1390,IPR006119, IPR038109,PF07508,SSF53041,IPR011109,PTHR30461, PS51736,Coil,PF00239
MYEDIKTACLYVRFSSHNQTEQSIEGQTRVCRDFCKRHNIRIVEIYADRATSASKDIEKRVQFLKMIKDSEKGLFDAVIVYKLDRFARSRYDSATYKYRLKRNGVQLISATENISNDPEGIILESVLEGMAEFYSAELSQKINRGMRESAYKHNSIGGAIPLGYKIEDKKLVIDPKTAPIVKEAFEKYADGETVAEICRQFNARGYKTSKGTAFGKSSFTKIFRNERYIGVYTFHDYRAEDAIPAIIDKDLWDRVQLRVGKIKNAPARNKAKVVYLLSGKLFCGHCGSKMNGNCNAGNYCYYQCYGKKNGNVDCKKKNIRKEFIERLVAQDALSLLTDEYIEQIATIACEKNQHEIELDSALPTIRDRIHQVDLSLNHLLKAIESGSAPDMLVKRMGELEKEKKDLQAQAKKESEDIVELDKAQVIYWLEQFRGGSIEDEEFCRMLIDLFVNSVTVWDEDDNTYKVTVAYNLTSLPTKTYRLNKGGTLSDFASNAPPMNPLV

SEQ ID NO: 5692 - protein, 502 aa, Unknown
  Description of Unknown: Integrase B5693 sequence
  PTHR30461:SF3,IPR036162,PS51737,IPR011109,PTHR30461, PS00397,PF00239,G3DSA:1.10.10.2600,IPR006119,SSF53041, cd00338,SM00857,IPR025827,IPR038109,PS51736, IPR006118,PF13408,G3DSA:3.40.50.1390,PF07508,Coil
MTDNTSMRTGALYIRVSTGKQEELSPDAQRRLLLDYASKNNIIISNQYIYEEDGISGRKADKRPQFQNMIAHAKSKEHPFDVILVWKYSRFARNQEESIVYKSMLRKDHVEVISVSEPLVDGPFGSLIERIIEWMDEYYSIRLSGEVVRGMTENALRGRNQARPPLGYKVPHAKETPVIVPEEALIIHTIFDMYTENGASMFAIAKHLNDLGYLTSHKKPFERRSIGYILSNPTYIGKSVWNRHSNDNKALKDESEWIIRDGSHEPIISTEQYEKAQQRIKAEYTPKYAKPPELHRHWLSGMVKCHTCGRSLSTSIHKDKRYGRTYTNFQCYGYLKGKCSVSHQISARKLEPAVLEGLKEIMEGVRPLQFKIIKSEEPTAQSAHEILTERLHDIEKKEERIRQAYRDGIDTIEEYRDNKAILFKERTEIESRLAELTPAPAPSETDTRELMRNRLKNVYEILSSEDVSTVTKSNALKSIVDKIVYDSEKKELSIYLYCSDTL

SEQ ID NO: 5693 - protein, 502 aa, Unknown
  Description of Unknown: Integrase B5694 sequence
  PTHR30461:SF3,SM00857,G3DSA:1.10.10.2600,IPR036162,PF13408, IPR025827,PS51737,G3DSA:3.40.50.1390,IPR006119,IPR038109, PF07508,IPR011109,SSF53041,PF00239,PTHR30461, PS51736,Coil,cd00338
MKTAVIYARYSSDKQTEQSIEGQLYDCYNYAKANNITVIGEYIDRAMTGRNDDRPDFQRMISDSTKHTFELVLVWKLDRFARSTEDAAYNRGKLKRNGVRLLSIKEDFGDSSAGDLMMHVMESFNEFYSADLREKTVRGMHQSALKCQSTGGQIPIGYKIEGKKYVIDESARFIPETVFRMYAEGKRLAEIARYLNEKGYRTRMGRKFTTGSFYTMLSNEKYIGVYKYGDVRIEGGYEAMIDPVLFEAVQKKLVENKKRAPKISERENFYLTGKLFCGHCGEPMNGMSGNSTKGKHLYYRCNGVRKHTGCDKCTERKEEIENEIIGAIQRAFANADPEELTRKVIENYEKNSRPADQVKVMKAELQKITNKVDNVVNAIAEMGGNETLYTQLRQLTEQKEQKEAEIRIAEHKADDMPTVELVKKILDLIQNADTMTDEGRQLLIDGAVSRIYVYDDSLDIYFKGGKNTEIPLNPANKDDVSDNSFACCKEWGAKTKTYKPFR

SEQ ID NO: 5694 - protein, 502 aa, Unknown
  Description of Unknown: Integrase B5695 sequence
  cd03768,PTHR30461:SF3,SM00857,G3DSA:1.10.10.2600,IPR036162, PF13408,IPR025827,PS51737,G3DSA:3.40.50.1390,IPR006119, IPR038109,PF07508,IPR011109,SSF53041,PTHR30461, PS51736,Coil,PF00239
MEFIREDCIYARQSVDRKDSISIESQIDFCKYELKGGSCRVFKDKGYSGKNTDRPEFQKLLGEIRKGKVRRVIVYKLDRISRSILDFATMMELFQEYDVEFVSSTEKFDTSTPMGRAMLNICIVFAQLERETIQKRVTDAYYSRCLKGFHMSGQAPYGYQLEPTVVEGIRTKKMVADPVAADHVRLMFEMYAEPETSFGDITRYFEEHDIKIYGKSMFRTFLSQLLRNPVYAQADLELYEFFKSQGAAIVNDASDFAGTNGCYLYQGRDVKEDKDRCLKDQILVIAPHEALISSDTWLKCRKKLMANTTFQQGRKPKNTWLAGKIKCGHCGYALKATHVPNSTGYFRCTKRTENKGCPGCGKIRKEEFEQFIFSAMQEKFKDFQILHGREEKVNPKLTAYQVELAQVEAEIEKLLDTLTGANATLLAYANKKIEELDTRRQTISKAIAELSVETISPQQIKKLSYYLDNWDSIDFDDKRKAADGLISTIKATSDRVQIEWKI

SEQ ID NO: 5695 - protein, 502 aa, Unknown
  Description of Unknown: Integrase B5696 sequence
  PTHR30461:SF3,cd00338,SM00857,G3DSA:1.10.10.2600,IPR036162, PF13408,IPR025827,G3DSA:3.40.50.1390,PS51737,IPR006119, IPR038109,PF07508,SSF53041,IPR011109,PTHR30461, PS51736,Coil,PF00239
MSETTQIGVIYARYSSDKQRDESIDGQIRECMAYAEREGITITNTYIDRALSAKTDDRPEFRQMILDSNKQAFNYVLVYQLDRFSRNRYDSAIYKAKLRKNGIRVISVKENIKDDPSGIILESVLEGMAEYYSAELSQKVMRGMTDNVLQGKWVGTVVPYGYKLSNNRQLEINEHEANVVRKLFDMYLQRHTLSEMASYMNAHGHLTHKGKPFNTNSIKAIISNKKYIGVYSWGTERIENAIPPIIDKNIFEKAQHKRNLRAKKKGNRSELYQLCGKLECGRCGGNYVGSTGTSKTGTLHHYYVCSNRRRKNACQAQNIRRDALDDIVISQTLAILNKPNVVNKIAKYAASSGKNLQSETVAQIDIIDAHIRDLKKSLDNYMTAIANGFISDVLKHRIEATEQELKDQIEIKTNLENTIIPVELTEDHIRFFLLKMAKENPSTLRGRARIIEAFVHHVTIYEDHIEIVFNYKNELSEFHDKTLESSLLNDLVTQKGFEPLAF

SEQ ID NO: 5696 - protein, 502 aa, Unknown
  Description of Unknown: Integrase B5697 sequence
  PTHR30461:SF3,cd00338,SM00857,G3DSA:1.10.10.2600,IPR036162, PF13408,PS51737,IPR025827,G3DSA:3.40.50.1390,IPR006119, IPR038109,PF07508,SSF53041,IPR011109,PTHR30461, PS51736,Coil,PF00239
MSETTQTGVIYARYSSDKQRDESIDGQIRECMAYAEREGITITNTYIDRALSAKTDDRPEFRQMILDSNKQAFNYVLVYQLDRFSRNRYDSAIYKAKLRKNGIRVISVKENIKDDPSGIILESVLEGMAEYYSAELSQKVMRGMTDNVLQGKWVGTVVPYGYKLSNNRQLEINKHEANVVRKLFDMYLQRHTLSEMASYMNANGHLTHKGKPFNTNSIKAIISNEKYIGVYSWGAERIENAIPPIIDKSIFEKAQHKRNLRAKKKGNRSELYQLCGKLKCGRCGGNYVGSTGTSKTGALHYYYVCSNRRRKNACQAQNIRRDALDDIVISQTLAILNKPNVVNKIAKYAASSGKNLQSETVVQIDIIDAHIRDLKKSLDNYMTAIANGFISDVLKHRIEATEQELKDQIEIKTNLENTIIPVELTEDHIRFFLLKMAKENPSTLRGRARIIEAFVHHVTIYEDHIEIVFNYKNELSEFHNKTLESSLLNDLVTQKGFEPLAF

SEQ ID NO: 5697 - protein, 502 aa, Unknown
  Description of Unknown: Integrase B5698 sequence
  PTHR30461:SF3,cd00338,SM00857,G3DSA:1.10.10.2600,IPR036162, PF13408,IPR025827,PS51737,G3DSA:3.40.50.1390,IPR006119, IPR038109,PF07508,SSF53041,IPR011109,PTHR30461, PS51736,Coil,PF00239
MRGVIYARYSPGPHQTEQSIEGQVADCQQYAEEHGIDIIEIYADRHVSGKSVVGRDEFQRMLRDAEKGRFDCVLVWKIDRFGRDRQDIAMGKMALKRAGVKLMYARESVPEGPEGIILESVLEGLAEYYSADLRQKVIRGMKETAKKGQYCGQSLPIGYKVDAERHIVVDEREAAVVREAFKLHIAGGQIRDIVQLFADRGIMGRRGKPVSNAVVYRMLRNEKYLGEFYIQDVKLNVEPIIDQATFLEAARHFKTSRNNAAGRAKVNYLLSCKMFCGYCGSMISAEAGTGKLGKVYRYYKCGDKKRGKKCELKPFPKDHLEDAIILATVNDMLTDEMIEKLTVRILEVQEQENADDPVVGLRRRLDSNKKRQRNLLDAIEEGGARGLVSRLAALEEEEEQLVLEIQRAEIKRPRLTHEVVEAWLRSFRVGDVTDDDFRARLVDTFIARVELRNDEALIFYNIREKGPHSRVRVRPEWWSPRDGTRTPKIIVLRDYVVLRIAV

SEQ ID NO: 5698 - protein, 502 aa, Unknown
  Description of Unknown: Integrase B5699 sequence
  cd03768,PTHR30461:SF3,SM00857,IPR036162,PF13408, IPR025827,G3DSA:3.40.50.1390,PS51737,IPR006119,PF07508, IPR011109,SSF53041,PTHR30461,PS51736,PF00239
MIAIYARQSVEKKDSISIESQIEYAKREVFSEDFKIYQDSGYSGKNTNRPAFHEMMADVQSGRIEKVVVYRLDRISRSILDFADFINILESNQISFVSATEKFDTSTPMGRAMLYIIVVFAQLERETIAERVRDNYYARVKKGAWGGGPAAFGFDLVKTTIDGKKATICQPNEQISVVQRIFELYALPYSSLADVQRQLIQDGTVSAGGVNFDNAKLSSILKNPAYVRADTAVYNFYKAKGAILANPPEDFDGVHGCILVGKRDANERKYKDVSNHLLAMGHHEGIVDSTAFLFCQQKLSRNRQIKNTYKGKHSWLTGLVKCAHCGYAFTIRFSKTKDGQIPYFCCSGKYLHKACTAKQTHRVREIEAEVQASLIQHAASYNLIHRQNTDAAAKEFQSRISEIDAKIENLILSLESVSHVSAQYINQRIEALHREKQLLLHRYNETISEYNINEVTPFSATDWEQMDIEQKRQLARSLIRTVYLSEDGLSVSFNIKNGGHKP

SEQ ID NO: 5699 - protein, 502 aa, Unknown
  Description of Unknown: Integrase B5700 sequence
  PTHR30461:SF3,cd00338,SM00857,G3DSA:1.10.10.2600,IPR036162, PF13408,IPR025827,G3DSA:3.40.50.1390,IPR006119,IPR038109, PF07508,IPR011109,SSF53041,PTHR30461, PS51736,Coil,PF00239
MKKAYSYIRFSSEAQRQGDSVHRQDKLIREWLISNPDYTLDETLSFRDLGLSGYDSSNISKGGLGVFLEAVKSGLIKEGSVLLVESLDRLTRVSIDHAQELLRSLLKAGINVVTLSDGTTYDKSSLNDPLSLIKSILIAERAHEESLTKSKRVKAAWDSKRDKLRSGNDKKILTRNCPMWLEVSEDRSSFKVRESIAALIREIFKMRIEGSPIQEIARKFSKEFSPSFVNTVLYNVAVIGTLKTRAVQEPIEGYYPAIIDESTFYQVQLLKQSSKGKKPLNRYPNRVYLFKGLLVCGECHKSISVIGATETVYGAYRCRDFNSGRCSQRSISRGQVDKSLFELFRYMDRLPIATSIDNVLDSLQLKKKDCEERIQRLVEALEVSPNTKPLVERIKALQSDLDAIEISIEEESYKVKSFNRDRLVDSCDMNTVEGRNEFHLIVKRLVKRIYLDTLNRRVTVELVNGKVIEGYPASKDIDKEPPINILEILERDYLNLDKISLD

SEQ ID NO: 5700 - protein, 502 aa, Unknown
  Description of Unknown: Integrase B5701 sequence
  cd03768,PTHR30461:SF3,SM00857,G3DSA:1.10.10.2600,IPR036162, PF13408,IPR025827,PS51737,G3DSA:3.40.50.1390,IPR006119, IPR038109,PF07508,IPR011109,SSF53041,PTHR30461, PS51736,Coil,PF00239
MEFIREDCIYARQSVDRKDSISIESQIDFCKYELKGGSCRVFKDKGYSGKNTDRPEFQKLLGEIRKGKVRRVIVYKLDRISRSILDFATMMELFQEYDVEFVSSTEKFDTSTPMGRAMLNICIVFAQLERETIQKRVTDAYYSRCLKGFHMSGQAPYGYQLEPTVVEGIRTKKMVADPIAADHVRLMFEMYAEPETSFGDITRYFEEHDIKIYGKSMFRTFLSQLLRNPVYAQADLELYEFFKSQGAAIVNDASDFAGTNGCYLYQGRDVKEDKDRCLKDQILVIAPHEALISSDTWLKCRKKLMANTTFQQGRKPKNTWLAGKIKCGHCGYALKATHVPNSTGYFRCTKRTENKGCPGCGKIRKEEFEQFIFSTMQEKFKDFQILHGREEKVNPKLTAYQVELAQVEAEIEKLLDTLTGANATLLAYANKKIEELDTRRQTISKAIAELSVETISPQQIKKLSYYLDNWDSIDFDDKRKAADGLISTIKATSDHVQIEWKI

SEQ ID NO: 5701 - protein, 502 aa, Unknown
  Description of Unknown: Integrase B5702 sequence
  PTHR30461:SF3,IPR036162,PS51737,IPR011109,PTHR30461, PS00397,PF00239,G3DSA:1.10.10.2600,IPR006119,SSF53041, cd00338,SM00857,IPR025827,IPR038109,PS51736, IPR006118,PF13408,G3DSA:3.40.50.1390,PF07508,Coil
MKKKILMAALYIRVSTEKQEELSPDSQKRLLLDYAKSHDMIVSEKHIYIENGISGRKADKRPKFQQMIATAKSSDHPFDVILLWKFSRFARNQEESIVYKSMLRNKYSVDVVSISEPLVDGPFGSLIERIIEWMDEFYSIRLSGDVTRGMTQKALNGGYQCRPPLGYRIPYHKATPEIVPDEAKIVRLIFEKYVYENMSIFAIVKHLNSLGHKTSHGKPFEKRSIEYILQNPGYAGDIRWNRTINETNEIRDPSEWIIRPGHHPAIIEKELFEKAQERYHSEYKRRNAKPSEISKHWLSGLLKCSKCGRSLSSCVVHRKTLPDSFYFQCYGYLKGKCNNDCYVREEEIGPTVIKALEEALRKGTVSYTIKKSYQNQSRGSELEVLYKNLDRLSFKEERAKEAYIDGIDTKEEYKANKLRLQKERQELQEMIDTIEHNSSDTVSNDSRMLSSISNVLDIVQSDKFTMQEKNAALKSIVDQITYDKKINHIDVDYYLIETPEAL

SEQ ID NO: 5702 - protein, 502 aa, Unknown
  Description of Unknown: Integrase B5703 sequence
  cd03768,SM00857,G3DSA:1.10.10.2600,IPR036162,PF13408, IPR025827,G3DSA:3.40.50.1390,PS51737,IPR006119,IPR038109, PF07508,IPR011109,SSF53041,PTHR30461,PS51736, Coil,PF00239
MKTDSNKELRCAIYTRKSVAEGLDKDFNTLDAQREAGESYIASQKHEGWIVIPKHYDDGGFTGGNMERPALQELFDDIKNGKIDIVVVYKVDRLSRSIMDFAKIVELFESHNVSFVSVTQHFNTKDSMGRLTLNILLSFAQFERELISERIKDKMSASRKKGRWTGGLPVLGYDILPEGRAIAVNHKEAQIVRRIFAYYLENRSIRSVLEWLQSENMRTKTWKSRKGKILGGNGFSLSVLAHLLKNKIYIGKIEYEGEIYEAECDAIIDPDTFEKVQVLLAANNVDKSPQVRNKYNALLSGKVFCKHCGTPMTHSYTKKTQNKVYRYYICSNATKTGWKNCPHPSVSAEELESLVVSELEKISDDTKLADDVIESYFTINEVELDTLIKNESFAKRSIEKLRRKISENENASNIAELRRKETDTESAMEDIRAEIKRLRNRLETSKGKLRNMFADFRKVWSNLNFKEQYELTDLLIERIVFDGTNGEVFINFRETGIKTFKE

SEQ ID NO: 5703 - protein, 502 aa, Unknown
  Description of Unknown: Integrase B5704 sequence
  PTHR30461:SF3,IPR036162,PS51737,IPR011109,PTHR30461, PS00397,PF00239,G3DSA:1.10.10.2600,IPR006119,SSF53041, cd00338,SM00857,IPR025827,IPR038109,PS51736, IPR006118,PF13408,G3DSA:3.40.50.1390,PF07508,Coil
MTNNTSMRTGALYIRVSTGKQEELSPDAQRRLLLDYASKNNIIISNQYIYEEDGISGRKADKRPQFQDMIAHAKSKEHPFDVILVWKYSRFARNQEESIVYKSMLRKDHVEVISVSEPLVDGPFGSLIERIIEWMDEYYSIRLSGEVVRGMTENALRGRNQARPPLGYKVPHAKETPVIVPEEALIIHTIFDMYTEDGASMFAIAKHLNNLGYLTSHKKPFERRSIGYILSNPTYIGKSVWNRHSNDNKALKDESEWIIRDGSHEPIISVDQYEKAQQRIKAEYAPKYAKPPELHRHWLSGMVKCHTCGRSLSTSVHKDKRYGRTYTNFQCYGYLKGKCSVSHQISVRKLEPAILEGLKEIMEGVRPLQFKIIKSEEPAAQSAHEILTERLHDIEKKEERIRQAYRDGIDTIEEYRDNKAILFKERTEIESRLEELTPAPVPSETDTRELMRNRLKNVYEILSSEDVSTVTKSNALKSIVDKVVYDSEKKELSIYLYCSDTL

SEQ ID NO: 5704 - protein, 502 aa, Unknown
  Description of Unknown: Integrase B5705 sequence
  PTHR30461:SF3,SM00857,G3DSA:1.10.10.2600,IPR036162,PS51737, G3DSA:3.40.50.1390,IPR006119,IPR038109,PF07508,IPR011109, SSF53041,PTHR30461,Coil,PS51736,cd00338, PF00239
MNKVCIYLRKSRADEEIEKALGQGETLRKHRKSLLKFAKENNLNIVDIKEEIVSGDSLFFRPKMLELLKEVEEKKYTGVLVMDIDRLGRGGMKDQGIILDAFKESNTEIITPTKTYNLNNEFDEEMTEFKTFFARRELKSITKRMQGGRVRSVEEGNYIGTNPPLGYEIFYIQKSRTLKIVQEEAEIIKIIFKMYSENNGATSIAEHLNMLGLKTKTGNNFSPSSVLAILKNPIYIGKITWKKREEKKSKIPGKTKDCRTRDKSEWIISQGKHEAIISEDLFNKCQNILTGRYHIPYQLHNKPVNPFSGLITCKICGKKMTMRPSRGINRLMCVHKCGNRSSRFDYVESDLIKALEEYVANYKIQIEIKEKKVDLGLYKKQATLITNELNELKKQKNKLFDLLERGIYDEMIFLERSKNIDKRIEECECSLTKINEELSLNNLKTEENIVNFKNAIEAYKETNDIDSKNLILKSILEKVEYYKDKEAKNDDFELTIYPKFLR

SEQ ID NO: 5705 - protein, 502 aa, Unknown
  Description of Unknown: Integrase B5706 sequence
  PTHR30461:SF3,SM00857,G3DSA:1.10.10.2600,IPR036162,PF13408, IPR025827,PS51737,G3DSA:3.40.50.1390,IPR006119,IPR038109, PF07508,SSF53041,IPR011109,PF00239,PTHR30461, PS51736,Coil,cd00338
MYEDIKTACLYVRFSSHNQTEQSIEGQTRVCRDFCKRHNIRIVEIYADRATSASKDIEKRVQFLKMIKDSEKGLFDAVIVYKLDRFARSRYDSATYKYRLKRNGVQLISATENISNDPEGIILESVLEGMAEFYSAELSQKINRGMRESAYKHNSIGGAVPLGYKIEDKKLVIDPKTAPLVKEAFEKYADGETVAEICRQFNARGYKTSKGTAFGKSSFTKIFRNERYIGVYTFHDYRAEGAVPAIIDKDLWDRVQLRAGKIKSAPARHKAKVVYLLSGKLFCGHCGSRMNGNCNASNYYYYQCYGKKNGHVDCKKKNIRKEFIERLVAQDALSLLTDEYVEQIATIACEKNQHEIELDSALPTIRDRIHQVDISLNNLLKAIESGSAPDMLVKRMGELEKEKKDLQVQAKKESDNLIELDKAQVIYWLEQFRGGSIEDEEFCRMLIDLFVNSVTVWDEDDDTYKVTVAYNLTSLPTKTYRLSKGGTLSDFASNAPAESRRT

SEQ ID NO: 5706 - protein, 502 aa, Unknown
  Description of Unknown: Integrase B5707 sequence
  PTHR30461:SF3,IPR036162,PS51737,IPR011109,PTHR30461, PS00397,PF00239,G3DSA:1.10.10.2600,IPR006119,SSF53041, cd00338,SM00857,IPR025827,IPR038109,PS51736, IPR006118,PF13408,G3DSA:3.40.50.1390,PF07508,Coil
MTDNTSMRTGALYIRVSTGKQEELSPDAQRRLLLDYASKNNIIISNQYIYEEDGISGRKADKRPQFQNMIAHAKSKEHPFDVILVWKYSRFARNQEESIVYKSMLRKDHVEVISVSEPLVDGPFGSLIERIIEWMDEYYSIRLSGEVVRGMTENALRGRNQARPPLGYEVPHAKETPVIVPEEALIIHTIFDMYTEDGASMFAIAKHLNNLGYLTSHKKPFERRSIGYILSNPTYIGKSVWNRHSNDNKALKDESEWIIRDGSHEPIISVEQYEKAQQRIKAEYTPKYAKPPELHRHWLSGMVKCHTCGRSLSTSIHKDKRYGRTYTNFQCYGYLKGKCNVSHQISARKLEPAVLEGLQEIMEGVRPLQFKIIKSEEPAAQSAHEILTERLHDIEKKEERIRQAYRDGIDTIEEYRDNKAILFKERAEIESRLAELTPAPAPSETDTRELMCNRLKNVHEILSSEDVSTVTKSNALKSIVDKIVYDSEKKELSIYLYCSDTL

SEQ ID NO: 5707 - protein, 502 aa, Unknown
  Description of Unknown: Integrase B5708 sequence
  cd00338,SM00857,G3DSA:1.10.10.2600,IPR036162,PS51737, G3DSA:3.40.50.1390,IPR006119,IPR038109,PF07508,IPR011109, SSF53041,PTHR30461,PS51736,Coil,PF00239
MNNKICMYLRKSRADEELEKTLGEGETLSKHRKALLKFAKEKKLNIVEIKEEIVSGESLFFRPKMLELLKEVEAKKYDGVLVMDMQRLGRGDMKDQGIILETFKNSNTKIITPQKTYDLNNDFDEEYTEFEAFMSRKELKMINRRMQGGRVRSVEEGNYIATNPPYGYDIGFINKSRVLKVNEYESNAIKLIFKLYLDGNGASFIANELNNLGYKTKLGNNFSNSSVLTIIKNPVYIGKIAWKRKDIKKSKTPGKVKDTRLRDVSEWIIADGKHQAIINTETWEAAQKILKSRYHIPYQLSNSPVNVFAGLITCGICGKKMVMRKARGINRLMCIYKCGNKSTRFDNVESDCLKYLREYLTDYTAEIKNQIKEDDNNIYISQISQLKKELTTLNNQRLKLFDLLERNLYDENTFLERSKNINDRIETVSSTLKSIEKLLKKKSKASYEEDIEFFKSVLDAYDETEDISKKNSLLKSILFKIEYTKTNKGKDYEIKLFPKLRK

SEQ ID NO: 5708 - protein, 502 aa, Unknown
  Description of Unknown: Integrase B5709 sequence
  SM00857,G3DSA:1.10.10.2600,IPR036162,PS51736, PS51737,G3DSA:3.40.50.1390,IPR006119,IPR038109, PF07508,IPR011109,SSF53041,PTHR30461, mobidb-lite,cd00338,PF00239
MTKSEQQERKQKIRERYKGADTSRIKVIPAKSSEHLETSNTIRRVAAYVRVSTDNDEQTSSYELQKNYYTKYIKAQPGWEFAGIYADEGISGTSLEHRKGMQKLIEDCKAGKIDLILTKSISRFARNIVDCLSIVGMLKDLEPPVGVKFETDNISTLDINGRMLLSIVASLAEEESHNKSLLMNWSLEQRYKEGMFLIPELLGYDLDENGDLVVNPEEAQTVKVIYYLYLNGFSLTEIAELLTDYRRKTKLGNTEWNPSSLAAVIANERHCGDLLARKTYTPNYLTHKSKKIKNNERAQYWDFDHHEAIVSREVYNAANHLRASRSYAKRKRPLPVLSVVDDGILRGYVPFDKDWTGFSAEEYREASESVWQEKQTNTVEVMNRLDLTGYELVRSQYFSTLRNPAMTISNGKLRFNTACLKKFKNVEYAELLLNSVDRCVAIRPCEKSNPNAIHWGRLKEGRWCASTLVCRGLAKALFDIMEWEDGLKYRFRGQFVQISLLQ

SEQ ID NO: 5709 - protein, 502 aa, Unknown
  Description of Unknown: Integrase B5710 sequence
  PTHR30461:SF3,IPR036162,PS51737,IPR011109,PTHR30461, PS00397,PF00239,G3DSA:1.10.10.2600,IPR006119,SSF53041, cd00338,SM00857,IPR025827,IPR038109,PS51736, IPR006118,PF13408,G3DSA:3.40.50.1390,PF07508,Coil
MTDNTSMRTGALYIRVSTGKQEELSPDAQRRLLLDYASKNNIIISNQYIYEEDGISGRKAEKRPQFQDMIAHAKSKEHPFDVILVWKYSRFARNQEESIVYKSMLRKDHVEVISVSEPLVDGPFGSLIERIIEWMDEYYSIRLSGEVVRGMTENALRGRNQARPPLGYKVPHAKETPVIVPEEALIIHTIFDMYTEDGASMFAIAKHLNNLGYLTSHKKPFERRSIGYILSNPTYIGKSVWNRHSNDNKALKDESEWIIRDGSHEPIISTEQYEKAQQRIKAEYAPKYAKPPELHRHWLSGMVKCHTCGRSLSTSIHKDKRYGRTYTNFQCYGYLKGKCNVSHQISVRKLEPAILEVLKEIMEGVRPLQFKIIKSEEPAAQSAHEILTERLHDIEKKEERIRQAYRDGIDTIEEYRDNKAILFKERTEIESRLAELTPAPAPSETDTRELMRNRLKNVYEILSSGDVSTVTKSNALKSIVDKIVYDSEKKELSIYLYCSDTL

SEQ ID NO: 5710 - protein, 502 aa, Unknown
  Description of Unknown: Integrase B5711 sequence
  PTHR30461:SF3,SM00857,G3DSA:1.10.10.2600,IPR036162,PF13408, PS51737,G3DSA:3.40.50.1390,IPR025827,IPR006119,IPR038109, PF07508,IPR011109,SSF53041,PF00239,PTHR30461, PS51736,Coil,cd00338
MKTAVIYARYSSDKQTEQSIEGQLYDCYNYAKANNITVIGEYIDRAMTGRNDDRPDFQRMISDSAKHTFELVLVWKLDRFARSTEDAAYNRGKLKRNGVRLLSIKEDFGDSSAGDLMMHVMESFNEFYSADLREKTVRGMHQSALKCQSTGGQIPIGYKIEGKKYAIDEATRFIPETVFRMYAEGKRLAEIARYLNERGYRTRMGRKFTTGSFYTMLSNEKYIGVYKYGDVRIEGGYEAMIDPVLFDAVQKKLVENKKRAPKISERENFYLTGKLFCGHCGEPMNGMSGNSTKGKHLYYRCNGVRKHTGCDKRTERKEELENEIIGAIQRAFANADPEELTRKVIENYEKNSRPADQVKVMKAELQKITNKVDNVVNAIAEMGGNETLYTQLRQLTEQKEQKETEIRIAEHKADDMPTVELVKKILDLIQNADTMTDEGRQLLIDGAVSRIYVYDDSLDIYFNGGKNTEIPLNPANKDDVSDNSFACCKEWGSENEKKQKKS

SEQ ID NO: 5711 - protein, 502 aa, Unknown
  Description of Unknown: Integrase B5712 sequence
  cd03768,PTHR30461:SF3,SM00857,G3DSA:1.10.10.2600,IPR036162, PF13408,IPR025827,G3DSA:3.40.50.1390,PS51737,IPR006119, IPR038109,PF07508,SSF53041,IPR011109,PTHR30461, PS51736,Coil,PF00239
MDIIREDCIYARQSVDRKDSISIESQIDFCKYELKGGSCKVFKDKGYSGKNTDRPEFQKLLGEIRKGRVRRVIVYKLDRISRSILDFANMMELFQEYDVEFVSSTEKFDTSTPMGRAMLNICIVFAQLERETIQKRVTDAYYSRCLKGFHMSGQAPYGYQLEPTVVEGIRTKKMVADPVAADHVRLMFEMYAEPETSFGDITRYFEEQGIKIYEKSMVRSFLSQLLRNPVYAQADLELYEFFKSQGAAIVNDASDFAGTNGCYLYQGRDVKEDKDRCLKDQILVIAPHEALIPSDVWLKCRKKLMMNKTFQQGRKPKNTWLAGKVKCGRCGYALKATHVPNSPGYFRCTKRAENKGCPGCGKIRKTEFEEFIFNAMRKRFKNFQVRHDREEKVNPKLTAHQIELAQVEAEIEKLLDTLTGANATLLAYANKKIEELDTRRQTISKAIAELSVETMSPQKEQELSYFLDHWDSIDFEDKRKSADGLIISISATSDHVQVEWKI

SEQ ID NO: 5712 - protein, 502 aa, Unknown
  Description of Unknown: Integrase B5713 sequence
  PTHR30461:SF3,SM00857,G3DSA:1.10.10.2600,IPR036162,PF13408, PS51737,G3DSA:3.40.50.1390,IPR025827,IPR006119,IPR038109, PF07508,IPR011109,SSF53041,PTHR30461,Coil, PS51736,cd00338,PF00239
MKTCIYLRKSRADEEAEKQGEFETLHRHKTTLLKIAKEKCLNVVDIKEELESGESIKDRPRMIELLKEVEDNQYDAVLVMDIDRLGRGNMQDQGLILDTFKNSNTEIITPRKTYNLNNEFDEEYSEFEAFMARKELKLINRRLQRGRIKSIEEGKYISPDPPYGYKFKYDDRGKKCLIIDEYQAEAVRLIFSMYLDMYGSNKIANKLNELGYKTNNHMQFKNKAVKDILTNITYCGYVKWKTVDRKNHNRVRPKDEQIIVKGNHEAIIDEITFNRAQEIRKNRYIPPTFEKKEISNPLAGVLICGKCGHNLIQAVDSRRPKDDIRRFYIKCKHCDNKSSRFDYIEKAILNSLEDWLNEYKIKVSLEDDRTEIDKLKFESKAIKRELKNTENQQNKLYDFLERGIYSEEIFLERSVLLSNKIKSLKEELSRVNIEIISSKENTLARKQLIPTLETTLENYYKSDNAKEKNILLKTVLDKVVYTKEKNQKNDNFSIELYPKLPK

SEQ ID NO: 5713 - protein, 502 aa, Unknown
  Description of Unknown: Integrase B5714 sequence
  PTHR30461:SF3,IPR036162,PS51737,IPR011109,PTHR30461, PS00397,PF00239,G3DSA:1.10.10.2600,IPR006119,SSF53041, cd00338,SM00857,IPR025827,IPR038109,PS51736, IPR006118,PF13408,G3DSA:3.40.50.1390,PF07508,Coil
MTDNTSMRTGALYIRVSTGKQEELSPDAQKRLLLDYASKNNIIISNQYIYEEDGISGRKADKRPQFQDMIAHAKSKEHPFDVILVWKYSRFARNQEESIVYKSMLRKDHVEVISVSEPLVDGPFGSLIERIIEWMDEYYSIRLSGEVVRGMTENALRGRNQARPPLGYKVPHAKETPVIVPEEALIIHTIFDMYTENGASMFAIAKHLNNLGYLTSHKKPFERRSIGYILSNPTYIGKSVWNRHSNDNKALKDESEWIIRDGSHEPIISVEQYEKAQQRIKAEYTPKYAKPPELHRHWLSGMVKCHTCGRSLSTSIHKDKRYGRTYTNFQCYGYLKGKCNVSHQISARKLEPAVLEGLQEIMEGVRPLQFKIIKSEKPTAQSAHEILTERLHDIEKKEERIRQAYRDGIDTIEEYRDNKAILFKERAEIESRLEELTPAPVPSETDTRELMRNRLKNVYEILSSEDVSTVTKSNALKSIVDKIVYDSEKKELSIYLYCSDTL

SEQ ID NO: 5714 - protein, 502 aa, Unknown
  Description of Unknown: Integrase B5715 sequence
  PTHR30461:SF3,IPR036162,PS51737,IPR011109,PTHR30461, PF00239,G3DSA:1.10.10.2600,IPR006119,SSF53041,cd00338, SM00857,IPR025827,IPR038109,PS51736,mobidb-lite, PF13408,G3DSA:3.40.50.1390,PF07508,Coil
MNAVIYARFSSHSQREQSIEGQLRDCYEYAKRYDINIVGEYIDRAISGMTDDRPDFQRMIADAPKKQFERIIVWKLDRFARNRYDSALYKHKLKQYGIRVISAMENVGEGDESILLEALLEASAEYYSLDLKKKIKRGQRETIAKGRWCGGPIPYGYKAVDGKLLADEKTAPIIRYVFEQYAQGVSMKEIIDELKRRGVRSSRGGELTYTTFSRALTNPVYIGNFMYKGELVPGVADALIDEDTYNKVQNIVKANAHAPAANKAKVEYLLQGKAFCGHCGSHMVGESGKSRNGDVYYYYSCAARKKAHKCRKKNEKKDFIEWYVVEQTLQYVLTPARMRDIAKAVVAEYDKEFAGSRVEEYEKAIKQYERELDKLVDALVDAPKVAHKRIYEKMETLETQKAAMENELVKLRIASEIRFTEEEVRAWLRRFCTGDLFDPEFRRNIIDTFINCIYLYDDRIIIFYNIKGGKQVSFVDLAESLDNESESSGSDLNANAPPFKNL

SEQ ID NO: 5715 - protein, 502 aa, Unknown
  Description of Unknown: Integrase B5716 sequence
  cd03768,PTHR30461:SF3,SM00857,IPR036162,PF13408, IPR025827,PS51737,G3DSA:3.40.50.1390,IPR006119,PF07508, IPR011109,SSF53041,PTHR30461,PS51736,Coil, PF00239
MIAIYARQSVEKKDSISIESQIEYAKREVFSEDFKIYQDSGYSGKNTNRPAFHEMMADVQSGRIEKVVVYRLDRISRSILDFADFINILESNRISFVSATEKFDTSTPMGRAMLYIIVVFAQLERETIAERVRDNYYARVKKGAWGGGPAAFGFDLVKTTIDGKKATICQPNEQISVVQRIFELYALPYSSLADVQRQLIQDGSVSSGGVNFDNAKLSSILKNPAYVRADTAVYNFYKAKGAILANPPEDFDGVHGCILVGKRDANERKYKDVSNHLLAMGHHEGIVDSTAFLFCQQKLSRNRQIKNTYKGKHSWLTGLVKCAHCGYAFSIRFSKTKDGQVPYFCCSGKYLHKACTAKQTHRVREIEAEVQASLIQHAASYNLIHRQNTDAAAKELQSRISEIDAKIENLILSLESVSHVSAQYINQRIEALHHEKQLLLHRYNETISEYNINEVTPFSATDWEQMDIEQKRQLARSLIRTVYLSEDGLSVSFNIKKGGHKP

SEQ ID NO: 5716 - protein, 502 aa, Unknown
  Description of Unknown: Integrase B5717 sequence
  cd03768,PTHR30461:SF3,SM00857,IPR036162,G3DSA:3.40.50.1390, IPR006119,SSF53041,PTHR30461,PS51736,Coil, PF00239
MKKVAIYSRKSVLVEGSVSIETQINMCKDYINNKFPNAKFKVFEDEGFSGGNTNRPAFQKMLRLAQLNEIDIVVCYKVDRIARNTLDFLKILELFKENNVELISISEGFDPNTQMGKVMLTLLASFAEMERTNIQQRVKDNLLSIAKKGKWTGGSPPTGFKNGLNGGLEWDKKDMILDVFNMKCEKEKNSNIIKYIKEKYNHNFLGGTLATTLRKPIYVKSSPSVSLYLKTKGYIVQGDEDNIHSYLTYTDKETKYAIVSDIVGLIEPSIWISINKDMDKNISREGNRFSEKFWLTKTVRCKYCGQTFCGQTKTTKTKYYNKYGEEKIYISTYSYYSCRDAVRGKLKTCKNTKRVKQEILESKVSELIHLLKDKKTFNSSYFSNKIDNSSKIDTIKKQIKNIDKTINNLTDKIALLSNEASLIFISKLEELVKEKSILKDNLLQLELQELNSNNKKDSLLVYNNILAFNDNLSVDDKRKIAMSLFKEIIYDPETDLLDVTFM

SEQ ID NO: 5717 - protein, 502 aa, Unknown
  Description of Unknown: Integrase B5718 sequence
  cd03768,PTHR30461:SF3,SM00857,G3DSA:1.10.10.2600, IPR036162,PF13408,IPR025827,G3DSA:3.40.50.1390, PS51737,IPR006119,IPR038109,PF07508, IPR011109,SSF53041,PTHR30461,PS51736,Coil,PF00239
MEFIREDCIYARQSVDRKDSISIESQIDFCKYELKGGSCRVFKDKGYSGKNTDRPEFQKLLGEIRKGKVRRVIVYKLDRISRSILDFATMMELFQEYDVEFVSSTEKFDTSTPMGRAMLNICIVFAQLERETIQKRVTDAYYSRCLKGFHMSGQAPYGYQLEPTVVEGIRTKKMVADPVAADHVRLMFEMYAEPETSFGDITRYFEEHDIKIYGKSMFRTFLSQLLRNPVYAQADLELYEFFKSQGAAIVNDASDFAGTNGCYLYQGRDVKEDKDRCLKDQILVIAPHEALISSDTWLKCRKKLMANTTFQQGRKPKNTWLAGKIKCGHCGYALKATHVPNSTGYFRCTKRTENKGCPGCGKIRKEEFEQFIFSAMQEKFKDFQILYGREEKVNPKLTAYQVELAQVEAEIEKLLDTLTGANATLLAYANKKIEELDTRRQTISKAIAELSVETISPQQIKKLSYYLDNWDSIDFDDKRKAADGLISTIKATSDRVQIEWKI

SEQ ID NO: 5718 - protein, 502 aa, Unknown
  Description of Unknown: Integrase B5719 sequence
  PTHR30461:SF3,IPR036162,PS51737,IPR011109,PTHR30461, PS00397,PF00239,G3DSA:1.10.10.2600,IPR006119,SSF53041, cd00338,SM00857,IPR025827,IPR038109,PS51736, IPR006118,PF13408,G3DSA:3.40.50.1390,PF07508,Coil
MTDNTSMRTGALYIRVSTGKQEELSPDAQRRLLLDYASKNNIIISNQYIYEEDGISGRKADKRPQFQDMIAHAKSKEHPFDVILVWKYSRFARNQEESIVYKSMLRKDHVEVISVSEPLVDGPFGSLIERIIEWMDEYYSIRLSGEVVRGMTENALRGRNQARPPLGYKVPHAKETPVIVPEEALIIHTIFDMYTEDGASMFAIAKHLNNLGYLTSHKKPFERRSIGYILSNPTYIGKSVWNLHSNDNKALKDESEWIIRDGSHEPIISVEQYEKAQQRIKAEYTPKYAKPPELHRHWLSGMVKCHTCGRSLSTSIHKDKRYGRTYTNFQCYGYLKGKCSVSHQISARKLEPAVLEGLKEIMEGVRPLQFKIIKSEEPTAQSAHEILTEKLHDIEKKEERIRQAYRDGIDTIEEYRDNKAILFKERAEIESRLEELTPAPVPSETDTRELMRNRLKNVYEILSSEDVSTVTKSNALKSIVDKIVYDSEKKELSIYLYCSDTL

SEQ ID NO: 5719 - protein, 502 aa, Unknown
  Description of Unknown: Integrase B5720 sequence
  cd03768,PTHR30461:SF3,SM00857,IPR036162,PF13408, PS51737,G3DSA:3.40.50.1390,IPR025827,IPR006119,PF07508, SSF53041,IPR011109,PTHR30461,PS51736,Coil, PF00239
MIAIYARQSVEKKDSISIESQIEYAKREVFSEDFKIYQDSGYSGKNTNRPAFHEMMADVQSGKIEKVVVYRLDRISRSILDFADFINILESNRISFVSATEKFDTSTPMGRAMLYIIVVFAQLERETIAERVRDNYYARVKKGVWGGGPAAFGFDLVKTTIDGKKATICQPNEQISVVQRIFELYALPYSSLADVQRQLIQDGSVSSGGVNFDNAKLSSILKNPAYVRADTAVYNFYKAKGAILANPPEDFDGVHGCILVGKRDANERKYKDVSNHLLAMGHHEGIVDSAAFLFCQQKLSRNRQIKNTYKGKHSWLTGLVKCAHCGYAFSIRFSKTKDGQVPYFCCSGKYLHKACTAKQTHRVREIEAEVQASLIQHAASYNLIHRQNTDAAAKELQSRISEIDAKIENLILSLESVSHVSAQYINQRIEALHHEKQLLLHRYNETISEYNINEVTPFSATDWEQMDIEQKRQLARSLIRTVYLSEDGLSVSFNIKKGGHKP

SEQ ID NO: 5720 - protein, 502 aa, Unknown
  Description of Unknown: Integrase B5721 sequence
  PTHR30461:SF3,IPR036162,PS51737,IPR011109,PTHR30461, PS00397,PF00239,G3DSA:1.10.10.2600,IPR006119,SSF53041, cd00338,SM00857,IPR025827,IPR038109,PS51736, IPR006118,PF13408,G3DSA:3.40.50.1390,PF07508,Coil
MTDNTSMRTGALYIRVSTGKQEELSPDAQRRLLLDYASKNNIIISNQYIYEEDGISGRKADKRPQFQNMIAHAKSKEHPFDVILVWKYSRFARNQEESIVYKSMLRKDHVEVISVSEPLVDGPFGSLIERIIEWMDEYYSIRLSGEVVRGMTENALRGRNQARPPLGYEVPHAKETPVIVPEEALIIHTIFDMYTEDGASMFAIAKHLNDLGYLTSHKKPFERRSIGYILSNPTYIGKSVWNRHSNDNKALKDESEWIIRDGSHEPIISTEQYEKAQQRIKAEYTPKYAKPPELHRHWLSGMVKCHTCGRSLSTSIHKDKRYGRTYTNFQCYGYLKGKCNVSHQISARKLEPAVLEGLQEIMEGVRPLQFKIIKSEEPATQSAHEILTERLHDIEKKEERIRQAYRDGIDTIEEYRDNKAILFKERTEIKSRLAELTPAPVPSETDTRELMRNRLKNVYEILSSEDVSTVTKSNALKSIVDKIVYDSEKKELNIYLYCSDTL

SEQ ID NO: 5721 - protein, 502 aa, Unknown
  Description of Unknown: Integrase B5722 sequence
  cd03768,PTHR30461:SF3,SM00857,IPR036162,PF13408, IPR025827,G3DSA:3.40.50.1390,IPR006119,SSF53041,PTHR30461, PS51736,Coil,PF00239
MKRIAIYSRKSVYIEGSISIETQINMCKEYMLKKFKDCEFKIFEDEGFSGGNTNRPAFKKLLRLAELKQIDIVVCYKIDRIARNTLDFLNILEMFKENNVELISITEGFDPNTQMGKVMLTLLASFAEMERSNIQQRVKDNLLSIAKKGKWTGGSPPTGFKNNPNGGIEWDNKDMILDVFNMKYEKSKNTDLIQFIQHKYNHKFLGGTLATTLRKPIYVKSSSSVSLYLKSKGYIVQGTEDNIHSYLTYTDKDTKYAIVSNIVGLVEPSIWISVNKDMDKNISREGNRFSEKFWLTKTIRCKCCGQTYCGQTKTTKTKYYNKKGEEKIYVSTYSYYSCRDAVRGKLKTCNNTKRIKQDVLEAKVSALIYSLKDEKIFNSSYSINKVDNSFKIASLNKKVIEIDKTISNLTDKIALLSNDASLIFIDKIENLIKEKSSIKSNIVELELQELNSKIKTDKALIYNNIKAFNNNLSVDDKRKITMSIFKKIVYDPETNDLDVTFM

SEQ ID NO: 5722 - protein, 502 aa, Unknown
  Description of Unknown: Integrase B5723 sequence
  cd03768,SM00857,G3DSA:1.10.10.2600,IPR036162, PF13408,IPR025827,G3DSA:3.40.50.1390,PS51737, IPR006119,IPR038109,PF07508,IPR011109, SSF53041,PTHR30461,PS51736,Coil,PF00239
MNLIDAIYTRQSVDRIDSISVESQVEFCKREVIGENIKVYTDKGYSGKNTDRPAFQEMMTDIEAGKIRRVIVYRLDRISRSVLDFASVIDVFQKHSVDFVSTMEKFDTGTPIGKAMLMIVMIFAQLERETIQQRVIDAYSSRSKRGFYMGGKVPYGFQLKETVIDGIRTKMYEPIPEEAEIVQTMFRMYAEPQTSFGDIVRYLDEQQVKKRDGEPFSRSRIRDVVVNPVYVRADYRLYEFYKAQGTLIANQPEDFIGTNGAYLYSGNEGKRKTVSLQGHTLVLAPHEGLVSSDIWIKCRSKCLKNACVAKPVKAKATWLAGKIKCAHCGYSLSAKVYHCKTKEDNRYYLCNNKYNTGGCNFGSLDADIVDEIVFEEMQKKLAEFNTLSKQKQESCDLQTIKLKTSIEKIDQEIGALLDKIPMANGTVMDYINNRIADLDAKKKELYAEIVQLSDNNGYSLDEITDYLTHWEEISMADKLTVVDSLVESIYASQDKIKINWKI

SEQ ID NO: 5723 - protein, 502 aa, Unknown
  Description of Unknown: Integrase B5724 sequence
  cd03768,SM00857,G3DSA:1.10.10.2600,IPR036162,PF13408, IPR025827,PS51737,G3DSA:3.40.50.1390,IPR006119,IPR038109, PF07508,IPR011109,SSF53041,PTHR30461,PS51736, Coil,PF00239
MKTDKKKELRCAIYTRKSVAEGLDKDFNTLDAQREAGESYIASQKHEGWIVIPKHYDDGGFSGGNMERPALAELFDDIKKGKIDIVVVYKVDRLSRSIMDFAKIVELFEDHNVSFVSVTQHFNTKDSMGRLTLNILLSFAQFERELISERIKDKMSASRKKGRWTGGLPVLGYDILPEGRAIAVNHKEAQIVRRIFAYYLENRSIRSVLEWLRSENIRTKTWKSRKGKILGGNSFSLSVLAHLLKNKIYIGKIEYEGEIYEAECDAIIDSDTFEKVQGLLAANNVDKSPQVRNKYNALLSGKVFCKHCGTPMTHSYTKKTQNKVYRYYICSNATKTGWKNCPHPSVSAEELESLVVSELERISDDTKLADDVIESYFAINEAELDTLIKNEAFAKRSLENLRRKISENENASNITELRRKETDTESVAKDIRAEIKRLRNRLETSMVKLRNIFADFRKVWSNLNFKEQYELTDLLIERIVFDGTNGEVFINFRETGIKTFKE

SEQ ID NO: 5724 - protein, 502 aa, Unknown
  Description of Unknown: Integrase B5725 sequence
  SM00857,G3DSA:1.10.10.2600,IPR036162,PS51737,G3DSA:3.40.50.1390, IPR006119,IPR038109,PF07508,IPR011109,SSF53041, PTHR30461,Coil,PS51736,cd00338,PF00239
MPYCIYLRKSRKDMELEQYGDGETLARHKRTLLELARKQNLTIGEIYEEIVSGESIEARPQMQKLLRDVENNLWDGVLVMELERLARGDTKDQGTVAQTFKLTNTLIITPQKTYNPLNEFDEEYFEFGLFMSRREYKTINRRLQAGRLASIKEGNYIGSLPPFGYDKVRLTDAKGYTLAENGESDYVRMIYDLYVNKNMTPGKIADYLTSIGVQPKKGGKFTMHSVRDILRNPIYIGKVRWNWRPNKKSVQDGRIIVTRPRSTSESTVLIKGKHQAIISEEIFNAAQKKHGSNPRTQIKHELKNPFAHLMYCRECGKAMVYRTYANSEPRIICANKYCEISSSPFEVIEKSVIDSLTEKLGELEIAAAQPEQSSAEFKTYRSAVKKIEQELEQANAQQNKLYDLLEQGIYTQEIFLERQKALEQRRKDLQNKLVAARENAPQPINYEERITKVRQVLELYPTLDVKEQNTLLRSVIKRITYYRPKSDRYHQNLAEIDIELVF

SEQ ID NO: 5725 - protein, 502 aa, Unknown
  Description of Unknown: Integrase B5726 sequence
  PTHR30461:SF3,SM00857,G3DSA:1.10.10.2600,IPR036162,PF13408, IPR025827,G3DSA:3.40.50.1390,PS51737,IPR006119,IPR038109, PF07508,IPR011109,SSF53041,PF00239, PTHR30461,PS51736,Coil,cd00338
MSETTQIGVIYARYSSDKQRDESIDGQIRECMAYAEREGITITNTYIDRALSAKTDDRPEFRQMILDSNKQAFNYVLVYQLDRFSRNRYDSAIYKAKLRKNGIRVISVKENIKDDPSGIILESVLEGMAEYYSAELSQKVMRGMTDNVLQGKWVGTVVPYGYKLSNNRQLEINEHEANVVRKLFDMYLQRHTLSEMASYMNANGHLTHKGKPFNTNSIKAIISNEKYIGVYSWGSERIENAIPPIIDKSIFEKAQHKRNLRAKKKGNRSELYQLCGKLKCGRCGGNYVGSTGTSKTGALHHYYVCSNRRRKNACKAQNIRRDALDDIVISQTLAILNKPNVVNKIAKYAASSGKNLQSETVAQIDIIDAHIRDLKKSLDNYMTAIANGFISDVLKHRIESTEQELKDQIEIKTNLENTIIPVELTEDHIRFFLLKMAKENPSTLRGRARIIEAFVHHVTIYEDHIEIVFNYKNELSEFHDKTLESSLLNDLVTQKGFEPLAF

SEQ ID NO: 5726 - protein, 502 aa, Unknown
  Description of Unknown: Integrase B5727 sequence
  cd03768,PTHR30461:SF3,SM00857,IPR036162,PF13408, IPR025827,G3DSA:3.40.50.1390,IPR006119,SSF53041,PTHR30461, PS51736,Coil,PF00239
MKKVAIYSRKSVYIEGSVSIETQINMCKEYILKKFPNSTFEVFEDEGFSGGNTNRPAFQKLLRLAELKQIDIVVCYKIDRIARNTLDFLNILEMFKENNVELISITEGFDPNTQMGKVMLTLLASFAEMERSNIQQRVKDNLLSIAKKGKWTGGSPPTGFKNNPNGGIEWDNKDMILDVFNMKYEKSKNTDLIQFIQHKYNHKFLGGTLATTLRKPIYVKSSSSVSLYLKSKGYIVQGTEDNIHSYLTYTDKDTKYAIVSNIVGLVEPSIWISVNKDMDKNISREGNRFSEKFWLTKTIRCKCCGQTYCGQTKTTKTKYYNKKGEEKIYVSTYSYYSCRDAVRGKLKTCNNTKRIKQDVLEAKVSALIYSLKDEKIFNSSYSINKVDNSFKIASLNKKVIEIDKTISNLTDKIALLSNDASLIFIDKIENLIKEKSSIKSNIVELELQELNSKIKTDKALIYNNIKAFNNNLSVDDKRKITMSIFKKIVYDPETNDLDVTFM

SEQ ID NO: 5727 - protein, 502 aa, Unknown
  Description of Unknown: Integrase B5728 sequence
  PTHR30461:SF3,IPR036162,PS51737,IPR011109, PTHR30461,PS00397,PF00239,G3DSA:1.10.10.2600, IPR006119,SSF53041,cd00338,SM00857,IPR025827,IPR038109 ,PS51736,IPR006118,PF13408,G3DSA:3.40.50.1390,PF07508,Coil
MTDNTSMRTGALYIRVSTGKQEELSPDAQRRLLLDYASKNNIIISNQYIYEEDGISGRKADKRPQFQNMIAHAKSKEHPFDVILVWKYSRFARNQEESIVYKSMLRKDHVEVISVSEPLVDGPFGSLIERIIEWMDEYYSIRLSGEVVRGMTENALRGRNQARPPLGYKVMHAKETPVIVPEEAHIVHIIFDMYTEDGASMFAIAKHLNDLGYLTSHKKPFERRSIGYILNNPTYIGKSVWNRHSNDNKALKDESEWIIRDGSHEPIISAEQYEKAQQRIKAEYTPKYAKPPELHRHWLSGMVKCHTCGRSLSTSIHKDKRYGRTYTNFQCYGYLKGKCNVSHQISARKLEPAVLEGLKEIMEGVRPLQFKIIKSEEPAAQSAHEILTERLHDIEKKEERIRQAYRDGIDTIEEYRDNKAILFKERTEIESRLEELTPAPVPSETDTRELMRNRLKNVYEILSSEDVSTVTKSNALKSIVDKIVYDSEKKELSIYLYCSDTL

SEQ ID NO: 5728 - protein, 502 aa, Unknown
  Description of Unknown: Integrase B5729 sequence
  PTHR30461:SF3,cd00338,SM00857,G3DSA:1.10.10.2600,IPR036162, PS51737,G3DSA:3.40.50.1390,IPR006119,IPR038109,PF07508, IPR011109,SSF53041,PTHR30461,PS51736,Coil, PF00239
MKTCIYLRKSRADEELEKKEDVDTLARHRSTLLEVAKNQDLNVIEIKEEIKTGDSIAKRPKMIKLLEEIEKNMYDAVLCMDIDRLGRGDMQDQGRIINTFKKTNTLIITPDKTYNLNNDLDEEMTEFKTFFARRELKVITKRMQRGRVKSIEEGNFIGSTAPLGYKFRYDEYGKRHMIIDEETAPAIKLIFDMYLNGEGSFRIMKRLNTLGYKTTAGKDFTECAVRRIIRNQTYCGYVTWFEYRRKGTKTRKNKEGDVLVCKGKHKPIISEEDWNKAQEIRKGNQITAKKSDRKLINPLAGLIKCSCCKHTMVASYNTVKEGPVLYLRCKNCYEVGSSRLDLVEEEILNTLKVKLKEIKDELNNTEIEDKENKQLEMLKNTLTTLEKEKVELDKQKNKLHDLLERGIYDVDTFLERQQTLAAKKEEIETAIKGTKKLLEAEVSKDIDYKELAKNIECAIGDYENTDNIELKNKALKTVIKEILYYKEKKRFAQFTLEVKFKI

SEQ ID NO: 5729 - protein, 502 aa, Unknown
  Description of Unknown: Integrase B5730 sequence
  PTHR30461:SF3,cd00338,SM00857,IPR036162,PF13408, IPR025827,G3DSA:3.40.50.1390,IPR006119,SSF53041,PTHR30461, PS51736,Coil,PF00239
MPKGTRAAIYARFSSHNQRSESIDIQVEKSREYCAQNGLDVVRVYSDYAQTGRDVQRVEFQRMMADAKLGLFDYVVIYKVTRIMRNRDEMALARIRLRKAGVEILYAGESLGEGSTRVLNLGMLEVLAEWESAIDSERIRDGINKNAQRGMANGRTHYGWDIVNGYYEVNEREAAVMHRMKNMLFAGSTVAEIKRAVAGERGKRGKPLTHGVITKLLRREQNCGVYDYAGVRIEDGMPALWSREDQDMINSILGSNGRKHNKTRDTNDYPLSGKMWCPECGQYYVGTCGTSKTGRVYHYYKCKKCKRTFRRDAVEEAVLDTVLETIKKPDIRQRIVDVMALYNEMNEEKEEPESNRIEREIKRIDTAFERIWQAIEDGIAPPGGKERVAMLREQKAALEADLRQAQANEGANLSGEAIAAWLDHIAQEPDAAEIIETFVRLIEVDGDELKLYFAFDYWGDDFQPKQKKANPERCLPIRKHRGAREKRYSFGYAVFLILALMK

SEQ ID NO: 5730 - protein, 502 aa, Unknown
  Description of Unknown: Integrase B5731 sequence
  SM00857,G3DSA:1.10.10.2600,IPR036162,PF13408, IPR025827,G3DSA:3.40.50.1390,PS51737,IPR006119, IPR038109,PF07508,IPR011109,SSF53041, PTHR30461,Coil,PS51736,cd00338,PF00239
MRGVIYARYSPGPHQTEQSIEGQVADCQQYAEEHGIDIIEIYADRHVSGKSVVGRDEFQRMLRDAEKGRFDCVLVWKIDRFGRDRQDIAMGKMTLKRAGVKLMYARESVPEGPEGIILESVLEGLAEYYSADLRQKVIRGMKETAKKGQYCGQPLPIGYKVDSQRHVVIDEREAAAVREAFKMHIAGAQLRDIVQLFADRGIMGRRGKPVSNAVVYRMLRNEKYLGEFYIQDVKLNVEPIIDQATFLEAARHFKTSRNNAAGRAKVNYLLSCKMFCGYCGSMISAEAGTGKLGKVYRYYKCGDKKRGKKCELKPFPKDHLEDAIILATVNDMLTDEMIEKLTVRILEVQEQENADDPVVGLRRRLDSNKKRQRNLLDAIEEGGARGLVSRLAALEEEEEQLVLEIQRAEIKRPRLTHEVVEAWLRSFRVGDVTDDDFRARLVDTFIARVELRNDEALIFYNIREKGPHSRVRVRPEWWSPRDGTRTPKVIVLRDYVVLRIAV

SEQ ID NO: 5731 - protein, 502 aa, Unknown
  Description of Unknown: Integrase B5732 sequence
  PTHR30461:SF3,cd00338,SM00857,G3DSA:1.10.10.2600,IPR036162, PF13408,PS51737,G3DSA:3.40.50.1390,IPR025827,IPR006119, IPR038109,PF07508,SSF53041,IPR011109,PTHR30461, PS51736,Coil,PF00239
MKTAVIYARYSSDKQTEQSIEGQLYDCYNYAKSNNITVIGEYIDRAMTGRNDDRPDFQRMISDSAKHTFELVLVWKLDRFARSTEDAAYNRGKLKRNGVRLLSVKEDFGDSSAGDLMMHVMESFNEFYSADLREKTVRGMHQSALKCQSTGGQIPIGYKIEGKKYVIDESARFIPETVFRMYAEGKRLAEIARYLNEKGYRTRMGRKFTTGSFYTMLSNEKYIGVYKYGDVRIEGGYEAMIDPVLFDAVQKKLVENKKRAPKISERENFYLTGKLFCGHCGEPMNGMSGNSTKGKHLYYRCNGVRKHTGCDKRTERKEELENEIIGAIQRAFANADPEELTRKVIENYEKNSRPADQVKVMKAELQKITNKVDNVVNAIAEMGGNETLYTQLRQLTEQKEQKETEIRIAEHKADDMPTVELVKKILDLIQNADTMTDEGRQLLIDGAVSRIYVYDDSLDIYFKGGKNTEIPLNPANKDDVSDNSFACCKEWGAKTKTYKPFR

SEQ ID NO: 5732 - protein, 502 aa, Unknown
  Description of Unknown: Integrase B5733 sequence
  SM00857,G3DSA:1.10.10.2600,IPR036162,PF13408,IPR025827, G3DSA:3.40.50.1390,PS51737,IPR006119,IPR038109,PF07508, IPR011109,SSF53041,PTHR30461,Coil,PS51736, cd00338,PF00239
MRGVIYARYSPGPHQTEQSIEGQVADCQQYAEEHGIDIIEIYADRHVSGKSVVGRDEFQRMLRDAEKGRFDCVLVWKIDRFGRDRQDIAMGKMTLKRAGVKLMYARESVPEGPEGIILESVLEGLAEYYSADLRQKVIRGMKETAKKGQYCGQPLPIGYKVDSQRHVVIDEREAAVVREAFKLHIAGAQLRDIVQLFADRGIMGRRGKPVSNAVVYRMLRNEKYLGEFYIQDVKLNVEPIIDQATFLEAAQHFKTSRNNAAGRAKVNYLLSCKMFCGYCGSMISAEAGTGKLGKVYRYYKCGDKKRGKKCELKPFPKDHLEDAIILATVNDMLTDEMIEKLTVRILEVQEQENADDPVVGLRRRLDSNKKRQRNLLDAIEEGGARGLVSRLAALEEEEEQLVLEIQRAEIKRPRLTHEVVEAWLRSFRVGDVTDDDFRARLVDTFIARVELRNDEALIFYNIREKGPHSRVRVRPEWWSPRDGTRTPKIIVLRDYVVLRIAV

SEQ ID NO: 5733 - protein, 502 aa, Unknown
  Description of Unknown: Integrase B5734 sequence
  cd03768,PTHR30461:SF3,SM00857,G3DSA:1.10.10.2600,IPR036162, PF13408,IPR025827,G3DSA:3.40.50.1390,PS51737,IPR006119, IPR038109,PF07508,IPR011109,SSF53041,PTHR30461, PS51736,Coil,PF00239
MEFIREDCIYARQSVDRKDSISIESQIDFCKYELKGGSCRVFKDKGYSGKNTDRPEFQKLLGEIRKGKVRRVIVYKLDRISRSILDFATMMELFQEYDVEFVSSTEKFDTSTPMGRAMLNICIVFAQLERETIQKRVTDAYYSRCLKGFHMSGQAPYGYQLEPTVVEGIRTKKMVADPVAADHVRLMFEMYAEPETSFGDITRYFEEHDIKIYGKSMFRTFLSQLLRNPVYAQADLELYEFFKSQGAAIVNDASDFAGTNGCYLYQGRDVKEDKDRCLKDQILVIAPHEALISSDTWLKCRKKLMANTTFQQGRKPKNTWLAGKIKCGHCGYALKATHVPNSTGYFRCTKRTENKGCPGCGKIRKEEFEQFIFSAMQEKFKDFQILHGREEKVNPKLTTYQVELAQVEAEIEKLLDTLTGANATLLAYANKKIEELDTRRQTISKAIAELSVETISPQQIKKLSYYLDNWDSIDFDDKRKAADGLISTIKATSDRVQIEWKI

SEQ ID NO: 5734 - protein, 502 aa, Unknown
  Description of Unknown: Integrase B5735 sequence
  PTHR30461:SF3,IPR036162,PS51737,IPR011109,PTHR30461, PS00397,PF00239,G3DSA:1.10.10.2600,IPR006119,SSF53041, cd00338,SM00857,IPR025827,IPR038109,PS51736, IPR006118,PF13408,G3DSA:3.40.50.1390,PF07508,Coil
MTDNTSMRTGALYIRVSTGKQEELSPDAQKRLLLDYAAKNNIIISNQYIYEEDGISGRKADKRPQFQDMIAHAKSKEHPFDVILVWKYSRFARNQEESIVYKSMLRKDHVEVISVSEPLVDGPFGSLIERIIEWMDEYYSIRLSGEVVRGMTENALRGRNQARPPLGYKVPHAKETPVIVPEEALIIHTIFDMYTENGASMFAIAKHLNNLGYLTSHKKPFERRSIGYILSNPTYIGKSVWNRHSNDNKALKDESEWIIRDGSHEPIISAEQYEKAQQRIKAEYTPKYAKPPELHRHWLSGMVKCHTCGRSLSTSIHKDKRYGRTYTNFQCYGYLKGKCSVSHQISARKLEPAVLEGLKEIMEGVRPLQFKIIKSEEPTAQSAHEILTERLHDIEKKEERIRQAYRDGIDTIEEYRDNKAILFKERAEIESRLEELTPAPVPSESDTRELMRNRLKNVYEILSSEDVSTVTKSNALKSIVDKIVYDSEKKELSIYLYCSDTL

SEQ ID NO: 5735 - protein, 502 aa, Unknown
  Description of Unknown: Integrase B5736 sequence
  PTHR30461:SF3,SM00857,G3DSA:1.10.10.2600,IPR036162,PF13408, PS51737,G3DSA:3.40.50.1390,IPR025827,IPR006119,IPR038109, PF07508,SSF53041,IPR011109,PF00239,PTHR30461, PS51736,Coil,cd00338
MNAVIYARFSSHNQREQSIEGQLRDCYAYAKRYDLNVVGEYIDRALSGLTDDRPDFQRMIADAAKKQFERIIVWKLDRFARNRYDSALYKHRLKQYGVRVVSAMENVGEGDESILLEALLEASAEYYSLDLKKKIKRGQRENVANGKYNGGPLPYGYKAQNGKLIIDEKKAPVIRYLFEQYASGVPMKEIIDELTRRGVRGSRGGALTYNTFSRALTNTTYIGEYRYAGEVVPGLAEPMIDKEVFEKAQMFVKANARAPAANKAEVEYLLQGKAFCGNCGSPMIGECGRGRNGVVYNYYTCATRKKHHACRKKNERKDFIEWYVVEQTLQYVLTPARIKEIAKAVVTQYDKEFSGSKINECEKMIRQLDRELNKLVDALIEAPKAAHKRIYEKMESLEAQKTAMETDLVKLRIANEIRFTEEEVRAWLKQFCTGDLFDPEFRCNIIDTFINAIYLYDDRVIIFYNIKGGKQVSYIDMISTLEGEESDFVSDSIANAPPAKNP

SEQ ID NO: 5736 - protein, 502 aa, Unknown
  Description of Unknown: Integrase B5737 sequence
  SM00857,G3DSA:1.10.10.2600,IPR036162,PS51737,G3DSA:3.40.50.1390, IPR006119,IPR038109,PF07508,IPR011109,SSF53041, PTHR30461,Coil,PS51736,cd00338,PF00239
MNNKICMYLRKSRADEELEKTLGEGETLSKHRNALLKFAKEKKLNIVEIKEEIVSGESLFFRPKMLELLKEVEAKKYDGVLVMDMQRLGRGDMKDQGIILETFKNSNTKIITPQKTYDLNNDFDEEYTEFEAFMSRKELKMINRRMQGGRVRSVEEGNYIATNPPYGYDIGFINKNRVLKINEYESNAIKLIFKLYLNGNGASFIANELNNLGYKTKLGNNFSNSSVLTIIKNPVYIGKIAWKRKDIKKSRTPGKVKDTKTRDKSEWIIADGKHEAIIDMNTWDKTQEILKGKYHIPYQLTNSPANPFAGLITCGVCGKKMVMRKARGINRLMCIYKCGNKSTRFDLVESDCFEALKEHLKNYTAEVENELIEENTNIYTYQVSQLKKELTTLNNQRLKLFDLLERNLYDEDTFLERSKNINDRIDTVSSTLKSIEKLLKKKTKSSYQEDIQFFQSVLDAYNETEDIAKKNSLLKTILYKIEYTKLNRSKEHVIKVFPKLRK

SEQ ID NO: 5737 - protein, 502 aa, Unknown
  Description of Unknown: Integrase B5738 sequence
  PTHR30461:SF3,IPR036162,PS51737,IPR011109,PTHR30461, PS00397,PF00239,G3DSA:1.10.10.2600,IPR006119,SSF53041, cd00338,SM00857,IPR025827,IPR038109, PS51736,IPR006118,PF13408,G3DSA:3.40.50.1390,PF07508,Coil
MTDNTSMRTGALYIRVSTGKQEELSPDAQRRLLLDYASKNNIIISNQYIYEEDGISGRKADKRPQFQNMIAHAKSKEHPFDVILVWKYSRFARNQEESIVYKSMLRKDHVEVISVSEPLVDGPFGSLIERIIEWMDEYYSIRLSGEVVRGMTENALRGRNQARPPLGYKVPHAKETPVIVPEEALIIHTIFDMYTENGASMFAIAKHLNNLGYLTSHKKPFERRSIGYILSNPTYIGKSVWNRHSNDNKALKDESEWIIRDGSHEPIISVEQYEKAQQRIKAEYTPKYAKPPELHRHWLSGMVKCHTCGRSLSTSIHKDKRYGRTYTNFQCYGYLKGKCNVSHQISARKLEPAVLEGLQEIMEGVRPLQFKIIKSEEPAAQSAHEILTERLHDIEKKEERIRQAYRDGIDTIEEYRDNKAILFKERAEIESRLAELTPAPAPSETDTRELMRNRLKNVYEILSSEDVSTVTKSNALKSIVDKIVYDSEKKELSIYLYCSDTL

SEQ ID NO: 5738 - protein, 502 aa, Unknown
  Description of Unknown: Integrase B5739 sequence
  SM00857,G3DSA:1.10.10.2600,IPR036162,PF13408,PS51737, IPR025827,G3DSA:3.40.50.1390,IPR006119,IPR038109,PF07508, IPR011109,SSF53041,PTHR30461,Coil,PS51736, cd00338,PF00239
MRGVIYARYSPGPHQTEQSIEGQVADCQQYAEEHGIDIIEIYADRHVSGKSVVGRDEFQRMLRDAEKGRFDCVLVWKIDRFGRDRQDIAMGKMTLKRAGVKLMYARESVPEGPEGIILESVLEGLAEYYSADLRQKVIRGMKETAKKGQYCGQPLPIGYKVDSQRHIVIDEREAAVVREAFKLHIAGAQLRDIVQLFADRGIMGRRGKPVSNAVVYRMLRNEKYLGEFYIQDVKLNVEPIIDQATFLEAAQHFKTSRNNAAGRAKVNYLLSCKMFCGYCGSMISAEAGTGKLGKVYRYYKCGDKKRGKKCELKPFPKDHLEDAIILATVNDMLTDEMIEKLTVRILEVQEQENADDPVVGLRRRLDSNKKRQRNLLDAIEEGGARGLVSRLAALEEEEEQLVLEIQRAEIKRPRLTHEVVEAWLRSFRVGDVTDDDFRARLVDTFIARVELRNDEALIFYNIREKGPHSRVRVRPEWWSPRDGTRTPKIIVLRDYVVLRIAV

SEQ ID NO: 5739 - protein, 502 aa, Unknown
  Description of Unknown: Integrase B5740 sequence
  cd03768,PTHR30461:SF3,SM00857,IPR036162,PF13408, PS51737,IPR025827,G3DSA:3.40.50.1390,IPR006119,PF07508, IPR011109,SSF53041,PTHR30461,PS51736,PF00239
MIAIYARQSVEKKDSISIESQIEYAKREVFSEDFKIYQDSGYSGKNTNRPAFHEMMADVQSGRIEKVVVYRLDRISRSILDFADFINILESNRISFVSATEKFDTSTPMGRAMLYIIVVFAQLERETIAERVRDNYYARVKKGAWGGGPAAFGFDLVKTTIDGKKATICQPNEQISVVQRIFELYALPYSSLADVQRQLIQDGSVSSGGVNFDNAKLSSILKNPAYVRADTAVYNFYKAKGAIPANPPEDFDGVHGCILVGKRDANERKYKDVSNHLLAMGHHEGIVDSTAFLFCQQKLSRNRQIKNTYKGKHSWLTGLVKCAHCGYAFTIRFSKTKEGQVPYFCCSGKYLHKACTAKQTHRVREIEAEVQASLIQHAASYNLIHRQNTDAAAKEFQSRISEIDAKIENLILSLESVSHVSAQYINQRIEALHHEKQLLLHRYNETISEYNINEVTPFSATDWEQMDIEQKRQLARSLIRTVYLSEDGLSVSFNIKNGGHKP

SEQ ID NO: 5740 - protein, 501 aa, Unknown
  Description of Unknown: Integrase B5741 sequence
  cd03768,PTHR30461:SF3,SM00857,IPR036162,PF13408,PS51737, G3DSA:3.40.50.1390,IPR025827,IPR006119,PF07508,IPR011109, SSF53041,PTHR30461,PS51736,Coil,PF00239
MNAVYARQSLDKKDSLSIETQIELCKQELGIDVPTKVYIDKGFSGKNTNRPQFQEMMKDIHSGVINKVTVYKLDRLSRSLLDFAEMIEVFKQHNVEFQSTREKFDTSTPIGNAMLSIIMVFAQLERETIQLRVRDNYYMRSANGAYDSTAPYGFIKTKVALQGKSVSSLVCDPETTQILRGIFDAYAYTSTSLGALARQLNKRRVPSPGGAAWDSCKLSRIMSNPVYVKANADIYNYYRLTGINITNPIEAFAGVNGCVTYGQWDHKRRKFDQLKSLTLSIGLHEGLVDAQTFLLCQNRLSNNTQVYNGGQGKHSWLTGLIKCGYCGKAMKADVMKKGVPKFRCSGHANYGTCDDNARVSIAQVEEAVETQIMQHIQRHSDLQAQQIAECDVKEQQYKIQINKINEQIDNLVNAIAQGSATVIGYLNDKIAELETQRHEIEVALQKHILERPSPENTRQLYDTLDMWPYMDIAQRHEVAAMLIKEVRIFTDEIRIFWKYDL

SEQ ID NO: 5741 - protein, 501 aa, Unknown
  Description of Unknown: Integrase B5742 sequence
  cd03768,SM00857,IPR036162,PF13408,IPR025827, G3DSA:3.40.50.1390,PS51737,IPR006119,PF07508,SSF53041, IPR011109,PTHR30461,PS51736,Coil,PF00239
MNIREDAIYGRQSVDRKDSISIESQIEFCKYELRGGNFRQHTDKGYSGKNTDRPKFQELMADIKRGLIKRVVVYKLDRISRSILDFATMMETFQAYNMEFVSSTEKFDTSTPMGRAMLNICIVFAQLERETIQKRVTDAYYSRCQRGFHMSGAAPFGFQLEPTTIQGIRTKMMKPDPETADIARLMFEMYAQPSTSFGDIARYFADEGILIYDKELTRGFISQMLRNPIYVQADLEMYEFFKSQGTVVINEAADFAGINGCYLYQGRDVQARKNKHLKDQFLVVAPSEGMVSADVWLRCRKKLMANITFQNGRKAKNIWLAGKVKCGRCGYALMSVGNPSGVQYLRCSKRADNKSCPGCGTLRTREFEQFIYDEMVKKMAQFHSLTGKRETVNPKLTALKVELAHVEDEIEKLLNTLTGASAVLISYANTKIEELDAQRQTLSKEIAALSAESMSPEQIERLSVYLNRWEEIAFDDRRQVADSLISQIRATGECVAIEWKI

SEQ ID NO: 5742 - protein, 501 aa, Unknown
  Description of Unknown: Integrase B5743 sequence
  cd03768,PTHR30461:SF3,SM00857,IPR036162,PF13408,PS51737, G3DSA:3.40.50.1390,IPR025827,IPR006119,PF07508,IPR011109 ,SSF53041,PTHR30461,PS51736,Coil,PF00239
MNAVYARQSLDKKDSLSIETQIELCKQELGIDVPTKVYIDKGFSGKNTNRPQFQEMMKDIHSGVINKVTVYKLDRLSRSLLDFAEMIEVFKQHNVEFQSTREKFDTSTPIGNAMLSIIMVFAQLERETIQLRVRDNYYMRSANGAYDSTAPYGFIKTKIALQGKSVSSLVCDPETTQILRGIFDAYAYTSTSLGALARQLNQRRVPSPGGAAWDSCKLSRIMSNPVYVKANADIYNYYRLTGINITNPIEAFAGVNGCVTYGQWDHKRRKFDQLKSLTLSIGLHEGLVDAQTFLLCQNRLSNNTQVYNGGQGKHSWLTGLIKCGYCGKAMKADVMKKGVPKFRCSGHANYGTCDDNARVSIAQVEEAVETQIMQHIQRHSDLQAQQIAECDIKEQQYKIQINKINEQIDNLVNAIAQGSATVIGYLNDKIAALETQRHEIEVALQKHILERPSPENTRQLYDTLDMWPYMDIAQRHEVAAMLIKEVRIFTDEIRIFWKYDL

SEQ ID NO: 5743 - protein, 501 aa, Unknown
  Description of Unknown: Integrase B5744 sequence
  cd03768,PTHR30461:SF3,SM00857,IPR036162,PF13408, PS51737,G3DSA:3.40.50.1390,IPR025827,IPR006119,PF07508, IPR011109,SSF53041,PTHR30461,PS51736,Coil, PF00239
MNAVYARQSLDKKDSLSIETQIELCKQELGIDVPTKVYIDKGFSGKNTNRPQFQEMMKDIHSGVINKVTVYKLDRLSRSLLDFAEMIEVFKQHNVEFQSTREKFDTSTPIGNAMLSIIMVFAQLERETIQLRVRDNYYMRSANGAYDSTAPYGFIKTKVALQGKSVSSLVCDPETTQILRGIFDAYAYTSTSLGALARQLNQRRVPSPGGAAWDSCKLSRIMSNPVYVKANADIYNYYRLTGINITNPIEAFAGVNGCVTYGQWDHKRRKFDQLKSLTLSIGLHEGLVDAQTFLLCQNRLSNNTQVYNGGQGKHSWLTGLIKCGYCGKAMKADVMKKGVPKFRCSGHANYGTCDDNARVSIAQVEEAVETQIMQHIQRHSDLQAQQIAECDIKEQQYKIQINKINEQIDNLVNAIAQGSATVIGYLNDKIAALETQRHEIEVALQKHILERPSPENTRQLYDTLDMWPYMDIAQRHEVAAMLIKEVRIFTDEIRIFWKYDL

SEQ ID NO: 5744 - protein, 501 aa, Unknown
  Description of Unknown: Integrase B5745 sequence
  PTHR30461:SF3,SM00857,G3DSA:1.10.10.2600,IPR036162,PF13408, IPR025827,PS51737,G3DSA:3.40.50.1390,IPR006119,IPR038109, PF07508,IPR011109,SSF53041,PTHR30461,Coil, PS51736,cd00338,PF00239
MTAVIYARYSSDSQREASIEGQLRDCKDYAEKNGITVVGTYIDRAYSAKTDDRPDFQRMIKDSAKKIFDVVLVWKLDRFARNRFDAVNYKYQLEKNSVHLVSAMEPISQGPEGIMVESMLIGMAEYYSAELALKVARGERENALQCKYNGGVVPLGFTIGKEDRLYHIDPETAPIVQEIFTRYADGEPAEKIAASLNERGLRTRTGKPFVKNSFFQIFRNRRYIGEYRYKDIVTPGGIPAIVDQDLFDRVQQRFEQNRIAHGRPAKEDVSYLLTTKLFCGKCGTLMGGESGTSHMGNTYYYYKCGNAKRHGKAHCDLKAIRKEPLERFVVDTAIKVIFSDEIIERLIDLVIEAQQKENTRLPVLKDQLRDTEKRLANLLEAIEQGILTPTTKQRLDELEARKEALNTSILEEELKKPVLTREWIRFWLEKFRKGDVGSMEHQRQIIDTFVNSVYVFDDRVVLNFNFTDDAKTVTREEVLGSSAVDNAPPKKRAQLCYFVAK

SEQ ID NO: 5745 - protein, 501 aa, Unknown
  Description of Unknown: Integrase B5746 sequence
  PTHR30461:SF3,cd00338,SM00857,G3DSA:1.10.10.2600,IPR036162, PF13408,IPR025827,G3DSA:3.40.50.1390,PS51737,IPR006119, IPR038109,PF07508,SSF53041,IPR011109,PTHR30461, PS51736,Coil,PF00239
MNAVIYARFSSHNQREESIEGQVRECRKYAEQYDLHVVEVYADRAVSGKTDQRPEFQRMIRDSAKRRFQIVIMYTLDRFARNRRDSATYKYELRKNGVRVVYAKQEIPDSPEGIILESVLEGYAEYYSENLARNITRGLMENALQGKSVGGTTPLGYKREDDRLVIDPVNAQAVRTIFDMYLSGKSSQEIIRWLNEKGYFTALGNPFGKNSLRTILTNEKYIGIYRYRDVVIEDCVPKIIDKDIFDRVQERVKVVSKAKAHYKGDTDYLLCTKAFCGYCGAPLIGECGTGKSGQVYHYYKCASRKRGKTCNKHIENKDALEEAVVRETVNHILQKNVIESIAARAMASLDKLTADDALLKSLQSRLKETEIALANMTKAIEMGIITPTTKSRLLELEADKGDLLDKIKREQESYPDMSKEGIIYWLSSFMQGDPKDENFRRRIFESLLNRVDVFDNDDGTRRIVLTYNLSENRVSAVTCSCSDSALTPPPSSRNESFRLFF

SEQ ID NO: 5746 - protein, 501 aa, Unknown
  Description of Unknown: Integrase B5747 sequence
  cd03768,PTHR30461:SF3,SM00857,IPR036162,PF13408, PS51737,IPR025827,G3DSA:3.40.50.1390,IPR006119,PF07508, IPR011109,SSF53041,PTHR30461,PS51736,Coil, PF00239
MNAVYARQSLDKKDSLSIETQIELCKQELGIDVPTKVYIDKGFSGKNTNRPQFQEMMKDIHSGVINKVTVYKLDRLSRSLLDFAEMIEVFKQYNVEFQSTREKFDTSTPIGNAMLSIIMVFAQLERETIQLRVRDNYYMRSANGAYDSTAPYGFIKTKVALQGKSVSSLVCDPETTQILRGIFDAYAYTSTSLGALARQLNKRRVPSPGGAAWDSCKLSRIMSNPVYVKANADIYNYYRLTGINITNPIEAFAGVNGCVTYGQWDHKRRKFDQLKSLTLSIGLHEGLVDAQTFLLCQNRLNNNTQVYNGGQGKHSWLTGLIKCGYCGKAMKADVMKKGVPKFRCSGHANYGTCNDNARVSIAQVEEAVETQIMQHIQRHSDLQAQQIAECDVKEQQYKIQINKINEQIDNLVNAIAQGSATVIGYLNDKIAELETQRHEIEVALQKHILERPSPENTRQLYDTIDMWPYMDIAQRHEVAAMLIKEVRIFTDEIRIFWKYDL

SEQ ID NO: 5747 - protein, 501 aa, Unknown
  Description of Unknown: Integrase B5748 sequence
  PTHR30461:SF3,SM00857,G3DSA:1.10.10.2600,IPR036162,PF13408, IPR025827,G3DSA:3.40.50.1390,PS51737,IPR006119,IPR038109, PF07508,IPR011109,SSF53041,PTHR30461,Coil, PS51736,cd00338,PF00239
MRFSSPGQMSGDSLNRQRRLITEWLKVNSDYYLDTVTYEDLGLSAFNGKHAQSGAFSEFLDAIEHGYILPGTTLLVESLDRLSREKVGEAIERLKLILNHGIDVITLCDNTVYNIDSLNEPYSLIKAILIAQRANEESEIKSSRVKLSWKKKRQDALESGTIMTASCPRWLSLDDKRTAFVPDPDRVKTIELIFKLRMERRSLNAIAKYLNDHAVKNFSGKESAWGPSVIEKLLANKALIGICVPSYRARGKGISEIAGYYPRVISDDLFYAVQEIRLTPFGISNSSKNPMLINLLRTVMKCEACGNTMIVHAVSGSLHGYYVCPMRRLHRCDRPSIKRDLVDYNIINELLFNCSKIQPVENKKDANETLELKIIELQMKINNLIAALSVAPEVTAIAEKIRVLDKELRRASVSLKTLKSKAVSSLGDFHAIDLTSKNGRELCRTLAYKTFEKIIINTDNKTCDIYFMNGIVFKHYPLMKTISAQQAISTLKYMVDGEVYF

SEQ ID NO: 5748 - protein, 501 aa, Unknown
  Description of Unknown: Integrase B5749 sequence
  cd03768,SM00857,IPR036162,PF13408,IPR025827, PS51737,G3DSA:3.40.50.1390,IPR006119,PF07508,IPR011109, SSF53041,PTHR30461,PS51736,Coil,PF00239
MIIREDAIYGRQSVDRKDSISIESQIEFCKYELRGGNFRKYTDKGYSGKNTDRPKFQEMMADIRRGLIKRVVVYKLDRISRSILDFATMMETFQEYNVDFVSSTEKFDTSTPMGRAMLNICIVFAQLERETIQKRVTDAYYSRCQHGFHMSGAAPYGFQLEPTTIEGIRTKMMKPDPETADIAKLMFEMYSQPATSFGDIARYFADEGILIYGKEMTRGFISQLLRNPIYAQADLDMYEFFKSQGTVVVNEATDFAGTNGCYLYQGRDVQERKNKHLKDQILVLAPSEGLVSSDTWLRCRKKLMANKTFQGGRKAKNTWLAGKVKCGRCGYALMSVGNPTGIQYLRCSKRADSKSCDGCGTLRTREFERFLYGEMVKKLSEFQTLTAKRETVNPKLTALNMELARVEEEIEKLLNTLTGANAVLLSYANSKIEELDTRRQALTKEIAALSAETISPEQIERLSVYLNQWEEIDFEDRRQVADGLISQIRATDEHVSIEWKI

SEQ ID NO: 5749 - protein, 501 aa, Unknown
  Description of Unknown: Integrase B5750 sequence
  cd03768,PTHR30461:SF3,SM00857,IPR036162, PF13408,IPR025827,G3DSA:3.40.50.1390,PS51737, IPR006119,PF07508,IPR011109,SSF53041, PTHR30461,PS51736,Coil,PF00239
MNAVYARQSLDKKDSLSIETQIELCKQELGIDVPTKVYIDKGFSGKNTNRPQFQEMMKDIHSGVINKVTVYKLDRLSRSLLDFAEMIEVFKQHNVEFQSTREKFDTSTPIGNAMLSIIMVFAQLERETIQLRVRDNYYMRSANGAYDSTAPYGFIKTKIALQGKSVSSLVCDPETTQILRGIFDAYAYTSTSLGALARQLNQRRVPSPGGAAWDSCKLSRIMSNPVYVKANADIYNYYRLTGINITNPIEAFAGVNGCVTYGQWDHKRRKFDQLKSLTLSIGLHEGLVDAQTFLLCQNRLNNNTQVYNGGQGKHSWLTGLIKCGYCGKAMKADVMKKGVPKFRCSGHANYGTCDDNARVSIAQVEEAVETQIMQHIQRHSDLQAQQIAECDIKEQQYKIQINKINEQIDNLVNAIAQGSATVIGYLNDKIAALETQRHEIEVALQKHILERPSPENTRQLYDTLDMWPYMDIAQRHEVAAMLIKEVRIFTDEIRIFWKYDL

SEQ ID NO: 5750 - protein, 501 aa, Unknown
  Description of Unknown: Integrase B5751 sequence
  cd03768,PTHR30461:SF3,SM00857,IPR036162,PF13408, IPR025827,G3DSA:3.40.50.1390,PS51737,IPR006119,PF07508, IPR011109,SSF53041,PTHR30461,PS51736,Coil, PF00239
MNAVYARQSLDKKDSLSIETQIELCKQELGIDVPTKVYIDKGFSGKNTNRPQFQEMMKDIHSGVINKVTVYKLDRLSRSLLDFAEMIEVFKQHNVEFQSTREKFDTSTPIGNAMLSIIMVFAQLERETIQLRVRDNYYMRSANGAYDSTAPYGFIKTRVALQGKSVSSLVCDPETTQILRGIFDAYAYTSTSLGALARQLNKRRVPSPGGAAWDSCKLSRIMSNPVYVKANADIYNYYRLTGINITNPIEAFAGVNGCVTYGQWDHKRRKFDQLKSLTLSIGLHEGLVDAQTFLLCQNRLSNNTQVYNGGQGKHSWLTGLIKCGYCGKAMKADVMKKGVPKFRCSGHANYGTCNDNARVSIAQVEEAVETQIMQHIQRHSDLQAQQIAECDAKEQQYKIQITKINEQIDNLVNAIAQGSATVIGYLNDKIAELETQRHEIEVALQKHILERPSPENTRQLYDTLDMWPYMDIAQRHEVAAMLIKEVRIFTDEIRIFWKYDL

SEQ ID NO: 5751 - protein, 501 aa, Unknown
  Description of Unknown: Integrase B5752 sequence
  cd03768,PTHR30461:SF3,SM00857,IPR036162,G3DSA:3.40.50.1390, IPR006119,SSF53041,PTHR30461,PS51736,Coil, PF00239
MKRIAIYSRKSVYIEGSISIETQINMCKEYMLKKFKDCEFKIFEDEGFSGGNTNRPAFQKMLKLAELKQIDVVVCYKIDRIARNTLDFLNILEMFKKSSVELISITEGFDPNTQMGKVMLTLLASFAEMERSNIQQRVKDSMFSLAQKGKWTGGAPPLGFKVKESGGIEIDNKNLILDVFNMKFKKYKNTEIIEYIESKYNHKFVNTTLASTLRKPIYVKSSKEVSIYLKSKGYKILREENNINSYHTYKNDNVDYAIVNNIEGFIEPNIWIAVNKSMDKNSNGETNRFSENFWLTKTLRCKYCGKTYCGQTKIVKSKYTTKDGVIKEYTGNYEYYMCRDMLKGRLKTCENTKRIKRETLELKIEELIYMLQDKKFFEKYYGNKQVDTTFELKEIESKISKINKTIDNLTNKISLLSNDAAMIFIDKIESLVEEKKILNNRIIELELQSLNNLNSKEDFIYENILKFNKNLSVEQKRNIAMNIFKKIIYDYKTDKFEVSFN

SEQ ID NO: 5752 - protein, 501 aa, Unknown
  Description of Unknown: Integrase B5753 sequence
  cd03768,PTHR30461:SF3,SM00857,IPR036162,PF13408,PS51737, G3DSA:3.40.50.1390,IPR025827,IPR006119,PF07508,IPR011109 ,SSF53041,PTHR30461,PS51736,Coil,PF00239
MNAVYARQSLDKKDSLSIETQIELCKQELGIDVPTKVYIDKGFSGKNTNRPQFQEMMKDIHSGVINKVTVYKLDRLSRSLLDFAEMIEVFKQHNVEFQSTREKFDTSTPIGNAMLSIIMVFAQLERETIQLRVRDNYYMRSANGAYDSTAPYGFIKTKVALQGKSVSSLVCDPETTQILRGIFDAYAYTSTSLGALARQLNKRRVPSPGGAAWDSCKLSRIMSNPVYVKANADIYNYYRLTGINITNPIEAFAGVNGCVTYGQWDHKRRKFDQLKSLTLSIGLHEGLVDAQTFLLCQNRLSNNTQVYNGGQGKHSWLTGLIKCGYCGKAMKADVMKKGVPKFRCSGHANYGTCDDNARVSIAQVEEAVETQIMQHIQRHSDLQAQQIAECDAKEQQHKIQINKINEQIDNLVNAIAQGSATVIGYLNDKIAELETQRHEIEVALQKHILERPSPENARQLYDTLDMWPYMDIAQRHEVAAMLIKEVRIFTDEIRIFWKYDL

SEQ ID NO: 5753 - protein, 501 aa, Unknown
  Description of Unknown: Integrase B5754 sequence
  PTHR30461:SF3,IPR036162,PS51737,IPR011109,PTHR30461, PS00397,PF00239,G3DSA:1.10.10.2600,IPR006119,SSF53041, SM00857,IPR025827,IPR038109,PS51736,cd03768, IPR006118,PF13408,G3DSA:3.40.50.1390,PF07508,Coil
MRDMDSARLRVVCYVRVSTREQAEKGYSVSEQQERLKAYCLAKDWVVAQVITDPGFSGAKLERPGMQQLISLVQAKKCDAVLVWKLDRLSRSQKDTLYLIEDVFLKNGCAFVSMNENFDTSTAFGRAMIGILSVFAQLEREQIRERMAVGRVGRAKAGLFHGGGFAPIGYDYKTIAEGGAGLVVNEYEAIQVREVFSLYLQGWPVNRIRKYMAAHYTTKDGDWGSDTTVRDVLKNPLYTGKINWAKKVYDGQHEPLISQETFDAAAARLATSSWKRTCSDGMERNSPFKSTHLLGGIIWCARCGARYFASGNYSGRGENKRYWPYYVCYSRAKSAKHMIRDPNCRNDRWAVTKLDAIIEGEIRKLAFDPAALELAVSGPQRDEDVAQRRAALQQRLNDLRAQMGRVLDLYQMGGSLPASMVGDRVAKLQAEIDGVEAALAEAVEEPPTQRLDAARAALVGAEDVLDNGTLDERRELVHSLIRRIDLDGENIDIHWSFSPEA

SEQ ID NO: 5754 - protein, 501 aa, Unknown
  Description of Unknown: Integrase B5755 sequence
  PTHR30461:SF3,IPR036162,PS51737,IPR011109,PTHR30461, PS00397,PF00239,G3DSA:1.10.10.2600,IPR006119,SSF53041, SM00857,IPR025827,IPR038109,PS51736,cd03768, IPR006118,PF13408,G3DSA:3.40.50.1390,PF07508,Coil
MRDMDSARLRVVCYVRVSTREQAEKGYSVSEQQERLKAYCLAKDWVVAQVITDPGFSGAKLERPGMQQLISLVQAKKCDAVLVWKLDRLSRSQKDTLYLIEDVFLKNGCAFVSMNENFDTSTAFGRAMIGILSVFAQLEREQIRERMAVGRVGRAKAGLFHGGGFAPIGYDYKTIAEGGAGLVVNEYEAMQVREVFSLYLQGWPVNRIRKYMAAHYTTKDGDWGSDTTVRDVLKNPLYTGKINWAKKVYDGQHEPLISQETFDAAAARLATSSWKRTCSDGMERNSPFKSTHLLGGIIWCARCGARYFASGNYSGRGENKRYWPYYVCYSRAKSAKHMIRDPNCRNDRWAVAKLDAIIEGEIRKLAFDPAALELAVSGPQQDEDVAQRRAALQQRLNDLRAQMGRVLDLYQMGGSLPASMVGDRVAKLQAEIDGVEAALAEAVEEPPTQRLDAARAALVGAEDVLDNGTLDERRELVHSLIRRIDLDGENIDIHWSFSPEA

SEQ ID NO: 5755 - protein, 501 aa, Unknown
  Description of Unknown: Integrase B5756 sequence
  cd03768,SM00857,G3DSA:1.10.10.2600,IPR036162,PF13408, PS51737,G3DSA:3.40.50.1390,IPR025827,IPR006119,IPR038109, PF07508,IPR011109,SSF53041,PTHR30461,PS51736, Coil,PF00239
MNIREDVIYARQSVDRKDSISIESQIDFCKYELKGGSCRVFKDKGYSGKNTDRPEFQKLLGEIRKGKVRRVVVYKLDRISRSILDFANMMELFQEYDVEFVSSTEKFDTSTPMGRAMLNICIVFAQLERETIQKRVTDAYYSRCLKGFHMSGQAPYGFDLEPTVVENIRTKMMVADPIAASHVRLMFEMYAEPETSFGDITRYFEERGIKVYGKSLTRSYLSQLLRNPVYAQADLEMYEFFKSQGTVVVNDAADFAGTNGCYLYQGRDVKEDKDKSLKDQILVIAPHEGFVSADVWLRCRKKLMTNTTFQNGRKARNTWLAGKIKCGKCGYALKTTHNPAGYEYLRCSKRVDHKGCPGCGTLRKTEFEQFIFTAMGEKFREFKLLRGGEEKANPKITAYQVELAQVEAEIEKLLDTLTGANATLLAYANKKIEDLDNRRKTLSKAIADLSVETLSSQQIELLSGYLDDWENISFEDKRKAADGLISSISATSDYVKIEWKI

SEQ ID NO: 5756 - protein, 501 aa, Unknown
  Description of Unknown: Integrase B5757 sequence
  cd03768,PTHR30461:SF3,SM00857,G3DSA:1.10.10.2600,IPR036162, PF13408,PS51737,G3DSA:3.40.50.1390,IPR025827,IPR006119, IPR038109,PF07508,IPR011109,SSF53041,PTHR30461, PS51736,Coil,PF00239
MNAVYARQSLDKKDSLSIETQIELCKQELGIDVPAKVYIDKGFSGKNTNRPQFQEMMKDIHSGVINKVTVYKLDRLSRSLLDFAEMIEVFKQHNVEFQSTREKFDTSTPIGNAMLSIIMVFAQLERETIQLRVRDNYYMRSANGAYDSTAPYGFVKTKVALQGKSVSSLVCDPETAQILRGIFDAYAYTSTSLGTLARQLNKRRVPSPGGAAWDSCKLSRIMSNPVYVKANADIYNYYRLTGINITNPIEAFAGVNGCVTYGQWDHKRRKFDQLKSLTLSIGLHEGLVDAQTFLLCQNRLTNNAQVYNGGQGKHSWLTGLIKCGYCGKAMKADVMKKGVPKFRCSGHANYGTCDDNARVSIAQVEEAVETQIMQHVQRHSDLQAQQIAECDAKEQHYKIQINKINEQIDNLVNAIAQGSATVIGYLNDKITELETQRHEIEVALQKHILERPSPENTRQLYDTLDMWPYMDIAQRHEVAAMLIKEVRIFTDEIRIFWKYDL

SEQ ID NO: 5757 - protein, 501 aa, Unknown
  Description of Unknown: Integrase B5758 sequence
  cd00338,SM00857,G3DSA:1.10.10.2600,IPR036162,PS51737, G3DSA:3.40.50.1390,IPR006119,IPR038109,PF07508,IPR011109, SSF53041,PTHR30461,PS51736,Coil,PF00239
MRRRIDPNGRYCAYLRKSRDDRDERGNVMTVEETLRKHESWIVELAIRHGIRVEKWYREVVSAETIDARPEVQQVLRELAEGKWDGVLCVDVQRLARGDTKDQGIMCEFLEVSGALVITTDGYFDTTDEADMDYLEYGLFRSRQEYKAINKILKRGRKRSKLDGNWPFSIAPYGYVKVRDEIGPTLAHGDCAKYVVIVDELSAQGLSFGSIARRMVEIGAPGEWSATKVRRIVTNEAYLGRTPVEKFVVVKRMKADGSGLEKVSIPVKDPQYRPGRHDPIVTQELFDAANANRCNPSLKKSNELRNPLASLLVCSGCGFAMRMIKDSKTGMFRYYHSMKPNGCSVKSCGYDLMMDAVIAELKRRIDDSRVEVRQRSDRSAEREIAAMKESLSVVDRSLASLLDRLMREVVTEDEYMAMKRKLSDEKQSLEATLAAAEADRERETSIEHRNVTIHQAIDILRSDATAGEANAFLRTFIERIEYSNDGVGLNVHNIKLDIFFK

SEQ ID NO: 5758 - protein, 501 aa, Unknown
  Description of Unknown: Integrase B5759 sequence
  PTHR30461:SF3,cd00338,SM00857,G3DSA:1.10.10.2600,IPR036162, PS51737,G3DSA:3.40.50.1390,IPR006119,IPR038109,PF07508, SSF53041,IPR011109,PTHR30461,PS51736, Coil,PF00239
MQNAIYLRKSRADQGTVEDTLRKHKETLLDYAAKHNIFVSLNDIYEEVISGESLYARPQMLRLLSDVEAGKFSAVLCMDIDRLGRGGMSDQGIILDTFKSSNTKIITPAKTYDLNDELDENNMEFAAFIARFEYKQIRKRMRAGVKKSIQDGCYLANAPYGYVNITENKRATLAIQPEEAAYVRQIFDMYVNQGIGCQTIADNMNAMGAKPHRAAQFGRTSVMTILKNPVYIGKIVWDKKTHIRKNSKGNSKHIIISNPQDKWTVTQGLHPPIIDPETFSKAQEIIQNRYHPPAFTGVVINPLSGLIVCKNCGGVMQRAANCKGGPFCLCQKRGCMPMSKLAYVEQSLLGKLQLAADELAAAAQNPRPPAASKEDYQKIIKEIDHQIKTVRQQISRLQDLLEQNVYDIPTFLERQKKHSEKLAALENKKTSILRQANAHREIDIQKTRQRITEVLAAYATAAPQQKNILLKTIVEKAVYYKEKGWAPAQFELEVALRPSFL

SEQ ID NO: 5759 - protein, 501 aa, Unknown
  Description of Unknown: Integrase B5760 sequence
  cd03768,SM00857,IPR036162,PF13408,IPR025827, PS51737,G3DSA:3.40.50.1390,IPR006119,PF07508,SSF53041, IPR011109,PTHR30461,PS51736,Coil,PF00239
MFDAIYTRQSVDKADSISVTAQADFCRKEVVDYPIKVYTDKGYSGKNIDRPGFKELLADIEAGAVRRVIVYRLDRISRSVLDFANIIEIFQKKNVSFVSTMEKFDTDTPIGKAMLMIVMVFAQLERETIQRRVLDAYRSRSRRGFYMGGPVPFGYTLDEIVIDGIRTKTYKQIPEEVRAIQLMYDLYKAPQVSLRDVVRALNQNEVRRRDGTDFCVARVRDILMNPINVKADRRIYEFYKQQGTNVLNPAEDFVGTNGAYLYSSTDQNTRKSSDLSGKFLVLAPHEGIIDSITWIKCRNKLLGNVAVAKPLKAKATWLAGKIKCGYCGYSLVARTYHCKTKQDYRYFICSHKYVSAGCRFSTIDADQVEAYVFDAMRNKLEEFETLRRAKQTDVDLMTVKLKDRIAVIDSEIADLMGKLGAANDVLMNYINDRVKALDEEKRDLQVQINSAVIRDDDDPDAISGYLDKWDELSLPDKLTVVDSLIVKITACKDRIQIYWKI

SEQ ID NO: 5760 - protein, 501 aa, Unknown
  Description of Unknown: Integrase B5761 sequence
  cd00338,SM00857,IPR036162,PS51737, G3DSA:3.40.50.1390,IPR006119,PF07508,SSF53041, IPR011109,PTHR30461,PS51736,Coil, PF00239
MQKQNGLAYSYIRFSSKKQEQGDSVRRQTELAEKYSIANNLTLSEKNFQDLGISAFKEGNRPSLGDMLSAIEQGAIESGSTIIIESLDRLSRRGIDVTQQIIKSILQHNVFIASLTDGLLLNRESVNDLVSVIRIALAADLAHKESEKKSQRLRETKQQQRKAALEGKVINKILPFWLAREKDQFVFSDRLDAVKRIIELKRKGLGTNKIAKTLNDEGFRPLRSAGWNHTTVGKTLSSVALYGAYQTSETTKDRKVILLDIIDNYYPAVISKEDWMLLQSDAKQNKPGYKSDKNAFTGLLKHSCGGALVRKFHVVTGKTYQYHVCANARDGKCTVTQNFKNMEIALYKILKHLKMEKKTSVDTTIAQERAQLKEQIDNLNGMLLTMKKVPMSVLETIGNLEEKLQELDQQFKQQSDMVLAEQSVDFNLLSEIKDPIELNMMLKRVIKEITVFNLKKSWRIKVQYLNGHSQSFRWDGYSMSFVSDSKKLLEYMNAEKEQLDN

SEQ ID NO: 5761 - protein, 501 aa, Unknown
  Description of Unknown: Integrase B5762 sequence
  SM00857,G3DSA:1.10.10.2600,IPR036162,PF13408,IPR025827, G3DSA:3.40.50.1390,PS51737,IPR006119,IPR038109,PF07508, SSF53041,IPR011109,PTHR30461,Coil,PS51736, cd00338,PF00239
MSEKSAVIYARYSSHNQREESIEGQIRECKRYAQINDVTIIAEYADRAISGKSDNRAEFQRMIRDAEKGRFGLVIVYKLDRFARNRYDSAMYKARLKKCGVKVVSATEQLSDSPEGIILEAMLEGMAEYYSANLSQNIKRGMMENALKGLATGGGRCLGYYTGPDKKYYIDEAGASTVRMIYEMYDQGHTYAHIVETLNNQGRKTYKGAPFNKNSLGKILHNRRYIGDYVWGDIVQEGGMPQIIDRDLWERVQRKLNRKQNASARARGEYDYILSGKLYCGRCGKPMIGDSGTSRNGAKHYYYTCSTKKHGGTCPKKSVRAAAIEDEVIRTTIQTILTDEMLEHIADKVMEYQARDTDSAILIEQYKNQLKETETAIAGILRAVEAGMFSPSMKDRMDELEGQKAELNADIEREQINQQKVSRDEVLFFLSQFKGGDPDDPDYKQRLVDTFVNSVWLYDDKLVLTYNYSGDDNKITLDMVNAGLSGKPNGCSDNACQAPPK

SEQ ID NO: 5762 - protein, 501 aa, Unknown
  Description of Unknown: Integrase B5763 sequence
  cd03768,PTHR30461:SF3,SM00857,IPR036162,PF13408, IPR025827,PS51737,G3DSA:3.40.50.1390,IPR006119,PF07508, IPR011109,SSF53041,PTHR30461,PS51736,Coil, PF00239
MNAVYARQSLDKKDSLSIETQIELCKQELGIDVPTKVYIDKGFSGKNTNRPQFQEMMKDIHSGVINKVTVYKLDRLSRSLLDFAEMIEVFKQHNVEFQSTREKFDTSTPIGNAMLSIIMVFAQLERETIQLRVRDNYYMRSANGAYDSTAPYGFIKTKVALQGKSVSSLVCDPETTQILRGIFDAYAYTSTSLGALARQLNKRRVPSPGGAAWDSCKLSRIMSNPVYVKANADIYNYYRLTGINITNPIEAFAGVNGCVTYGQWDHKRRKFDQLKSLTLSIGLHEGLVDAQTFLLCQNRLNNNTQVYNGGQGKHSWLTGLIKCGYCGKAMKADVMKKGVPKFRCSGHANYGTCNDNARVSIAQVEEAVEAQIMQHIQRHSDLQAQQIAECDVKEQQYKIQINKINEQIDNLVNAIAQGSATVIGYLNDKIAELETQRHEIEVALQKHILERPSPENTRQLYDTLDMWPYMDIAQRHEVAAMLIKEVRIFTDEIRIFWKYDL

SEQ ID NO: 5763 - protein, 501 aa, Unknown
  Description of Unknown: Integrase B5764 sequence
  PTHR30461:SF3,SM00857,G3DSA:1.10.10.2600,IPR036162,PF13408, PS51737,IPR025827,G3DSA:3.40.50.1390,IPR006119,IPR038109, PF07508,IPR011109,SSF53041,PTHR30461,Coil, PS51736,cd00338,PF00239
MYEDIKTACLYVRFSSHNQTEQSIEGQTRVCRDFCKRHNIRIVEIYADRATSASKDIEKRVQFLKMIKDSEKGLFDAVIVYKLDRFARSRYDSATYKYRLKRNGVQLISATENISNDPEGIILESVLEGMAEFYSAELSQKINRGMRESAYKHNSIGGAVPLGYKIEDKKLVIDPKTAPIVKEAFEKYADGETVAEICRQFNARGYKTSKGTAFGKSSFTKIFRNERYIGVYSFHDYRAEDAIPAIIDKDLWDRVQLRVGKIKNAPARNKAKVVYLLSGKIFCGHCGSKMNGNCNAGNYYYYQCYGKKNGNVDCKKKNIRKEFIERLVAQDALSLLTDEYIEQIATIACEKNQHEIELDSALPTIRDRIHQVDLSLNNLLKAIESGSAPDMLVKRMGELEKEKKDLQAQAKKESEDIVELDKAQVIYWLEQFRGGSIEDEEFCRMLIDLFVNSVTVWDEDDNTYKVTVAYNLTSLPTKTYRLNKGGTLSDFTYNAPAFAHQ

SEQ ID NO: 5764 - protein, 501 aa, Unknown
  Description of Unknown: Integrase B5765 sequence
  PTHR30461:SF3,SM00857,G3DSA:1.10.10.2600,IPR036162,PF13408, IPR025827,G3DSA:3.40.50.1390,PS51737,IPR006119,IPR038109, PF07508,SSF53041,IPR011109,PF00239,PTHR30461, Coil,cd00338
MDKTNKEKNTKYAGRAVIYARFSSGKQREESIEGQIRVCTDFAKRNNMKVIGHYADRAISGRRDTRAQFQKMMQDSLKRMFDYVIVYQHERFARNRYDSAIYKWQLRKCGVRVISALEYFGDGPEAILFETWAEGNAEYFSADLARKVKRGMTENALKGKWNGTCPLGYIIGEDKRLKINPKTAPLVRKIFRRFVDGAKTVDIIKELSPEYFALTGKKFQRTSFSKMLTNETYIGVYSWNGITVDNAVPPIIKKEVFLMAKDRVEKQKRNKPVYMSDIYLLTAKIKCARCGAYMTGMSGTSRNGVKHYYYVCNNQRRNKSCDMKAIKVDTIEQAVINNAMSILNDEKSVDLIADEAIKLLAQSADGEQEVEILKNERKEVEKKINNCLMALENGVISDSIVERIAENEARLKSIDNEIEHLSLMNNPLSLTKERIIYFLMHGLKGKKRREFILSTLVKEVLLNYDSEHEVWEMSIAYNYSNNCNECNKNDNNVRKVKIWYA

SEQ ID NO: 5765 - protein, 501 aa, Unknown
  Description of Unknown: Integrase B5766 sequence
  PTHR30461:SF3,SM00857,G3DSA:1.10.10.2600,IPR036162,PF13408, PS51737,G3DSA:3.40.50.1390,IPR025827,IPR006119,IPR038109, PF07508,SSF53041,IPR011109,PF00239,PTHR30461, PS51736,Coil,cd00338
MYEDIKTACLYVRFSSHNQTEQSIEGQTRVCRDFCKRHNIRIVEIYADRATSASKDIEKRVQFLKMIKDSEKGLFDAVIVYKLDRFARSRYDSATYKYRLKRNGVQLISATENISNDPEGIILESVLEGMAEFYSAELSQKINRGMRESAYKHNSIGGAIPLGYKIEDKKLVIDPKTAPIVKEAFEKYADGETVAEICRQFNARGYKTSKGTAFGKSSFTKIFRNERYIGVYTFHDYRAEDAIPAIIDKDLWDRVQLRVGKIKNAPARNKAKVVYLLSGKIFCGHCGSKINGNCNAGNYYYYQCYGKKNGNVDCKKKNIRKEFIERLVAQDALSLLTDEYIEQIATIACEKNQHEIELDSALPTIRDRIHQVDLSLNNLLKAIESGSAPDMLVKRMGELEKEKKDLQVQAKKESEDIIELDKAQVIYWLEQFRGGNIEDEEFCRMLIDLFVNSVTVWDEDDNTYKVTVAYNLTSLPTKTYRLNKGGTLSDFTSNAPVPSSR

SEQ ID NO: 5766 - protein, 501 aa, Unknown
  Description of Unknown: Integrase B5767 sequence
  cd03768,SM00857,IPR036162,PF13408,IPR025827, G3DSA:3.40.50.1390,PS51737,IPR006119,PF07508,IPR011109, SSF53041,PTHR30461,PS51736,Coil,PF00239
MIIREDAIYGRQSVDRKDSISIESQIEFCKYELRGGNFRKYTDKGYSGKNTDRPKFQEMMADIRRGLIKRVVVYKLDRISRSILDFATMMETFQEYNVEFVSSTEKFDTSTPMGRAMLNICIVFAQLERETIQKRVTDAYYSRCQHGFHMSGAAPYGFQLEPTTIEGIRTKMMKPDPETADIAKLMFEMYSQPGTSFGDIARYFADEGILIYGKEMTRGFISQLLRNPIYAQADLDMYEFFKSQGTVVVNEATDFAGTNGCYLYQGRDVQERKNKHLKDQILVLAPSEGLVSSDTWLRCRKKLMANKTFQGGRKAKNTWLAGKVKCGRCGYALMSVGNPTGVQYLRCSKRADSKSCDGCGTLRTREFERFLYGEMVKKLSEFQTLTAKRETVNPKLTALNMELARVEDEIEKLLNTLTGANAVLLSYANSKIEELDTRRQALTKEIAALSAETMSPEQIERLSVYLNQWEEIDFEDRRQVADGLISQIRATDEHVSIEWKI

SEQ ID NO: 5767 - protein, 501 aa, Unknown
  Description of Unknown: Integrase B5768 sequence
  PTHR30461:SF3,SM00857,G3DSA:1.10.10.2600,IPR036162,PF13408, IPR025827,G3DSA:3.40.50.1390,PS51737,IPR006119,IPR038109, PF07508,IPR011109,SSF53041,PTHR30461, PS51736,cd00338,PF00239
MAIVKKIMPMVLSLDTRKRVAAYARVSMDTEQLQHSLSAQISAYSTIIQANPEWVYAGVFYDEGISGRSMKNRNGFIAMLEACEEGKIDMILVKSISRFARDTVDCLNTIRHLKELGIAVVFERERINTMTGEGELLLTLLASFAQEESRSISENVKWSIRKRFEQGIPNGHKPPYGYRWDGEMFRVIPEEGAVVKEIYRRYLAGESAYAIARSLAARGVKGRSGNPIEQTTIKDMFMNTCYMGTMMLQKYFFTEGRKRRKNCGELPRFYVDGLFEPLVTEEDHARAVELRRQNAEKCANINVELMPFSGKMKCGVCGCGLSRRSPKGYKKWTCNTKEKKGMAVCNSRPINEDELFRLATKALGLRKFDKDKFNEKIELITVRGDVLEFKFKSGAVKEVRREYDGSRGKNPFTNKCYCGTCVGKCERDTYPKGYKVWRCSKPKEKCQMKYLRETELFEASKEILGQNYQGEVVENIAKIVINDDTIDFVFKDGREQIWQRQ

SEQ ID NO: 5768 - protein, 501 aa, Unknown
  Description of Unknown: Integrase B5769 sequence
  PTHR30461:SF3,SM00857,G3DSA:1.10.10.2600,IPR036162,PF13408, PS51737,G3DSA:3.40.50.1390,IPR025827,IPR006119,IPR038109, PF07508,IPR011109,SSF53041,PTHR30461,Coil, PS51736,cd00338,PF00239
MQRAVIYARYSPGPNQTEQSIEGQVRECTKYAELHDLRIVGTYVDRKISGKTDNRREFQRMIDDSEKHIFDVIILYHTDRFARNRYDSAIYKHKLKENGVELRYATTDIPKGPEGIILESIMEGWAEYYSAELSRKIKRGMRESALKCHSTGAGRCLGYRTAEDKSLVIEPEGAKAVQTVFDMYIKGKSHADICRYLNDCGFRTAQGKLFNKNSVTHIIRNKRYIGVYTYDDITIEDGIPAIISKDTFHLAQLEAARRKTAKRPKEPKAEYLLSGKAFCGHCQKPLVGVSGTGKSGNKWYYYYCQESRAKRGCTKRPVKRDWLEREVVERTVAEILQPEVIQRIAKKCYDLQMEYRQDNSDVLFYELKLKDVRKAIKNTMHAIESGVKTKTLPARLQELENEEEALEAELAIAKASDFVITTDQIEFLLTQFAEPWECESEEEYHRRIIKCFVHKVFLFDDKLLIYYNVSRDGKTREQSEAELLEEALGEGFDKRSSGSTK

SEQ ID NO: 5769 - protein, 501 aa, Unknown
  Description of Unknown: Integrase B5770 sequence
  cd00338,SM00857,G3DSA:1.10.10.2600,IPR036162,PS51737, G3DSA:3.40.50.1390,IPR006119,IPR038109,PF07508,IPR011109, SSF53041,PTHR30461,PS51736,Coil,PF00239
MRRRIDPNGRYCAYLRKSRDDRDERGNVMTVEETLRKHESWIVELAIRHGIRVEKWYREVVSAETIDARPEVQQVLRELAEGKWDGVLCVDVQRLARGDTKDQGIMCEFLEVSGALVITTDGYFDTTDEADMDYLEYGLFRSRQEYKAINKILKRGRKRSKLDGNWPFSIAPYGYVKVRDEIGPTLAHGDCAKYVVIVDELSAQGLSFGSIARRMVEIGAPGEWSATKVRRIVTNEAYLGRTPVEKFVVVKRMKADGSGLEKVSIPVKDPQYRPGRHDPIVTQELFDAANANRCNPSLKKSNELRNPLASLLVCSGCGFAMRMIKDSKTGMFRYYHSMKPNGCSVKSCGYDLMMDAVIAELKRRIDDSRVEVRQRSDRSAEREIAAMKESLSVVDRSLASLLDRLMREVVTEDEYMTMKRKLSDEKQSLEATLAAAEADRERETSIEHRNVTIHQAIDILRSDATAGEANAFLRTFIERIEYSNDGVGLNVHNIKLDIFFK

SEQ ID NO: 5770 - protein, 501 aa, Unknown
  Description of Unknown: Integrase B5771 sequence
  PTHR30461:SF3,IPR036162,PS51737,IPR011109,PTHR30461, PS00397,PF00239,G3DSA:1.10.10.2600,IPR006119,SSF53041, SM00857,IPR025827,IPR038109,PS51736, cd03768,IPR006118,PF13408,G3DSA:3.40.50.1390,PF07508,Coil
MRDMDSARLRVVCYVRVSTREQAEKGYSVSEQQERLKAYCLAKDWVVAQVITDPGFSGAKLERPGMQQLISLVQAKKCDAVLVWKLDRLSRSQKDTLYLIEDVFLKNGCAFVSMNENFDTSTAFGRAMIGILSVFAQLEREQIRERMAVGRVGRAKAGLFHGGGFAPIGYDYKTIAEGGAGLVVNEYEAMQVREVFSLYLQGWPVNRIRKYMAAHYTTKDGDWGSDTTVRDVLKNPLYTGKINWAKKVYDGQHEPLISQETFDAAAARLATSSWKRTCSDGMERNSPFKSTHLLGGIIWCARCGARYFASGNYSGRGENKRYWPYYVCYSRAKSAKHMIRDPNCRNDRWAVAKLDAIIEGEIRKLAFDPAALELAVSGPQQDEDVAQRRAALQQRLNDLRAQMGRVLDLYQMGGSLPASMVGDRVAKLQAEIDGVEAALAEAVEEPPARRMDAARTALVGAEDVLDNGTLDERRELVHSLIRRIDLDGENIDIHWSFSPEA

SEQ ID NO: 5771 - protein, 501 aa, Unknown
  Description of Unknown: Integrase B5772 sequence
  PTHR30461:SF3,cd00338,SM00857,G3DSA:1.10.10.2600,IPR036162, PF13408,PS51737,G3DSA:3.40.50.1390,IPR025827,IPR006119, IPR038109,PF07508,IPR011109,SSF53041,PTHR30461, Coil,PF00239
MDKTNKEKNTKYAGRAVIYARFSSGKQREESIEGQIRVCTDFAKRNNMKVIGHYADRAISGRRDTRAQFQKMMQDSLKRMFDYVIVYQHERFARNRYDSAIYKWQLRKSGVRVISALEYFGDGPEAILFETWAEGNAEYFSADLARKVKRGMTENALKGKWNGTCPLGYVIGEDKRLKINPKTAPLVRKIFRRFVDGAKTVDIIKELSPEYFALTGKKFQRTSFSKMLTNETYIGVYSWNGITVDNAVPPIIKKEVFLMAKDRVEKQKRNKPVYMSDIYLLTAKIKCARCGAYMTGMSGTSRNGVKHYYYVCNNQRRNKSCEMKAIKVDTIEQAVINNAMSILNDEKSVDLIADEAIKLLAQSADGEQEVEILKNERKEVEKKINNCLMALENGVISDSIVERIAENEARLKSIDNEIEHLSLMNNPLSLTKERIIYFLMHGLKGKKRREFILSTLVKEVLLNYDSEHEVWEMSIAYNYSNNCNECNKNDNNVRKVKIWYA

SEQ ID NO: 5772 - protein, 501 aa, Unknown
  Description of Unknown: Integrase B5773 sequence
  PTHR30461:SF3,cd00338,SM00857,G3DSA:1.10.10.2600,IPR036162, PS51737,G3DSA:3.40.50.1390,IPR006119,IPR038109,PF07508, SSF53041,IPR011109,PTHR30461,PS51736,Coil, PF00239
MDVFMYLRKSRADNPESSVEETLRRHRDTLEKVAKERGYTVLHVYEEVVSGDSLYSRPQMLQMLEDVATGDCEAVLCMDLDRLGRGGMADQGVILETFKQSNTLIITPEKTYDLNNDIDEELTEFQTFMARRELKMIKRRLQRGIRKTIEEGGYIANAPYGYRKATVNKKPTLEINEEEARFVRMIFDMYVNQGIGCHTIAETLNAMGAKPHRAEKFGRTSIRHILKNPTFLGKIVWDQKHHIRKGTQNNAKHITIYNPPEKWTVVEGLHPAIIDEDTWNKAQAILKSRHHSPFFDGTVKNPLAGILRCAKCGSLMQRQPNLSRKDMEYILCTTKGCCASSRMDYVTDAVVQGIRKELDRLVNEKQQGIIRHAVDYSTAIKSTEKELASAKSQKDKLHDLLEQGVYDTNTFMERRKKVSARIQELSDVLEDLKKKKETQKAINYDKTIEKITTALNAFETADASKRNQLLKGIIHNATYLKEKGWSPRHFIVSVEIEPTYF

SEQ ID NO: 5773 - protein, 501 aa, Unknown
  Description of Unknown: Integrase B5774 sequence
  PTHR30461:SF3,SM00857,G3DSA:1.10.10.2600,IPR036162,PF13408, IPR025827,G3DSA:3.40.50.1390,PS51737,IPR006119,IPR038109, PF07508,SSF53041,IPR011109,PTHR30461,Coil, PS51736,cd00338,PF00239
MRIAAYCRVSTGKEDQLDSLEHQKEFFIEYAKKNGHTLVQVYADEGISGMSLKHRAEFNRLMKDAELHLFDMLVVKDISRFARNTVDFLQSIRTLKKFGINTLFLTANMESLGESEFVLTVFSALAQEESVNLSKRVKFGKQINTKMGRVPHKIFGYDRVDNFHLRINDNEAAIVRKIFELYLSGMGGTCIAQALNANGCTTKTGLQWKGYTVRRILRNSIYCGQYVNNKYEIADCLEHTRTIKDENQWLVHDRPEWAIISRDIFDQAQKQMAHRRQEYNSKTQKGISRYSYKHIFSMLIKCDCCGRSFTRKHYKNNGKRGAEIDRYCWKCITYDAYSAKGPCHNRVTINETDLIEHIREYLKSLIEDPKTFVQQIIDEAQSYCKSTPNEDVVQLKQKKASMQARRKKYQEMYAADLMTIDELKIEINKISDEMEMIDYKIKSSEMPLDPNDSNGIIDQYRKEIESFLNLETITSMDIRKIIDHIDAKADGEIIIHLKHLA

SEQ ID NO: 5774 - protein, 501 aa, Unknown
  Description of Unknown: Integrase B5775 sequence
  cd03768,SM00857,IPR036162,PF13408,IPR025827, G3DSA:3.40.50.1390,PS51737,IPR006119,PF07508,IPR011109, SSF53041,PTHR30461,PS51736,Coil,PF00239
MIIREDAIYGRQSVDRKDSISIESQIEFCKYELRGGNFRKYTDKGYSGKNTDRPKFQEMMADIRRGLIKRVVVYKLDRISRSILDFATMMETFQEYNVEFVSSTEKFDTSTPMGRAMLNICIVFAQLERETIQKRVTDAYYSRCQHGFHMSGAAPYGFQLEPTTIEGIRTKMMKPDPETADIAKLMFEMYSQPGISFGDIARYFADEGILIYGKEMKRGFISQLLRNPIYAQADLDMYEFFKSQGTVVVNEATDFAGTNGCYLYQGRDVQERKNKHLKDQILVLAPSEGLVSSDTWLRCRKKLMANKTFQGGRKAKNTWLAGKVKCGRCGYALMSVGNPTGVQYLRCSKRADSKSCDGCGTLRTREFERFLYGEMVKKLSEFQTLTAKRETVNPKLTALNMELARVEDEIEKLLNTLTGANAVLLSYANSKIEELDTRRQALTKEIAALSAETMSPEQIERLSVYLNQWEEIDFEDRRQVADGLISQIRATDEHVSIEWKI

SEQ ID NO: 5775 - protein, 501 aa, Unknown
  Description of Unknown: Integrase B5776 sequence
  cd03768,PTHR30461:SF3,SM00857,IPR036162,PF13408,PS51737, G3DSA:3.40.50.1390,IPR025827,IPR006119,PF07508,IPR011109 ,SSF53041,PTHR30461,PS51736,Coil,PF00239
MNAVYARQSLDKKDSLSIETQIELCKQELGIDVPTKVYIDKGFSGKNTNRPQFQEMMKDIHSGVINKVTVYKLDRLSRSLLDFAEMIEVFKQHNVEFQSTREKFDTSTPIGNAMLSIIMVFAQLERETIQLRVRDNYYMRSANGAYDSTAPYGFIKTKVALQGKSVSSLVCDPETTQILRGIFDAYAYTSTSLGALARQLNKRRVPSPGGAAWDSCKLSRIMSNPVYVKANADIYNYYRLTGINITNPIEAFAGVNGCVTYGQWDHKRRKFDQLKSLTLSIGLHEGLVDAQTFLLCQNRLSNNTQVYNGGQGKHSWLTGLIKCGYCGKAMKADVMKKGVPKFRCSGHANYGTCDDNARVSIAQVEEAVETQIMQHIQRHSDLQAQQIAECDAKEQQYKIQINKINEQIDNLVNAIAQGSATVIGYLNDKIAELETQRHEIEVALQKHILERPSPENTRQLYDTLDMWPYMDIAQRHEVAAMLIKEVRIFTDEIRIFWKYDL

SEQ ID NO: 5776 - protein, 501 aa, Unknown
  Description of Unknown: Integrase B5777 sequence
  PTHR30461:SF3,SM00857,G3DSA:1.10.10.2600,IPR036162,PF13408, IPR025827,G3DSA:3.40.50.1390,PS51737,IPR006119,IPR038109, PF07508,SSF53041,IPR011109,PTHR30461,Coil, PS51736,cd00338,PF00239
MNAVIYARFSSHSQREQSIEGQLRDCYEYAKRYDINIVGEYIDRAISGMTDDRPDFQRMIADAPKKQFERIIVWKLDRFARNRYDSALYKHKLKQYGIRVISAMENVGEGDESILLEALLEASAEYYSLDLKKKILRGQRETIAKGRWCGGPIPYGYKAVDGKLVADEKTAPIIRYVFEQYAQGVPMKEIIDELKRRGVRSSRGGELTYTTFSRALTNPVYIGNFMYKGELVPGVADALIDEDTYNKVQIIVKANAHAPAANKAKVEYLLQGKAFCGHCGSHMVGESGKSRNGDVYYYYSCAARKKAHKCRKKNEKKDFIEWYVVEQTLQYVLTPARMRDIAKAVVAEYDKEFAGSRVEEYEKAIKQYERELDKLVDALVDAPKVAHKRIYEKMETLETQKASMENELVKLRIASEIRFTEEEVRAWLRRFCTGDLFDPEFRRNIIDTFINCIYLYDDRIIIFYNIKGGKQVSFVDLAESLDNESESSGSDLNANAPPQFV

SEQ ID NO: 5777 - protein, 501 aa, Unknown
  Description of Unknown: Integrase B5778 sequence
  PTHR30461:SF3,SM00857,G3DSA:1.10.10.2600,IPR036162,PF13408, IPR025827,G3DSA:3.40.50.1390,PS51737,IPR006119,IPR038109, PF07508,IPR011109,SSF53041,PTHR30461,cd00338, PF00239
MDKTNKEKNTKYAGRAVIYARFSSGKQREESIEGQIRVCTDFAKRNNMKVIGHYADRAISGRRDTRAQFQKMMQDSLRRMFDYVIVYQHERFARNRYDSAIYKWQLRKSGVRVISALEYFGDGPEAILFETWAEGNAEYFSADLARKVKRGMTENALKGKWNGTCPLGYVIGGDKRLKINPKTAPLVRKIFRRFVDGAKTVDIIKELSPEYFALTGKKFQRTSFSKMLTNETYIGVYSWNGITVDNAVPPIIKKEVFLMAKDRVEKQKRNKPVYMSDIYLLTAKIKCARCGAYMTGMSGTSRNGVKHYYYVCNNQRRNKSCDMKAIKVDTIEQAVINNAMSILNDEKSVDLIADEAIKLLAQSADGEQEVEILKNERKEVVKKINNCLMALENGVISDSIVERIAENEARLKSIDNEMEHLSLMNNPLSLTKERIIYFLMHGLKGKKRREFILSTLVKEVLLNYDSEHEVWEMSIAYNYSNNCNECNKNDNNVRKVKIWYA

SEQ ID NO: 5778 - protein, 501 aa, Unknown
  Description of Unknown: Integrase B5779 sequence
  PTHR30461:SF3,SM00857,G3DSA:1.10.10.2600,IPR036162,PF13408, PS51737,G3DSA:3.40.50.1390,IPR025827,IPR006119,IPR038109, PF07508,SSF53041,IPR011109,PTHR30461,Coil, PS51736,cd00338,PF00239
MNAVIYARYSSDKQTEQSIEGQLREGYAYAERMGITVVGEYIDRAVSGTSDQRPDFQRMISDSIKRQFEAVIVWKLDRFARNRYDSAIYKSKLKKNGVRVFSVTEGIGDGDESIILEAVLEAMAEVYSKQLGQNAARGMRETAMKGLCTGGQIPLGYAVGEDHKLHIDSKTAPAVQLIYTLYADGQSKTQIANELNSRGFRTKTGKPYNCNSFYRILTNPMYYGNYTYKGEVLRECPAIISKALYDKCQERNDAVKRSRGMKISEVEWLLRGKLYCGHCGTQMTGDSGTSRTNEKYYYYTCHKHKRYKDCDKKSEKKEQLERAVCQKTVEYVLREDRIEYIAERVVEQYEKEFDASTIKEKETSLSKLNIELDKCAESLMNTTIRSVVDRINARAEELEAAKTELEHELAQLRITSKARITVDEIITFLRGFCSGDVDDIQFRRKIIDTFINAVYVFDDKYVIYYNVRDCKQVTYSDMLASIHAPSDMSVHGSDCLLYGEP

SEQ ID NO: 5779 - protein, 501 aa, Unknown
  Description of Unknown: Integrase B5780 sequence
  PTHR30461:SF3,IPR036162,PS51737,IPR011109,PTHR30461, PS00397,PF00239,G3DSA:1.10.10.2600,IPR006119,SSF53041, SM00857,IPR025827,IPR038109,PS51736,cd03768, IPR006118,PF13408,G3DSA:3.40.50.1390,PF07508,Coil
MRDMDSARLRVVCYVRVSTREQAEKGYSVSEQQERLKAYCLAKDWVVAQVITDPGFSGAKLERPGMQQLISLVQAKKCDAVLVWKLDRLSRSQKDTLYLIEDVFLKNGCAFVSMNENFDTSTAFGRAMIGILSVFAQLEREQIRERMAVGRVGRAKAGLFHGGGFAPIGYDYKTIAEGGAGLVVNEYEAMQVREVFSLYLQGWPVNRIRKYMAAHYTTKDGDWGSDTTVRDVLKNPLYTGKINWAKKVYDGQHEPLISQETFDAAAARLATSSWKRTCSDGMERNSPFKSTHLLGGIIWCARCGARYFASGNYSGRGENKRYWPYYVCYSRAKSAKHMIRDPNCRNDRWAVAKLDAIIEGEIRKLAFDPAALELAVSGPQQDEDVAQRRAALQQRLNDLRAQMGRVLDLYQMGGSLPASMVGDRVAKLQAEIDGVEAALAEAVEEPPTQRLDAARAALVGAEDVLDNGTLDERRELVHSLIRRIDLDGENIDIHWSFSPET

SEQ ID NO: 5780 - protein, 501 aa, Unknown
  Description of Unknown: Integrase B5781 sequence
  cd03768,SM00857,G3DSA:1.10.10.2600,IPR036162,PF13408, PS51737,G3DSA:3.40.50.1390,IPR025827,IPR006119,IPR038109, PF07508,SSF53041,IPR011109,PTHR30461,PS51736, Coil,PF00239
MNIREDVIYARQSVDRKDSISIESQIDFCKYELKGGSCRIFKDKGYSGKNTDRPEFQKLLGEIRKGKVRRVVVYKLDRISRSILDFANMMELFQEYDVEFVSSTEKFDTSTPMGRAMLNICIVFAQLERETIQKRVTDAYYSRCLKGFHMSGQAPYGFDLEPTVVENIRTKMMVADPIAANHVRLMFEMYAEPETSFGDITRYFEEQGIKVYGKSLTRPFLSQLLRNPVYAQADLEMYEFFKSQGAVVVNDAADFAGTNGCYLYQGRDVKEDKDKSLKDQILVIAPHEGFISSDIWLRCRKKLMTNITFQNGRKARNTWLAGKIKCGKCGYALKTTHNPSGYEYLRCSKRADHKGCPGCGTLRKNEFEQFIFTAMGEKFREFKLLRGGEGKVNPKITAYQVELAQVEVEIEKLLDTLTGANATLLAYANKKIEDLDNRRKTLSKAIADLSVETLSSQQIELLSGYLDDWEHISFEDKRKAADSLISSISATSDYVKIEWKI

SEQ ID NO: 5781 - protein, 501 aa, Unknown
  Description of Unknown: Integrase B5782 sequence
  PTHR30461:SF3,IPR036162,PS51737,IPR011109,PTHR30461, PS00397,PF00239,G3DSA:1.10.10.2600,IPR006119,SSF53041, cd00338,SM00857,IPR025827,IPR038109,PS51736, IPR006118,PF13408,G3DSA:3.40.50.1390,PF07508,Coil
MKEKVSERKTGAIYIRVSTDKQEELSPDAQLRLLMDYAKKDAIDVPKEYIFQDNGISGRKANKRPAFQNMIALAKSREHPIDTIIVWKFSRFARNQEESIVYKSLLKKNNVDVVSVSEPLVDGPFGSLIERIIEWMDEYYSIRLSGEVFRGMKENATRGAYQARPPLGYQVIERGKPPVIVPEEAAIVRMIFDKYVNGKMSFFDIARHLNSLGLKTSHGKAFERRSIEDIIQNPSYCGMIRWNRMENATNRIKDQDEWIIADGMQEAIISKELFDAAQERLKKIYKPVGKRPSSTYKHWLSGLLKCPVCGRTLTATTMKRANGEKYAYFSCYGYSKGKCDKPHGVSSLVIEREILKALEEALGSNSIVYEMREIRPQELSNERSLIMVCLASLKGKEDRIRASYREGIDTLEEYKENKALIAKERDSLEQQLAELEENTPDKIPDDPTPKMLDRVSSVHDILVSDSYSLVQKNEALKQIIDKIVYDRESDTLKIHFFLYHS

SEQ ID NO: 5782 - protein, 501 aa, Unknown
  Description of Unknown: Integrase B5783 sequence
  cd03768,SM00857,IPR036162,PF13408,IPR025827, G3DSA:3.40.50.1390,PS51737,IPR006119,PF07508,IPR011109, SSF53041,PTHR30461,PS51736,Coil,PF00239
MIIREDAIYGRQSVDRKDSISIESQIEFCKYELRGGNFRKYTDKGYSGKNTDRPKFQEMMADIRRGLIKRVVVYKLDRISRSILDFATMMETFQEYNVEFVSSTEKFDTSTPMGRAMLNICIVFAQLERETIQKRVTDAYYSRCQHGFHMSGAAPYGFQLEPTTIEGIRTKMMKPDPETADIAKLMFEMYSQPGTSFGDIARYFADEGILIYGKEMKRGFISQLLRNPIYAQADLDMYEFFKSQGTVVVNEATDFAGTNGCYLYQGRDVQERKNKHLKDQILVLAPSEGLVSSDTWLRCRKKLMANRTFQGGRKAKNTWLAGKVKCGRCGYALMSVGNPTGVQYLRCSKRADSKSCDGCGTLRTREFERFLYGEMVKKLSVFQTLTAKRETVNPKLTALNMELARVEDEIEKLLNTLTGANAVLLSYANSKIEELDTRRQALTKEIAALSAETMSPEQIERLSVYLNQWEEIDFEDRRQVADGLISQIRATDEHVSIEWKI

SEQ ID NO: 5783 - protein, 501 aa, Unknown
  Description of Unknown: Integrase B5784 sequence
  PTHR30461:SF3,IPR036162,PS51737,IPR011109,PTHR30461, PS00397,PF00239,G3DSA:1.10.10.2600,IPR006119,SSF53041, SM00857,IPR025827,IPR038109,PS51736, cd03768,IPR006118,PF13408,G3DSA:3.40.50.1390,PF07508,Coil
MRDMDSARLRVACYVRVSTREQAEKGYSVSEQQERLKAYCLAKDWVVAQVITDPGFSGAKLERPGMQQLISLVQTKKCGAVLVWKLDRLSRSQKDTLYLIEDVFLKNGCAFVSMNENFDTSTAFGRAMIGILSVFAQLEREQIRERMAVGRVGRAKAGLFHGGGYAPIGYDYKTIAEGGDGLVVNEYEAMQVREVFSLYLQGWPVNRIRKYMAAHYTTKDGDWGSDTTVRDVLKNPLYTGKINWAKKVYDGQHEPLISQETFDAAAARLATSSWKRTCSDGMERNSPFKSTHLLGGIIWCARCGARYFASGNYSGRGENKRYWPYYVCYSRAKSAKHMIRDPNCRNDRWAVAKLDAIIEGEIRKLAFDPAALELAVSGPQQDEDVAQRRAALQQRLNDLRAQMGRVLDLYQMGGSLPASMVGDRVAKLQAEIDGVEAALAEAVEEPPTQRLDAARAALVGAEDVLDNGTLDERRELVHSLIRRIDLDGENIDIHWSFSPEA

SEQ ID NO: 5784 - protein, 501 aa, Unknown
  Description of Unknown: Integrase B5785 sequence
  PTHR30461:SF3,cd00338,SM00857,G3DSA:1.10.10.2600,IPR036162, PF13408,IPR025827,PS51737,G3DSA:3.40.50.1390,IPR006119, IPR038109,PF07508,SSF53041,IPR011109,PTHR30461, PS51736,Coil,PF00239
MYEDIKTACLYVRFSSHNQTEQSIEGQTRVCRDFCKRHNIRIVEIYADRATSASKDIEKRVQFLKMIKDSEKGLFDAVIVYKLDRFARSRYDSATYKYRLKRNGVQLISATENISNDPEGIILESVLEGMAEFYSAELSQKINRGMRESAYKHNSIGGAVPLGYKIEDKKLVIDPKTAPIVKEAFEKYADGETVAEICRQFNARGYKTSKGTAFGKSSFTKIFRNERYIGVYTFHDYRAEDAIPAIIDKDLWDRVQLRVGKIKNAPARNKAKVVYLLSGKIFCGHCGSKMNGNCNAGNYCYYQCYGKKNGNVDCKKKNIRKEFIERLVAQDALSLLTDEYIEQIATIACEKNQHEIELDSALPTIRDRIHQVDLSLNHLLKAIESGSAPDMLVKRMGELEKEKKDLQAQAKKESEDIVELDKAQVIYWLEQFRGGSIEDEEFCRMLIDLFVNSVTVWDEDDNTYKVTVAYNLTSLPTKTYRLNKGGTLSDFASNAPGTVSE

SEQ ID NO: 5785 - protein, 501 aa, Unknown
  Description of Unknown: Integrase B5786 sequence
  cd03768,PTHR30461:SF3,SM00857,IPR036162,PF13408, IPR025827,PS51737,G3DSA:3.40.50.1390,IPR006119,PF07508, IPR011109,SSF53041,PTHR30461,PS51736,Coil, PF00239
MNAVYARQSLDKKDSLSIETQIELCKQELGIDVPTKVYIDKGFSGKNTNRPQFQEMMKDIHSGVINKVTVYKLDRLSRSLLDFAEMIEVFKQYNVEFQSTREKFDTSTPIGNAMLSIIMVFAQLERETIQLRVRDNYYMRSANGAYDSTAPYGFIKTKVALQGKSVSSLVCDPETTQILRGIFDAYAYTSTSLGALARQLNKRRVPSPGGAAWDSCKLSRIMSNPVYVKANADIYNYYRLTGINITNPIEAFAGVNGCVTYGQWDHKRRKFDQLKSLTLSIGLHEGLVDAQTFLLCQNRLNNNTQVYNGGQGKHSWLTGLIKCGYCGKAMKADVMKKGVPKFRCSGHANYGTCNDNARVSIAQVEEAVEAQIMQHIQRHSDLQAQQIAECDVKEQQYKIQINKINEQIDNLVNAIAQGSATVIGYLNDKIAELETQRHEIEVALQKHILERPSPENTRQLYDTLDMWPYMDIAQRHEVAAMLIKEVRIFTDEIRIFWKYDL

SEQ ID NO: 5786 - protein, 501 aa, Unknown
  Description of Unknown: Integrase B5787 sequence
  SM00857,G3DSA:1.10.10.2600,IPR036162,PF13408,IPR025827, PS51737,G3DSA:3.40.50.1390,IPR006119,IPR038109,PF07508, SSF53041,IPR011109,PTHR30461,Coil,PS51736, cd00338,PF00239
MRGVIYARYSPGPHQTEQSIEGQVADCQQYAEEHGIDIIEIYADRHVSGKSVGRDEFQRMLRDAEKGRFDCVLVWKIDRFGRDRQDIAMGKMTLKRAGVKLMYARESVPEGPEGIILESVLEGLAEYYSADLRQKVIRGMKETAKKGQYCGQPLPIGYKVDSQRHVVIDEREAAVVREAFKLHIAGAQLRDIVQLFADRGIMGRRGKPVSNAVVYRMLRNEKYLGEFYIQDVKLNVEPIIDQATFLEAAQHFKTSRNNAAGRAKVNYLLSCKMFCGYCGSMISAEAGTGKLGKVYRYYKCGDKKRGKKCELKPFPKDHLEDAIILATVNDMLTDEMIEKLTVRILEVQEQENADDPVVGLRRRLDSNKKRQRNLLDAIEEGGARGLVSRLAALEEEEEQLVLEIQRAEIKRPRLTHEVVEAWLRSFRVGDVTDDDFRARLVDTFIARVELRNDEALIFYNIREKGPHSRVRVRPEWWSPRDGTRTPKIIVLRDYVVLRIAV

SEQ ID NO: 5787 - protein, 501 aa, Unknown
  Description of Unknown: Integrase B5788 sequence
  cd03768,PTHR30461:SF3,SM00857,IPR036162,PF13408, PS51737,G3DSA:3.40.50.1390,IPR025827,IPR006119,PF07508, IPR011109,SSF53041,PTHR30461,PS51736,Coil, PF00239
MNAVYARQSLDKKDSLSIETQIELCKQELGIDVPTKVYIDKGFSGKNTNRPQFQEMMKDIHSGVINKVTVYKLDRLSRSLLDFAEMIEVFKQHNVEFQSTREKFDTSTPIGNAMLSIIMVFAQLERETIQLRVRDNYYMRSANGAYDSTAPYGFIKTKVALQGKSVSSLVCDPETTQILRGIFDAYAYTSTSLGALARQLNKRRVPSPGGAAWDSCKLSRIMSNPVYVKANADIYNYYRLTGINITNPIEAFAGVNGCVTYGQWDHKRRKFDQLKSLTLSIGLHEGLVDAQTFLLCQNRLSNNTQVYNGGQGKHSWLTGLIKCGYCGKAMKADVMKKGVPKFRCSGHANYGTCNDNARVSIAQVEEAVETQIMQHIQRHSDLQAQQIAECDAKEQQYKIQITKINEQIDNLVNAIAQGSATVIGYLNDKIAELETQRHEIEVALQKHILERPSPENTRQLYDTLDMWPYMDIAQRHEVAAMLIKEVRIFTDEIRIFWKYDL

SEQ ID NO: 5788 - protein, 501 aa, Unknown
  Description of Unknown: Integrase B5789 sequence
  PTHR30461:SF3,IPR036162,PS51737,IPR011109,PTHR30461, PF00239,G3DSA:1.10.10.2600,IPR006119,SSF53041,cd00338, SM00857,IPR025827,IPR038109,mobidb-lite,PS51736, PF13408,G3DSA:3.40.50.1390,PF07508,Coil
MRAFIYCRFSSHKQQELSIEGQRDICQEYADKHNITVVGQYADRARSGKTENRADFRRLMRDAATGVVDCVLVWRYDRFFRNRAESALYRKQLEAAGVHLISVTEYIPEGSAGIITQGMIETVAEYFSAKLSEDVSRGMNKAAQHCQIVGRAPLGYRAGPNKRWQIDPVGAELVRRIFEWYASGKAMGQLAAQLNEEGHRTTNGTLYTRSSFNSILRNEKYIGVYSYGGEVRIEGGCPRIIEDELFFTVQRRLSANRHRPGAYKAEVPYLLSGKLFCGLCGAPMTGTAGTSHTGARHYYYICNNRRAKTCKKKNVRLDLIEEAVLQSALDILTDENIAYISAEVERRCAENSDSAALLASLNAQLEEVQRRLKNIGNAIAQGIITETTKELLEEAEADRTALRRQIDRAKVQAALVVKAEAVACWLDGFRRGDRTDPDFRRQVFGALVHSVFVYDDYLKIIFNVDSAGAAVVPYEAAQAATPSEAPPGSYLDTLGAPEKAR

SEQ ID NO: 5789 - protein, 501 aa, Unknown
  Description of Unknown: Integrase B5790 sequence
  PTHR30461:SF3,SM00857,G3DSA:1.10.10.2600,IPR036162,PF13408, IPR025827,PS51737,G3DSA:3.40.50.1390,IPR006119,IPR038109, PF07508,IPR011109,SSF53041,PTHR30461,PS51736, cd00338,PF00239
MNTVIYARYSAGPRQTDQSIDGQLRVCTEFCKQRGLTVVDTYCDRHISGRTDERPEFQRLIADAKAHKFEAVVVYKTDRFARNKYDSAIYKRELRRNGIQIFYAAEAIPEGPEGIILESLMEGLAEYYSAELAQKIKRGLNESALKCQSLGSGRPLGYTVDEQKHFQIDPESSQAVKTIFEMYIKGESNAAICDYLNARGLRTSQGNLFNKNSINRIIKNRKYIGEYRYNDIVVEGGMPAIISKETFCLAQAEMERRRTHRAPVSPKAEYLLAGKLFCGHCKGPMQGVSGTGKSGNKWYYYYCANTRGKERTCDKKQVSRDRLEKAVVDFTVRYILQEDVLEELSKKVYAAQERQNNTASEIAFYEKKLAENKKAIANILRAIESGAMTQALPARLQELENEQTVIQGELSYLKGARLAFTEDQILFALLQHLDPRPGESEQDYHRRIITDFVSEVYLYDDRMLIYFNISSADGKLKHADLSAIESGVFDAGLISSTTSPP

SEQ ID NO: 5790 - protein, 501 aa, Unknown
  Description of Unknown: Integrase B5791 sequence
  PTHR30461:SF3,SM00857,G3DSA:1.10.10.2600,IPR036162,PF13408, PS51737,G3DSA:3.40.50.1390,IPR025827,IPR006119,IPR038109, PF07508,IPR011109,SSF53041,PF00239,PTHR30461, PS51736,Coil,cd00338
MQRAVIYARYSPGPNQTEQSIEGQVRECTKYAELHDLRIVGTYVDRKISGKTDNRREFQRMIDDSEKHIFDVIILYHTDRFARNRYDSAIYKHKLKENGVELRYATTDIPKGPEGIILESIMEGWAEYYSAELSRKIKRGMRESALKCHSTGAGRCLGYRTAEDKSLVIEPEGAKAVQTVFDMYIKGKSHADICRYLNDCGFRTAQGKLFNKNSVTHIIRNKRYIGVYTYDDITIEDGIPAIISKDTFHLAQLEAARRKTAKRPKEPKAEYLLSGKAFCGHCQKPLVGVSGTGKSGNKWYYYYCQESRAKRGCTKRPVKRDWLEREVVERTVAEVLRPEVIQHIAKKCYDLQMEYRQDNSDVLFYELKLKDVRKAIKNTMHAIESGVKTKTLPARLQELENEEEALEAELAIAKASDFVITTDQIEFLLTQFAEPWACESEEEYHRRIIKCFVHKVFLFDDKLLIYYNVSRDGKTREQSEVELLEEALGEGFDKRSSGSTK

SEQ ID NO: 5791 - protein, 501 aa, Unknown
  Description of Unknown: Integrase B5792 sequence
  PTHR30461:SF3,SM00857,G3DSA:1.10.10.2600,IPR036162,PF13408, IPR025827,G3DSA:3.40.50.1390,PS51737,IPR006119,IPR038109, PF07508,IPR011109,SSF53041,PTHR30461,Coil, PS51736,cd00338,PF00239
MRNAVIYARYSSDRQREESIEGQIRVCEDFARRNDMRILKIYTDRALTGRTDKRPEFQLMIKEAASRAFDAVIVYKLNRFARNRYDSASYKHKLKKYGVKVVSAMENIADDPSGILLESVIEGMAEYYSAELSENVIRGQTENILEGKWAGGTVPLGYKLDAEKHLVLDEEKVPIVKLVFSMTLDGLGTTTIARELNRRGYRNARGKPFRMSNIYVILKNKHYLGKFSWRGIESPHAVPAIVSESDFNEVQKIMNARRVNRVKAGERYMLSGKLFCGECGERMVGTSGTSRNGEIYYYYACPNHQRKNTRTCERTQIRADIIDSTVCDVTTRLLESDAAVEAIARQAVEVQTHTDVNAAIAATKKRMADVKKKIDNCVKAVESGIISDAIAKTLHDNEETLRDLECELAKQEIARKSSELTVDKIRFFFKSICRDAKKADKYRRILLSTLVRMVIVRGDALEIRYNYANEYPALQNPVKAECSYNHRLVGLSGFEPETSSM

SEQ ID NO: 5792 - protein, 501 aa, Unknown
  Description of Unknown: Integrase B5793 sequence
  PTHR30461:SF3,cd00338,SM00857,G3DSA:1.10.10.2600,IPR036162, PF13408,IPR025827,PS51737,G3DSA:3.40.50.1390,IPR006119, IPR038109,PF07508,SSF53041,IPR011109,PTHR30461, PS51736,Coil,PF00239
MYEDIKTACLYVRFSSHNQTEQSIEGQTRVCRDFCKRHNIRIVEIYADRATSASKDIEKRVQFLKMIKDSEKGLFDAVIVYKLDRFARSRYDSATYKYRLKRNGVQLISATENISNDPEGIILESVLEGMAEFYSAELSQKINRGMRESAYKHNSIGGAIPLGYKIEDKKLVIDPKTAPIVKEAFEKYADGETVAEICRQFNARGYKTSKGTAFGKSSFTKIFRNERYIGVYTFHDYRAEDAIPAIIDKDLWDRVQLRVGKIKNAPARNKAKVVYLLSGKIFCGHCGSKMNGNCNAGNYCYYQCYGKKNGNVDCKKKNIRKEFIERLVAQDALSLLTDEYIEQIATIACEKNQHEIELDSALPTIRDRIHQVDLSLNHLLKAIESGSAPDMLVKRMGELEKEKKDLQAQAKKESEDIVELDKAQVIYWLEQFRGGSIEDEEFCRMLIDLFVNSVTVWDEDDNTYKVTVAYNLTSLPTKTYRLNKGGTLSDFASNAPGPRWS

SEQ ID NO: 5793 - protein, 501 aa, Unknown
  Description of Unknown: Integrase B5794 sequence
  SM00857,G3DSA:1.10.10.2600,IPR036162,PF13408,PS51737, IPR025827,G3DSA:3.40.50.1390,IPR006119,IPR038109,PF07508, IPR011109,SSF53041,PTHR30461,Coil,PS51736, cd00338,PF00239
MRAVIYARYSPGPKQTDLSIEGQVRECKEYIKKKGYELVKVYADRHVTGMSLKKRDDFACLMDDAKAHKFDVVVCYDTARFARDKFDAVVNKKILRQDLGIGIEYATLNTEGPEGRLIESVMEGFNQYYSEELSRKVKRGMYDAAMKGQTLGSRPPLGYRVDEQKRFIVDEAEAEAVRSAFEAYARGATFASCARTLNAAGYRTSRGSEFTISTVRKMLVNQRYIGVYMGEQDKVPRIVTDEVFYEVQKRIKKAEPRSPKGVYPLVGKLICGCCGAHMTGVSGTSKTGRRYFYYKCPNKCKGQRVRQDKLDQFVAEFTREAFISPETLREIAHRLFTHQEAENASKEVQTSLETTLARTETALDNIALALAERPKSKTLLKKLDDLELQRHDIEITLAKEKTKRSGILSEAALEEGLAAFIQGFEFEGSEDQDRRLIDALVDTVVLYPDRVLATYTIQGIKNLEKVEFSRDGLSSTTTIKGRTLIFASGGFAIQCKRNGKI

SEQ ID NO: 5794 - protein, 501 aa, Unknown
  Description of Unknown: Integrase B5795 sequence
  PTHR30461:SF3,cd00338,SM00857,G3DSA:1.10.10.2600,IPR036162, PF13408,PS51737,G3DSA:3.40.50.1390,IPR025827,IPR006119, IPR038109,PF07508,IPR011109,SSF53041,PTHR30461, PS51736,Coil,PF00239
MYEEVKNACIYARYSSSNQTEQSIEGQLRVCREFCNRHNIRVVEVYTDRATSASKDIEKRVSFLKMIKDSERGNFDAVIVYKLDRFARSRYDSATYKYRLRKNGVQLISATENISNDPEGIILESVLEGMAEFYSAELSQKIHRGLRESAYKHNSIGGQIPLGYKTEGKKLVIDEETAPIVREAFEMYAEGHSVADICRTFNAKGYKTSKGTRFGKSSFSKIFRNEKYIGIYQFHDYRAEDAIPALIDRKTFNLVQARLKTVGKAPGQFKAKHIYLLSGKLYCGHCGSKMNGNCNTNEYSYYECYGKKNLHKDCHKRNLRKDFIEDIVVRDALSLLTPERIEEIATVAIQTNTYEVETTTDIPAIRGRLHETKLSLENITKAIEGGLAPETLVKRMVELEKEKKVLEGELKKEEKGVAYLDREQVIYWLNQFKNGDIEDEDFRRQLIDLFVNSVTVWDEPDDFFKITIAYNLTSLQEKTYRLPKGGTLSDLALNPPGSSCG

SEQ ID NO: 5795 - protein, 501 aa, Unknown
  Description of Unknown: Integrase B5796 sequence
  PTHR30461:SF3,cd00338,SM00857,G3DSA:1.10.10.2600,IPR036162, PF13408,PS51737,G3DSA:3.40.50.1390,IPR025827,IPR006119, IPR038109,PF07508,IPR011109,SSF53041,PTHR30461, PS51736,Coil,PF00239
MAEITIIPAKNHADEIVRTAAYARVSSDSEDQLNSFAAQIRYYTELLQNSTDAVFVDMYADQGITGTSAAKRTEFQRLMSDCRKGKIDRILTKSISRFARNTKDSLEAVRELKTLGISVYFEKENIDTGEISSEMMLAIYSQFAQEESMSISRNVRMGFQKRMADGSYVPSAVPFGYIRENGKFVIDKEKAEIVRGIFSDYLNGVSAEWLAEKYRVKLATVKYVLTNEKYTGDSIFHKWYTTDTLPFDCRENRGERDKYYVSETHPAIISREVFQSVQRLIERKGRAHKGKTTQSYPLRKKIYCGECGTLYKRKERGSRVCWVCRNHDSSADKCSAKQIDEREIYGAFIVMFNKLLQNYKVILVPLQRQIQELFNLKMRENAQIVQLRKELAESREQAYLIAGLRSKGILDAAYYTEKAAALEKNIDSLQKRLDAFEEDDENGRILGKFRKLIGIFERAETITEFDEIKFGQIVEKITVLSESKIRFELIGGIGFVEQIMR

SEQ ID NO: 5796 - protein, 501 aa, Unknown
  Description of Unknown: Integrase B5797 sequence
  cd03768,SM00857,G3DSA:1.10.10.2600,IPR036162,PF13408, PS51737,IPR025827,G3DSA:3.40.50.1390,IPR006119,IPR038109, PF07508,IPR011109,SSF53041,PTHR30461,PS51736, Coil,PF00239
MNIREDVIYARQSVDRKDSISIESQIDFCKYELKGGSCRVFKDKGYSGKNTDRPEFQKLLGEIRKGKVRRVVVYKLDRISRSILDFANMMELFQEYDVEFVSSTEKFDTSTPMGRAMLNICIVFAQLERETIQKRVTDAYYSRCLKGFHMSGQAPYGFDLEPTVVENIRTKMMVADPIAASHVRLMFEMYAEPETSFGDITRYFEERGIKVYGKSLTRSYLSQLLRNPVYAQADLEMYEFFKSQGTVVVNDAADFAGTNGCYLYQGRDVKEDKDKSLKDQILVIAPHEGFVSADVWLRCRKKLMTNTTFQNGRKARNTWLAGKIKCGKCGYALKTTHNPSGYEYLRCSKRADHKGCPGCGTLRKTEFEQFIFTAMGEKFREFKLLRGGEEKANPKITAYQVELAQVEAEIEKLLDTLTRANATLLAYANKKIEDLDNRRKTLSKAIADLSVETLSSQQIELLSGYLDDWENISFEDKRKAADGLISSISATSDYVKIEWKI

SEQ ID NO: 5797 - protein, 500 aa, Unknown
  Description of Unknown: Integrase B5798 sequence
  SM00857,G3DSA:1.10.10.2600,IPR036162,PS51737,G3DSA:3.40.50.1390, IPR006119,IPR038109,PF07508,SSF53041,IPR011109, PF00239,PTHR30461,PS51736,Coil,cd00338
MAYAMYLRKSRADEELGYENTLERHEEMLRNLAAQTGIHVDESHIYREIVSGESIEARPQMQKLLKAVEMGLYTGVLCIELERLSRGDGADQQRILKAFQFSDTKIITLTKTYDLAGDDSFDEEFFEFGLFMSRREYKMIKKRLYRGRIQAQKEGYFIGSRPPYGYDKKRIGKGYVLVPNENAEVVRYIFRRYAKRETAANILHDLNNMAIPTVTGTKWTAYAIREVIKNQTYIGKINTKTVRCEKSIKDGKVVQRWLNNYEPVVVDGKHEPIIDEELFWKCQEVRDSKKTRTRSDLTLKNPLASLMFCSVCGKTIRRTHYDYKGERTFYYGCVTSRCETKNTFTHVVYDMVMAELKKELERQQVMLADYDTSPEHDARKDELEMLKAELGKKSMMLERACEAYETGVYDRQTYLERVQKVNAARAELQTRVEELEASIEESEERHAKAVPILTRVVEEMHTLEPKEQNDLLKMIIDRIEYEKTESGAAIEPTLRISLKI

SEQ ID NO: 5798 - protein, 500 aa, Unknown
  Description of Unknown: Integrase B5799 sequence
  PTHR30461:SF3,cd00338,SM00857,G3DSA:1.10.10.2600,IPR036162, PF13408,PS51737,G3DSA:3.40.50.1390,IPR025827,IPR006119, IPR038109,PF07508,IPR011109,SSF53041, PTHR30461,PS51736,Coil,PF00239
MAYAMYLRKSRADEELGYENTLERHEEMLRNLAAQTGIHVDESHIYREIVSGESIEARPQMQRLLKAVEMGLYTGVLCIELERLSRGDGADQQRILKAFQFSDTKIITLTKTYDLAGDDSFDEEFFEFGLFMSRREYKMIKKRLYRGRIQAQKEGYFIGSRPPYGYDKKRIGKGYVLVPNENAEVVRYIFRRYAQYDTAANILHDLNNMAIPTVTGAKWTAYAIREVIKNQTYIGKINTKTVRCEKSIRDGKVVQKWLNNYEPVTVEGRHEPIVDEELFWKCQEVRDSKKTRTRSDQTLKNPFASIMFCSVCGKTMRRTHYDYKGERTFYYGCQTSRCETKNTFTHVVYDMVIDELKKELERQQVVLADYDTSPEHDARRDELEMLKAELGKKSMMLERACEAYETGVYDRQTYLERVQKVNAARAELQARVEDLEKSIDESEERHEKAVPILTRVVEEMHTLEPKEQNDLLKMIVDRIEYEKTESGAAIEPTLRISLKI

SEQ ID NO: 5799 - protein, 500 aa, Unknown
  Description of Unknown: Integrase B5800 sequence
  PTHR30461:SF3,cd00338,SM00857,G3DSA:1.10.10.2600,IPR036162, PF13408,IPR025827,G3DSA:3.40.50.1390,PS51737,IPR006119, IPR038109,PF07508,SSF53041,IPR011109,PTHR30461, PS51736,Coil,PF00239
MQKNTTIENTTKAVIYARYSSDRQREESIEGQLRVCEDYAKRTGMTILHVYADRALSGRSDQRPEFQMMIQAAATQAFDTVLVYKLNRFARNRYDSAKYKHKLKKYGVKVVSAMENIANDPSGILLESVIEGMAEYYSAELAENVMRGMTENALECKWPGGTVPLGYKLDAARHLIIDEPAAKTVRWIYQMALESRQPSSIIRELNAAGCRTAFGRPFGRTSLNTILKNERYIGTFIWNDIKKPNAIPVIIDPEDWQKVQTISKSKKKCIAKSRGENYLLTGRLFCGQCGESMVGTAGTSKMQRVYHYYACGNHLKKKGCTTKAIRADKLEDLICTATTQLLSNQDAIKAIAKQAISAQETQGPSLVLKSLQNQKADISRKLQNCVKAVEEGLISQTVTNHIQEYEKQLQSLNDDIKKEELMNRVPQLTEKHIEFFFWSISQQIKKADKYKSILLSSLVRSVIIYEDFIEIQYNYKKELPILQNPVKIKSGSIIYFGALK

SEQ ID NO: 5800 - protein, 500 aa, Unknown
  Description of Unknown: Integrase B5801 sequence
  PTHR30461:SF3,IPR036162,PS51737,IPR011109,PTHR30461, PF00239,G3DSA:1.10.10.2600,IPR006119,SSF53041,cd00338, SM00857,IPR025827,IPR038109,PS51736,mobidb-lite, PF13408,G3DSA:3.40.50.1390,PF07508,Coil
MKTAVIYARYSSDKQTEQSIEGQLYDCYNYAKQHGITVVREYIDRAMTGKNDDRPAFQQMLHDSAQHKWDSVLVWKLDRFARNTIDSAVNRQILAKNGVRLLSVMESFGDDASGQMMTHIIEAINEYYSADLREKTIRGMRQSAMKAQTTGHIPLGYKVVDKKLVIDDETRIIPETVFRMYAEGERLTDIAEHLNAQGYRNRRGRPFTPNSFYNMLANEKYIGIYKYDDIVIEGGIPQMIPNEVFEAVREKLITNRKRAAKNTAKADYYLSGKLYCGHCGEPMSGLSGTGRNGVKHYYYRCNGVQKKSGCHKKLEKKYLIEDEVCRAARSAFEQMDKAETAETIYQMYLQTVRNEYAPAELEKELTECTKQAENVVNAIAQTGGNQLLYDKVRELEERKEQLGSALRLSQAMTDNVPSVEQITVFIDDILATDINTTEGKKAIADIMISKVYVYDDKLTVIFKDKDGKSVDIPLSAVSDSSSADCAPSALGSHTGQRRTT

SEQ ID NO: 5801 - protein, 500 aa, Unknown
  Description of Unknown: Integrase B5802 sequence
  PTHR30461:SF3,cd00338,SM00857,G3DSA:1.10.10.2600,IPR036162, PS51737,G3DSA:3.40.50.1390,IPR006119,IPR038109,PF07508, IPR011109,SSF53041,PTHR30461,PS51736,Coil, PF00239
MAYAMYLRKSRADEELGYENTLERHEEMLRNLAAQTGIHVDESHIYREIVSGESIEARPQMQKLLKAVEMGLYTGVLCIELERLSRGDGADQQRILKAFQFSDTKIITLTKTYDLAGDDSFDEEFFEFGLFMSRREYKMIKKRLYRGRIQAQKEGYFIGSRPPYGYDKKRIGKGYVLVPNENAEVVRYIFRRYAQRETAANILHDLNNMAIPTVTGTKWTAYAIREVIKNQTYIGKINTKTVRCEKSIKDGKVVQRWLNNYEPVVVEGKHEPIVDEELFWKCQEVRDSKKTRMRSDLTLKNPLASIMFCSVCGKTIRRTHYDYKGERTFYYGCVTSRCETKNTFTHVVYDMVIDELKKELERQQVVLASYDTSPEHDARRDELEMLRAELGKKSMMLERACEAYETGIYDRQTYLERVQKVNAARAELQARVEELEASIEESEERHEKAVPILTRVVEEMHTLEPKEQNDLLKMIIDRIEYEKTESGAAIEPTLRISLKI

SEQ ID NO: 5802 - protein, 500 aa, Unknown
  Description of Unknown: Integrase B5803 sequence
  PTHR30461:SF3,cd00338,SM00857,G3DSA:1.10.10.2600,IPR036162, PF13408,IPR025827,PS51737,G3DSA:3.40.50.1390,IPR006119, IPR038109,PF07508,SSF53041,IPR011109,PTHR30461, PS51736,Coil,PF00239
MYEDIKTACLYVRFSSHNQTEQSIEGQTRVCRDFCKRHNIRIVEIYADRATSASKDIEKRVQFLKMIKDSEKGLFDAVIVYKLDRFARSRYDSATYKYRLKRNGVQLISATENISNDPEGIILESVLEGMAEFYSAELSQKINRGMRESAYKHNSIGGAIPLGYKIEDKKLVIDPKTAPIVKEAFEKYADGETVAEICRQFNARGYKTSKGTAFGKSSFTKIFRNERYIGVYTFHDYRAEDAIPAIIDKDLWDRVQLRVGKIKNAPARNKAKVVYLLSGKIFCGHCGSKMNGNCNAGNYCYYQCYGKKNGNVDCKKKNIRKEFIERLVAQDALSLLTDEYIEQIATIACEKNQHEIELDSALPTIRDRIHQVDLSLNHLLKAIESGSAPDMLVKRMGELEKEKKDLQAQAKKESEDIVELDKAQVIYWLEQFRGGSIEDEEFCRMLIDLFVNSVTVWDEDDNTYKVTVAYNLTSLPTKTYRLNKGGTLSDFASNAPGSRC

SEQ ID NO: 5803 - protein, 500 aa, Unknown
  Description of Unknown: Integrase B5804 sequence
  PTHR30461:SF3,SM00857,G3DSA:1.10.10.2600,IPR036162,PF13408, PS51737,IPR025827,G3DSA:3.40.50.1390,IPR006119,IPR038109, PF07508,IPR011109,SSF53041,PTHR30461,PS51736, cd00338,PF00239
MNGVIYARYSSENQREESIDGQLRECTAFAQHNDIQIVGEYIDRAFSAKTDNRPSFQKMIKDSAKGEFDVIIVWKLDRFARNRYDSAHYKNILKKNGVKVVSATEAISSGAEGIILESVLEGMAEYYSAELAEKVSRGMKENALKCKYNGGSVPLGYYIDESKHFQIDSSVAPFVVECFEHYADGMTMKQLRDELNMKGVKNSRGGKLSIDVISRMLTNRKYLGEYTFQDITIKDGIPAIVSTSLFEKVQDRLTKTKKAPSSHKADDDYILTTKLFCGKCKSFMVGESGTNAQGKKYRYYKCVNHKKHQGCDMKSIRKDLIENMTIKYIREFLNDEDLINTLIDLAYDAQHKENEQLPLLRKQLAQTEKGIKNIVDAIEQGISTKSTRERLLDLEQRKNDIEMSISKESIENPMLTKKQFKFWFDQLKKLDISKSEQRQKLVDLFVNSIIIYDDHIKFFFNYKEHTETITFDELNNCSDLPDSPRPNNKRHPLGCLLFFI

SEQ ID NO: 5804 - protein, 500 aa, Unknown
  Description of Unknown: Integrase B5805 sequence
  PTHR30461:SF3,SM00857,G3DSA:1.10.10.2600,IPR036162,PF13408, PS51737,G3DSA:3.40.50.1390,IPR025827,IPR006119,IPR038109, PF07508,IPR011109,SSF53041,PF00239,PTHR30461, PS51736,Coil,cd00338
MSSTETLKSGALYIRVSTHGKQEELSPAAQKRLLLKYAKEHNIVVSKEYIYEEKGISGRKADRRPEFMRMISAAKSNPSPFDVILVWKFSRFARNQEESIVYKSLLRRKCNVDVISVSEPLVEGPFGSLIERIIEWMDEYYSIRLSGEVFRGMSEKAMKGGYQARPPLGYKILVKGEPPVIVPEEAKIVEYIFDKYVNARSGIFDIARSLNTMGAKTSHGKAFERRSVEYILQNPTYCGKIRWNRTTNATNEIKPKEDWILADGTHPAIISEELFHAAQERFQSEYRPTGARPSSTYRHWLSGIIKCPECGRTMIAKSTTDKRYHKQYSYFTCYGYSKGKCLAKNSVSSKKLEPVVIAGIKAATSDTNLSFTIKKSIPVEDKSELKILEGLLAKIDMKEKRIKEAYMNGIDSLEEYKENKLLLTKERAVLEEKIKNTNAEPNNNMDMIKNDMKKRIENVYDIITGDSFSDQQKSDALKSIVEKIVYKKEEETVDIYYYYL

SEQ ID NO: 5805 - protein, 500 aa, Unknown
  Description of Unknown: Integrase B5806 sequence
  PTHR30461:SF3,cd00338,SM00857,G3DSA:1.10.10.2600,IPR036162, PF13408,PS51737,IPR025827,G3DSA:3.40.50.1390,IPR006119, IPR038109,PF07508,IPR011109,SSF53041,PTHR30461, PS51736,Coil,PF00239
MRKKAIDSTAAVVYARYSAGPKQTDQSIEGQIYDCQEYAKKHGLTIIEYYIDRHISGKEDSNRSEFQRMLNDCCKGQFKYVITWKVDRFGRNREELAVNKSKLKRAGVQLVYAKESIPDGPEGIILESLLEGLAEYYSADLAQKVKRGMSESAKKGKVLGSACIYGFQKSSDGLYEINEPAATIIREVFRRYADGDTVPQIIKDLNSRGVLTYKNKPFDSSTLYRALRNRKYIGEYTFGDVVYESGIPQIIDNETFDRVQERMDANKHTGFKYAAPVPFLFTGKIICGECGESYCGESGTSKTGTVHRYYKCHGRKARKTLCNSPVFRKDWFEQFILQKTVTDVLNDDVIDYLVKEIIKVQESDSFSSEISVLKKEKREVEKSLSNIMRAIESGIFNDTTADRMSQLEHRSKELSVEISKAELKRLRLTPDHLYYWFDQFRGGDISDETFRKHLADAFINQIFVYEDRVVIAYNCANNNPRSIDLSELSACVRTRSRKVD

SEQ ID NO: 5806 - protein, 500 aa, Unknown
  Description of Unknown: Integrase B5807 sequence
  SM00857,G3DSA:1.10.10.2600,IPR036162,PS51737,G3DSA:3.40.50.1390, IPR006119,IPR038109,PF07508,IPR011109,SSF53041, PTHR30461,Coil,PS51736,cd00338,PF00239
MAYAMYLRKSRADEELGYENTLERHEEMLRNLAAQTGIHVDESHIYREIVSGESIEARPQMQKLLKAVEMGLYTGVLCIELERLSRGDGADQQRILKAFQFSDTKIITLTKTYDLAGDDSFDEEFFEFGLFMSRREYKMIKKRLYRGRIQAQKEGYFIGSRPPYGYDKKRIGKGYVLVPNENAEVVRYIFRRYAQRDTAANILHDLNNMAIPTVTGTKWTAYAIREVIKNQTYIGKINTKTVRCEKSIKDGKVVQRWLNNYEPVTVEGRHEPIVDEELFWKCQEVRDSKKTRVKADQTLKNPLASIMFCDVCGKTIRRTHYDYKGERTFYYGCVTSRCETKNTFTHVVYDMVIDELKKELERQQVVLASYDTTPEKDTRKDELEMLKAELGKKQMMLERACEAYETGIYDRQTYLERVQKVNAAKVELQARIETLEKDIEESEERHEKAVPILTKVVEEMHTLTPKEQNDLLKMIIDKIIYKKTESGAAIEPELEISLKI

SEQ ID NO: 5807 - protein, 500 aa, Unknown
  Description of Unknown: Integrase B5808 sequence
  cd00338,SM00857,G3DSA:1.10.10.2600,IPR036162, PS51737,G3DSA:3.40.50.1390,IPR006119,IPR038109, PF07508,IPR011109,SSF53041,PTHR30461, PS51736,Coil,PF00239
MKSVLYARVSTEDLEQNNSYIQQQLYQDDRFEIVKIFSDKASGSSVDGRESFLEMLKYVGISKEGNNYFVEHRTEIECIIVANVSRFSRSVVDARLIIDALHKNNVKVFFVDLNKFSDDADIFLQLNMYLMIEEQYLRDVSKKVKAGMQRKQSTGYILGSNKIWGYNYVTKDDGKGYLVPHETESLMVKNIFKEYIFGAGTRTLAKKYKLASSTILGILKNTKYCGYMGYNLKSDNPTYVKSPFIEPLISTEAFEEVQRIIKGRCNSESGRGRRIKVRNLTGKIKCECGANYHYKQRETEWCCGREGVEGRTKGCGSPQFNTKLIIPYLEKNIDNIEKNLEFNLNREIKDINVGSFDRLNQRKEELIRQQDKLLDLYLDEDKLKNISKEMLERRSKLIKEEIEEVEEKLVILNDMNSHLNNLRRIKVEYKNEIKNIRRLIEEKNLDEIEKLISKIQLETIVNIINFRKELKIKEIQFSCFNELYNTNFIFAPEPKKVWDK

SEQ ID NO: 5808 - protein, 500 aa, Unknown
  Description of Unknown: Integrase B5809 sequence
  PTHR30461:SF3,cd00338,SM00857,G3DSA:1.10.10.2600,IPR036162, PF13408,IPR025827,G3DSA:3.40.50.1390,PS51737,IPR006119, IPR038109,PF07508,IPR011109,SSF53041,PTHR30461, PS51736,Coil,PF00239
MRVVLYMRYSSDRQTEQSIEGQNRVCTAFCEQQGYEIVDRYIDRATSAFKDTDKRTEFQRMIRDSEKQLWEGIVVYKLDRFARNRYDSATYKARLKKNGVRVISATENISDNPEGVILEAVLEGMAEFYSKELSQKIMRGMFESANKCHSIGGHIPLGYKIENKKLVIDEAGAAIVREAFDLYANGATVAEICETFNTKGYRTAKNAEFNKNSFRSMFKNERYIGIYKYKDLRIEGGVPAIVDKDIFTIVQKKLSKNAEAPSRGKAKIDYLLSQKLFCGHCGSLMTGESGTGKGGTTYFYYTCGKRKREHTCDKKPLKKDFIERAVVEDALTLLTPETINELADIAAKESVREMEENSIIPALKNQLHETERSINNLVKMVEKGVESDTIADRLKELEKEKRAIEKRLVVAQDDYVILEKDHIVWWLSEFCNGDIEDEEFRRHIIDLLVNSVTVWDEPDGWYKITSVYNLTSNKTKTFRCSDLSGQAPPQVKKSEHYHQW

SEQ ID NO: 5809 - protein, 500 aa, Unknown
  Description of Unknown: Integrase B5810 sequence
  PTHR30461:SF3,SM00857,G3DSA:1.10.10.2600,IPR036162,PF13408, PS51737,G3DSA:3.40.50.1390,IPR025827,IPR006119,IPR038109, PF07508,IPR011109,SSF53041,PF00239,PTHR30461, Coil,cd00338
MYEEIKTACLYLRYSSSNQTEQSIEGQMHVCQDFCKRHNIRIVEMYIDRATSASKDIEKRVEFLKMIKDSEKGNFNAVIVYKLDRFARSRYDSATYKYRLKRNGVQLISATENITQDPEGIILESVLEGMAEFYSAELSQKINRGMRESAMKHNSIGGAIPLGYKTVDKKLVIDETTAPIVREAFQMYADGESVAEICRTFNNRGYKTSKGTRFGKSSFTKIFRNEKYIGVYKYHDYRAEDVIPPIIDKDLWDRVQVRVGKIKKAPARNKARHTYLLTGKLFCGHCGSAMNADGNSQGYLYYRCYGKKNLDKQCNKRNMEKNLIERLVAQDAMSFLTDEYIEKIATIACDRNKQEIESDSPIPVIRDRIRQVDVSLNNLLKAIETGSAPDMLVKRMGELETEKKDMEVQLKKEMAHQVYIDKEQVIFWLEKFREGDINDEEFCQTVIDLFVNSVTVWDEPDDKFKITIAYNLTSIPQKTYRLSKDGRLSDYASNTPDWKS

SEQ ID NO: 5810 - protein, 500 aa, Unknown
  Description of Unknown: Integrase B5811 sequence
  cd00338,SM00857,G3DSA:1.10.10.2600,IPR036162,PF13408, IPR025827,G3DSA:3.40.50.1390,PS51737,IPR006119,IPR038109, PF07508,SSF53041,IPR011109,PTHR30461,PS51736, Coil,PF00239
MYLRKSRADDPHESIEDTLRKHEKILFDLANKLNIKKDEIVQFKEVVSGENLKNRPQAQKMLKLVMENAFEGVLVVDSQRLARGDTLDQGTIIRAFSLNNTKIITPGKTINPGDEIDQDYFEFDLFMGRREYKMINKRMQRGRNISVQEGNYVGSIAPYGYKKTKIGKCHTLKINEDEIDCFNKMKELALNGLGCTSIANELNRLGFKPRKSKLWTTNAVRDILLNKTNLGLIKWNTRKSVKLYKNDEIIKSRPRNEEAEYYPGKHPAIITQVEYDAIVENIKNRARPVKKDKKLQNPLAGVVYCGKCGKAMIRRSYNNGYRDGLICTNTHCNNVSSVLEVVEKRVLESLEDTLKEYRQFIDNYHNDKTKTNNDSLIIKTEKEINKIDSQINKACEMLEVGTYSVELFKERKTLLDNQKKALIDKIEALKKEDTDFKLQNYINAVPILENAIKLYWNSSVEEKNKLLKQIVKRCGYLKSERGKRNGKGVYNFKLNIYLKI

SEQ ID NO: 5811 - protein, 500 aa, Unknown
  Description of Unknown: Integrase B5812 sequence
  PTHR30461:SF3,cd00338,SM00857,G3DSA:1.10.10.2600,IPR036162, PF13408,PS51737,G3DSA:3.40.50.1390,IPR025827,IPR006119, IPR038109,PF07508,IPR011109,SSF53041,PTHR30461, PS51736,Coil,PF00239
MKTAAIYARYSCENQTEQSIEGQLRVCQEYAASLGILIVETYIDRAMSGTNDNRAAFQQMLKDSSKKQFQFVIVYKLDRFARNKVESVINKKTLQDNGVTLLSAMERITDTPEGHMMETILEGFNQYFSEELAQKVKRGMRETRLKGLYQGGGLPYGYKVEGRKVVIDESAAEIVRYAFQEYSKGAFVLEIIDTLHKKGLLYKGKPFPRNLLYHVLRNEKYTGSYKCRDEVVDNIYPQIIPVELFQKVGARLEKNRYGKRSFEATYLLKFKAKCGYCGMPMYSETGTASNGETNRYYKCAGKKKYHNGCTKSQLRKEYLEDIVVNAIIDELNRPGAIEYITKKLLETQEENIKNNSTVNALLKEKTKIDKQLENIANAIQNGIVSKTTAKRLQDLEEQQEKLEREILIEQSKQATPLTRAQIKEFYSDALGMELRMLIEYLVKEVIMYDDKIQIIFKSPINTVPDEDRGFLFYEGTKQPKTIISRRWSTKRKIMVEIRVE

SEQ ID NO: 5812 - protein, 500 aa, Unknown
  Description of Unknown: Integrase B5813 sequence
  PTHR30461:SF3,cd00338,SM00857,G3DSA:1.10.10.2600,IPR036162, PF13408,PS51737,G3DSA:3.40.50.1390,IPR025827,IPR006119, IPR038109,PF07508,IPR011109,SSF53041,PTHR30461, Coil,PF00239
MYEEIKTACLYLRYSSSNQTEQSIEGQMHVCQDFCKRHNIRIVEMYIDRATSASKDIEKRVEFLKMIKDSEKGNFNAVIVYKLDRFARSRYDSATYKYRLKRNGVQLISATENITQDPEGIILESVLEGMAEFYSAELSQKINRGMRESAMKHNSIGGAIPLGYKTVDKKLVIDETTAPIVREAFQMYADGESVAEICRTFNNRGYKTSKGTRFGKSSFTKIFRNEKYIGVYKYHDYRAEDVIPPIIDKDLWDRVQVRVGKIKKAPARNKAKHTYLLTGKLFCGHCGSSMNADGNSNGYLYYRCYGKKNMNESCKKRNMEKNLIERLVAQDAMSFLTDEYIEKIATIACDRNRQEIESDSPIPVIRDRIRQVDVSLNNLLKAIETGSAPDMLVKRMGELETEKKDMEVQLKKEMAHQVYIEKEQVIFWLEKFREGDINDEEFCQTVIDLFVNSVTVWDEPDDKFRITIAYNLTSIPQKTYRLSKDGRLSDYASNTPDWKS

SEQ ID NO: 5813 - protein, 500 aa, Unknown
  Description of Unknown: Integrase B5814 sequence
  PTHR30461:SF3,SM00857,G3DSA:1.10.10.2600,IPR036162,PF13408, IPR025827,G3DSA:3.40.50.1390,PS51737,IPR006119,IPR038109, PF07508,IPR011109,SSF53041,PTHR30461,Coil, PS51736,cd00338,PF00239
MNTVIYARYSAGPRQTDQSIEGQLRVCTDFCKQRGLTVIDTYCDRHISGRTDERPEFQRLIADAKRKKFEAVVVYKTDRFARNKYDSAVYKRELKRNGIQIFYAAEAIPDGPEGIILESLMEGLAEYYSAELAQKIKRGMHESALKCQSTGSGRPLGYRVDEQKHFQTDPESAQTVQTIFEQYIKGESNAAICELLNSRGLRTAQGKPFNKNSINRIIKNRKYIGEYRYHDIVVEGGMPAIISKDTFNLAQAEMERRRTRKAPKSPKAEYLLAGRLFCGHCKGPMQGVSGTGKSGNKWYYYYCGNTRGKNKTCDKKQVSRDRLERAVVDFTVRYILQEEVLEELARKVHAAQERQNDTASEIAFYEKKLADNKKSIANVLRAIESGAATQTLPARLQELENEQAVILGEISFLKGKRLAFTEDQILFALMKHLEPYPGESEQDYRRRIISDFVSEVYLYDDRLLIYFNISSENGKLKSADLSNIEGGEFDEGLVRSTKTI

SEQ ID NO: 5814 - protein, 500 aa, Unknown
  Description of Unknown: Integrase B5815 sequence
  PTHR30461:SF3,SM00857,G3DSA:1.10.10.2600,IPR036162,PF13408, IPR025827,G3DSA:3.40.50.1390,PS51737,IPR006119,IPR038109, PF07508,IPR011109,SSF53041,PF00239,PTHR30461, PS51736,Coil,cd00338
MRVVLYMRYSSDRQTEQSIEGQNRVCTAFCEQQGYEIVDRYIDRATSAFKDTDKRTEFQRMIRDSEKQLWEGIVVYKLDRFARNRYDSATYKARLKKNGVRVISATENISDNPEGVILEAVLEGMAEFYSKELSQKITRGMFESANKCHSIGGHIPLGYKIENKKLVIDEAGAAIVREAFDLYANGATVAEICETFNTKGYRTAKNAEFNKNSFRSMFKNERYIGIYKYKDLRIEGGVPAIVDKDTFAIVQKKLSKNAEAPSRGKAKIDYLLSQKLFCGHCGSLMTGESGTGKGGTTYFYYTCGKRKREHTCDKKPLKKDFIERAVVEDALTLLTPETIDELADIAVNESIREMEENSIIPALKDQLHDTERSINNLVKMVEKGVESDTIADRLKELEKEKRAIEKRLVVAQDDYVLLEKDHIVWWLSEFCNGDIEDEEFRRHIIDLLVNSVTVWDEPDGWYKITSVYNLTSNKTKTFRCSDLSGQAPPQVKKSEHYHQW

SEQ ID NO: 5815 - protein, 500 aa, Unknown
  Description of Unknown: Integrase B5816 sequence
  cd00338,SM00857,G3DSA:1.10.10.2600,IPR036162,PF13408, PS51737,G3DSA:3.40.50.1390,IPR025827,IPR006119,IPR038109, PF07508,IPR011109,SSF53041,PTHR30461,PS51736, Coil,PF00239
MAYAMYLRKSRADEELGYENTLERHEEMLRNLAAQTGIHVDESHIYREIVSGESIEARPQMQRLLKAVEMGLYTGVLCIELERLSRGDGADQQRILKAFQFSDTKIITLTKTYDLAGDDSFDEEFFEFGLFMSRREYKMIKKRLYRGRIQAQKEGYFIGSRPPYGYDKKRIGKGYVLVPNENAEVVRYIFRRYAQRETAANILHDLNNMAIPTVTGTKWTAYAIREVIKNQTYIGKINTKTVRCEKSIKDGKVVQRWLNNYEPVTVDGKHEPIVDEDLFWKCQEVRDSKKTRTRSDQTLKNPFASIMFCSVCGKTMRRTHYDYKGERTFYYGCQTSRCETKNTFTHVVYDMVIDELKKELERQHVMLADYDTSPEHDARKDELEMLRAELGKKSMMLERACEAYETGIYDRQTYLERVQKVNAARAELKARVEELEVSIDESEERHQKAVPILTRVVEEMHTLEPKEQNDLLKMIVDRIEYEKTESGAAIEPTLRISLKI

SEQ ID NO: 5816 - protein, 500 aa, Unknown
  Description of Unknown: Integrase B5817 sequence
  PTHR30461:SF3,SM00857,G3DSA:1.10.10.2600,IPR036162,PF13408, IPR025827,G3DSA:3.40.50.1390,PS51737,IPR006119,IPR038109, PF07508,IPR011109,SSF53041,PTHR30461,Coil, PS51736,cd00338,PF00239
MKAAAYARYSTDKQTENSIAYQMNAITKYCLDHDIDLISAFSDEAESGTNTDREGFQNLVRAAQNKEFEAVVIYDISRGSRDVADWFQFRKTMRALGVQVISTNQQLGDITNPNDFLIELINVGLGQHMVLDTRKKSMAGMLERAKKGLYCGGNCPLGYKIENGRYVIEEKEAEVVRQIFNRYAQGESYNQIIDGLNGAVGKFGRPIGKNSLHSILANERYTGVYIWNERNVRIMRKWAGGKKNPNPVIIEGIIPQIIDKTTWERVKKRMETRKNGTNKAKREYLLTGLIECAECGATYVGHCNVAHRKDGSVRENRYYECGNKYRTRTCHSKNLNADELELFVVTQIQDTLRNWDPSEVARKYIKEIQGATADCTEEKRELVDVEHQINNGVKAVLSGMRIPELDKEIDRLRQRKLDLENIIAEKSQQTNHSYSADEIEAALSDLIKNFDPKEAVKQLVQKIYANADGSCTVHIGVHKIGAGDPSYSICTFFFPAKSKT

SEQ ID NO: 5817 - protein, 500 aa, Unknown
  Description of Unknown: Integrase B5818 sequence
  cd00338,SM00857,G3DSA:1.10.10.2600,IPR036162,PF13408, PS51737,G3DSA:3.40.50.1390,IPR025827,IPR006119,IPR038109, PF07508,IPR011109,SSF53041,PTHR30461,PS51736, Coil,PF00239
MAYAMYLRKSRADEELGYENTLERHEEMLRNLAEQTGIHIDEAHIYREIVSGESIEARPQMQRLLKAVEMGLYTGVLCIELERLSRGDGADQQRILKAFQFSDTKIITLTKTYDLAGDDSFDEEFFEFGLFMSRREYKMIKKRLYRGRIQAQKEGYFIGSRPPYGYDKKRIGKGYVLVPNENAEVVRYIFRRYAQHDTAANILHDLNNMAIPTVTGAKWTAYAIREVIKNQTYIGKINTKTVRCEKSIKDGKVVQRWLNNYEPVTVEGRHEPIVDEELFWKCQEVRDSKKTRTRSDQTLKNPFASMMFCSVCGKTMRRTHYDYKGERTFYYGCQTSRCETKNTFTHVVYDMVIDELKKELERQQVVLANYDTAPEKDTRKDELEMLRAELGKKSMMLERACEAYETGIYDRQTYLERVQKVNAARAELQARVEELEASIEESEERHEKAVPILTRVVEEMHTLTPKEQNDLLKMIVDRIEYEKTESGAAIEPTLRISLKI

SEQ ID NO: 5818 - protein, 500 aa, Unknown
  Description of Unknown: Integrase B5819 sequence
  cd00338,SM00857,G3DSA:1.10.10.2600,IPR036162,PS51737, G3DSA:3.40.50.1390,IPR006119,IPR038109,PF07508,IPR011109, SSF53041,PTHR30461,PS51736,Coil,PF00239
MAYAMYLRKSRADEELGYENTLERHEEMLRNLAAQTGIHVDESHIYREIVSGESIEARPQMQKLLKAVEMGLYTGVLCIELERLSRGDGADQQRILKAFQFSDTKIITLTKTYDLAGDDSFDEEFFEFGLFMSRREYKMIKKRLYRGRIQAQKEGYFIGSRPPYGYDKKRIGKGYVLVPNENAEVVRYIFRRYAQRETAANILHDLNNMAIPTVTGTKWTAYAIREVIKNQTYIGKINTKTVRCEKSIKDGKVVQRWLNNYEPVVVEGKHEPIVDEDLFWKCQEVRDSKKTRMRSDLTLKNPLASIMFCSVCGKTIRRTHYDYKGERTFYYGCVTSRCETKNTFTHVVYDMVIDELKKELERQQVVLASYDTSPEHDARRDELEMLRAELGKKSMMLERACEAYETGIYDRQTYLERVQKVNAARADLQARVEELEASIEESEERHEKAVPILTKVVEEMHTLEPKEQNDLLKMIIDRIEYEKTESGAAIEPTLRISLKI

SEQ ID NO: 5819 - protein, 500 aa, Unknown
  Description of Unknown: Integrase B5820 sequence
  PTHR30461:SF3,SM00857,G3DSA:1.10.10.2600,IPR036162,PF13408, IPR025827,G3DSA:3.40.50.1390,PS51737,IPR006119,IPR038109, PF07508,IPR011109,SSF53041,PF00239, PTHR30461,Coil,cd00338
MTIIGEYCDRAISGKTDNRPNFQRLIKDSEKGQFEAVIMYTLDRFARNRYDSAIYKAKLKKNGVKVYYAKQPMPDTPEGIILESVLEGYAEYYSENLSRNIKRGLKENALQCLAVGGAGMPLGYTVGEDRKYKIDPVGAKIVQEIFQMYADGMSATQIINECNRRGYKTSRGNAFNKNSLRTMLKNDRYIGVYRFADVVVEDGVPPIISRELFEKVQATLRHNYSARARNKAKDDYLLTTKLFCGHCGSSMVGESGTSRSGKLHHYYKCIDRKRNHKCKKAVEKKDWIEELVVRFTVQNVLNDETIERIARKTMEIIEKESADTSYLNGLQNELKDIKKKIKNLMNAIEQGIITPTTKERMDELEAEKNDLEGKIAREEMKKPLLTKERIMHWLNSFKSGNVNDIEYRRRVIDTLVNSVYIYDDGDKGRRIVFTFNMSGQNTATLSCSDIACVAPPPIMVSLDRMRVKAHPIGLFRGFSDLNFSRKTKDRLTVFSGTVGI

SEQ ID NO: 5820 - protein, 500 aa, Unknown
  Description of Unknown: Integrase B5821 sequence
  PTHR30461:SF3,IPR036162,PS51737,IPR011109,PTHR30461, PS00397,PF00239,G3DSA:1.10.10.2600,IPR006119,SSF53041, cd00338,SM00857,IPR025827,IPR038109,PS51736, IPR006118,PF13408,G3DSA:3.40.50.1390,PF07508,Coil
MPQNTNYGNLSHSDSTKRAAAYIRVSTDDQLELSPDSQLKEIRAFADRNGYTIDDEYIFHDDGISGTSAKRRPAFMEMIATAKKKPKPFDAIIVWKFSRFARSREDSIVFKSMLKKLGISVISVSEPITDDKMSIIVEGLIESMDEYYSANLSEEVKRGMLEKFSRKQAMSAAPYGYRLEDKKYVPEPAEAEIIKEVFTRFVGGETVWGISKDLKARGIKTKRGNITEPRTIHYYLDNPVYIGSIRYTLDGGGSRQRYLDGNFMLQEDCHEPIISKELWNEAQKLIKKNREIYGKSTKPVSYHEYALKGIVKCASCEHNLTYCSSKDAPRVQCPMYQHNKCDTSSSVRLDLLNEALLLHLQEALKDKNLNIDISADTSTKSSREIQLEAEIKRETARLARMKEAYLNGVDTIEEYKENKSAQTKIISRLEKELKKLKSPPSDKEKQEKIKQVKTKIKTAIDALQSTAISETEKNALLKTFISKALYDSKTKTLTVYYYAQ

SEQ ID NO: 5821 - protein, 500 aa, Unknown
  Description of Unknown: Integrase B5822 sequence
  PTHR30461:SF3,SM00857,G3DSA:1.10.10.2600,IPR036162,PF13408, PS51737,G3DSA:3.40.50.1390,IPR025827,IPR006119,IPR038109, PF07508,IPR011109,SSF53041,PTHR30461,Coil, PS51736,cd00338,PF00239
MRMCGYARVSTDEERQLDSLEHQMEFFSDFAKQNGHHLVNVYTDEGITGRQLKKRDAFNKMLSDSKLGLFDLLVVKDVSRFARNTVDLLTSIRQLKSRGIDVIFVNNSQKVLGESEFVITLLGAVAQEESSNLSKRVKFGKNITSKKGRVPPRIFGYDRIDNFTMEINEREAEVVREIYHLYIDEGLGCRLIAITLGEKQMKTKYGNDWNQRNIRRILENPIYSGHYINHRYTVVDFLEGTTKALPKEQHYHHDRPEWAIITPERFQQAQEILEQRRKQYATEYTHFTGRYSNRHLFSTLIRCKECGRAFSRRVTHYPNSDYIYWRCPTNNQYTAKRCSNNTIVREDDLIETLSTYLREVVSNKESIAQEIARKFKEANAVEGSKPDAQTLEAKKVKLKAKLEKYMEMYANDIITMEALKSKTAEINESINVIDDQLILLEGQHTQERTIESITNEAMTEIERFLSLQSATNMDLRRIIDSIIVDDKKQVKINLKITGNL

SEQ ID NO: 5822 - protein, 500 aa, Unknown
  Description of Unknown: Integrase B5823 sequence
  PTHR30461:SF3,SM00857,G3DSA:1.10.10.2600,IPR036162,PF13408, PS51737,G3DSA:3.40.50.1390,IPR025827,IPR006119,IPR038109, PF07508,IPR011109,SSF53041,PTHR30461,Coil, PS51736,cd00338,PF00239
MKAAAYARYSTDKQTENSIAYQMNAITKYCLDHDIDLISAFSDEAESGTNTDREGFQNLVRAAQNKEFEAVVIYDISRGSRDVADWFQFRKTMRALGVQVISTNQQLGDITNPNDFLIELINVGLGQHMVLDTRKKSMAGMLERAKKGLYCGGNCPLGYKIENGRYVIEEKEAKVVRQIFNRYAQGESYNQIIDGLNGAVGKFGRPIGKNSLHSILANERYTGVYIWNERNVRIMRKWAGGKKNPNPVIIEGIIPQIIDKTTWERVKKRMETRKNGTNKAKREYLLTGLIECAECGATYVGHCNVAHRKDGSVRENRYYECGNKYRTRTCHSKNLNADELELFVVTQIQDTLRNWDPSEVARKYIKEIQGATADCTEEKRELVDVERQINNGVKAVLSGMRVPELDKEIDRLRQRKLDLENIIAEKSQQTNHSYSADEIEAALSGLIKNFDPKEAVKQLVQKIYANADGSCTVHIGVHKIGAGDPSYSICTFFFPAKSKT

SEQ ID NO: 5823 - protein, 500 aa, Unknown
  Description of Unknown: Integrase B5824 sequence
  PTHR30461:SF3,SM00857,G3DSA:1.10.10.2600,IPR036162,PF13408, PS51737,G3DSA:3.40.50.1390,IPR025827,IPR006119,IPR038109, PF07508,IPR011109,SSF53041,PTHR30461,Coil, PS51736,cd00338,PF00239
MRMCGYARVSTDEERQLDSLEHQMEFFSDFAKQNGHHLVNVYTDEGITGRQLKKRDAFNKMLSDSKLGLFDLLVVKDVSRFARNTVDLLTSIRQLKSRGIDVIFVNNSQKVLGESEFVITLLGAVAQEESSNLSKRVKFGKNITSKKGRVPPRIFGYDRIDNFTMEINEREAEVVREIYHLYIDEGLGCRLIAITLGEKQMKTKFGNDWNQRNIRRILENPIYSGHYINHRYTVVDFLEGTTKALPKEQHYHHDRPEWAIITPERFQQAQEILEQRRKQYATEYTHFTGRYSNRHLFSTLIRCKECGRAFSRRVTHYPNSDYIYWRCPTNNQYTAKRCSNNTIVREDDLIETLSTYLREVVSNKESIAQEIARKFKEANAVEGSKPDAQALEAKKVKLKAKLEKYMEMYANDIITMEALKSKTAEINESINVIDDQLILLEGQRTQERTIESITNEAMAEIERFLSLQSATNMDLRRIIDSIIVDDKKKVKINLKITGNL

SEQ ID NO: 5824 - protein, 500 aa, Unknown
  Description of Unknown: Integrase B5825 sequence
  SM00857,G3DSA:1.10.10.2600,IPR036162,PF13408,PS51737, IPR025827,G3DSA:3.40.50.1390,IPR006119,IPR038109,PF07508, IPR011109,SSF53041,PTHR30461,PS51736,cd00338, PF00239
MVVRARETNEEIEAIGYIRQSDQRQDKEDISELTQLRKIEQFCESNNFKLVKVFKDIDYSGFRIKYTKRPGLMDALKCIEDRPKVRKMIFFNLSRLTRLKKDFQELQGILNSHQVDICSASEFVDFSTPNGRLVAGFFVDLNEYYSDNLSEIVNDSKETNAKKGRWNGGPAPFGFVKTADGMGFEEVPERAYYVREIFRMAKLGKGPYLIARWLNEQKVYSLTGKEWTARRVRYMLTNPTYAAMQRWKGECYKLLVCPVLVSWDDFNYIQSTLFGKDKAWKGKERQLLTSVLICPECGSKMHSRYMSHSKQKRKYVCSRKTSMGAISCSSPNHDQESFEAAVINLIANMAEKKYGYESLIPEMKEDSDNNNSFSKLQDELANINNAEQKIFDDYYLHNKIEEHHYELSMRRYGKRKAEILELLDKIPLPQSKSFGDYNDAIQEFSELINELPNDDKRRSIELLVEKITPGAPAVVHFKWGETREIHPRNIEKFKKKLILY

SEQ ID NO: 5825 - protein, 500 aa, Unknown
  Description of Unknown: Integrase B5826 sequence
  SM00857,G3DSA:1.10.10.2600,IPR036162,PS51737,G3DSA:3.40.50.1390, IPR006119,IPR038109,PF07508,IPR011109,SSF53041, PTHR30461,Coil,PS51736,cd00338,PF00239
MKDRSALYLRKSQADQPDESIAEVLAKHRAMLMELADKMDVTISQDDIYEEVVSGESLYARPEMLRMLEQVEAGVYDGVFCMDIDRLGRGSMSEQGIILETFRMAETKIICPGKTYDLTNDADEELTEMKALFARFELKMIRKRMQRGLMQTIQAGGYVANQPYGYRKCTVGKLPSLEINEDQAKFIRHAYKRYIEGVGAHIIADELNAMGSVPNRSAKWSRNTVRDILRNPTYAGKVAWNRVKRYKPTKSHPRPRAEYQKMEDWIMVDGLHPAIIPWEDWERVQEIRKGRHIPSVNHGQVANPMAGLIRCGNCGRNMQRVGVSTKGGPRLHCMEKACIASAKFGLVEQRLLENLERMRDELEIEAQKSSGPDISSLLVEKRTIETKLRKTASRVDVLHDLLEDGTYDRETFKTRLSKAQAETEALNAQQADVERRIEEAKRRDTTLVLAQLTSVLQLYPTLDNEGKNRLLKSVIDYVIYRKPQKTRPMAFTLEIKLKNI

SEQ ID NO: 5826 - protein, 500 aa, Unknown
  Description of Unknown: Integrase B5827 sequence
  PTHR30461:SF3,SM00857,G3DSA:1.10.10.2600,IPR036162,PF13408, IPR025827,G3DSA:3.40.50.1390,PS51737,IPR006119,IPR038109, PF07508,IPR011109,SSF53041,PTHR30461, Coil,PS51736,cd00338,PF00239
MSNTETLKSGALYIRVSTHGKQEELSPAAQKRLLLKYAKEHNIVVSKEYIYEEKGISGRKADRRPEFMRMISAAKSNPSPFDVILVWKFSRFARNQEESIVYKSLLRRKCNVDVISVSEPLVDGPFGSLIERIIEWMDEYYSIRLSGEVFRGMSEKAMKGGYQARPPLGYKIITKGEPPVIVPEEAKIVEYIFDKYVNARSGIFDIARSLNTMGAKTSHGKAFERRSVEYILQNPTYCGKIRWNRTTNATNEIKPKEDWILADGTHPAIISEELFHAAQERFQSEYRPTGARPSSTYRHWLSGIVKCPECGRTMIAKSTTGKSNNKQYCYFTCYGYSKGKCLAKSSISSRKLEPVVLEGIKAATLNDNLSFSIKAPVPVEDKSELKILKGLLAKLENKEKRIKEAYMNEIDTLEEYKENKLLLAKERSDLEEKIKNSSTEPTNNTEDMKKDMQERIRNVYDIITSDNFTDQQKSDAIRSIVEKIVYKKEEEMVEIYYYYV

SEQ ID NO: 5827 - protein, 500 aa, Unknown
  Description of Unknown: Integrase B5828 sequence
  PTHR30461:SF3,SM00857,G3DSA:1.10.10.2600,IPR036162,PF13408, IPR025827,PS51737,G3DSA:3.40.50.1390,IPR006119,IPR038109, PF07508,IPR011109,SSF53041,PF00239,PTHR30461, PS51736,Coil,cd00338
MELSKGVIYARYSSDKQRDESIEGQIRECKAYAEREGIIITHIYTDRALSARTDHRPEFRQMIDDAKKHNFEYVIVYQLDRFSRSREDSAVYKSILKRNGVKVISAKENISSDPAGIILESVLEGMAEYYSAELAQKVRRGMTDNALKGKMNGTPTPLGYDKTKENSLIINKREAKIVERIFDMYLKGHSIPSICSFLNSKGYLSKKGGKFSYSVVRRILSNEKYIGIMKWNDITVEDAIPSIISKEIFDKVQTANSRRIKLKASRSEFYNLCGKLYCGKCNAHYVGSTATSRSGEKHYYYVCNNRRKHHTCDAPNIKREIIEDIVVNKTLEILNQPNTIEELAKMAIKANKDMMSTSELELQAVNDRIKQLQSELDNYMKAIAKGFISDTLQTQIEKTEAELQDQMTRRANHEIANNQIHLTAEHIEFFLTKMAKENPTTKQGRASIIDTFIKQATIFDDRVEIVFNYSNDLPQFKEQAIECSHSCDMVDHQGFEPWTP

SEQ ID NO: 5828 - protein, 500 aa, Unknown
  Description of Unknown: Integrase B5829 sequence
  PTHR30461:SF3,SM00857,G3DSA:1.10.10.2600,IPR036162,PF13408, PS51737,G3DSA:3.40.50.1390,IPR025827,IPR006119,IPR038109, PF07508,IPR011109,SSF53041,PTHR30461,Coil, PS51736,cd00338,PF00239
MRMCGYARVSTDEERQLDSLEHQMEFFSDFAKQNGHHLVNVYTDEGITGRQLKKRDAFNKMLSDSKLGLFDLLVVKDVSRFARNTVDLLTSIRQLKSRGIDVIFVNNSQKVLGESEFIITLLGAVAQEESSNLSKRVKFGKNITSKKGRVPPRIFGYDRIDNFTMEINEREAEVVREIYHLYIDEGLGCRLIAITLAEKQMKTKFGNDWNQRNIRRILENPIYSGHYINHRYTVVDFLEGTTKALPKEQYYHHDRPEWAIITPERFQQAQEILEQRRKQYATEYTHFTGRYSNRHLFSTLIRCKECGRAFSRRVTHYPNSDYIYWRCPTNNQYTAKRCSNNTIVREDDLIETLSTYLREVVSNKESIAQEIARKFKEANAVEGSKPDVQTLEAKKVKLKAKLEKYMEMYANDVITMEALKSKTAEINESINVIDDQLILLEGQRTQERTIESITNEAMTEIERFLSLQSATNMDLRRIIDSIIVDDKKQVKINLKITGNL

SEQ ID NO: 5829 - protein, 500 aa, Unknown
  Description of Unknown: Integrase B5830 sequence
  PTHR30461:SF3,SM00857,G3DSA:1.10.10.2600,IPR036162,PF13408, IPR025827,G3DSA:3.40.50.1390,PS51737,IPR006119,IPR038109, PF07508,IPR011109,SSF53041,PF00239,PTHR30461, PS51736,Coil,cd00338
MNTVIYARYSAGPRQTDQSIEGQLRVCTDFCKQRGLTVIDTYCDRHISGRTDERPEFQRLIADAKRKKFEAVVVYKTDRFARNKYDSAVYKRELKRNGIQIFYAAEAIPDGPEGIILESLMEGLAEYYSAELAQKIKRGMHESALKCQSTGSGRPLGYRVDEQKHFQIDPEAAQTVQTIFEQYIKGESNAAICELLNSRGLRTAQGKPFNKNSINRIIKNRKYIGEYRYHDIVVEGGMPAIISKDTFNLAQAEMERRRTRKAPKSPKAEYLLAGRLFCGHCKGPMQGVSGTGKSGNKWYYYYCGNTRGKNKTCDKKQVSRDRLERAVVDFTVRYILQEDVLEELARKVHAAQERQNDTTSEIVFYEKKLADNKKSIANVLRAIESGAATQTLPARLQELENEQAVILGELSFLKGKRLAFTEDQILFALMKHLEPYPGEPEQDYRRRIISDFVSEVYLYDDRLLIYFNISSEDGKLKSADLSNIEGGEFDEGLVGSTKLC

SEQ ID NO: 5830 - protein, 500 aa, Unknown
  Description of Unknown: Integrase B5831 sequence
  PTHR30461:SF3,IPR036162,PS51737,IPR011109,PTHR30461, PF00239,G3DSA:1.10.10.2600,IPR006119,SSF53041,cd00338, SM00857,IPR025827,IPR038109,PS51736,mobidb-lite, PF13408,G3DSA:3.40.50.1390,PF07508,Coil
MDKKLKVAAYGRVSTNSKQQSHSFDNQSDYWNKKLAEDPRYEYVGLYADKGISGKYMKYRPQMLAMLDACRCGKIDMIFTKSVQRFARNTIELLEVVRELRDMNIAVYFEKENINTLTAESELYLTIAAAVAEEDLNRYGQNVAWTIQDRFEKGDISVVGIRMLGYETRNKKLHIIPSEAAVVQQMFELYSTGNYSTRQMAELLNSRGYKTAKGNEWTSQTILGILTNEKYKGDALLYKRINVNGQQLMNHGLRDMLYVENSHDAIISKELWDKVRDVLDKKGNKKLRGKTIDNYPFTSLITCPICGKSYIHKVNNAGTKYACPIWRCKMQLTYGKSACSNTGIKDSVLKEKFIDVYNEFIESKRFGETNSEAEQQLKKLINDENELIALHVRGLISKINLDNDRAELRKQRIILERQINEYRQSHIKNLELKPITEFNEELVGRVLKQVTIQDWIITFEFYNGVKISRQYTNGPNGNQKGWKEKKRLKEAQEQNGNDNQ

SEQ ID NO: 5831 - protein, 500 aa, Unknown
  Description of Unknown: Integrase B5832 sequence
  cd00338,SM00857,G3DSA:1.10.10.2600,IPR036162,PF13408, IPR025827,G3DSA:3.40.50.1390,PS51737,IPR006119,IPR038109, PF07508,IPR011109,SSF53041,PTHR30461,PS51736, Coil,PF00239
MYLRKSRADDPHESIEDTLRKHEKILFDLANKLNIKKDEIVQFKEVVSGENLKNRPQAQKMLKLVMENAFEGVLVVDSQRLARGDTLDQGTIIRAFSLNNTKIITPGKTINPGDEIDQDYFEFDLFMGRREYKMINKRMQRGRNISVQEGNYVGSIAPYGYKKTKIGKCHTLKINEDEIDCFNKMKELALNGLGCTSIANELNRLGFKPRKSKLWTTNAVRDILLNKTNLGLIKWNTRKSVKLYKNDEIIKSRPRNEEAEYYPGKHHAIITQVEYDAIVENIKNRARPVKKDKKLQNPLAGVVYCGKCGKAMIRRSYNNGYRDGLICTNTHCNNVSSVLEVVEKRVLESLEDTLKEYRQFIDNYHNDKTKTNNDSLIIKTEKEINKIDSQINKACEMLEVGAYSVELFKERKTLLDNQKKALIDKIEALKKEDTDFKLQNYINAVPILENAIKLYWNSSVEEKNKLLKQIVKRCDYLKSERGKRNGKGMYNFKLNIYLKI

SEQ ID NO: 5832 - protein, 500 aa, Unknown
  Description of Unknown: Integrase B5833 sequence
  PTHR30461:SF3,SM00857,G3DSA:1.10.10.2600,IPR036162,PF13408, PS51737,IPR025827,G3DSA:3.40.50.1390,IPR006119,IPR038109, PF07508,IPR011109,SSF53041,PTHR30461,PS51736, cd00338,PF00239
MQRAVIYARFSSDMQREESIDAQVRACKAYAKNKGYIVVDTYADEAKSGRDVTKRDAYNQMLADAMEDKFDVIIFHKIDRNSRNELNYFTFKDKLEKLGIRYEYAAQPIDALSPEGQMMETMMVGMAAYYSRNLAKETKKGLNENAYKALFNGGCPPLGYKIVDKKYVIDEQEAAAVRLIFELYLNGYGYAAICRELSAKGYTTKAGKAFAKNSLHDILCNEKYIGTYTFNKIPRKKGGRNSHAAERPEDFISIENAFPAIISKDDWALVRAKMDRNRHRAASYTAKEKYLLSGKVFCGHCGSAMVGHRIRKRYCYYGCTRKEQTPTSKCPQKMIRAEVLEHWVLQILERVVFTVGGMRRIADAIVDAYEAEQKEQAGSQATLLQRKAVAEKKLNNLYKIFEEGNADEFDRQRLNQIKAELREINKSICETSVKPAKLLSKQKIAAILAAMKDEIFVKKNSYYVQQAVDLLVDHVTITDKVLKITLSTQNVCAYLVPRRR

SEQ ID NO: 5833 - protein, 500 aa, Unknown
  Description of Unknown: Integrase B5834 sequence
  cd00338,SM00857,G3DSA:1.10.10.2600,PS51736,PF13408, IPR025827,PS51737,G3DSA:3.40.50.1390,IPR036162,IPR006119, IPR038109,PF07508,IPR011109,SSF53041,PTHR30461, mobidb-lite,Coil,PF00239
MNVVLYMRYSSDRQTEQSIEGQKRVCMDFCERQGYNVVGEYIDRATSAYKETAKRTNFCRMIRDSSNGLWQGVVVYKLDRFARNRYDSATYKVRLKKNGVKVISATENISDSPEGVILESVLEGMAEFYSKELSQKVSRGLNESAHKCNSTGGAIPLGYKTVNKKLTVDEPNAQIVKEAFDLYAGGATISEICEKFNSQGYRTKKGTEFNKNSFKTMFRNEKYIGTYTYKDIRIEGGIPAIIDKETFETVQKRLSANAQAPARGKARVNYLLSQKLFCGHCGANMIGDSGRSKTGETYYYYSCSTRKRFHSCKKRTIRKDLIERIVAENAMRLITPEMINTIADMAIKCNREDIESDAIIPALTADLKEINTGIKNLLKMVERGVESETLDSRLKELEKRKKDTESRLDAAKSEYLTLDKTVIVGWLSQFLSGDIEDEDFRRHLIDTLINSVTVWDEPDGGYKITTVYNLRKGNTQTYRVNADGSSDLERNSPPKKRQFS

SEQ ID NO: 5834 - protein, 500 aa, Unknown
  Description of Unknown: Integrase B5835 sequence
  PTHR30461:SF3,SM00857,G3DSA:1.10.10.2600,IPR036162,PF13408, IPR025827,G3DSA:3.40.50.1390,PS51737,IPR006119,IPR038109, PF07508,SSF53041,IPR011109,PF00239,PTHR30461, PS51736,Coil,cd00338
MNEKINAVIYARFSSHNQQEQSIEGQLRYCSDYANKNGMTVINSYIDRAISGTSDNRPSFQQMIKDSNNRKFDIVLVWKLDRFARNKYDSVVYKNKLKKNGVKVISVTEYLGEGTESVLLESLLEAMAETYSRQLSENVQRGMRESAMKGLSTGGNIPLGYKIIDKKYVIDEAEAEIIRYIFNNYADGKPKKQIIDEINAKGWRTKKGCKFKYNSFNTILKNRKYIGEYIYQDLAVKDVIPAIVDVDIFNQVQSQMTQNKRTAGTQSAKREYLLSTKLFCGQCGGAMTGETSTGRHGGKYGYYMCRNKKFHKNNCEKKRERQEELEEFVVQKTVAMYSDKQFMQLIAKKVVKLYNDEFGSNHIATLEENKHKLETRFDELSNALVKTTNARMLDKFNKEIEQIDIELQELEIEIARENSIAHAQMTVDDVIDFINEVMKGNIKDKEFQKQIIDTFVNAIYVFDDKLVIYYNGSSEAEKVNYSDMLKDMRKDATSNTFAPP

SEQ ID NO: 5835 - protein, 500 aa, Unknown
  Description of Unknown: Integrase B5836 sequence
  PTHR30461:SF3,SM00857,G3DSA:1.10.10.2600,IPR036162,PF13408, PS51737,G3DSA:3.40.50.1390,IPR025827,IPR006119,IPR038109, PF07508,IPR011109,SSF53041,PTHR30461,Coil, PS51736,cd00338,PF00239
MSNKETLKSGALYIRVSTHGKQEELSPDAQKRLLLKYAKDHNIVVSKSYIYEEKGISGRKADRRPEFMRMISTAKSNPSPFDVILVWKFSRFARNQEESIVYKSLLRRKCNVDVISVSEPLIEGPFGSLIERIIEWMDEYYSIRLSGEVFRGMSEKAMKGGYQARPPLGYKILVKGEPPVIVPEEAKIVEYIFDKYVNARSGIFDIARSLNTMGVKTSHGKAFERRSVEYILQNPTYCGKIRWNRTTNATNEIKPKEVWILADGTHPAIISEELFHAAQERFQSEYRPTGARPSSTYRHWLSGIVKCPECGRTMIAKSTTGKSNNKQYCYFTCYGYSKGKCLAKSSISSRKLEPVVLEGIKAATLNDNLSFSIKAPVPVEDKSELKILKGLLAKLENKEKRIKEAYMNEIDTLEEYKENKLLLAKERSDLEEKIKNSSTEPTNNTEDMKKDMQERIRNVYDIITSDNFTDQQKSDAIRSIVEKIVYKKEEEMVEIYYYYV

SEQ ID NO: 5836 - protein, 500 aa, Unknown
  Description of Unknown: Integrase B5837 sequence
  PTHR30461:SF3,SM00857,G3DSA:1.10.10.2600,IPR036162,PF13408, PS51737,G3DSA:3.40.50.1390,IPR025827,IPR006119,IPR038109, PF07508,IPR011109,SSF53041,PF00239,PTHR30461, PS51736,Coil,cd00338
MNEKINAVIYARFSSHNQQEQSIEGQLRYCSDYANKNGMTVINSYIDRAISGTSDNRPSFQQMIKDSNNRKFDIVLVWKLDRFARNKYDSVVYKNKLKKNGVKVISVTEYLGEGTESVLLESLLEAMAETYSRQLSENVQRGMRESAMKGLSTGGNIPLGYKIIDKKYVIDEAEAEIIKYIFNNYANGKPKKQIIDEINAKGWRTKKGCKFKYNSFNTILKNRKYIGEYNYQDLVVKDVIPAIVDVDIFNQVQSQMTQNKRTAGTQSAKREYLLSTKLFCGQCGGAMTGETSTGRHGGKYGYYMCRNKKFHKNNCEKKREKQEELEEFVVQKTVAMYSDKQFMHLIAKKVVKLYNDEFGSNHVTTLEENKHKLETRFDELSDALVKTANARMLDKFNKEIEQIDIELQELEIEIARENSIAHAQMTVDDVIDFINEVMQGNIKDKEFQKQIIDTFINAIYVFDDKLVIYYNGSSEAEKVNYSDMLKDMKKGATSNTFAPP

SEQ ID NO: 5837 - protein, 500 aa, Unknown
  Description of Unknown: Integrase B5838 sequence
  cd00338,SM00857,G3DSA:1.10.10.2600,IPR036162,PF13408, IPR025827,PS51737,G3DSA:3.40.50.1390,IPR006119,IPR038109, PF07508,IPR011109,SSF53041,PTHR30461,PS51736, Coil,PF00239
MYLRKSRADDPHESIEETLRKHEKILFDLANKLNIKKDEIVQFKEIVSGENLKNRPQAQKMLKLVMENAFDGVLVVDSQRLARGDTLDQGTIIRAFSLNNTKIITPGKTINPGDEIDQDYFEFDLFMGRREYKMINKRMQRGRSISVQEGNYVGSIAPYGYKKTKIGKCHTLEINEDEIDCFNKMKELALNGFGCTSVANELNGLGFKPRKSKLWTTNAVRDILLNKTNLGLVKWNTRKSVKIYKNDEIIKSRPRNEEAEYYQGKHPAIITQEEYDTIVENIKNRARPVKKDKKLQNPLAGIVYCGKCGKAMIRRSYNNGYRDGLICTNTHCNNVSSVLEVVEKRLLESLEDTLKEYRQFIDNYHNDETKTNNDSLIIKTEKEIDKIDSQINKACEMLEIGTYSVELFKERKTLLDNQKKALIDKIEALKKEGADFKLQNYINAVPILENAIKLYWNSSVEERNKLLKQIVKRCDYLKSERGKRNGKGMYNFKLNIYLKI

SEQ ID NO: 5838 - protein, 500 aa, Unknown
  Description of Unknown: Integrase B5839 sequence
  PTHR30461:SF3,SM00857,G3DSA:1.10.10.2600,IPR036162,PF13408, IPR025827,G3DSA:3.40.50.1390,PS51737,IPR006119,IPR038109, PF07508,SSF53041,IPR011109,PTHR30461,Coil, cd00338,PF00239
MNTVIYTRYSAGPRQTDQSIEGQLRVCTDFCKQRGLTVIDTYCDRHISGRTDERPEFQRLIADAKRKKFEAVVVYKTDRFARNKYDSAVYKRELKRNGIQIFYAAEAIPDGPEGIILESLMEGLAEYYSAELAQKIKRGMHESALKCQSTGSGRPLGYRVDEQKHFQIDPESAQTVQTIFEQYIKGESNAAICELLNSRGLRTAQGKPFNKNSINRIIKNRKYIGEYRYHDIVVEGGMPAIISKDTFNLAQAEMERRRTRKAPKSPKAEYLLAGRLFCGHCKGPMQGVSGTGKSGNKWYYYYCGNTRGKNKTCDKKQVSRDRLECAVVDFTVRYILQEEVLEELARKVHAAQERQNDTASEIAFYEKKLADNKKSIANVLRAIESGAATQTLPARLQELENEQAVILGELSFLKGKRLAFTEDQILFALMKHLEPYPGETEQDYRRRIISDFVSEVYLYDDRLLIYFNISSEDGKLKSADLSNIEGGEFDEGLVSSTITI

SEQ ID NO: 5839 - protein, 500 aa, Unknown
  Description of Unknown: Integrase B5840 sequence
  PTHR30461:SF3,SM00857,G3DSA:1.10.10.2600,IPR036162,PF13408, PS51737,IPR025827,G3DSA:3.40.50.1390,IPR006119,IPR038109, PF07508,IPR011109,SSF53041,PTHR30461,Coil, PS51736,cd00338,PF00239
MKAAAYARYSTDKQTENSIAYQMNAITKYCLDHDIDLISAFSDEAESGTNTDREGFQNLVRAAQNKEFEAVVIYDISRGSRDVADWFQFRKTMRALGVQVISTNQQLGDITNPNDFLIELINVGLGQHMVLDTRKKSMAGMLERAKKGLYCGGNCPLGYKIENGRYVIEEKEAKVVRQIFNRYAQGESYNQIIDGLNGAVGKFGRPIGKNSLHSILANERYTGVYIWNERNVRIMRKWAGGKKNPNPVIIEGIIPQIIDKTTWERVKKRMETRKNGTNKAKREYLLTGLIECAECGATYVGHCNVAHRKDGSVRENRYYECGNKYRTRTCHSKNLNADELELFVVTQIQDTLRNWDPSEVARKYIKEIQGATADCTEEKRELVDVEHQINNGVKAVLSGMRIPELDKEIDRLRQRKLDLENIIAEKSQQTNHSYSADEIEAALSDLIKNFDPKEAVKQLVQKIYANADGSCTVHIGVHKIGAGDPSYSICTFFFPAKSKT

SEQ ID NO: 5840 - protein, 500 aa, Unknown
  Description of Unknown: Integrase B5841 sequence
  PTHR30461:SF3,SM00857,G3DSA:1.10.10.2600,IPR036162,PF13408, IPR025827,G3DSA:3.40.50.1390,PS51737,IPR006119,IPR038109, PF07508,IPR011109,SSF53041,PF00239,PTHR30461, PS51736,Coil,cd00338
MELSKGVIYARYSSDKQRDESIEGQIRECKAYAEREGIIITHIYTDKALSARTDHRPEFRQMIDDAKKHNFEYVIVYQLDRFSRSREDSAVYKSILKRNGVKVISAKENISSDPAGIILESVLEGMAEYYSAELAQKVRRGMTDNALKGKMNGTPTPLGYDKTKDNSLIINKREAKIVERIFDMYLKGHSIPSICSFLNSKGYLSKKGGKFSYAVIRRILSNEKYIGTMKWNDIIVEDAIPAIISKEIFDKVQAANSRRIKLKASRSEFYNLCGKLYCGKCNAHYVGSTATSRSGEKHYYYVCNNRRKHHTCDAPNLKREIIEDIVINKTLEILNQPNTIEQLAELAVKANKDMMSTSELELQAVNDRIKQLQSELDNYMKAIAKGFISDTLQTQIEKTEAELQDQMTRRTNHEIASNQIHLTAEHIEFFLHKMAKENPTTKRGRASIIDTFIKQATIYDDRVEIIFNYSNDLPQFKEQAIECSHSCDMVDHQGFEPWTP

SEQ ID NO: 5841 - protein, 500 aa, Unknown
  Description of Unknown: Integrase B5842 sequence
  PTHR30461:SF3,SM00857,G3DSA:1.10.10.2600,IPR036162,PF13408, IPR025827,PS51737,G3DSA:3.40.50.1390,IPR006119,IPR038109, PF07508,IPR011109,SSF53041,PF00239,PTHR30461, PS51736,Coil,cd00338
MNEKINAVIYARFSSHNQQEQSIEGQLRYCSDYANKNGMTVINSYIDRAISGTSDNRPSFQQMIKDSNNKKFDVVLVWKLDRFARNKYDSVVYKNKLKKNGVKVISVTEYLGEGTESVLLESLLEAMAETYSRQLSENVQRGMRESAMKGLSTGGNIPLGYKIVDKKYVVDEAEAEIIKYIFNNYADGKPKKQIIDEINSKGWRTKKGCKFKYNSFNTILKNRKYIGEYNYQDLVVKDVIPAIVDVDVFNQAQSQMTQNKRTAGTQSAKREYLLSTKLFCGQCGGAMTGETSTGRHGGKYGYYMCRNKKFHKNNCEKKRERQEELEEFVVQKTVAMYSDKQFMQLIAKKVVKLYNDEFGSNHIATLEENKHKLETRFDELSNALVKTTNARMLDKFNKEIEQIDIELQELEIEIARENSIAHAQMTVDDVIDFINEVMKGNIKDKKFQKQIINTFINAIYVFDDKLVIYYNGSSEAEKVSYSDMLKDMKKGATSATFAPP

SEQ ID NO: 5842 - protein, 500 aa, Unknown
  Description of Unknown: Integrase B5843 sequence
  PTHR30461:SF3,IPR036162,PS51737,IPR011109,PTHR30461, PS00397,PF00239,G3DSA:1.10.10.2600,IPR006119,SSF53041, cd00338,SM00857,IPR025827,IPR038109,PS51736, IPR006118,PF13408,G3DSA:3.40.50.1390,PF07508,Coil
MPKNSNYGNLSHSDSTKRAAAYIRVSTDDQLELSPDSQLKEIRAFADRNGYTIDDEYIFHDDGISGTSAKRRPAFMDMIATAKKKPKPFDAIIVWKFSRFARSREDSIVFKSMLKKLGISVISVSEPITDDKMSIIVEGLIESMDEYYSANLSEEVKRGMLEKFSRKQAMSAAPYGYRLEDKKYVPEPAEAEIIKEVFTRFVGGETVWGISKDLKSRGVKTKRGNITEPRTIHYYLDNPVYIGSIRYTLDGGGSRQRYLDGNYMLQEDCHEPIISKELWNEAQKLIKKNREIYGKSTKPVSYHEYALKGIVKCASCEHNLTYCSSKDAPRVQCPMYQHNKCDTSSSVRLDLLNEALLLHLQEALKDKNLNIDISADTSAKSSREIQLEAEIKRETARLARMKEAYLNGVDTIEEYKENKSAQTKIISRLEKELKKLKSPPSDKDKQEKIKQVKTKIKTAIDALQSTAISETEKNALLKTFILKALYDSKTKTLTVYYYAQ

SEQ ID NO: 5843 - protein, 500 aa, Unknown
  Description of Unknown: Integrase B5844 sequence
  cd00338,SM00857,G3DSA:1.10.10.2600,IPR036162,PF13408, IPR025827,G3DSA:3.40.50.1390,PS51737,IPR006119,IPR038109, PF07508,IPR011109,SSF53041,PTHR30461,PS51736, Coil,PF00239
MYLRKSRADDPHESIEDTLRKHEKILFDLANKLNIKKDEIVQFKEVVSGENLKNRPQAQKMLKLVMENAFEGVLVVDSQRLARGDTLDQGTIIRAFSLNNTKIITPGKTINPGDEIDQDYFEFDLFMGRREYKMINKRMQRGRNISVQEGNYVGSIAPYGYKKTKIGKCHTLKINEDEIDCFNKMKELALNGFGCTSVANELNRLGFKPRKSKLWTTNAVRDILLNKTNLGLIKWNTRKSVKLYKNDEIIKSRPRNEEAEYYPGKHPAIITQVEYDAIVENIKNRARPVKKDKKLQNPLAGVVYCGKCGKAMIRRSYNNGYRDGLICTNTHCNNVSSVLEVVEKRVLESLEDTLKEYRQFIDNYHNDKTKTNNDSLIIKTEKEINKIDSQINKACEMLEVGTYSVELFKERKTLLDNQKKALIDKIEALKKEDTDFKLQNYINAVPILENAIKLYWNSSVEEKNKLLKQIVKRCDYLKSERGKRNGKGVYNFKLNIYLKI

SEQ ID NO: 5844 - protein, 500 aa, Unknown
  Description of Unknown: Integrase B5845 sequence
  PTHR30461:SF3,cd00338,SM00857,G3DSA:1.10.10.2600,IPR036162, PF13408,PS51737,IPR025827,G3DSA:3.40.50.1390,IPR006119, IPR038109,PF07508,SSF53041,IPR011109,PTHR30461, PS51736,Coil,PF00239
MRAFIYGRFSSHKQQELSIEAQIDICREYAEKHNITVVGEYVDRARSARTENRADFRRLIRDACTGVVDCVLVWRYDRFFRDRAESALYRKQLEAAGVHLISVTEFIPDGSAGVITQGMIETVAEYFSAKLSEDVTRGMNKAAQHCQITGGAPLGYRPGPNKRWQIDPVGAELVKRCFEWYDSGKSMGELADHFNKEGHKTAKGNSFNKSSFTTILRNKKYIGIYEYDGTVSIAGGVPRIIEDDLFFRVQRKIDANRHRPGAYKAEVPYLLSGKLFCGKCGSPMTGTAGTGKSGVRHYYYICNNRRAKKCDKKNVRLDLIEEAVLQSALDVLTDDNISYISAEVERRCSENSGNKALVASLRVQLTEVEKQLKNIGNAIAQGIITETTKQMLMDAEADRAALRQQIDRATVQASLEVKAEAVACWLDGFRHGDRKSPEFRKDVFGALVHSVFVYDDYMKIIFNVDSAGAALVPFSAVQNAATSDFVGALPGSYLGGSGVP

SEQ ID NO: 5845 - protein, 500 aa, Unknown
  Description of Unknown: Integrase B5846 sequence
  PTHR30461:SF3,SM00857,G3DSA:1.10.10.2600,IPR036162,PF13408, PS51737,G3DSA:3.40.50.1390,IPR025827,IPR006119,IPR038109, PF07508,IPR011109,SSF53041,PF00239,PTHR30461, Coil,cd00338
MYEEIKTACLYLRYSSSNQTEQSIEGQMHVCQDFCKRHNIRIVEMYIDRATSASKDIEKRVEFLKMIKDSEKGNFNAVIVYKLDRFARSRYDSATYKYRLKRNGVQLISATENITQDPEGIILESVLEGMAEFYSAELSQKINRGMRESAMKHNSIGGAIPLGYKTVDKKLVIDETTAPIVREAFQMYADGESVAEICRTFNNRGYKTSKGTRFGKSSFTKIFRNEKYIGVYKYHDYRAEDVIPPIIDKDLWDRVQVRVGKIKKAPARNKARHTYLLTGKLFCGHCGSAMNADGNSQGYLYYRCYGKKNLDKQCNKRNMEKNLIERLVAQDAMSFLTDEYIEKIATIACDRNKQEIESDSPIPVIRDRIRQVDVSLNNLMKAIETGSAPDMLVKRMGELETEKKDMEVQLKKEMAHQVYIDKEQVIFWLEKFREGDINDEEFCQTVIDLFVNSVTVWDEPDDKFKITIAYNLTSIPQKTYRLSKDGRLSDYASNTPDWKS

SEQ ID NO: 5846 - protein, 500 aa, Unknown
  Description of Unknown: Integrase B5847 sequence
  PTHR30461:SF3,SM00857,G3DSA:1.10.10.2600,IPR036162,PF13408, PS51737,IPR025827,G3DSA:3.40.50.1390,IPR006119,IPR038109, PF07508,SSF53041,IPR011109,PF00239,PTHR30461, PS51736,Coil,cd00338
MNEKINAVIYARFSSHNQQEQSIEGQLRYCSDYANKNGMTVINSYIDRAISGTSDNRPSFQQMIKDSNNKKFDVVLVWKLDRFARNKYDSVVYKNRLKKNGVKVISVTEYLGEGTESVLLESLLEAMAETYSRQLSENVQRGMRESAMKGLSTGGNIPLGYKIIDKKYVIDEAEAEIIRYIFNNYADGKPKKQIIDEINSKGWRTKKGCKFKYNSFNTILKNRKYIGEYNYQELIVEDVIPAIVDVDIFNQVQSQMAQNKRTAGTQSAKREYLLSTKLFCGQCGGAMTGETSTGRHGGKYGYYMCRNKKFHKNNCEKKRERQEELEEFVVQKTVAMYSDKQFMQLIAKKVVKLYNDEFGSNHIATLEENKHKLETRFDELSDALVKTTNARMLDKFNSEIEQIDIELQELEIEIARENSIAHAQMTVDDVIDFINEVMKGNIKDKEFQKQIIDTFINAIYVFDDKLVIYYNGSSEAEKVSYSDMLKDMRKGATSSTLAPP

SEQ ID NO: 5847 - protein, 500 aa, Unknown
  Description of Unknown: Integrase B5848 sequence
  PTHR30461:SF3,SM00857,G3DSA:1.10.10.2600,IPR036162,PF13408, IPR025827,G3DSA:3.40.50.1390,PS51737,IPR006119,IPR038109, PF07508,IPR011109,SSF53041,PF00239,PTHR30461, PS51736,Coil,cd00338
MNTVIYARYSAGPRQTDQSIEGQLRVCTDFCKQRGLTVIDTYCDRHISGRTDERPEFQRLIADAKRKKFEAVVVYKTDRFARNKYDSAVYKRELKRNGIQIFYAAEAIPDGPEGIILESLMEGLAEYYSAELAQKIKRGMHESALKCQSTGSGRPLGYRVDEQKRFQIDPESAQTVQTIFEQYIKGESNAAICELLNSRGLRTAQGKPFNKNSINRIIKNRKYIGEYRYHDIVVEGGMPAIISKDTFNLAQAEMERRRTRKAPKSPKAEYLLAGRLFCGHCKGPMQGVSGTGKSGNKWYYYYCGNTRGKNKTCDKKQVSRDRLERAVVDFTVRYILQEDVLEELARKVHAAQERQNDTASEIAFYEKKLADNKKSIANVLRAIESGAATQTLPARLQELENEQAVILGELSFLKGKRLAFTEDQILFALMKHLEPYPGESEQDYRRRIISDFVSEVYLYDDRLLIYFNISSEDGKLKSADLSNIEGGEFDEGLISSTKTI

SEQ ID NO: 5848 - protein, 500 aa, Unknown
  Description of Unknown: Integrase B5849 sequence
  PTHR30461:SF3,cd00338,SM00857,G3DSA:1.10.10.2600,IPR036162, PF13408,PS51737,IPR025827,G3DSA:3.40.50.1390,IPR006119, IPR038109,PF07508,SSF53041,IPR011109,PTHR30461, PS51736,Coil,PF00239
MYEDIKTACLYVRFSSHNQTEQSIEGQTRVCRDFCKRHNIRIVEIYADRATSASKDIEKRVQFLKMIKDSEKGLFDAVIVYKLDRFARSRYDSATYKYRLKRNGVQLISATENISNDPEGIILESVLEGMAEFYSAELSQKINRGMRESAYKHNSIGGAVPLGYKIEDKKLVIDPKTAPIVKEAFEKYADGETVAEICRQFNARGYKTSKGTAFGKSSFTKIFCNERYIGVYSFHDYRAEDAIPAIIDKDLWDRVQLRVGKIKNAPARNKAKVVYLLSGKIFCGHCGSKMNGNCNAGNYYYYQCYGKKNGNVDCKKKNIRKEFIERLVAQDALSLLTDEYIEQIATIACEKNQHEIELDSALPTIRDRIHQVDLSLNNLLKAIESGSAPDMLVKRMGELEKEKKDLQVQAKKESEDIVELDKAQVIYWLEQFRGGSIEDEEFCRMLIDLFVNSVTVWDEDDNTYKVTVAYNLTSLPTKTYRLNKGGTLSDFTSNAPDWET

SEQ ID NO: 5849 - protein, 500 aa, Unknown
  Description of Unknown: Integrase B5850 sequence
  PTHR30461:SF3,SM00857,G3DSA:1.10.10.2600,IPR036162,PF13408, IPR025827,G3DSA:3.40.50.1390,PS51737,IPR006119,IPR038109, PF07508,IPR011109,SSF53041,PF00239,PTHR30461, PS51736,Coil,cd00338
MSSKETLKSGALYIRVSTHGKQEELSPAAQKRLLLKYAKEHNIVISKDYIYEEKGISGRKADRRPEFMRMISTAKSNPSPFDVILVWKFSRFARNQEESIVYKSLLRRKCDVEVVSVSEPLVDGPFGSLIERIIEWMDEYYSIRLSGEVFRGMSEKAMKGGYQARPPLGYQIVSKGEPPVIVPEEAKVVEYIFDKYVNAHSGIFDIARSLNTLGAKTSHGKPFERRSVEYILQNPTYCGKIRWNRTLNATNEIKPKEEWILTQGTHPAIISEEMFDAAQERFKNEYHPTGARPSSTYRHWLSGIMKCPACGRTMIAKAVTDKRYHKQYCYFTCYGYSKGKCLAKNSISSKKLEPVVIAGIKAATLSNDLSFAIKNPIPVEDKSELKILEGLLAKMESKEKRIKDAYMNGIDSMEEYKENKLLLSKERADLEERIKNTNTEPEDNMDIIKNDMKKRIQNVYEIITSDDFSNQEKSDALKSAVEKIVYKKEEEIVDICYYYL

SEQ ID NO: 5850 - protein, 500 aa, Unknown
  Description of Unknown: Integrase B5851 sequence
  PTHR30461:SF3,SM00857,G3DSA:1.10.10.2600,IPR036162,PF13408, IPR025827,G3DSA:3.40.50.1390,PS51737,IPR006119,IPR038109, PF07508,SSF53041,IPR011109,PF00239,PTHR30461, PS51736,Coil,cd00338
MNSLKAVIYARYSSDKQRDESIEGQIRECRAFAEREGIIITGIYTDKALSARTDNRPEFLQMIEDSKKHLFDYVLVYQLDRFSRSREDSAVYKAILKKNGVKVVSAKENITNDPAGIILESVLEGMAEYYSAELSQKVRRGMTDNALQGKVNGTPTPLGYDKTEDKHLIINEREARIVQTIFDLYIKGHSIPSICSHLDAKGYLSKHGSKFSYAVVRRILSNEKYIGTMRWNDIVIENAIPSIISKEIFDKVQHEKGHRIKKKGARSEFYNLCGKIYCGKCGGHYTGNTATSHTGAKHHYYSCTNRRKHKTCTGKNIKRDILEDIIINKTIHILNEPNTIAQLAKMATEASSTMLGDAELELKHIDARIKELQSELENYMKAIAKGFISDTLQTQIENAEAELQDHMTRKTNHEIKAHPIKLTAEHIEFFLYKMAKENPTTNTGRARILDTFIHSATIYDDRVEITFNYNNDLPQFKGQVIDGSFSVDVVDHQGFEPWTP

SEQ ID NO: 5851 - protein, 500 aa, Unknown
  Description of Unknown: Integrase B5852 sequence
  PTHR30461:SF3,SM00857,G3DSA:1.10.10.2600,IPR036162,PF13408, IPR025827,G3DSA:3.40.50.1390,PS51737,IPR006119,IPR038109, PF07508,IPR011109,SSF53041,PTHR30461,Coil, PS51736,cd00338,PF00239
MRMCGYARVSTDEERQLDSLEHQMEFFSDFAKQNGHHLVNVYTDEGITGRQLKKRDAFNKMLSDSKLGLFDLLVVKDVSRFARNTVDLLTSIRQLKSRGIDVIFVNNSQKVLGESEFIITLLGAVAQEESSNLSKRVKFGKNITSKKGRVPPRIFGYDRIDNFTMEINEREAEVVREIYHLYIDEGLGCRLIAITLAEKQMKTKFGNDWNQRNIRRILENPIYSGHYINHRYTVVDFLEGTTKALPKEQYYHHDRPEWAIITPERFQQAQEILEQRRKQYATEYTHFTGRYSNRHLFSTLIRCKECGRAFSRRVTHYPNSDYIYWRCPTNNQYTAKRCSNNTIVREDDLIETLSTYLREVVSNKESIAQEIARKFKEANAVEGSKPDAQTLEAKKVKLKAKLEKYMEMYANDVITMEALKSKTAEINESINVIDDQLILLEGQRTQERTIESITNEAMTEIERFLSLQSATNMDLRRIIDSIIVDDKKKVKINLKITGNL

SEQ ID NO: 5852 - protein, 500 aa, Unknown
  Description of Unknown: Integrase B5853 sequence
  PTHR30461:SF3,SM00857,G3DSA:1.10.10.2600,IPR036162,PF13408, IPR025827,G3DSA:3.40.50.1390,PS51737,IPR006119,IPR038109, PF07508,IPR011109,SSF53041,PF00239,PTHR30461, PS51736,Coil,cd00338
MKAVIYARYSSDSQREESIEGQLRECTAFAEKNGITVLRHYIDRAYSAKTDNRPEFQNMIKDSGKRLFDIVIVWKLDRFARNRYDSARYKATLKKNGVKVVSATEIISEGAEGIILESVLEGYAEYYSADLSEKVIRGMTDNALKCKFNGGMMPIGYVIDAERHFQIDPLTAPFVLEAFKRYDGGETISSIMNWLNEQGLTNTRGRKMTFNSVGHILHNRRYIGEFRYRDVIVPDGIPAIVPQDLFDRVQEKLAKNKKAPARHKAEDDYLLTTKLFCGYCGAYLCGESGTSRTGKVHHYYKCVSVKKKRTECHKKPVRKEWIEDLVVGETMKMVMDDKAIEAIVSMLMDLQERDNVNVPLYEQQLREAETAINNLLNAIQQGILTRSTKARLEELENRRDELENRLACEKLAKPKVSAEFMTFWLHRFRKLDVRQQSHRKMLIDTFINEIFLYDDKMVITFNYKEGTKTITFAELQEAISNKNGSDLDCLVAPKCSKRKV

SEQ ID NO: 5853 - protein, 500 aa, Unknown
  Description of Unknown: Integrase B5854 sequence
  SM00857,G3DSA:1.10.10.2600,IPR036162,PS51737,G3DSA:3.40.50.1390, IPR006119,IPR038109,PF07508,IPR011109,SSF53041, PTHR30461,Coil,PS51736,cd00338,PF00239
MAYAMYLRKSRADEELGYENTLERHEEMLRNLAAQTGIHVDESHIYREIVSGESIEARPQMQKLLKAVEMGLYTGVLCIELERLSRGDGADQQRILKAFQFSDTKIITLTKTYGLAGDDSFDEEFFEFGLFMSRREYKMIKKRLYRGRIQAQKEGYFIGSRPPYGYGKKRIGKGYVLVPNENAEVVRYIFRRYAQRETAANILHDLNNMAIPTVTGTKWTAYAIREVIKNQTYIGKINTKTVRCEKSIKDGKVVQRWLNNYEPVTVEGRHEPIVDEELFWKCREVRDSEKTRVKADQTLKNPLASIMFCEVCGKTIRRTHYDYKGERTFYYGCVTSRCETKNTFTHIVYDMVIDELKKELERQQVMLADYDTSPEHDARKDELEMLKAELGKKQMMLERACEAYETGIYDRQTYLERVQKVNAAKVELQARIETLEKDIEESEERHEKAVPILTKAVEEMHTLTPKEQNDLLKMIIDKITYKKTESGAAIEPELEISLKI

SEQ ID NO: 5854 - protein, 500 aa, Unknown
  Description of Unknown: Integrase B5855 sequence
  PTHR30461:SF3,SM00857,G3DSA:1.10.10.2600,IPR036162,PF13408, PS51737,G3DSA:3.40.50.1390,IPR025827,IPR006119,IPR038109, PF07508,IPR011109,SSF53041,PTHR30461, Coil,PS51736,cd00338,PF00239
MSNKETLKSGALYIRVSTHGKQEELSPDAQKRLLLKYAKDHNIVVPKSYIYEEKGISGRKADRRPEFMRMISTAKSNPSPFDVILVWKFSRFARNQEESIVYKSLLRRKCNVDVISVSEPLIEGPFGSLIERIIEWMDEYYSIRLSGEVFRGMSEKAMKGGYQARPPLGYKILVKGEPPVIVPEEAKIVEYIFDKYVNARSGIFDIARSLNTMGVKTSHGKAFERRSVEYILQNPTYCGKIRWNRTTNATNEIKPKEDWILADGAHPAIISEELFHAAQERFQSEYRPTGARPSSTYRHWLSGIVKCPECGRTMIAKSTTGKSNNKQYCYFTCYGYSKGKCLAKSSISSRKLEPVVLEGIKAATLNDNLSFSIKAPVPVEDKSELKILKGLLAKLENKEKRIKEAYMNEIDTLEEYKENKLLLAKERSDLEEKIKNSSTEPTNNTEDMKKDMQERIRNVYDIITSDNFTDQQKSDAIRSIVEKIVYKKEEEMVEIYYYYV

SEQ ID NO: 5855 - protein, 500 aa, Unknown
  Description of Unknown: Integrase B5856 sequence
  cd00338,SM00857,G3DSA:1.10.10.2600,IPR036162,PF13408, IPR025827,PS51737,G3DSA:3.40.50.1390,IPR006119,IPR038109, PF07508,IPR011109,SSF53041,PTHR30461,PS51736, Coil,PF00239
MAYAMYLRKSRADEELGYENTLERHEEMLRNLAAQTGIHVDESHIYREIVSGESIEARPQMQKLLKAVEMGLYTGVLCIELERLSRGDGADQQRILKAFQFSDTKIITLTKTYDLAGDDSFDEEFFEFGLFMSRREYKMIKKRLYRGRIQAQKEGYFIGSRPPYGYDKKRIGKGYVLVPNENAEVVRYIFRRYAKRETAANILHDLNNMAIPTVTGTKWTAYAIREVIKNQTYIGKINTKTVRCEKSIKDGKVVQRWLNNYEPVVVEGKHEPIVDEELFWKCQEVRDSKKTRTRSDQTLKNPFASIMFCSVCGKTMRRTHYDYKGERTFYYGCQTSRCETKNTFTHVVYDIVIGELRKELERQQVILADYDTSPEHDARKDELEMLRDELGKKSMMLERACEAYETGIYDRQTYLERVQKVNAARAELQARVEELEASIEESEERHEKAVPILTRVVEEMHTLTPKEQNDLLKMIVDRIEYEKTESGAAIEPTLRISLKI

SEQ ID NO: 5856 - protein, 499 aa, Unknown
  Description of Unknown: Integrase B5857 sequence
  PTHR30461:SF3,cd00338,SM00857,G3DSA:1.10.10.2600,IPR036162, PF13408,PS51737,G3DSA:3.40.50.1390,IPR025827,IPR006119, IPR038109,PF07508,IPR011109,SSF53041,PTHR30461, PS51736,Coil,PF00239
MKTAVIYARYSSDKQTEQSIEGQLYDCYNYAKQHGITVVQEYIDRAMTGKNDDRPAFQQMLHESAMHKWDSVIVWKLDRFARNTIDSAVNRQILAKNGVKLLSVMESFGDDASGQMMTHIIEAINEYYSADLREKTIRGMRQSAMKAQTTGHIPLGYKVVDKKLVIDDETRIIPETVFRMYAEGERLTDIANHLNSQGYRNRRGRPFSTNSFYNMLSNEKYIGIYKYDDIVIEGGIPQMIPNEVFEAVREKLITNRKRAAKNTAKADYYLSGKLYCGHCGEPMSGLSGTGRNGVKHYYYRCNGVQKKSGCHKKLENKYLIEDEVCRAARSAFEQMDKAETAETIYQMYLQTVRNEYAPAELEKELTECTKQAENVVNAIAQTGGNQLLYDKVRELEERKEQLSSALRLSQAMTDNVPSVEQITVFIDDILATDINTTEGKKAIADIMISKVYVYDDKLTVIFKDKDGKSVDIPLSAMSDTSSADCAPSALGSQANFKAN

SEQ ID NO: 5857 - protein, 499 aa, Unknown
  Description of Unknown: Integrase B5858 sequence
  cd03768,PTHR30461:SF3,SM00857,IPR036162,PF13408, IPR025827,G3DSA:3.40.50.1390,PS51737,IPR006119,PF07508, IPR011109,SSF53041,PTHR30461,PS51736,Coil, PF00239
MDAIYARQSIEKKDSLSIEQQIDMCKKSAADAVEIYKDIGYSGKNTTRPDFQRLLGDVKSGTVNRVICYRIDRISRNLLDFMNIWQLFQQNHVEFISVSEQFDTSTPVGKAMLYIAMVFAQMERETIGTRITDNFYARTAAGAWGGGPAPYGFKKVRGMLHGKTQTLLEPVPDEQENIKWMFTEYATGLRSLGWLGREMWKRDPDRGIRWTNVSLRRILINPLYAAADADLYAFFSRSGINIVSPLAAWDGKHSALQTGSRSADTRVRRPISEQQLSVFSTNPVVSSQTYIRVQKQLAKNRQIKNTGKGQWSWLSGKIKCAECGYSCTLCHSPGVTRTKAYIRCSGRYGQLAEKRCTTRHTETIESVEEYVLAQLKDHLSGVAPSKRSKKSAAQERKRNELKLQLIEVQQKQQNAAAAIAEGGATIMRLMMPEIEKLDAEATKITDELSTLAGSEQQSWMPDMALDFDAIDDTGLRDLVALTIDKVLVSPSRPPEIIWK

SEQ ID NO: 5858 - protein, 499 aa, Unknown
  Description of Unknown: Integrase B5859 sequence
  PTHR30461:SF3,IPR036162,PS51737,IPR011109,PTHR30461, PF00239,G3DSA:1.10.10.2600,IPR006119,SSF53041,cd00338, SM00857,IPR025827,IPR038109,mobidb-lite,PS51736, PF13408,G3DSA:3.40.50.1390,PF07508,Coil
MNVVLYMRYSSDRQTEQSIEGQKRVCMDFCERQGYNVVGEYIDRATSAYKETAKRTNFCRMIRDSSNGLWQGVVVYKLDRFARNRYDSATYKVRLKKNGVKVISATENISDSPEGVILESVLEGMAEFYSKELSQKVSRGLNESAHKCNSTGGAIPLGYKTVDKKLTVDEPNAQIVKEAFDLYAGGATISEICEKFNSQGYRTKKGTEFNKNSFKSMFRNEKYIGTYTYKDIRIEGGIPAIIDKETFETVRKKLSANAQAPARGKARVNYLLSQKLFCGHCGANMIGESGRSKTGETYYYYSCSTRKRFHSCKKRTIRKDLIERIVAENAMRLITPEMINTIADMAIKCNREDIESDAIIPALTADLKEINTSIKNLLKMVERGVESETLDSRLKELEKRKKDTESRLDAAKSEYLTLDKTVIVGWLSQFLSGDIEDEDFRRHLIDTLINSVTVWDEPDGGYKITTVYNLKGNTQTYRVNADGSSDMKRNSPPKKRQFS

SEQ ID NO: 5859 - protein, 499 aa, Unknown
  Description of Unknown: Integrase B5860 sequence
  PTHR30461:SF3,IPR036162,PS51737,IPR011109,PTHR30461, PF00239,G3DSA:1.10.10.2600,IPR006119,SSF53041,cd00338, SM00857,IPR025827,IPR038109,mobidb-lite,PS51736, PF13408,G3DSA:3.40.50.1390,PF07508,Coil
MNVVLYMRYSSDRQTEQSIEGQKRVCMDFCERQGYNVVGEYIDRATSAYKETAKRTNFCRMIRDSSNGLWQGVVVYKLDRFARNRYDSATYKVRLKKNGVKVISATENISDSPEGVILESVLEGMAEFYSKELSQKVSRGLNESAHKCNSTGGAIPLGYKTVNKKLTVDEPNAQIVKEAFDLYAGGATISEICEKFNSQGYRTKKGTEFNKNSFKSMFRNEKYIGTYTYKDIRIEGGIPAIIDKETFETVQKRLSANAQAPARGKARVNYLLSQKLFCGHCGANMTGDSGRSKTGETYYYYSCSTRKRFHSCKKRTIRKDLIERIVAENAMRLITPEMINTIADMAIKCNREDIESDAIIPALTADLKEINTSIKNLLKMVERGVESETLDLRLKELEKRKKDTESRLDAAKSEYLTLDKTVIVGWLSQFLSGDIEDEDFRRHLIDTLINSVTVWDEPDGGYKITTVYNLKGNTQTYRVNADGSSDMKRNSPPKKRQFS

SEQ ID NO: 5860 - protein, 499 aa, Unknown
  Description of Unknown: Integrase B5861 sequence
  PTHR30461:SF3,IPR036162,PS51737,IPR011109,PTHR30461, PS00397,PF00239,G3DSA:1.10.10.2600,IPR006119,SSF53041, cd00338,SM00857,IPR025827,IPR038109,PS51736, IPR006118,PF13408,G3DSA:3.40.50.1390,PF07508,Coil
MSEKLKEVCAYIRVSTDKQEELSPESQIRLIKDYAEQHNMLLTRIYQEDKGISGKKADKRPAFQEMIATCKEKSHPYDAILLWKFSRFARNIDESTYYKSVLRKKCNVDVISISEPITEGMYGRLIEMVIEWSDEFYLYNLSGEVMRGMTQKALKGGYNSNVPIGYIKERGKDKIPQIEPKGAEIVRKIFDMYTEQNIPMGDIAARLNQSGYRTARGSLFETRVIGYILENPFYIGKIRWNFFNKQSNKRKNPDDVIISDGKHEAIISEEQFSQAANRRANDRLRTGYNKKRRPAPLLANWLSGMIKCSKCGASLGFAHGGTKTVPNFCCWKYSKGLCSTRNGITLKNAEKEVLSILEELSGSGYFYNYNLNVINTENTERGYILKELKSLDAKMKRIKDAYINEIDTLEEYKANKELILKRRTELNEKLEAATITIHPASVHKDVDFQGLIDIIKDENSNDTKKHNALLEIVDHFVWDKETQEMTVVLNDDISLVNCK

SEQ ID NO: 5861 - protein, 499 aa, Unknown
  Description of Unknown: Integrase B5862 sequence
  PTHR30461:SF3,SM00857,G3DSA:1.10.10.2600,IPR036162,PS51737, G3DSA:3.40.50.1390,IPR006119,IPR038109,PF07508,IPR011109, SSF53041,PTHR30461,Coil,PS51736,cd00338, PF00239
MSLYALYLRKSRSDDPEKSVEETLRRHREILDKYAIENGIDVKPEDIYEEVVSGESLYSRPEMLRLLESVESGAYEGVLCMDIDRLGRGKTSDQGIILETFKYSNTKIITPNRQYDLNDEFDEDYAEFEGFMAHRELKMIKRRMQRGIQKTIEEGGYLANAPYGYVSAKIGKRPSLAINEDEAPFVRMIFDLYVNKGMGCQHIADTINSMGAKPHRSQEFGRTSIMKIIKSPVYIGKIVWNQKTHIRKGTRGNTKHETIYNPPEKWTIVDGLHPAIIDEALYNRAQEIARIKYHSPSFTGVIENPLSGLIHCGNCNRMMTRAPHMRGGPYLLCARRGCIPSSKLPLVEDAVLMSLRNEITRLKGQQEQECEEKQELSVTATKAIDKELKATKEQLSRLHDLLEQQIYDVATFMERRTTLTKKIEKLEAAKASYQKQEKQLNIPAMIQRIELVLMQYRQCRPQEQNELLKSVIEKVIYHKEKGAKPADFKLDISLLPIFL

SEQ ID NO: 5862 - protein, 499 aa, Unknown
  Description of Unknown: Integrase B5863 sequence
  cd00338,SM00857,G3DSA:1.10.10.2600,IPR036162,PF13408, IPR025827,G3DSA:3.40.50.1390,PS51737,mobidb-lite,IPR006119, IPR038109,PF07508,IPR011109,SSF53041,PTHR30461, PS51736,Coil,PF00239
MNVVLYMRYSSDRQTEQSIEGQKRVCMDFCERQGYNVVGEYIDRATSAYKETAKRTNFCRMIRDSSNGLWQGVVVYKLDRFARNRYDSATYKVRLKKNGVKVISATENISDSPEGVILESVLEGMAEFYSKELSQKVSRGLNESAHKCNSTGGAIPLGYKTVNKKLTVDEPNAQIVKEAFDLYAGGATISEICEKFNSQGYRTKKGTEFNKNSFKTMFRNEKYIGTYTYKDIRIELGIPAIIDKETFETVQKRLSANAQAPARGKARVNYLLSQKLFCGHCGANMIGESGRSKTGETYYYYSCSTRKRFHSCKKRTIRKDLIERIVAENAMRLITPEMINTIADMAIKCNREDIESDAIIPALTADLKEINTGIKNLLKMVERGVESETLDLRLKELEKRKKDTESRLDAAKSEYLTLDKTVIVGWLSQFLSGDIEDEEFRRHLIDTLINSVTVWDEPDGGYKITTVYNLKGNTQTYRVNADGSSDMKRNSPPKKRQFS

SEQ ID NO: 5863 - protein, 499 aa, Unknown
  Description of Unknown: Integrase B5864 sequence
  PTHR30461:SF3,IPR036162,PS51737,IPR011109,PTHR30461, PF00239,G3DSA:1.10.10.2600,IPR006119,SSF53041,cd00338, SM00857,IPR025827,IPR038109,mobidb-lite,PS51736, PF13408,G3DSA:3.40.50.1390,PF07508,Coil
MNVVLYMRYSSDRQTEQSIEGQKRVCMDFCERQGYNVVGEYIDRATSAYKETAKRTNFCRMIRDSSNGLWQGVVVYKLDRFARNRYDSATYKVRLKKNGVKVISATENISDSPEGVILESVLEGMAEFYSKELSQKVSRGLNESAHKCNSTGGAIPLGYKTVDKKLTVDEPNAQIVKEAFDLYAGGATISEICEKFNSQGYRTKKGTEFNKNSFKSMFRNEKYIGTYTYKDIRIEGGIPAIIDKETFETVQKKLSANAQAPARGKARVNYLLSQKLFCGHCGANMIGDSGRSKTGETYYYYSCSTRKRFHSCKKRTIRKDLIERIVAENAMRLITPEMINTIADMAIKCNREDIESDAIIPALTADLKEINTSIKNLLKMVERGVESETLDLRLKELEKRKKDTESRLDAAKSEYLTLDKTVIVGWLSQFLSGDIEDEDFRRHLIDTLINSVTVWDEPDGGYKITTVYNLKGNTQTYRVNADGSSDMKRNSPPKKRQFS

SEQ ID NO: 5864 - protein, 499 aa, Unknown
  Description of Unknown: Integrase B5865 sequence
  PTHR30461:SF3,IPR036162,PS51737,IPR011109,PTHR30461, PF00239,G3DSA:1.10.10.2600,IPR006119,SSF53041,cd00338, SM00857,IPR025827,IPR038109,mobidb-lite,PS51736, PF13408,G3DSA:3.40.50.1390,PF07508,Coil
MNVVLYMRYSSDRQTEQSIEGQKRVCMDFCERQGYNVVGEYIDRATSAYKETAKRTNFCRMIRDSSNGLWQGVVVYKLDRFARNRYDSATYKVRLKKNGVKVISATENISDSPEGVILESVLEGMAEFYSKELSQKVSRGLNESAHKCNSTGGAIPLGYKTVNKKLTVDELNAQIVKEAFDLYAGGATISEICEKFNSQGYRTKKGTEFNKNSFKSMFRNEKYIGTYTYKDIRIEGGIPAIIDKETFETVQKRLSANAQAPARGKARVNYLLSQKLFCGHCGANMIGDSGRSKTGETYYYYSCSTRKRFHSCKKRTIRKDLIERIVAENAMRLITPEMINTIADMAIKCNREDIESDAIIPALTADLKEINTSIKNLLKMVERGVESETLDLRLKELEKRKKDTESRLDAAKSEYLTLDKTVIVGWLSQFLSGDIEDEDFRRHLIDTLINSVTVWDEPDGGYKITTVYNLKGNTQTYRVNADGSSDMKRNSPPKKRQFS

SEQ ID NO: 5865 - protein, 499 aa, Unknown
  Description of Unknown: Integrase B5866 sequence
  SM00857,G3DSA:1.10.10.2600,IPR036162,PF13408,PS51737, G3DSA:3.40.50.1390,IPR025827,IPR006119,IPR038109,PF07508, IPR011109,SSF53041,PF00239,PTHR30461,PS51736, Coil,cd00338
MKDKYALYLRKSQADQPDESIAEVLAKHRTMLMELADKMGVDVAQADIFEEVVSGESLYARPEMLRLLEQVEAGAYAGVFCMDIDRLGRGSMSEQGIILETFRLAETKIICPGKTYDLTNDADEELTEMKALFARFELKMIRKRMRRGLMQTIQAGGYVANQPYGYRKCTVGKLPSLEIDEEQAKFIRHIYKRYREGVGAHIISEELNAMGSVPNRSGRWSRNTVRHVLRNPTYAGKVAWNRVKRYKPTKNNPRPRAEHQKMEDWILVDGLHPAIIPWEEWQQVQEIRKGRYIPSQNHGQVANVLAGLIRCGNCGHNMQRMGQNKCDPRILCTEKGCVPSTKYDLVVERFLESLERIRDDLQIEVQQAKAPDISGLLAEQSTIAAKRKKTATKIDTLHDLLEDGTYDRATYKERMAKAEAEQAALLLQQADVELRIQRAMSRDKANMLSRLTSVLQLYPTLDNEGKNHILKSIVNYAVYRKSPKSKPGDFTLEIILKDI

SEQ ID NO: 5866 - protein, 499 aa, Unknown
  Description of Unknown: Integrase B5867 sequence
  PTHR30461:SF3,SM00857,G3DSA:1.10.10.2600,IPR036162,PS51737, G3DSA:3.40.50.1390,IPR006119,IPR038109,PF07508,SSF53041, IPR011109,PTHR30461,Coil,PS51736,cd00338, PF00239
MSLYALYLRKSRSDDPEKSVEETLRRHREILDKYAIENGIDVKPEDIYEEVVSGESLYSRPEMLRLLESVESGAYEGVLCMDIDRLGRGKTSDQGIILETFKYSNTKIITPNRQYDLNDEFDEDYAEFEGFMAHRELKMIKRRMQRGIQKTIEEGGYLANAPYGYVSAKIGKRPSLAINEDEAPFVRMIFDLYVNKGMGCQHIADTINSMGAKPHRSQEFGRTSIMKIIKSPVYIGKIVWNQKTHIRKGTRGNTKHETIYNPPEKWTIVDGLHPAIIDEALYNRAQEIARTKYHSPSFTGVIENPLSGLIHCGNCNRMMTRAPHMRGGPYLLCARRGCIPSSKLPLVEDAVLMSLRNEITKLKGRQKQMEEEKQNTSITVIKAIDKELKATKDQLSRLHDLLEQQVYDVSTFMERRSTLTKKIEKLEASRESFRKQEKRLNIPAMIQRIELVLTQYRDSSPQVQNELLKSVIEKVIYHKEKGAKPADFQLEVSLLPIFL

SEQ ID NO: 5867 - protein, 499 aa, Unknown
  Description of Unknown: Integrase B5868 sequence
  PTHR30461:SF3,IPR036162,PS51737,IPR011109,PTHR30461, PS00397,PF00239,G3DSA:1.10.10.2600,IPR006119,SSF53041, cd00338,SM00857,IPR025827,IPR038109,PS51736, IPR006118,PF13408,G3DSA:3.40.50.1390,PF07508,Coil
MSEKLKEVCAYIRVSTDKQEELSPESQIRLIKDYAEQHNMLLTRIYQEDKGISGKKADKRPAFQEMIATCKEKSHPYDAILLWKFSRFARNIDESTYYKSVLRKKCNVDVISISEPITEGMYGRLIEMVIEWSDEFYLYNLSGEVMRGMTQKALKGGYNSNVPIGYIKERGRDKIPQIEPKGAEIVRKIFDMYTEQNIPMGDIAAKLNKSGYRTARGSLFETRVIGYILENPFYIGKIRWNFFDKQSNKRKNPDDVIISDGKHEAIISEEQFSKAANRRAHDRLRTGYNKKRRPAPLLANWLSGMIKCSKCGASLGFAHGGTKTVPNFCCWKYSKGLCSTRNGITLKNAEKEVLSILEELSGSGYFYNYNLNVINTENTERGYILKELKSLDAKMKRIKDAYINEIDTLEEYKANKELILKRRTELNKKLESATITVHPASVHKDVDFQGLIDIIKDENSNDTKKHNALLEVVDHFVWNKETQEMTVVLNDDISLAYCK

SEQ ID NO: 5868 - protein, 499 aa, Unknown
  Description of Unknown: Integrase B5869 sequence
  PTHR30461:SF3,IPR036162,PS51737,IPR011109,PTHR30461, PS00397,PF00239,G3DSA:1.10.10.2600,IPR006119,SSF53041, cd00338,SM00857,IPR025827,IPR038109,PS51736, IPR006118,PF13408,G3DSA:3.40.50.1390,PF07508,Coil
MSEKLKEVCAYIRVSTDKQEELSPESQIRLIKDYAEQHNMLLTRIYQEDKGISGKKADKRPAFQEMIATCKEKSHPYDAILLWKFSRFARNIDESTYYKSVLRKKCNVDVISISEPITEGMYGRLIEMVIEWSDEFYLYNLSGEVMRGMTQKALKGGYNSNVPIGYIKERGRDKIPQIEPKGAEIVRKIFNMYTEQNIPMGDIAARLNQSGYRTARGSLFETRVIGYILENPFYIGKIRWNFFDKQSNKRKNPDDVIISDGKHEAIISEEQFSQAANRRAHDRLRTGYNKKRRPAPLLANWLSGMIKCSKCGASLGFAHGGTKTVPNFCCWKYSKGLCSTRNGITLKNAEKEVLSILEELSGSGYFYNYNLNVINTENTERGYILKELKSLDAKMKRIKDAYINEIDTLEEYKANKELILKRRTELNKKLESATITVHPASVHKDVDFQGLIDIIKDENSNDMEKHNALLEVVDHFVWNKETQEMTVVLNDDISLVNCK

SEQ ID NO: 5869 - protein, 499 aa, Unknown
  Description of Unknown: Integrase B5870 sequence
  PTHR30461:SF3,SM00857,G3DSA:1.10.10.2600,IPR036162,PF13408, IPR025827,G3DSA:3.40.50.1390,PS51737,IPR006119,IPR038109, PF07508,SSF53041,IPR011109,PTHR30461,PS51736, cd00338,PF00239
MAYAEYLRKSRYDNPDETLEETLARHRKLLAEYMVRNNISVLPEDIYEEVVSGDSLYARPQMLRLLEAVEAGKYEGVVCMDIQRLGRGSMTDQGAILDAFKYSHTKILTPTKTYDLDDDTDETYTEFETFMGRQELKMIKKRLQRGIKATVEAGGYISNAPYGYEQTRVGKMPTLRIKEDEASFVRMMFDMYANQGMGCQRIADTISAMGARPHRGEAFSRNTIRRILKSPVYIGKVVWNQKSCIQPGKQGNNKHMVIYHPPEKWIVVDGIHPAIVDEDIFYRVQKMFDGHSHSPTFTGVIENPLSGIVICGNCGGRMQRQMHERGGPYLMCQRRGCIVSSQLPLVEEAILNHLREEMIALPANQEPHDSDNQKDLTEALRTIDRDIRTARQQDNKLHDLLEQGVYDIDTFMERHAMLTDRIAKLSLAKERLRPQEKQLLDIEGMQQRIRAVLDAYHGATPQARSDLLKSVIERVVYHKEPGAKPAGFELEMYLKPMYL

SEQ ID NO: 5870 - protein, 499 aa, Unknown
  Description of Unknown: Integrase B5871 sequence
  PTHR30461:SF3,SM00857,G3DSA:1.10.10.2600,IPR036162,PS51737, G3DSA:3.40.50.1390,IPR006119,IPR038109,PF07508,SSF53041, IPR011109,PTHR30461,Coil,PS51736,cd00338, PF00239
MSLYALYLRKSRSDDPEKSVEETLRRHREILDKYAIENGIDVKPEDIYEEVVSGESLYSRPEMLRLLESVESGAYEGVLCMDIDRLGRGKTSDQGIILETFKYSNTKIITPNRQYDLNDEFDEDYAEFEGFMAHRELKMIKRRMQRGIQKTIEEGGYLANAPYGYVSAKIGKRPSLAINEDEAPFVRMIFDLYVNKGMGCQHIADTINSMGAKPHRSQEFGRTSIMKIIKSPVYIGKIVWNQKTHIRKGTRGNTKHETIYNPPEKWTIVDGLHPAIIDEALYNRAQEIARTKYHSPSFTGVIENPLSGLIHCGNCNRMMTRAPHMRGGPYLLCARRGCIPSSKLPLVEDAVLMSLRNEITRLKGQQEQECEEKQELSVTATKAIDKELKATKEQLSRLHDLLEQQIYDVATFMERRSTLTKKIEKLEAAKASYQKQEKQLNIPAMIQRIELVLMQYRQCRPQEQNELLKSVIEKVIYHKEKGAKPADFKLEISLLPIFL

SEQ ID NO: 5871 - protein, 499 aa, Unknown
  Description of Unknown: Integrase B5872 sequence
  PTHR30461:SF3,IPR036162,PS51737,IPR011109,PTHR30461, PF00239,G3DSA:1.10.10.2600,IPR006119,SSF53041,cd00338, SM00857,IPR025827,IPR038109,mobidb-lite,PS51736, PF13408,G3DSA:3.40.50.1390,PF07508,Coil
MNVVLYMRYSSDRQTEQSIEGQKRVCMDFCERQGYNVVGEYIDRATSAYKETAKRTNFCRMIRDSSNGLWQGVVVYKLDRFARNRYDSATYKVRLKKNGVKVISATENISDSPEGVILESVLEGMAEFYSKELSQKVSRGLNESAHKCNSTGGAIPLGYKTVDKKLTVDEPNAQIVKEAFDLYAGGATISEICEKFNSQGYRTKKGTEFNKNSFKTMLRNEKYIGTYTYKDIRIEGGIPAIIDKETFETVQKRLSANAQAPARGKARVNYLLSQKLFCGHCGANMTGDSGRSKTGETYYYYSCSTRKRFHSCKKRTIRKDLIERIVAENAMRLITPEMINTIADMAIKCNREDIESDAIIPALTADLKEINTSIKNLLKMVERGVESETLDSRLKELEKRKKDTELRLDAAKSEYLTLDKTVIVGWLSQFLSGDIEDEDFRRHLIDTLINSVTVWDEPDGGYKITTVYNLKGNTQTYRVNADGSSDMKRNSPPKKRQFS

SEQ ID NO: 5872 - protein, 499 aa, Unknown
  Description of Unknown: Integrase B5873 sequence
  cd00338,SM00857,G3DSA:1.10.10.2600,IPR036162,PF13408, IPR025827,G3DSA:3.40.50.1390,mobidb-lite,PS51737,IPR006119, IPR038109,PF07508,IPR011109,SSF53041,PTHR30461, PS51736,Coil,PF00239
MNVVLYMRYSSDRQTEQSIEGQKRVCMDFCERQGYNVVGEYIDRATSAYKETAKRTNFCRMIRDSSNGLWQGVVVYKLDRFARNRYDSATYKVRLKKNGVKVISATENISDSPEGVILESVLEGMAEFYSKELSQKVSRGLNESAHKCNSTGGAIPLGYKTVDKKLTVDEPSAQIVKEAFDLYAGGATISEICEKFNSQGYRTKKGTEFNKNSFKSMFRNEKYIGTYTYKDIRIEGGIPAIIDKKTFETVQKKLSANAQAPARGKARVNYLLSQKLFCGHCGANMIGESGRSKTGETYYYYSCSTRKRFHSCKKRTIRKDLIERIVAENAMRLITPEMINTIADMAIKCNREDIESDAIIPALTADLKEINTSIKNLLKMVERGVESETLDSRLKELEKRKKDTESRLDAAKSEYLTLDKTVIVGWLSQFLSGDIEDEDFRRHLIDTLINSVTVWDESDGGYKITTVYNLKGNTQTYRVNADGSSDMKRNSPPKKRQFS

SEQ ID NO: 5873 - protein, 499 aa, Unknown
  Description of Unknown: Integrase B5874 sequence
  cd00338,SM00857,G3DSA:1.10.10.2600,IPR036162,PF13408, IPR025827,G3DSA:3.40.50.1390,PS51737,mobidb-lite,IPR006119, IPR038109,PF07508,IPR011109,SSF53041,PTHR30461, PS51736,Coil,PF00239
MNVVLYMRYSSDRQTEQSIEGQKRVCMDFCERQGYNVVGEYIDRATSAYKETAKRTNFCRMIRDSSNGLWQGVVVYKLDRFARNRYDSATYKVRLKKNGVKVISATENISDSPEGVILESVLEGMAEFYSKELSQKVSRGLNESAHKCNSTGGAIPLGYKTVDKKLTVDEPNAQIVKEAFDLYAGGATISEICEKFNSQGYRTKKGTEFNKNSFKSMFRNEKYIGTYTYKDIRIEGGIPAIIDKETFETVQKKLSANAQAPARGKARVNYLLSQKLFCGHCGANMIGDSGRSKTGETYYYYSCSTRKRFHSCKKRTIRKDLIERIVAENAMRLITPEMINTIADMAIKCNREDIESDAIIPALTADLKEINTSIKNLLKMVERGVESETLDSRLKELEKRKKDTELRLDAAKSEYLTLDKTVIVGWLSQFLSGDIEGEDFRRHLIDTLINSVTVWDEPDGGYKITTVYNLKGNTQTYRVNADGSSDMKRNSPPKKRQFS

SEQ ID NO: 5874 - protein, 499 aa, Unknown
  Description of Unknown: Integrase B5875 sequence
  PTHR30461:SF3,IPR036162,PS51737,IPR011109,PTHR30461, PF00239,G3DSA:1.10.10.2600,IPR006119,SSF53041,cd00338, SM00857,IPR025827,IPR038109,mobidb-lite,PS51736, PF13408,G3DSA:3.40.50.1390,PF07508,Coil
MNVVLYMRYSSDRQTEQSIEGQKRVCMDFCERQGYNVVGEYIDRATSAYKETAKRTNFCRMIRDSSNGLWQGVVVYKLDRFARNRYDSATYKVRLKKNGVKVISATENISDSPEGVILESVLEGMAEFYSKELSQKVSRGLNESAHKCNSTGGAIPLGYKTVDKKLTVDEPNAQIVKEAFDLYAGGATISEICEKFNSQGYRTKKGTEFNKNSFKSMFRNEKYIGTYTYKDIRIEGGIPAIIDKETFETVQKRLSANAQAPARGKARVNYLLSQKLFCGHCGANMIGDSGRSKTGETYYYYSCSTRKRFHSCKKRTIRKDLIERIVAENAMRLITPEMINTIADMAIKCNREDIESDAIIPALTADLKEINTSIKNLLKMVERGVESETLDLRLKELEKRKKDTESRLDAAKSEYLTLDKTVIVGWLSQFLSGDIEDEDFRRHLIDTLINSVTVWDEPDGGYKITTVYNLKGNTQTYRVNADGSSDMKRNSPPKKRQFS

SEQ ID NO: 5875 - protein, 499 aa, Unknown
  Description of Unknown: Integrase B5876 sequence
  PTHR30461:SF3,SM00857,G3DSA:1.10.10.2600,IPR036162,PF13408, PS51737,IPR025827,G3DSA:3.40.50.1390,IPR006119,IPR038109, PF07508,IPR011109,SSF53041,PF00239,PTHR30461, PS51736,Coil,cd00338
MKTAVIYARYSSDTQTEQSIEGQLRVCNEYAKNNDILILRTYIDRAMTGTNDNRPDFRQMIEDSKKHDFSIVLVYKFDRFSRNKYETTKHKKTLKDNGVKVVSATEYIPDSPEAIILESMIEGYAEYYSAELSQKVKRGMNETRQKGNFTGGTIIYGYKLENHKVVIDEEKAEVVRFIYDQYAQGVYVKDIIKTLTERGIFNRGKKFARNTVYNILKNEKYSGIYRHGNEVFTNMYPQIVPTEIYENVRRKTETNKYGTRSVEVVYLLRNKIKCGYCGSPISAECGTAKNGQKIRYYKCLGRKHQSGCKKSQVRKEILEKYVLDNVCEQMQRPEILDKMATYLLQVQENRIKQNSVLTNLIKEKRQTENTINNIMQAIELGGQSATVMKRMRELEEKLTDIEKRLTIEKSQTAFRLSKEQMIDYYKSALEKEPQQLINYFIKEIQLYDDKMIIIYNTPKTINLDESQGFSFYEKNVKMPYVIQNREYYGLKDFRLIMRI

SEQ ID NO: 5876 - protein, 499 aa, Unknown
  Description of Unknown: Integrase B5877 sequence
  SM00857,G3DSA:1.10.10.2600,IPR036162,PS51737,G3DSA:3.40.50.1390, IPR006119,IPR038109,PF07508,SSF53041,IPR011109, PTHR30461,Coil,PS51736,cd00338,PF00239
MARRRRCAIYARFSSERQREESIEDQLRVCREWAAREGWEVAATYADRHISGRTDRRPEFRRMVADAEAGAGWQAVVVYKLDRFARSRADSAHYRMRLRASGVRLLSATEAIPDGPEGIIMEGVLDSFAEYYSAALGQNVRRGMHGNALKHKANGVLPMGYAVDAAGGYELDPREAPIVRGVFEIVAAGKGRKEARDWANAQGLRTRRGNELNYDSVRRMVMDERYRGVYHFGDVRDEDGMPRIVDDATWYEANDRLARKPRKYSFPLSGKLWDAQTGKPFRGTAGTSGTGRRYLYYSVPVGGGHEWRVAKDLVEGTVRDALAECFADPSTAGTLAEWAHAAMVEEAGVDTSSIEAAIADAERRSANILRAIEAGVVPDGAKERIEALREERSRLTARLSRARASVPDVGEIREFVTTQLYRQAGDRLMEDLVSKVTVDRERGEVDIRIPWSARLSGDSGSETFEREVLRSRVWWSSREHGRTLYVLPGGLLLRARMAA

SEQ ID NO: 5877 - protein, 499 aa, Unknown
  Description of Unknown: Integrase B5878 sequence
  cd00338,SM00857,G3DSA:1.10.10.2600,IPR036162, PF13408,PS51737,G3DSA:3.40.50.1390,IPR025827, IPR006119,IPR038109,PF07508,SSF53041, IPR011109,PTHR30461,PS51736,Coil,PF00239
MKKAFAYARFSTDMQREESIDAQFRAIKEYCSRNKISLINFFKDEGISGTTDNRPAFQEMIKKAEEVDYIIVHKLDRFSRNKYDSAIYKRALHQKGVRVLSVLENLDNSPESIILESVLEGMSEYYSKNLSREVKKGLYENAYKAKFNGGVPLFGYSIDENKNYIINEYQAIAVRLIFEMFSKGHSYSEIITELNKRGYKTNKGNNFKKTTLHDLLANERYIGTYVFSREDYDMENRKRNSHKFKNRNDMIIVENGNPAIIDKKTWDLVKERQSLNKKISNKAKWTYVLSPFLYCNQCGKKMSGFTRKNKIGKYYQHYRCINTSCEQKSVRTDILESEFYDAFNKLIFNDSNKKLLVEKINNFIKMKNSNNDNSKIENELKDIEQQLNNAVTFILNGSSSQTIKNKIEELEQKKYNLQNELIQKSQKHNNINSKEIINFLNRYDKLEKFSIPEQQTILKFFIDQLRYEKGKLIIKLKLAEKPPPTLKNNENGTELPAPF

SEQ ID NO: 5878 - protein, 499 aa, Unknown
  Description of Unknown: Integrase B5879 sequence
  PTHR30461:SF3,IPR036162,PS51737,IPR011109,PTHR30461, PS00397,PF00239,G3DSA:1.10.10.2600,IPR006119,SSF53041, cd00338,SM00857,IPR025827,IPR038109,PS51736, IPR006118,PF13408,G3DSA:3.40.50.1390,PF07508,Coil
MSEKLKEVCAYIRVSTDKQEELSPESQIRLIKDYAEQHNMLLTRIYQEDKGISGKKADKRPAFQEMIATCKEKSHPYDAILLWKFSRFARNIDESTYYKSVLRKKCNVDVISISEPITEGMYGRLIEMVIEWSDEFYLYNLSGEVMRGMTQKALKGGYNSNVPIGYIKERGRDKIPQIEPKGAEIVRKIFDMYTEQNIPMGDIAARLNQSGYRTARGSLFETRVIGYILENPFYIGKIRWNFFDKQSNKRKNPDDVIISDGKHEAIISEEQFSKAANRRAHDRLRTGYNKKRRPAPLLANWLSGMIKCSKCGASLGFAHGGTKTVPNFCCWKYSKGLCSTRNGITLKNAEKEVLSILEELSGSGYFYNYNLNVINTENTERGYILKELKSLDAKMKRIKDAYINEIDTLEEYKTNKELILKRRTELNEKLEAATITIHPASVHKDVDFQGLIDIIKDENSNDTKKHNALLEIVDHFVWDKETQEMTVVLNDDISLVNCK

SEQ ID NO: 5879 - protein, 499 aa, Unknown
  Description of Unknown: Integrase B5880 sequence
  PTHR30461:SF3,IPR036162,PS51737,IPR011109,PTHR30461, PF00239,G3DSA:1.10.10.2600,IPR006119,SSF53041,cd00338, SM00857,IPR025827,IPR038109,mobidb-lite,PS51736, PF13408,G3DSA:3.40.50.1390,PF07508,Coil
MNVVLYMRYSSDRQTEQSIEGQKRVCMDFCERQGYNVVGEYIDRATSAYKETAKRTNFCRMIRDSSNGLWQGVVVYKLDRFARNRYDSATYKVRLKKNGVKVISATENISDSPEGVILESVLEGMAEFYSKELSQKVSRGLNESAHKCNSTGGAIPLGYKTVNKKLTVDEPNAQIVKEAFDLYAGGATISEICEKFNSQGYRTKKGTEFNKNSFKTMFRNEKYIGTYTYKDIRIEGGIPAIIDKETFKAVQKRLSANAQAPARGKARVNYLLSQKLFCGHCGANMIGESGRSKTRETYNYYSCSTRKRFHSCKKRTIRKDLIERIVAENAMRLITPEMINTIADMAIKCNREDIESDAIIPALTADLKEINTSIKNLLKMVERGVESETLDSRLKELEKRKKDTESRLDAAKSEYLTLDKTVIVGWLSQFLSGDIEDEDFRRHLIDTLINSVTVWDEPDGGYKITTVYNLKGNTQTYRVNADGSSDMKRNSPPKKRQFS

SEQ ID NO: 5880 - protein, 499 aa, Unknown
  Description of Unknown: Integrase B5881 sequence
  PTHR30461:SF3,IPR036162,PS51737,IPR011109,PTHR30461, PF00239,G3DSA:1.10.10.2600,IPR006119,SSF53041,cd00338, SM00857,IPR025827,IPR038109,mobidb-lite,PS51736, PF13408,G3DSA:3.40.50.1390,PF07508,Coil
MNVVLYMRYSSDRQTEQSIEGQKRVCMDFCERQGYNVVGEYIDRATSAYKETAKRTNFCRMIRDSSNGLWQGVVVYKLDRFARNRYDSATYKVRLKKNGVKVISATENISDSPEGVILESVLEGMAEFYSKELSQKVSRGLNESAHKCNSTGGAIPLGYKTVDKKLTVDEPSAQIVKEAFDLYAGGATISEICEKFNSQGYRTKKGTEFNKNSFKSMFRNEKYIGTYTYKDIRIEGGIPAIIDKETFETVQKRLSANAQAPARGKARVNYLLSQKLFCGHCGANMIGESGRSKTGETYYYYSCSTRKRFHSCKKRTIRKDLIERIVAENAMRLITPEMINTIADMAIKCNREDIESDAIIPALTADLKEINTSIKNLLKMVERGVESETLDSRLKELEKRKKDTESRLDAAKSEYLTLDKTVIVGWLSQFLSGDIEDEDFRRHLIDTLINSVTVWDESDGGYKITTVYNLKGNTQTYRVNADGSSDMKRNSPPKKRQFS

SEQ ID NO: 5881 - protein, 499 aa, Unknown
  Description of Unknown: Integrase B5882 sequence
  PTHR30461:SF3,SM00857,IPR006118,G3DSA:1.10.10.2600,IPR036162, PS51737,G3DSA:3.40.50.1390,IPR006119,IPR038109,PF07508, IPR011109,SSF53041,PF00239,PTHR30461,PS00397, PS51736,Coil,cd00338
MSEKLKEVCAYIRVSTDKQEELSPESQIRLIKDYAEQHNMLLTRIYQEDKGISGKKADKRPAFQEMIATCKEKSHPYDAILLWKFSRFARNIDESTYYKSVLRKKCNVDVISISEPITEGMYGRLIEMVIEWSDEFYLYNLSGEVMRGMTQKALKGGYNSNVPIGYIKERGRDKIPQIEPKGAEIVRKIFNMYTEQNIPMGDIAARLNQSGYRTARGSLFETRVIGYILENPFYIGKIRWNFFDKQSNKRKNPDDVIISDGKHEAIISEEQFSKAANRRAHDRLRTGYNKKRRPAPLLANWLSGMIKCSKCGASLGFAHGGAKTVPNFCCWKYSKGLCSTRNGITLKNAEKEVLSILEELSGSGYFYNYNLNVINTENTERGYILKELKSLDAKMKRIKDAYINEIDTLEEYKANKELILKRRTELNKKLESSTITVHPASVHKDVDFQGLIDIIKDENSNDMEKHNALLEVVDHFVWDKETQEMTVVLNDDISLAYCK

SEQ ID NO: 5882 - protein, 499 aa, Unknown
  Description of Unknown: Integrase B5883 sequence
  PTHR30461:SF3,SM00857,IPR006118,G3DSA:1.10.10.2600,IPR036162, PS51737,G3DSA:3.40.50.1390,IPR006119,IPR038109,PF07508, SSF53041,IPR011109,PF00239,PTHR30461,PS00397, PS51736,Coil,cd00338
MSEKLKEVCAYIRVSTDKQEELSPESQIRLIKDYAEQYNMLLTRIYQEDKGISGKKADKRPAFQEMIATCKDKAHPYDAILLWKFSRFARNIDESTYYKSVLRKKCNVDVISVSEPIVEGMYGRLIEMVIEWSDEFYLYNLSGEVMRGMTQKALKGGYNSNVPIGYIKERGRDKIPQIELKGAEIVRKIFDMYTEQNIPMGDIAARLNQSGYRTARGSLFETRVVGYILENPFYIGKIRWNFFDKQSNKRKNPDDVIISDGKHEAIISDEQFSKAANRRAHDRLRTGYNKKRRPTPLLANWLSGMIKCSKCGASLGFAHGTDKVVPNFCCWKYSKGLCSTRNGITLKNAEKEVLTILEELSGSGYFYNYNLNVINTENTERAYILKELRSLDTKMKRIKDAYINEIDTLEEYKANKELINKRREELNKKLEAASVTVHPAAVHKAVDFQALIDIIKDENSNDTEKHNALLEVVDYFVWDKETQEMTVVLNSDISLVNCK

SEQ ID NO: 5883 - protein, 499 aa, Unknown
  Description of Unknown: Integrase B5884 sequence
  PTHR30461:SF3,IPR036162,PS51737,IPR011109,PTHR30461, PF00239,G3DSA:1.10.10.2600,IPR006119,SSF53041,cd00338, SM00857,IPR025827,IPR038109,PS51736,mobidb-lite, PF13408,G3DSA:3.40.50.1390,PF07508,Coil
MSAKTDHRPDFQRMIKDSAKGLFDVIIVWKLDRFARNRYDSAHYKALLRKYGVKVLSATENISEGPEGIILESMLEGMAEYYSAELSEKVIRGHTENALKCKYNGGTPTFGFIIDKEKCYQIDPHTAPVVLESFTRYADGATMKEVMQYLVESGFTTVRGRKIDLNFIARLLKNRKYIGEYSYRHIVTPGGIPAIVPQDLFDRVQQRLEANRKAPARHKAEDDYLLTTKLFCGTCGAMMVGESGTSASKGRKYHYYRCVNTKKHKTCNAKHKSVRKIPLENAVVSAVMAKVMNDDFVEYIADRVLEIQGMESSELPALRQQLAETERGIENMLNAIQMGIINQSTKQRLDELEERKKEIELRIIQEEIKKPMLSREDVTFWICRFRKLDVSRLEERRRLIDSFVNSVTIFDDYLLITFNYKDGETRLDFKDIESSDLQSVGGRDRLRVDIPFRISTCFVLLSIRYRRLPGMPSSGQQSSYATGTGKDSACGHTLSPAFR

SEQ ID NO: 5884 - protein, 499 aa, Unknown
  Description of Unknown: Integrase B5885 sequence
  PTHR30461:SF3,SM00857,G3DSA:1.10.10.2600,IPR036162,PF13408, PS51737,G3DSA:3.40.50.1390,IPR025827,IPR006119,IPR038109, PF07508,IPR011109,SSF53041,PTHR30461,Coil, PS51736,cd00338,PF00239
MKKAVIYARYSSDMQREESIDAQVRACTYYAHQYQFEVVRVYADRAQSGKRTKNREQFLQMIEDASQKEFEVILVHKLNRFGRNTLEVLEYKNSLEDMGIELISVTERLESTPEGKLMLIIIAGMNEFYSDNLSQEVMKGLKENAYQCKFTGGVPALGYKVDPESKKLVVDEQEAPIVRLIFQRYADGWSYNMIIDELDRLGYHTKYGRPFGKNSLFELLRNEKYVGIYTFNRAAKRKRDGSRNYHATKDPSEIIRIPGGCPALIDKETFEKVQNIMEQNKRLNIQQHGKKVYILSGKLFCANCGARMYGNCKTTRGQAHFYYVCSNSWRHHNCSARHIPAEELENEIVDMLQNRICNSEFLNNVSQQLQDDMQKGIEATQKQRKSTAKQLQTVNFKIKNLLNLASQGIDIEELGEAISSLKQEKETLITTLDAMDSLPSAMSKENPIRQSLTRLSSLEAPEQASILRQYVDKIFVSSQKESTVPIQVQICLYSTSPEQ

SEQ ID NO: 5885 - protein, 499 aa, Unknown
  Description of Unknown: Integrase B5886 sequence
  PTHR30461:SF3,cd00338,SM00857,IPR006118,G3DSA:1.10.10.2600, IPR036162,PS51737,G3DSA:3.40.50.1390,IPR006119,IPR038109, PF07508,SSF53041,IPR011109,PTHR30461,PS00397, PS51736,Coil,PF00239
MSEKLKEVCAYIRVSTDKQEELSPESQIRLIKDYAEPHNMLLTRIYQEDHGISGKKADKRPAFQEMIATCKDKSHPYDAILLWKFSRFARNIDESTYYKSVLRKKCNVDVISVSEPIVEGMYGRLIEMVIEWSDEFYLYNLSGEVMRGMTQKALKGGYNSNVPIGYIKERGKDKIPQIEPKGAEIVRKIFDMYTEQNIPMSDIAAKLNKSGYRTARGSFFETRVVGYILENPFYIGKIRWNFFDKQSNKRKNPDDVIISDGKHEAIISDEQFSKAANRRAHDRLRTGYNKKRRPTPLLANWLSGMIKCSKCGASLGFAHGTAKVVPNFCCWKYSKGLCSTRNGITLKNAEKEVLTILEELSGSGYFYNYNLNVINTENTERAYILKELRSLDTKMKRIKDAYINEIDTLEEYKANKELINKRREELNKKLEAASVTVHPAAVHKAVDFQALIDIIKDENSIDTEKHNALLEVVDHFVWDKETQEMTVVLNSDISLVNCK

SEQ ID NO: 5886 - protein, 499 aa, Unknown
  Description of Unknown: Integrase B5887 sequence
  PTHR30461:SF3,IPR036162,PS51737,IPR011109,PTHR30461, PF00239,G3DSA:1.10.10.2600,IPR006119,SSF53041,cd00338, SM00857,IPR025827,IPR038109,mobidb-lite,PS51736, PF13408,G3DSA:3.40.50.1390,PF07508,Coil
MNVVLYMRYSSDRQTEQSIEGQKRVCMDFCERQGYNVVGEYIDRATSAYKETAKRTNFCRMIRDSSNGLWQGVVVYKLDRFARNRYDSATYKVRLKKNGVKVISATENISDSPEGVILESVLEGMAEFYSKELSQKVSRGLNESAHKCNSTGGAIPLGYKTVDKKLTVDEPSAQIVKEAFDLYAGGATISEICEKFNSQGYRTKKGTEFNKNSFKSMFRNEKYIGTYTYKDIRIEGGIPAIIDKETFETVQKRLSANAQAPARGKARVNYLLSQKLFCGHCGANMIGDSGRSKTGETYYYYSCSTRKRFHSCKKRTIRKDLIERIVAENAMRLITPEMINTIADMAIKCNREDIESDAIIPALTADLKEINTSIKNLLKMVERGVESETLDSRLKELEKRKKDTELRLDAAKSEYLTLDKTVIVGWLSQFLSGDIEDEDFRRHMIDTLINSVTVWDEPDGGYKITTVYNLKGNTQTYRVNADGSSDMKRNSPPKKRQFS

SEQ ID NO: 5887 - protein, 499 aa, Unknown
  Description of Unknown: Integrase B5888 sequence
  SM00857,G3DSA:1.10.10.2600,IPR036162,PS51737,G3DSA:3.40.50.1390, IPR006119,IPR038109,PF07508,IPR011109,SSF53041, PTHR30461,PS51736,cd00338,PF00239
MKDKYAQYLRKSQADQPDESIAEVLVKHRTMLMELADKMGVDVAQADIFEEVVSGESLYARPEMLRLLEQVEAGAYAGVFCMDIDRLGRGSMSEQGIILETFRLAETKIICPGKTYDLTNDADEELTEMKALFARFELKMIRKRMRRGLMQTIQAGGYVANQPYGYRKCTVGKLPSLEINEEQAKFIRHIYKRYLEGAGAHIISDELNAMGSVPNRSGRWSRNTVRHVLRNPTYAGKVAWNRVKRYKPTKNNPRPRAEHQKMEDWILVDGLHPAIIPWEEWQQVQEIRKGRYIPSQNHGQVANVLAGLIRCGNCGHNMQRMGQNKCDPRILCTEKGCIPSTKYDLVVERFMESLERIRDDLQIEVQQAKTPDISGLTSEQRAVAAKLKKTASKIDTLHDLLEDGTYDRATYKERMAKAEAEQGSLLLQQADVEQRIQRAMSRDKANMLSKLTSVLQLYPTLDNEGKNQILKSIVNYAVYRKSPKSKPGDFTLEIILKDI

SEQ ID NO: 5888 - protein, 499 aa, Unknown
  Description of Unknown: Integrase B5889 sequence
  PTHR30461:SF3,IPR036162,PS51737,IPR011109, PTHR30461,PS00397,PF00239,G3DSA:1.10.10.2600, IPR006119,SSF53041,cd00338,SM00857,IPR025827,IPR038109 ,PS51736,IPR006118,PF13408,G3DSA:3.40.50.1390,PF07508,Coil
MSEKLKEVCAYIRVSTDKQEELSPESQIRLIKDYAEQHNMLLTRIYQEDKGISGKKADKRPAFQEMIATCKEKSHPYDAILLWKFSRFARNIDESTYYKSVLRKKCNVDVISISEPITEGMYGRLIEMVIEWSDEFYLYNLSGEVMRGMTQKALKGGYNSNVPIGYIKERGRDKIPQIEPKGAEIVRKIFDMYTEQNIPMGDIAARLNQSGYRTARGSLFETRVIGYILENPFYIGKIRWNFFNKQSNKRKNPDDVIISDGKHEAIISEEQFSKAANRRAHDRLRTGYNKKRRPAPLLANWLSGMIKCSKCGASLGFAHGGTKTVPNFCCWKYSKGLCSTRNGITLKNAEKEVLSILEELSGSGYFYNYNLNVINTENTERGYILKELKSLDAKMKRIKDAYINEIDTLEEYKANKELILKRRTELNEKLEAATITVHPASVHKDVDFQGLIDIIKDENSNDMEKHNALLEVVDHFVWNKETQEMTVVLNDDISLVNCK

SEQ ID NO: 5889 - protein, 499 aa, Unknown
  Description of Unknown: Integrase B5890 sequence
  PTHR30461:SF3,SM00857,G3DSA:1.10.10.2600,IPR036162,PF13408, IPR025827,PS51737,G3DSA:3.40.50.1390,IPR006119,IPR038109, PF07508,SSF53041,IPR011109,PTHR30461,Coil, PS51736,cd00338,PF00239
MNAVIYARFSSHSQREQSIEGQLRDCYEYAKRYDINIVGEYIDRAISGMTDDRPDFQRMIADAPKKQFERIIVWKLDRFARNRYDSALYKHKLKQYGIRVISAMENVGEGDESILLEALLEASAEYYSLDLKKKILRGQRETIAKGRWCGGPIPYGYKAVDGKLVADEKTAPIIRYVFEQYAQGVPMKEIIDELKRRGVRSSRGGELTYTTFSRALTNPVYIGNFMYKGELVPGVADALIDEDTYNKVQIIVKANAHAPAANKAKVEYLLQGKAFCGHCGSHMVGESGKSRNGDVYYYYSCAARKKAHKCRKKNEKKDFIEWYVVEQTLNYVLTPTRMRDIAKAVVAEYDKEFSGSKVQEYEKAIKQYERELDKLVDALVDAPKVAHKRIYEKMETLETQKASMENELVKLRIASEIRFTEEEVRAWLRRFCTGDLFDPEFRRNIIDTFINCIYLYDDRIIIFYNIKGGKQVSFVDLAESLDSESESSGSDLNANAPPN

SEQ ID NO: 5890 - protein, 499 aa, Unknown
  Description of Unknown: Integrase B5891 sequence
  PTHR30461:SF3,cd00338,SM00857,IPR006118,G3DSA:1.10.10.2600, IPR036162,PS51737,G3DSA:3.40.50.1390,IPR006119,IPR038109, PF07508,IPR011109,SSF53041,PTHR30461,PS00397, PS51736,Coil,PF00239
MSENLKEVCAYIRVSTDKQEELSPESQIRLIKDYAEQHNMLLTRIYQEDKGISGKKADKRPAFQEMIATCKDKSHPYDAILLWKFSRFARNIDESTYYKSVLRKKCNVDVISVSEPITEGMYGRLIEMVIEWSDEFYLYNLSGEVMRGMTQKALKGGYNSNVPIGYVKERGRDKIPQIEPKGAEIVKKIFDMYTEQNIPMGDIAARLNKAGYRTARGSLFETRVVGYILENPFYIGKIRWNYFDKQSNKRKSPDNVIISKGKHKAIISDEQFSKAANRRAHDRLRTGYNKKRRPAPLLANWLSGMIKCSKCGGSLGFAHGGAKTVPNFCCWKYSKGLCSTRNGITLKNAEKEVLTILEELSSSGYFYNYNLNVINTENTERAYILKELRSLDTKMKRIKDAYINEIDTLEEYKANKELINKRREELNKKLEAASVTVHPAAVHKAVDFQALIDIIKDENSNDTEKHNALLEVVEHFVWDKETQEMTVVLNSDISLVNCK

SEQ ID NO: 5891 - protein, 499 aa, Unknown
  Description of Unknown: Integrase B5892 sequence
  PTHR30461:SF3,SM00857,G3DSA:1.10.10.2600,IPR036162,PF13408, PS51737,IPR025827,G3DSA:3.40.50.1390,IPR006119,IPR038109, PF07508,IPR011109,SSF53041,PTHR30461,PS51736, cd00338,PF00239
MKIRRVQPSPILQKKLRVAAYARVSVDTLHHSLAAQVSYYSNLIQKNPAWEYAGVYADEGITGTSTTHRTEFKRLIADCNAGKIDLVLVKSISRFARDTVDCLNTVRQLKEKGIAVRFERENIDSMSEDGELLLTLLASFAQEESRSIGDNIRWGVRRRFAEGIPNGHKAPYGYQWDGEMFRIVPSEGEIVKEIYRRYLAGESAYAIANTLAGRGITGRQGRPIEQTTVKDILSNISYTGTMALQKNYITEGHIRKRNKGELPMYLVEGIFELLISRDDFDKAQEIRKRRAERAVNRNPVLMPLSGMVKCGCCGSGFSRRTAGKYRRWACNTRERKGRESCDSRPIKEEELVAAVRTVMEKEDFDATKLRRKVSKIVIHGDRIDFHLVNGRIKKTARIYNGQRGSNPFTNKVYCASCGSKCERDTWTKGTKVWSCSQPRTKCQLRRLPESELREAAASFFGNGYEGKIVQNVERIIISDDEVVFHLKEGGAYRWQRPCG

SEQ ID NO: 5892 - protein, 499 aa, Unknown
  Description of Unknown: Integrase B5893 sequence
  SM00857,G3DSA:1.10.10.2600,IPR036162,PS51737,G3DSA:3.40.50.1390, IPR006119,IPR038109,PF07508,IPR011109,SSF53041, PTHR30461,Coil,PS51736,cd00338,PF00239
MARRRRCAIYARFSSERQREESIEDQVRVCREWAAREGWEVVAEYADRHISGRTDRRPEFRRMVADAESGAGWQAVVVYKLDRFARSRADSARYRVRLRASGVRLLSATEAIPDGPEGIIMEGVLDSFAEYYSAALGQNVRRGMHGNALKHKANGVLPMGYAVDAAGGYELDPREASIVRGVFEMVAAGKGRKEARDWANDQGLRTRRGNELNYDSVRRMVMDERYRGVYHFGDVRDEGGMPRIVDDATWYEANDKLARKPRRYSFPLSGKLWDAQTGKPFRGTAGTSGTGRRYLYYSVPTGAGHEWRVAKDLVEGTVRDALAECFADPSTAGTLAEWAHAAMVEEAGVDTSSIETAIADAERRSANILRAIEAGVVPDGARERIEALREERSRLTARLSRARASVPDVEEIREFVTTQLYRQAGDRLMEDLVSKVTVDRERGEVDIRIPWSARLSGDSESETFEREVLRSRVWWSSREHGRTLYVLPGGLLLRARMAA

SEQ ID NO: 5893 - protein, 499 aa, Unknown
  Description of Unknown: Integrase B5894 sequence
  PTHR30461:SF3,IPR036162,PS51737,IPR011109,PTHR30461, PF00239,G3DSA:1.10.10.2600,IPR006119,SSF53041,cd00338, SM00857,IPR025827,IPR038109,mobidb-lite, PS51736,PF13408,G3DSA:3.40.50.1390,PF07508,Coil
MNVVLYMRYSSDRQTEQSIEGQKRVCMDFCERQGYNVVGEYIDRATSAYKETAKRTNFCRMIRDSSNGLWQGVVVYKLDRFARNRYDSATYKVRLKKNGVKVISATENISDSPEGVILESVLEGMAEFYSKELSQKVSRGLNESAHKCNSTGGAIPLGYKTVDKKLTVDEPSAQIVKEAFDLYAGGATISEICEKFNSQGYRTKKGTEFNKNSFKSMFRNEKYIGTYTYKDIRIEGGIPAIIDKETFETVQKRLSANAQAPARGKARVNYLLSQKLFCGHCGANMIGDSGRSKTGETYYYYSCSTRKRFHSCKKRTIRKDLIERIVAENAMRLITPEMINTIADMAIKCNREDIESDAIIPALTADLKEINTSIKNLLKMVERGVESETLDSRLKELEKRKKDTELRLDAAKSEYLTLDKTVIVGWLSQFLSGDIEDEDFRRHLIDTLINSVTVWDEPDGGYKITTVYNLKGNTQTYRVNADGSSDMKRNSPPKKRQFS

SEQ ID NO: 5894 - protein, 499 aa, Unknown
  Description of Unknown: Integrase B5895 sequence
  PTHR30461:SF3,cd00338,SM00857,G3DSA:1.10.10.2600,IPR036162, PF13408,IPR025827,G3DSA:3.40.50.1390,PS51737,IPR006119, IPR038109,PF07508,SSF53041,IPR011109,PTHR30461, PS51736,Coil,PF00239
MENAVIYARFSSHNQQEQSIDGQLRYCKDYAERNAMKVINVYSDRAISGTTDERPQFQQMIRDAKNKQFKYILVWKLDRFARNRYDSAVYKNQLKKCGVRVLSVTEFVGEGSEGVLLESILEAMAETYSLQLSENVRRGMRESVRHGLSCGGTAPLGYDVVNKRYVINEKEAEIVRYVYTQYASGKGKKEIINDLNAKGWRNKKGTKFAFSSLDRLLKNRKYIGEYNYQDITIKDVIPALVDVDLFDTVQNILTKNKRQGGARSYKREYLLSTKLFCGYCGASITGETSTGRHGVKFGYYVCRNQKFHKNNCNKKRERQEELEEIIVRKTLEMYSDRKFIKEVAQKVVDLYNCEFGDNHLTTLEENKNSLEAKFDELSHALLKTTNERMLDKLNKEIEQIDIELNELELEIAREKSISQAKMNVSDVVEFIKNVTNGNIRDKEFQKQIIDTFINAIYVFDDKIIIYYNGSKEAEKVSYNDMLKDISGATTTDTAQPKKT

SEQ ID NO: 5895 - protein, 499 aa, Unknown
  Description of Unknown: Integrase B5896 sequence
  PTHR30461:SF3,IPR036162,PS51737,IPR011109,PTHR30461, PF00239,G3DSA:1.10.10.2600,IPR006119,SSF53041,cd00338, SM00857,IPR025827,IPR038109,mobidb-lite,PS51736, PF13408,G3DSA:3.40.50.1390,PF07508,Coil
MNVVLYMRYSSDRQTEQSIEGQKRVCMDFCERQGYNVVGEYIDRATSAYKETAKRTNFCRMIRDSSNGLWQGVVVYKLDRFARNRYDSATYKVRLKKNGVKVISATENISDSPEGVILESVLEGMAEFYSKELSQKVSRGLNESAHKCNSTGGAIPLGYKTVDKKLTVDEPNAQIVKEAFDLYAGGATISEICEKFNSQGYRTKKGTEFNKNSFKTMLRNEKYIGTYTYKDIRIEGGIPAIIDKETFETVQKRLSANAQAPARGKARVNYLLSQKLFCGHCGANMTGDSGRSKTGETYYYYSCSTRKRFHSCKKRTIRKDLIERIVAENAMRLITPEMINTIADMAIKCNREDIESDAIIPALTADLKEINTSIKNLLKMVERGVESETLDSRLKELEKRKKDTESRLDAAKSEYLTLDKTVIVGWLSQFLSGDIEDEDFRRHLIDTLINSVTVWDESDGGYKITTVYNLKGNTQTYRVNADGSSDMKRNSPPKKRQFS

SEQ ID NO: 5896 - protein, 499 aa, Unknown
  Description of Unknown: Integrase B5897 sequence
  PTHR30461:SF3,IPR036162,PS51737,IPR011109,PTHR30461, PF00239,G3DSA:1.10.10.2600,IPR006119,SSF53041,cd00338, SM00857,IPR025827,IPR038109,mobidb-lite,PS51736, PF13408,G3DSA:3.40.50.1390,PF07508,Coil
MNVVLYMRYSSDRQTEQSIEGQKRVCMDFCERQGYNVVGEYIDRATSAYKETAKRTNFCRMIRDSSNGLWQGVVVYKLDRFARNRYDSATYKVRLKKNGVKVISATENISDSPEGVILESVLEGMAEFYSKELSQKVSRGLNESAHKCNSTGGAIPLGYKTVDKKLTVDEPSAQIVKEAFDLYAGGATISEICEKFNSQGYRTKKGTEFNKNSFKSMFRNEKYIGTYTYKDIRIEGGIPAIIDKETFETVQKRLSANAQAPARGKARVNYLLSQKLFCGHCGANMIGESGRSKTGETYYYYSCSTHKRFHSCKKRTIRKDLIERIVAENAMRLITPEMINTIADMAIKCNREDIESDAIIPALTADLKEINTSIKNLLKMVERGVESETLDSRLKELEKRKKDTESRLDAAKSEYLTLDKTVIVGWLSQFLSGDIEDEDFRRHLIDTLINSVTVWDEPDGGYKITTVYNLKGNTQTYRVNADGSSDMKRNSPPKKRQFS

SEQ ID NO: 5897 - protein, 499 aa, Unknown
  Description of Unknown: Integrase B5898 sequence
  PTHR30461:SF3,IPR036162,PS51737,IPR011109,PTHR30461, PS00397,PF00239,G3DSA:1.10.10.2600,IPR006119,SSF53041, cd00338,SM00857,IPR025827,IPR038109,PS51736, IPR006118,PF13408,G3DSA:3.40.50.1390,PF07508,Coil
MSEKLKEVCAYIRVSTDKQEELSPESQIRLIKDYAEQHNMLLTRIYQEDKGISGKKADKRPAFQEMIATCKEKSHPYDAILLWKFSRFARNIDESTYYKSVLRKKCNVDVISISEPITEGMYGRLIEMVIEWSDEFYLYNLSGEVMRGMTQKALKGGYNSNVPIGYIKERGRDKIPQIEPKGAEIVRKIFNMYTEQNIPMGDIAARLNQSGYRTARGSLFETRVIGYILENPFYIGKIRWNFFNKQSNKRKNPDDVIISDGKHEAIISEEQFSQAANRRANDRLRTGYNKKRRPAPLLANWLSGMIKCSKCGASLGFAHGGTKTVPNFCCWKYSKGLCSTRNGITLKNAEKEVLSILEELSGSGYFYNYNLNVINTENTERGYILKELKSLDAKMKRIKDAYINEIDTLEEYKANKELILKRRTELNKKLESATITVHPASVHKDVDFQGLIDIIKDENSNDMEKHNALLEVVDHFVWNKETQEMTVVLNDDISLAYCK

SEQ ID NO: 5898 - protein, 499 aa, Unknown
  Description of Unknown: Integrase B5899 sequence
  PTHR30461:SF3,IPR036162,PS51737,IPR011109,PTHR30461, PF00239,G3DSA:1.10.10.2600,IPR006119,SSF53041,cd00338, SM00857,IPR025827,IPR038109,mobidb-lite,PS51736, PF13408,G3DSA:3.40.50.1390,PF07508,Coil
MNVVLYMRYSSDRQTEQSIEGQKRVCMDFCERQGYNVVGEYIDRATSAYKETAKRTNFCRMIRDSSNGLWQGVVVYKLDRFARNRYDSATYKVRLKKNGVKVISATENISDSPEGVILESVLEGMAEFYSKELSQKVSRGLNESAHKCNSTGGAIPLGYKTVDKKLTVDEPNAQIVKEAFDLYAGGATISEICEKFNSQGYRTKKGTEFNKNSFKSMFRNEKYIGTYTYKDIRIEGGIPAIIDKETFETVQKRLSANAQAPARGKARVNYLLSQKLFCGHCGANMIGDSGRSKTGETYYYYSCSTRKRFHSCKKRTIRKDLIERIVAENAMRLITPEMINTIADMAIKCNREDIESDAIIPALTADLKEINTSIKNLLKMVERGVESETLDSRLKELEKRKKDTELRLDAAKSEYLTLDKTVIVGWLSQFLSGDIEDEDFRRHLIDTLINSVTVWDEPDGGYKITTVYNLKGNTQTYRVNADGSSDMKRNSPPKKRQFS

SEQ ID NO: 5899 - protein, 499 aa, Unknown
  Description of Unknown: Integrase B5900 sequence
  PTHR30461:SF3,IPR036162,PS51737,IPR011109,PTHR30461, PS00397,PF00239,G3DSA:1.10.10.2600,IPR006119,SSF53041, cd00338,SM00857,IPR025827,IPR038109,PS51736, IPR006118,PF13408,G3DSA:3.40.50.1390,PF07508,Coil
MSEKLKEVCAYIRVSTDKQEELSPESQIRLIKDYAEQHNMLLTRIYQEDKGISGKKADKRPAFQEMIATCKEKSHPYDAILLWKFSRFARNIDESTYYKSILRKKCNVDIISISEPITEGMYGRLIEMVIEWSDEFYLYNLSGEVMRGMTQKALKGGYNSNVPIGYIKERGRDKIPQIEPKGAEIVRKIFDMYTEQNIPMGDIAARLNQSGYRTARGSLFETRVIGYILENPFYIGKIRWNFFNKQSNKRKNPDDVIISDGKHEAIISEEQFSKAANRRAHDRLRTGYNKKRRPAPLLANWLSGMIKCSKCGASLGFAHGGTKTVPNFCCWKYSKGLCSTRNGITLKNAEKEVLSILEELSGSGYFYNYNLNVINTENTERGYILKELKSLDAKMKRIKDAYINEIDTLEEYKANKELILKRRTELNEKLEAATITVHPASVHKDVDFQGLIDIIKDENSNDMEKHNALLEVVDHFVWNKETQEMTVVLNDDISLAYCK

SEQ ID NO: 5900 - protein, 499 aa, Unknown
  Description of Unknown: Integrase B5901 sequence
  PTHR30461:SF3,SM00857,G3DSA:1.10.10.2600,IPR036162,PS51737, G3DSA:3.40.50.1390,IPR006119,IPR038109,PF07508,IPR011109, SSF53041,PF00239,PTHR30461,PS51736,Coil, cd00338
MQTAVIYARYSSDKQTEQSIEGQLYDCYNYAKQHGITVVQEYIDRAMTGKNDDRPAFQQMLHESAMHKWDSVIVWKLDRFARNTIDSAVNRQILAKNGVKLLSVMESFGDDASGQMMTHIIEAINEYYSADLREKTIRGMRQSAMKAQTTGHIPLGYKVVDKKLVIDDETRIIPETVFRMYAEGERLTDIAEHLNAQGYRNRRGRPFTTNSFYNMLANEKYIGIYKYDDIVIEGGIPQMIPNEVFEAVREKLITNRKRAAKNTAKADYYLSGKLYRGHCGEPMSGLSGTGRNGVKHYYYRCNGVQKKSGCHKKLENKYLIEDEVCRAARSAFEQMDKAETAETIYQMYLQTVRNEYAPAELEKELTECTKQAENVVNAIAQTGGNQLLYDKVRELEERKEQLGSALRLSQAMTDNVPSVEQITVFIDDILATDINTIEGKKAIADIMISKVYVYDDKLTVIFKDKDGKCVDIPLSAVSDSSSADCAPSALGSQANFKAT

SEQ ID NO: 5901 - protein, 499 aa, Unknown
  Description of Unknown: Integrase B5902 sequence
  PTHR30461:SF3,IPR036162,PS51737,IPR011109,PTHR30461, PF00239,G3DSA:1.10.10.2600,IPR006119,SSF53041,cd00338, SM00857,IPR025827,IPR038109,mobidb-lite,PS51736, PF13408,G3DSA:3.40.50.1390,PF07508,Coil
MNVVLYMRYSSDRQTEQSIEGQKRVCMDFCERQGYNVVGEYIDRATSAYKETAKRTNFCRMIRDSSNGLWQGVVVYKLDRFARNRYDSATYKVRLKKNGVKVISATENISDSPEGVILESVLEGMAEFYSKELSQKVSRGLNESAHKCNSTGGAIPLGYRTVNKKLTVDEPNAQIVKEAFDLYAGGATISEICEKFNSQGYRTKKGTEFNKNSFKSMFRNEKYIGTYTYKDIRIEGGIPAIIDKETFETVQKRLSANAQAPARGKARVNYLLSQKLFCGHCGANMIGDSGRSKTGETYYYYSCSTRKRFHSCKKRTIRKDLIERIVAENAMRLITPEMINTIADMAIKCNREDIESDAIIPALTADLKEINTSIKNLLKMVERGVESETLDSRLKELEKRKKDTESRLDAAKSEYLTLDKTVIVGWLSQFLSGDIEDEDFRRHLIDTLINSVTVWDEPDGGYKITTVYNLKGNTQTYRVNADGSSDMKRNSPPKKRQFS

SEQ ID NO: 5902 - protein, 499 aa, Unknown
  Description of Unknown: Integrase B5903 sequence
  cd00338,SM00857,IPR036162,PS51737,G3DSA:3.40.50.1390, IPR006119,PF07508,IPR011109,SSF53041,PTHR30461, PS51736,Coil,PF00239
MQKQNGLAFSYIRFSSKKQEQGDSVRRQTELAENYAQANNLILSEKNFQDLGISAFKEGNRASLADMLQAIEQGSISPGSTIIIESLDRLSRRGIDVTQQIIKQILQHQVYIASLVDGLLLNRESVNDLVSVIRIALAADLAHKESEKKSQRLRETKGQQRQRALNGEVINKSLPFWLERKDNAYVFSDRLDAVKRIIELKKKGLGNNKIAKTLNDEEFAPLRSAGWNHTTVAKTIKSVALYGAYQTSETTKDRKVILLDIVEDYYPAVISKEEFMLLQSDQKQNKPGYKSEKNAFTGLLKHECGGALVRKFHTVSGKVYEYHVCANARDGKCSVTQNFKNIETAMFKILRELKMEKKTSLDATLLQERSDVQEKIQDLNNMLLSMKKVPASVLQTIGSLEDKLQALDQAITEQNNRVMNEQSVDLNLLQEVQDPVELNMMLKRVIREITVFNLKKSWRIKVSYINGHSQSFRWDSKNISFKSDTEKLLDFMNSEREEE

SEQ ID NO: 5903 - protein, 499 aa, Unknown
  Description of Unknown: Integrase B5904 sequence
  PTHR30461:SF3,cd00338,SM00857,G3DSA:1.10.10.2600, IPR036162,PF13408,PS51737,G3DSA:3.40.50.1390, IPR025827,IPR006119,IPR038109,PF07508, SSF53041,IPR011109,PTHR30461,PS51736,Coil,PF00239
MKVAIYLRKSRADEELERTVGEGETLTKHKKALLKIAKERKYDIIEIKEEIVSGESLFHRPKMIELLNEVESKRYDGVLVMDMQRLGRGDMQDQGVILKTFKESNTKIITPQKTYDLNNDFDEEYSEFEAFMSRKELKMITRRMQGGRQRSVEEGNYLGTTPPLGYDIEKIGRARTLKPNDYADVVRLIFKRYLEGYGTGAIASELNTLGYKSATGKEFERTSVLFILKNLVYIGKITWKKKEQKKSTTPGKARDTRTRDKSEWIIVNGKHPAIIDENTFFAVQKKLEEKYHVPYQLVNGIANPLAGIIICGVCGNKMVLRKYGNRAPHIICNKKCGCKSSRFDYIENAVLENLKKYYTELEVVIKENKKEDKSEIYKKQIQHLNKELKTLKVQKNNIFDLFEQGKYDEEMFIERSVNVSSRIENISSQLEVLENELKKENKTSITSQEIKDVIDAYHLADIKEKNELLKSILFKVEYTKNKNQKNDDFDIKLFPKIYV

SEQ ID NO: 5904 - protein, 499 aa, Unknown
  Description of Unknown: Integrase B5905 sequence
  PTHR30461:SF3,IPR036162,PS51737,IPR011109,PTHR30461, PS00397,PF00239,G3DSA:1.10.10.2600,IPR006119,SSF53041, cd00338,SM00857,IPR025827,IPR038109,PS51736, IPR006118,PF13408,G3DSA:3.40.50.1390,PF07508,Coil
MKQSKAKISVDIRFALLCIIRKVNRVKCVIYVRVSTDEQAKHGYSIAAQIEKLEAYCISQGWELVAKFVDDGYSAKDLERPQFQEMMEQIKAGGIDVLLVYRLDRLTRSVSDLYSILNELDQYNCKFKSATEVYDTTNAMGRLFITLVAAIAQWERENTAERVYFGMDKKARLGEWPGGTPPFGYKIEEEKLIIDPEEVKTVREIFKLSKTLGFYTIAKQLTTKGIPTRNGGDWHVDSVRAIANNPIYAGYIRWGDDGRQNKKPPREQKLYDGIHEPIIDRDEFWGLQDILDKRRTFGGKRETSKYYFSSILKCARCGHSMSGHKGGNGKKTYRCSGKKAGKNCTSHIILEDNIVKAVLTEFEGLVRDIYSDVKTSKEPIERLSVLNSELSSVQKLMKKKKTMYENDIIDIDELIATTSELREKEKELIREIKNIQKEDKTDTDELKYIIENIDTLWDHANDYERKQLMTSIFSQLIIDTNDEYRGSKYPRDVIIVAAK

SEQ ID NO: 5905 - protein, 499 aa, Unknown
  Description of Unknown: Integrase B5906 sequence
  PTHR30461:SF3,SM00857,G3DSA:1.10.10.2600,IPR036162,PS51737, G3DSA:3.40.50.1390,IPR006119,IPR038109,PF07508,IPR011109, SSF53041,PTHR30461,Coil,cd00338,PF00239
MKYLIYARISERGSSFDHKAENSTTMQIEFCKKFVEMKGGEIVGVVKDEFLTGGNLNRAGIRQILKEVEAGHAAWDCLVTYNLSRLTREPRDLYKVMDILGSAGKRYSSASEPEFDAASITGEMMMGILTHIARYMRKSSAHTVRDRMMSIAARGEWPAGYPPYGYKRGAHKDNVLHVDERKAVIVRDIFELYASDKHTTREIVHKYKNELSKSKVLSLLRNPTYIGKIYYAGSIFNGKHERLISDDLFLQVQRKLPQLKKALRPKAYRYPFLLPGLLFCHCGCRLTPGTAKSGQYAYYTCTDPDCRTRVSAPKIEKYALEQIKSFKISDKAVKSAVEEVKKRNQEIREQHQPELDRLKKTRTSLVAERVKLVAACISNTLDDLLVAELNKRAARIRTDLETIDAQIAAIETIPSGDAEIERIALVFIGMLRNLQNLLEENATPDEIRSILPDFIKEIRLQEDKSYQIIFTNSGSSTKGSKWCALKDLIERKFFHFKIA

SEQ ID NO: 5906 - protein, 498 aa, Unknown
  Description of Unknown: Integrase B5907 sequence
  IPR036162,PS51737,IPR011109,PTHR30461, PS00397,PF00239,G3DSA:1.10.10.2600,IPR006119, SSF53041,cd00338,SM00857,IPR025827,IPR038109,PS51736 ,IPR006118,PF13408,G3DSA:3.40.50.1390,PF07508,Coil
MTPPKGFSSSTHAPLPDLRIAAAYIRVSTDDQAELSPASQLVEIRKWASRNGYIVPDEFVFMDEGISGRGVKKRDEFRRMIGVAKTKPKPFDAILLWKFSRFARNRDDAVMYKSILRKQLGIDVISISEPVAEGGMGLITEALIEAMDEYYSINLAQEVKRGMEEKHRRGEVQSNPPYGYGIKDHVFVPKPPEDGFVKELFRRYLAGEGCFPLARWMNECGQRTHRGGRFENRTIEYILRNPVYIGKLRWNPTGRTRRDFANENVVLVDGKHEPLIDEETFNAVQRRIDEQKLLYPRYARASGTQKHWISGLVRCAACGGGLIVNTPDYMACNNYVRGSCRVRQTVRRDALEAALISRLREDAARGSSLTFDVVRSSDGSASSLSAVEAARDSAVRMLDRLRDAYLTGADTVEEYKASKAAVQQRIADLDAQIAAMQKEDRAAADPKLLRSALRAVVKTLESPNTTVAEKNAAVRSVADNITWNKAANTLTIHYRLVL

SEQ ID NO: 5907 - protein, 498 aa, Unknown
  Description of Unknown: Integrase B5908 sequence
  cd00338,SM00857,G3DSA:1.10.10.2600,IPR036162,PS51736, PS51737,G3DSA:3.40.50.1390,PF13408,IPR025827,IPR006119, IPR038109,PF07508,IPR011109,SSF53041,PTHR30461, mobidb-lite,Coil,PF00239
MDRKIRAAAYGRVSTNSKEQAHSFENQSDYWNKKLANEPKYEYVGLYADKGISGRHVRYRPQMLALLDTCRRGEVEIIFTKSVQRFARNTIELLETVRELREINVAVVFEKENINTLTAESELYLTIAAAVAEEDLNRYGENVAWTIKDRFEKGDISVVGIRMLGYRMKNKEFRIIPHEAEVVRKLFELYSSGKYSTGELAEVMNEGGYRTMNGCLWTQQRVLQTLTNEKYRGDALLYKTATINGQQVVNRGVKDMLYVENSHAAIITPELWDKVTELINARGNMKLRGRVNESYPFTSLIKCPICGQSYIHKINNSGTKYACPIWKCRTHLACGKKGCSNSGIKDSVLKEKFIEAYNEFIENRNFGNDEDAAERELKKLNAEENELISLHVRGLISKHDYEHDKNDIRARRKALEQKVRDYRQAHIRHGAAKPINEFDEELVGRLIKGVTIKDYVVTFEFYNGVTISREYTNGPSGNQKGWKEKKRLKEAQTNGSSN

SEQ ID NO: 5908 - protein, 498 aa, Unknown
  Description of Unknown: Integrase B5909 sequence
  cd00338,SM00857,G3DSA:1.10.10.2600,IPR036162,PS51737, G3DSA:3.40.50.1390,IPR006119,IPR038109,PF07508,SSF53041, IPR011109,PTHR30461,Coil,PF00239
MSEYLMYLRKSRQDDPNENVEEVLSKHEIQLQEYALRNFKYHIPEEDIYREVVSGETIDDRPMINELFKSIESGDIKGVLVIEPQRLTRGDMLDCGTVEHLFRYTNTLVVTPPKTYDLSDKYDRKLFEMELSRGSDFLDYTKEILERGRKASTRRGNYVHSIPPYGYDKVRINKDWTLVPNETESQYVKLAFKLFNDGLGCNGVAHKLDALGARTRNGKPFESCVVSQMLQNPVYIGKLKIGNRSTVKVVENGKLIKKRIRNKNYDVVDGKHEALIDADTFEKAQERFGSNTKENTSHELKNMYAGLMKCGICGKAIMIVPYSNTCKRVDRYKCRNSFNCGNISHRYDEINDAIVEGLKKHLHDFEVKYREETPADNEAKQTLLNSLTKNFEEIDKKMNSICEYLESGLYTTDMFLSRKKALEEEKERLIVAIENTKKEMHSECDLEEKIITLHKALDMLNDDSISAKTKNRFLKTFIKVIYYKKTKEDGISLDIILL

SEQ ID NO: 5909 - protein, 498 aa, Unknown
  Description of Unknown: Integrase B5910 sequence
  PTHR30461:SF3,IPR036162,PS51737,IPR011109, PTHR30461,PS00397,PF00239,G3DSA:1.10.10.2600, IPR006119,SSF53041,SM00857,IPR025827,IPR038109,PS51736 ,cd03768,IPR006118,PF13408,G3DSA:3.40.50.1390,PF07508,Coil
MDSARLRVACYVRVSTREQAEKGYSVSEQQERLKAYCLAKDWVVAQVITDPGFSGAKLERPGMQQLISLVQAKKCDAVLVWKLDRLSRSQKDTLYLIEDVFLKNGCAFVSMNENFDTSTAFGRAMIGILSVFAQLEREQIRERMAVGRVGRAKAGLFHGGGYAPIGYDYKTIAEGGDGLVVNEYEAMQVREVFSLYLQGWPVNRIRKYMAAHYTTKDGDWGSDTTVRDVLKNPLYTGKINWAKKVYDGQHEPLISQETFDAAAARLATSSWKRTCSDGMERNSPFKSTHLLGGIIWCARCGARYFASGNYSGRGENKRYWPYYVCYSRAKSAKHMIRDPNCQNDRWAVAKLDAIIEGEIRKLAFDPAALELAVSGPQQDEDVAQRRAALQQRLNDLRAQMGRVLDLYQMGGSLPASMVGDRVAKLQAEIDGVEAALAEAVEEPPTQRLDAARAALVGAEDVLDNGTLDERRELVHSLIRRIDLDGENIDIHWSFSPEA

SEQ ID NO: 5910 - protein, 498 aa, Unknown
  Description of Unknown: Integrase B5911 sequence
  PTHR30461:SF3,SM00857,G3DSA:1.10.10.2600,IPR036162,PS51737, G3DSA:3.40.50.1390,IPR006119,IPR038109,PF07508,IPR011109, SSF53041,PF00239,PTHR30461,PS51736,Coil, cd00338
MPTAKTAVIYARFSCNKQREASIDDQLRICRQWCQRERYAIVAEYCDYAISGRTDDRPEFQRMVANAGESDIVLVYMMDRFSRGEYDAPIYKRELAQHGVKLVSALEQIPDSPEGIIYEKLLEGLAACESKKTAIRTRRGMEGNALKCKTNGVRVFGYARNEADEYVIDEDEAAFVREAFKRRIAKETTNSIARDFAARGVKTSNGNPCGYSMVERMVKNRKYTGRYEWGGVVKEGGMPAIIDEVTFMEAQGIRAAKERSAESWGDFALSGKAICAGCGRNLQGVSGRGRGNRKYEYYRCQDGCVKPVRREELEGEIVKALRALLQDRDEALRIAKMVAESSDGAEVAARRKQAAQSLSAAERGLKNILNAIEQGIIAPGAKERIAELEHQRDRAKLDLEAIRDDQIDPERLADFLQCGAALDDSTLMRAFVYQVSVSDDECIVTLNYDVENNEPARLDVQRVRTKCKWCPVRTTSRTEICSFGTIVLLRIPRTRLAA

SEQ ID NO: 5911 - protein, 498 aa, Unknown
  Description of Unknown: Integrase B5912 sequence
  IPR036162,PS51737,IPR011109,PTHR30461,PS00397, PF00239,G3DSA:1.10.10.2600,IPR006119,SSF53041,cd00338, SM00857,IPR025827,IPR038109,PS51736,IPR006118, PF13408,G3DSA:3.40.50.1390,PF07508,Coil
MTPPKGFSSSAHAPLPDLRIAAAYIRVSTDDQVELSPASQLVEIRKWASRNGYIVPDEFVFMDEGISGRGVKKRDEFRRMIGVAKTKPKPFDAILLWKFSRFARNRDDAVMYKSILRKQLGIDVISISEPVAEGGMGLITEALIEAMDEYYSINLAQEVKRGMEEKHRRGEVQSNPPYGYGIKDHVFVPKPPEDGFVKELFRRYLAGEGCFPLARWMNECGQRTHRGGRFENRTIEYILRNPVYIGKLRWNPAGRTRRDFANENVVLVDGKHEPLIDEETFNAVQRRIDEQKLLYPRYARASGTQKHWISGLVRCAACGGGLIVNTPDYMACNNYVRGSCRVRQTVRRDALEAALISRLREDAARGSSLTFDVVRSSDGSASSLSAVEAARDSAVRMLDRLRDAYLTGADTVEEYKASKAAVQQRIADLDAQIAAMQKEDRAAADPKLLRSALRAVVKTLESPDTTVAEKNAAVRSVADNITWNKAANTLTIHYRLVL

SEQ ID NO: 5912 - protein, 498 aa, Unknown
  Description of Unknown: Integrase B5913 sequence
  PTHR30461:SF3,IPR036162,PS51737,IPR011109,PTHR30461, PS00397,PF00239,G3DSA:1.10.10.2600,IPR006119,SSF53041, cd00338,SM00857,IPR025827,IPR038109,PS51736, IPR006118,PF13408,G3DSA:3.40.50.1390,PF07508,Coil
MANIQPVKNGALYIRVSTHLQEELSPDAQKRLLMEYAEAHNIIVLKEHIYIDSGISGRSARQRPQFNNMIAEAKSKEHPFDVILVWKYSRFARNQEESIVYKSMLKRENVDVISVSEPISDDPFGSLIERIIEWMDEYYSIRLSGEVSRGMAENAMRGNYQARPPLGYRIPGYRQTPVIVPEEAELIQLIFDLYTEKKMGIFEIVRYLNEHGYQTGHKKPFQRRSVTYILKNPTYIGKTIWNQHDQDHKLRDKSEWIIADGKHEPIISKEQFDKAQKRIESTYKPAYRKPTSVCHHWLSSLLKCSSCGRTLVVKRTASKNKDRMYINFQCYGYQKGICNTNQSISAIKLEPVIMHSLEDAMTSGKIHFDVLNPTTLDSSQKQQLLTRLNEIEKKEVRIKRAYRDGIDTLEEYKENKSIIQTEKEMLLKKIEHIEEPALSPEEAKPIMMDRIKNVYEVITNPDIGMEEKNKAARSIIEKIVFDRATGSVNIFFYLANCP

SEQ ID NO: 5913 - protein, 498 aa, Unknown
  Description of Unknown: Integrase B5914 sequence
  IPR036162,PS51737,IPR011109,PTHR30461,PS00397, PF00239,G3DSA:1.10.10.2600,IPR006119,SSF53041,cd00338, SM00857,IPR025827,IPR038109,PS51736,IPR006118, PF13408,G3DSA:3.40.50.1390,PF07508,Coil
MTPPKGFSSSAHAPLPDLRIAAAYIRVSTDDQVELSPASQLVEIRKWASRNGYIVPDEFVFMDEGISGRGVKKRDEFRRMIGVAKTKPKPFDAILLWKFSRFARNRDDAVMYKSILRKQLGIDVISISEPVAEGGMGLITEALIEAMDEYYSINLAQEVKRGMEEKHRRGEVQSNPPYGYGIKDHVFVPKPPEDGFVKELFRRYLAGEGCFPLARWMNECGQRTHRGGRFENRTIEYILRNPVYIGKLRWNPAGRTRRDFSNENVVLVDGKHEPLIVEETFNAVQRRIDEQKLLYPRYARASGTQKHWISGLVRCAACGGGLIVNTPDYMACNNYVRGSCRVRQTVRRDALEAALISRLREDAARGSSLTFDVVRSSDGSASSLSAVEAARDSAVRMLDRLRDAYLTGADTVEEYKASKAAVQKRIADLDAQIAAMQKEDRAAADPKLLRSALRAVVKTLESPDTTVAEKNAAVRSVADNITWNKAANTLTIHYRLVL

SEQ ID NO: 5914 - protein, 498 aa, Unknown
  Description of Unknown: Integrase B5915 sequence
  IPR036162,PS51737,IPR011109,PTHR30461,PS00397, PF00239,G3DSA:1.10.10.2600,IPR006119,SSF53041,cd00338, SM00857,IPR025827,IPR038109,PS51736,IPR006118, PF13408,G3DSA:3.40.50.1390,PF07508,Coil
MTPPKGFTSSVPAPLPDLRIAAAYIRVSTDDQVELSPASQLVEVRKWAARNGYIVPDEFVFMDEGISGRGVKKRDEFRRMIGVAKTKPKPFDAILLWKFSRFARNRDDAVMYKSILRKQLGIDVISISEPVAEGGMGLITEALIEAMDEYFSINLAQEVKRGMEEKHRRGEVQSNPPYGYGIKDHVFVPKPPEDGFVKELFRRYLAGEGCFPLARWMNECGQRTHRGGRFENRTIEYILRNPVYIGKLRWNPAGRTRRDFSNENVVLVDGKHEPLIDEETFNAVQHRIDEQKLLYPRYARASGTQKHWISGLVRCAACGGGLIVNTPDYMACNNYVRGSCRVRQTVRRDALEAALISRLQEDAARGSSLTFDVVRSSDGSASSLSAVEAARDSAVRMLDRLRDAYLTGADTVEEYKASKAAVQKRIADLDAQIAAMQKEDQAAVDPKLLRSALRAVVKTLESPDTTVAEKNAAVRSVADNITWNKAANTLTIHYRLVL

SEQ ID NO: 5915 - protein, 498 aa, Unknown
  Description of Unknown: Integrase B5916 sequence
  IPR036162,PS51737,IPR011109,PTHR30461,PS00397, PF00239,G3DSA:1.10.10.2600,IPR006119,SSF53041,cd00338, SM00857,IPR025827,IPR038109,PS51736,IPR006118, PF13408,G3DSA:3.40.50.1390,PF07508,Coil
MTPPKGFTSSVPAPLPDLRIAAAYIRVSTDDQVELSPASQLVEIRKWAARNGYIVPDEFVFMDEGISGRGVKKRDEFRRMIGVAKTKPKPFDAILLWKFSRFARNRDDAVMYKSILRKQLGIDVISISEPVAEGGMGLITEALIEAMDEYYSINLAQEVKRGMEEKHRRGEVQSNPPYGYGIKDHVFVPKPPEDGFVKELFRRYLAGEGCFPLARWMNECGQRTHRGGRFENRTIEYILRNPVYIGKLRWNPAGRTRRDFANENVVLVDGKHEPLIDEETFNAVQRRIDEQKLLYPRYARASGTQKHWISGLVRCAACGGGLIVNTPDYMACNNYVRGSCRVRQTVRRDALEAALISRLREDAARGSSLTFDVVRSSDGSASSLSAVEAARDSAVRMLDRLRDAYLTGADTVEEYKASKAAVQKRIADLDAQIAAMQKEDRAAADPKLLRSALRAVVKTLESPDTTVAEKNAAVRSVTDNITWNKAANTLTIHYRLVL

SEQ ID NO: 5916 - protein, 498 aa, Unknown
  Description of Unknown: Integrase B5917 sequence
  PTHR30461:SF3,SM00857,G3DSA:1.10.10.2600,IPR036162,PF13408, IPR025827,PS51737,G3DSA:3.40.50.1390,IPR006119,IPR038109, PF07508,IPR011109,SSF53041,PTHR30461,Coil, PS51736,cd00338,PF00239
MPEALNAVIYARYSSDRQTEQSIEGQLRECYAFAKANDIAVIDTYIDRAISGKTDNRPAFQKMIEDSAKRQFQAVIVYRLDRFTRNRYDSAIYKARLKKNGVKVLSAMENLNGSPESIIMESLLEGMAEYYSVELSQKITRGMRENALKGKALGGQRVLGYKVNSDCYFEIDETTAPVVVDIFKLYSSGKTVKEICDILNARGVKTARGGAFNKNSLHTILTNKKYIGIYKTKYGEIVGGIPAIIDKELFEMVALRMEQNKKAPARAKAEINYLLSTKLFCGKCRSAMVGESGTSKTGKKYYYYACVKKKREKACDKSNVKKDWIEDLVIQRTVTDILKDDVIEKIADRLVELQKAEAAESGTMLYLENSLAEIQVSIKNIMTAIEKGIITESTKTRLTELEDEKRNVEIEIAKESIARRIISREQIIYWISSFKDGDITSEKYRQQLIDTFVHAVFVYDDKIVITYNYSGENNTATISDLDLSSPPQVKKSEHYHQW

SEQ ID NO: 5917 - protein, 498 aa, Unknown
  Description of Unknown: Integrase B5918 sequence
  IPR036162,PS51737,IPR011109,PTHR30461,PS00397, PF00239,G3DSA:1.10.10.2600,IPR006119,SSF53041,cd00338, SM00857,IPR025827,IPR038109,PS51736,IPR006118, PF13408,G3DSA:3.40.50.1390,PF07508,Coil
MTPPKGFTSSVPAPLPDLRIAAAYIRVSTDDQVELSPASQLVEIRKWAARNGYIVPDEFVFMDEGISGRGVKKRDEFRRMIGIAKTKPKPFDAILLWKFSRFARNRDDAVMYKSILRKQLGIDVISISEPVAEGGMGLITEALIEAMDEYYSINLAQEVKRGMEEKHRRGEVQSNPPYGYGIKDHVFVPKPPEDGFVKELFRRYLAGEGCFPLARWMNECGQRTHRGGRFENRTIEYILRNPVYIGKLRWNPAGRTRRDFANENVVLVDGKHEPLIDEETFNAVQRRIDEQKLLYPRYARASGTQKHWISGLVRCAACGGGLIVNTPDYMACNNYVRGSCRVRQTVRRDALEAALISRLREDAARGSSLTFDVVRSSDGSASSLSAVEAARDSAVRMLDRLRDAYLTGADTVEEYKASKAAVQKRIADLDAQIAAMQKEDRAAADPKLLRSALRAVVKTLESPDTTVAEKNAAVRSVADNITWNKAANTLTIHYRLVL

SEQ ID NO: 5918 - protein, 498 aa, Unknown
  Description of Unknown: Integrase B5919 sequence
  PTHR30461:SF3,cd00338,SM00857,G3DSA:1.10.10.2600,IPR036162, PF13408,PS51737,G3DSA:3.40.50.1390,IPR025827,IPR006119, IPR038109,PF07508,IPR011109,SSF53041,PTHR30461, PS51736,Coil,PF00239
MKRAVFYGRYSSDRQTEQSIEGQRRVCEEFAKAEQIQIVGEYIDRATSGTSTEHREQFQKMLKDSKNGGWDYVLVYKLDRFARSRYDSAISKQQLKKNSVKVLSATERITDSPEGILIEGLLESMDEYFSRELSRKCKRGIRESIIKGHNFGGRVLYGYDRKDKRFVINEEQAVNVRRIFKSYLSGCTIQSIANQLNADGYRTNYGNEFKRYTVSDILHNDKYTGIHYIDGIEEPETCPAIISQTTFERVKEKLNQSAHRSREHTTGHTYALSGLLQCGVCGRYVCGSSVERKYFYYACRSREHAENSVHIHADKLEQVVIDALQTFFTEEQVSTLAERLYQIYTTDMDGKPDRSKRLNEIEKQIQGTVNALIACPSSKALQEKLTQLEEQKAEIEKMPILQPQLKKEHFENYFRWLALRLEHIEDRQTFFHTVIHKVLVYPEKAVIILNMTDEMADPPKREQVEAFMSNVGEVSPCPTLYKLYVTPFAIFIRAALIK

SEQ ID NO: 5919 - protein, 498 aa, Unknown
  Description of Unknown: Integrase B5920 sequence
  PTHR30461:SF3,SM00857,G3DSA:1.10.10.2600,IPR036162,PF13408, PS51737,G3DSA:3.40.50.1390,IPR025827,IPR006119,IPR038109, PF07508,IPR011109,SSF53041,PF00239,PTHR30461, PS51736,Coil,cd00338
MGNVMVIPAKRQVGNTARQQDAKPKLRVAAYCRVSTDSDEQATSYEAQVEHYTEFIQKNPEWEFAGIYADDGISGTNTKNRDEFNRMIEDCEAGTIDMIITKSISRFARNTLDCLKYIRQLKDKNIPVFFEKEAINTMDAKGEVLITIMASLAQQESQSLSQNVKLGLQFRYQNGQVQVNHNHFLGYTKDDEGNLIIDPEQAEVVKRIYREYLEGYSMDKIAKGLEADGILTGAGKTKWWTSTINKILRNEKYIGDALLQKTYTTDFLNKTRVKNNGIVPQYYVEGNHEAIIPKDIFLRVQEELVRRRVVKTSANSKKRSYSCNHCFAQIVICGECGEMFRRIHWNNRGCKSIVWRCLSRLEPTGEECHARTVNETVLENVVVQAINTLLGDKSTYQAQLQQNIAKVIREAQKSTADGIDEQLMELQKELLKKANNKEAYDEIADQIFKLREQREKCNVDTAARDAQIARINDLQDYIKQQRTDLAEFDETLVKRWLK

SEQ ID NO: 5920 - protein, 498 aa, Unknown
  Description of Unknown: Integrase B5921 sequence
  IPR036162,PS51737,IPR011109,PTHR30461,PS00397, PF00239,G3DSA:1.10.10.2600,IPR006119,SSF53041,cd00338, SM00857,IPR025827,IPR038109,PS51736,IPR006118, PF13408,G3DSA:3.40.50.1390,PF07508,Coil
MTPPKGFSSSAHAPLPDLRIAAAYIRVSTDDQVELSPASQLVEIRKWAARNGYIVPDEFVFMDEGISGRGVKKRDEFRRMIGVAKTKPKPFDAILLWKFSRFARNRDDAVMYKSILRKQLGIDVISISEPVAEGGMGLITEALIEAMDEYYSINLAQEVKRGMEEKHRRGEVQSNPPYGYGIKDHVFVPKPPEDGFVKELFRRYLAGEGCFPLARWMNECGQRTHRGGRFENRTIEYILRNPVYIGKLRWNPAGRTRRDFSNENVVLVDGKHEPLIDEETFNAVQRRIDEQKLLYPRYARASGTQKHWISGLVRCAACGGGLIVNTPDYMACNNYVRGSCRVRQTVRRDALEAALISRLREDAARGSSLTFDVVRSSDGSASSLSAVEAARDSAVRMLDRLRDAYLTGADTVEEYKASKAAVQKRIADLDAQIAAAHKENAAAANPNLLRSALRAVVKTLESPDTTVAEKNAAVRSVADNITWNKAANTLTIHYRLVL

SEQ ID NO: 5921 - protein, 498 aa, Unknown
  Description of Unknown: Integrase B5922 sequence
  PTHR30461:SF3,SM00857,G3DSA:1.10.10.2600,IPR036162,PF13408, IPR025827,PS51737,G3DSA:3.40.50.1390,IPR006119,IPR038109, PF07508,SSF53041,IPR011109,PTHR30461,PS51736, cd00338,PF00239
MQAAAYARYSTEHQTESSIAYQMRKIEEYCNDHSITVIARYTDEAKSGTNTQRPAFQQLCKDAAQRKFDAVVIYDISRGSRDVSDWFGFRKQMAILGIQVISVEDRIGDILNPSDYLTELITVGLGQHHVLTSRQKSMDSIATKAKTGQFLGGTPNFGYNVVNGRYVINPAEAEIVQKIYRMYAAGKSYGEILAEIGEVRGKRGRVIGKNSLHYLLRNERYIGVYSWCKYHHKIMGKYAGNIPNENAVRIEDSIPAIIDKDTWEAVQIRMNDKKQRACNKAKRSYLLSGLIECTECGANYVGHTSTNKKGYSTRYYCCGNKYRNHTCHAKNLNAEELEIFVVQNLKQYLSDLDFSQMAQQVADEINGASVDLKAERKELADIIFQLNNGTKAILKGIDYPELQEEMFRLRVRKSELEDIIRRGEEKKPVSAEKLEQLFQHAVKQLDTDTKQICKSMVKIYAHPNGDCDLEVGVHISGCGSRQTILCTTFHYFCKKKIV

SEQ ID NO: 5922 - protein, 498 aa, Unknown
  Description of Unknown: Integrase B5923 sequence
  PTHR30461:SF3,SM00857,G3DSA:1.10.10.2600,IPR036162,PF13408, IPR025827,PS51737,G3DSA:3.40.50.1390,IPR006119,IPR038109, PF07508,IPR011109,SSF53041,PTHR30461,Coil, PS51736,cd00338,PF00239
MENKRAVIYARYSSDRQREESIEGQIRECTAFAKRSNLDVINTYTDRALSARTDNRPSFQKLIRDSNKRIFDYVIVYTLDRFSRSRYDSAVYKNKLKKNGVKVLSAKEHIEDTPSGIILESVLEGYAEYYSAELAQKVKRGLTDNVLEHKWTGTCIPFGYKKDDANHLVPDAVTSPLTPRIYEAALGGKSRVEIARWLNEKGYITTYGRRFRPEQVTKILKNRIYTGTFTWDGKQYPAFTTPLITEELFDKVQKTFRKNTRKNPDDYVLTGKIYCGRCGSTMTGMSGTSKSRKTYYYYRCSSMNHSARQAKEPCGAKNVSRDMIEKLIYDKTLQILNTPEWRKEIAHQAMLAQSDDSEELKIKAMEQELSDAKRKITNIITAISNGISSEELAKTLHDLEARKKELESQISHEQLVKKDLTLTEDAIEFYFVQLARKSAGGSDLNVFWDFINHIVVYDDYIEVFYNYVANKKIANPVIIQCSPRNVLVDHQGFEPRTP

SEQ ID NO: 5923 - protein, 498 aa, Unknown
  Description of Unknown: Integrase B5924 sequence
  PTHR30461:SF3,IPR036162,PS51737,IPR011109,PTHR30461, PS00397,PF00239,G3DSA:1.10.10.2600,IPR006119,SSF53041, cd00338,SM00857,IPR025827,IPR038109,PS51736, IPR006118,PF13408,G3DSA:3.40.50.1390,PF07508,Coil
MSDIQPVKNGALYIRVSTHLQEELSPDAQKRLLMEYAEAHNIIVLKEHIYIDSGISGRSARQRPQFNNMIAEAKSKEHPFDVILVWKYSRFARNQEESIVYKSMLKRENVDVISVSEPISDDPFGSLIERIIEWMDEYYSIRLSGEVSRGMAENAMRGNYQARPPLGYRIPGYRQTPVIVPEEAELIQLIFDLYTEKKMGIFEIVRYLNEHGYQTGHKKPFQRRSVTYILKNPTYIGKTIWNQHDQDHKLRDKSEWIIADGKHEPIISKEQFDKAQKRIESTYKPAYRKPTSVCHHWLSSLLKCSSCGRTLVVKRTASKKKDRMYVNFQCYGYQKGICNTNQSISAIKLEPVIMHSLEDAMTSGKIHFDVLNPTTLDSSQKQQLLTRLSEIEKKEERIKRAYRDGIDTLEEYKENKFIIQTEKEMLLKKIEHIEEPALSQEEAKPIMMDRIKNVYEVITNPDIGMEEKNKAARSIIEKIVFDRATGSVNIFFYLANCP

SEQ ID NO: 5924 - protein, 498 aa, Unknown
  Description of Unknown: Integrase B5925 sequence
  IPR036162,PS51737,IPR011109,PTHR30461,PS00397, PF00239,G3DSA:1.10.10.2600,IPR006119,SSF53041,cd00338, SM00857,IPR025827,IPR038109,PS51736,IPR006118, PF13408,G3DSA:3.40.50.1390,PF07508,Coil
MTPPKGFTSSVPAPLPDLRIAAAYIRVSTDEQVELSPASQLVEIRKWAARNGYIVPDEFVFMDEGISGRGVKKRDEFRRMIGVAKTKPKPFDAILLWKFSRFARNRDDAVMYKSILRKQLGIDVISISEPVAEGGMGLITEALIEAMDEYYSINLAQEVKRGMEEKHRRGEVQSNPPYGYGIKDHVFVPKPPEDGFVKELFRRYLAGEGCFPLARWMNECGQRTHRGGRFENRTIEYILRNPVYIGKLRWNPAGRTRRDFANENVVLVDGKHEPLIDEETFNAVQCRIDEQKLLYPRYARASGTQKHWISGLVRCAACGGGLIVNTPDYMACNNYVRGSCRVRQTVRRDALEAALISRLREDAARGSSLTFDVVRSSDGSASSLSAVEAARDSAVRMLDRLRDAYLTGADTVEEYKSSKAAVQKRIADLDAQIAAAHKESAAAADPKLLRSALHAVVKTLESPDTTVAEKNAAVRSVTDNITWNKAANTLTIHYRLVL

SEQ ID NO: 5925 - protein, 498 aa, Unknown
  Description of Unknown: Integrase B5926 sequence
  PTHR30461:SF3,SM00857,G3DSA:1.10.10.2600,IPR036162,PF13408, IPR025827,G3DSA:3.40.50.1390,PS51737,IPR006119,IPR038109, PF07508,IPR011109,SSF53041,PTHR30461,Coil, PS51736,cd00338,PF00239
MKAVIYARFSSHNQREESIEGQVRACQRFAKEHDMTVIEIYADRGLSGLHADNRPEFQRMIADSDRHKFQALIMWNLDRFSRDKYDTAVYKSRLKKNGVTLYYSDQNIPDTPEGIILESLLEGFAQYYSANLSRNAKRGLQENARKCLWNGGGLPLGYTIDETKHFVIDPAGAACVRLIFQMYADNHSIKEIVSTLNEKGYRTVKGNKFRLGSIQGVLRNRKYIGEYHASGITVPNGVPAIVDVELFNAVQEKIGVVSAAKARNKAEIPYLLTTKVFCGHCGSPMIGESGTGKGGSTYRYYKCSCRKNRKGQCDKRTEQKEWLEETVVAQTVEKFLHPDVIEDVSNACAAVLEQDCQNNALLKALNAQLADVEKSSRNLIKAIEAGVFTASMRERLAELEQQKEDITVQIAREQLRKPQLSAEQIAFFLRSFLDGDAHDPNFQERIIESLVRRVDVYDEGPGNRKLTVFYNLKKNNHSSVSVKCSDSESVGLPKRSVA

SEQ ID NO: 5926 - protein, 498 aa, Unknown
  Description of Unknown: Integrase B5927 sequence
  IPR036162,PS51737,IPR011109,PTHR30461,PS00397, PF00239,G3DSA:1.10.10.2600,IPR006119,SSF53041,cd00338, SM00857,IPR025827,IPR038109,PS51736,IPR006118, PF13408,G3DSA:3.40.50.1390,PF07508,Coil
MNQNESLKTAFGYIRVSTHMQEEISPEAQKHELQKWAKQHNILITQWFQDNGISGKKAENRTAFQNMIALAKEKDHPDYILAWKFSRFARNQEESIVYKSLLRKNGVQVVSISEPLPDGPFAPLIERIIEWMDEYYSIRLSGEVKRGMKEKAKKGGYQSAPPLGYRREKGDTVPAIYEPEAKIYRLIKKYFIQDEYNPTTIARTLNDQGYRTRQGNRFEARVIIYILRNPFYIGKIRWNRSSHGGYYENSPDEVIVSDGQHEPLCTNEEWDIISKRIKKYTPGSTGRRRSKTLLPHYLSGGLFRCPICGASMCYQRGVSKKLPRAYPYFCCWKYAKGIHSENVNVGSPKTEEALLNSLQEFVDHGHSNITYTVEKVEEPSGNDAAQYEQLLDKLAIRKQRAKEAYLDGIDTKEEYRENRELIDAEVKSIKEKLATLETAAVITTTEEFHVDIREIILKLKDDTLSTLEKHTALASILDYMEYDKERDEYSFYYKFEME

SEQ ID NO: 5927 - protein, 498 aa, Unknown
  Description of Unknown: Integrase B5928 sequence
  SM00857,G3DSA:1.10.10.2600,IPR036162,PF13408,PS51737, IPR025827,G3DSA:3.40.50.1390,IPR006119,IPR038109,PF07508, SSF53041,IPR011109,PF00239,PTHR30461,PS51736, Coil,cd00338
MTAVIYARYSSDNQREESIEGQIRECTAYAEKNGITVVKHYIDRALSAKTDNRPDFQQMIKDSEKRLFDIVLVWKLDRFARNRYDSAHYEYQLERNHVKLVSATEPISDSPAGIMVKSMLTGMAEYYSAELSEKVVRGMTENVLKGKYNGGTIPIGFKVDEEKFFQVDPLKAPFVVEAFQRYNDGATMKELMNWLNDSGVTTNRNQKFTYNSVQKLLTNKRYIGENHFKDIVMPDSIPAIVDKDLFEEVQQKIKKNSRAPARHKAEDDYLLTTKLFCGMCGAMMFGECGTGRNKVVHHYYKCATAKRFKTCKKKTVRKEWLEDLVIAETMKLIQDDAVIDAIVAEVMELQDQENTTLPLLEKQMREVENGIENMLNAIQAGVLTNSTKSRLEKLEAQQKELEIRIAEEKIARPRLSENQVRFWLTRFRKLDPNVKSHRETLINTFVNAVYLYDEKVLITFNYKDGTKTITFDEIAAKDAPEGNGSDLGCFAPPKKFNV

SEQ ID NO: 5928 - protein, 498 aa, Unknown
  Description of Unknown: Integrase B5929 sequence
  PTHR30461:SF3,IPR036162,PS51737,IPR011109,PTHR30461, PS00397,PF00239,G3DSA:1.10.10.2600,IPR006119,SSF53041, cd00338,SM00857,IPR025827,IPR038109,PS51736, IPR006118,PF13408,G3DSA:3.40.50.1390,PF07508,Coil
MSDIQPVKNGALYIRVSTHLQEELSPDAQKRLLMEYAEAHNIIVLKEHIYIDSGISGRSARQRPQFNNMIAEAKSKEHPFDVILVWKYSRFARNQEESIVYKSMLKRENVDVISVSEPISDDPFGSLIERIIEWMDEYYSIRLSGEVSRGMAENAMRGNYQARPPLGYRIPGYRQTPVIVPEEAELIQLIFDLYTEKKMGIFEIVRYLNEHGYQTGHKKPFQRRSVTYILKNPTYIGKTIWNQHDQDHKLRDKSEWIIADGKHEPIISKEQFDKAQKRIESTYKPAYRKPTFVCHHWLSSLLKCSSCGRTLVVKRTASKKKDRMYVNFQCYGYQKGICNTNQSISAIKLEPVIMHSLEDAITSGKIHFDVLNPTTLDSSQKQQLLTRLNEIEKKEERIKRAYRDGIDTLEEYKENKSIIQTEKEMLLKKIEHIEEPALSPEEAKPIMMDRIKNVYEVITNPDIGMEEKNKAARSIIEKIVFDRATGSVNIFFYLANCP

SEQ ID NO: 5929 - protein, 498 aa, Unknown
  Description of Unknown: Integrase B5930 sequence
  PTHR30461:SF3,SM00857,G3DSA:1.10.10.2600,IPR036162,PF13408, IPR025827,PS51737,G3DSA:3.40.50.1390,IPR006119,IPR038109, PF07508,IPR011109,SSF53041,PTHR30461,Coil, PS51736,cd00338,PF00239
MQAAAYARYSTEHQTESSIAYQMRKIEEYCNDHSITVIARYTDEAKSGTNTQRPAFQQLCKDAAQRKFDAVVIYDISRGSRDVSDWFGFRKQMAILGIQVISVEDRIGDILNPSDYLTELITVGLGQHHVLTSRQKSMDSIATKAKTGQFLGGTPNFGYNVVNGRYVINPAEAEIVQKIYRMYAAGKSYGEILAEIGEVRGKRGRVIGKNSLHYLLRNERYIGVYSWCKYHHKIMGKYAGNIPNENAVRIEDSIPAIIDKDTWEAVQIRMNDKKQRACNKAKRSYLLSGLIECTECGANYVGHTSTNKKGYSTRYYCCGNKYRNHTCYAKNLNAEELEVFVVQNLKQYLSDLDFSQMAQQVADEINGASVDLKAERKELADIIFQLNNGTKAILKGIDYPELQEEMFRLRVRKSELEDIIRRGEEKKPVSVEKLEQLFQNAVKQLDTDTKQICKSMVKIYAHPNGDCDLEVGVHISGCGSRQTILCTTFHYFCKKKIV

SEQ ID NO: 5930 - protein, 498 aa, Unknown
  Description of Unknown: Integrase B5931 sequence
  PTHR30461:SF3,SM00857,G3DSA:1.10.10.2600,IPR036162,PF13408, PS51737,G3DSA:3.40.50.1390,IPR025827,IPR006119,IPR038109, PF07508,IPR011109,SSF53041,PF00239,PTHR30461, PS51736,Coil,cd00338
MNAVIYARYSTRNQKELSIEGQLRECMAFAAQKKYTVIEKYIDRAMSAKTDSRPEFQRMVRDSAKKQFQVVLCYKLNRFSRDRYDSAVYKAALRKNGVRLVYVEEQIPQGPEGIILESVLEGLAEFYSAELAQNVNRGMYDTAMKCQSVGGHITFGYKIGPDKKYQIDDSAAPIVQRIFAMWNDGARMRDILDYVNVLGVKTTMGKPFCNSTIASIIRNRRYTGLYIWRDVEIPDGIPRLISDKVFQKAQNRSEMGRKRVRSGKPAVAYDLTTKLFCGLCEAAMIGESGTSGGNGEKYCYYTCLARKRDHACAKKNVRKDWIERNVVELTRRHVLRPEIINKIIDNILKIEQQDIEQGVMASLKAQEKEVNSSIKNIMKAIEQGAYSPIIQSRLNELEKQREDLQVSIARESMLHDSITRDQLQFLFAEFSDGDIANADYRRRLIDAFVNAVYLTDTDLTIVYNYKDGQERIFLADLPFPDEKTTLSDSSDNVDLGGA

SEQ ID NO: 5931 - protein, 498 aa, Unknown
  Description of Unknown: Integrase B5932 sequence
  cd00338,SM00857,G3DSA:1.10.10.2600,IPR036162,PS51737, G3DSA:3.40.50.1390,IPR006119,IPR038109,PF07508,SSF53041, IPR011109,PTHR30461,Coil,PF00239
MSEYLMYLRKSRQDDPNENVEEVLSKHEIQLQEYALRNFKYHIPEEDIYREVVSGETIDDRPMINELFKSIESGDIKGVLVIEPQRLTRGDMLDCGTVEHLFRYTNTLVVTPPKTYDLSDKYDRKLFEMELSRGSDFLDYTKEILERGRKASTRRGNYVHSIPPYGYDKVRINKDWTLVPNETESQYVKLAFKLFNDGLGCNGVAHKLDALGARTRNGKPFESCVVSQMLQNPVYIGKLKIGNRSTVKVVENGKLIKKRIRNKNYDVVDGKHEALIDADTFEKAQERFGSNTKENTSHELKNMYAGLMKCGICGKAIMIVPYSNTCKRVDRYKCRNSFNCGNISHRFDEINDAIVEGLKKHLHDFEVKYMEDTPADNEAKQTLLNSLKKNFEEIDKKMNSICEYLESGLYTADMFLSRKKALEEEKERLIVAIENTKKEMHSECDLEEKIITLHKALDMLNDDSISAKTKNRFLKTFIKVIYYKKTKEDGISLDIILL

SEQ ID NO: 5932 - protein, 498 aa, Unknown
  Description of Unknown: Integrase B5933 sequence
  SM00857,IPR006118,G3DSA:1.10.10.2600,IPR036162, PS51737,G3DSA:3.40.50.1390,IPR006119,IPR038109, PF07508,SSF53041,IPR011109,PF00239, PTHR30461,PS00397,PS51736,Coil,cd00338
MTPPKGFTSPVPAPLPDLRIAAAYIRVSTDEQVELSPASQLVEIRKWAARNGYIVPDEFVFMDEGISGRGVKKRDEFRRMIGVAKSKPKPFDAILLWKFSRFARNRDDAVMYKSILRKQLGIDVISISEPVAEGGMGLITEALIEAMDEYYSINLAQEVKRGMEEKHRRGEVQCAPPYGYGLKDHVYVPKPPEDDYVREIFRRYLAGEGFFPLARWLNSCGQRTHRGGKFENRTVEYILRNPVYIGKLRWNPAGRTRRDYANENVVLSDGKHVPLIDEETFNAVQRRIDEQKLLYPKYSRQSWTQKHWVSGLVHCAACGGSLVVNTPEHLVCKNYIHGSCLVRQSIRRDVLEDALLSRFREDAARGSSPEFEVVRSGDNGVSAMAALEASRDSAVRMLDRLRDAYLTGADTVEEYKASKAAVQQRIADLDAQIAAMQKEDRAAADPKLLRSALRAVVKTLQSSDATVAEKNAAVRSVAENITWNKAANTLTVHYRLVL

SEQ ID NO: 5933 - protein, 498 aa, Unknown
  Description of Unknown: Integrase B5934 sequence
  PTHR30461:SF3,SM00857,G3DSA:1.10.10.2600,IPR036162,PF13408, IPR025827,G3DSA:3.40.50.1390,PS51737,IPR006119,IPR038109, PF07508,SSF53041,IPR011109,PTHR30461,Coil, PS51736,cd00338,PF00239
MNTVIYARYSAGPRQTDQSIEGQLRVCTDFCKQRGLTVIDTYCDRHISGRTDERPEFQRLITDAKRKKFEAVVVYKTDRFARNKYDSAVYKRELKRNGIQIFYAAEAIPDGPEGIILESLMEGLAEYYSAELAQKIKRGMHESALKCQSTGSGRPLGYRVDEQKHFQIDPESAQTVQTIFEQYIKGESNAAICELLNSRGLRTAQGKPFNKNSINRIIKNRKYIGEYRYHDIVVEGGMPAIISKDTFNLAQAEMERRRTRKAPKSPKAEYLLAGRLFCGHCKGPMQGVSGTGKSGNKWYYYYCGNTRGENKTCDKKQVSRDRLERAVVDFTVRYILQEEVLEELARKVHAAQERQNDTASEIAFYEKKLADNKKSIANVLRAIESGAMTQTLPARLQELENEQAVILGEISFLKGKRLAFTEDQIFFALMKHLEPYPGESEQDYRRRIISDFVSEVYLYDDRLLIYFNISSEDGKLKSADLSNIEGGEFDEGLVSSTK

SEQ ID NO: 5934 - protein, 498 aa, Unknown
  Description of Unknown: Integrase B5935 sequence
  IPR036162,PS51737,IPR011109,PTHR30461,PS00397, PF00239,G3DSA:1.10.10.2600,IPR006119,SSF53041,cd00338, SM00857,IPR025827,IPR038109,PS51736,IPR006118, PF13408,G3DSA:3.40.50.1390,PF07508,Coil
MTPPKGFTSSVHAPLPDLRIAAAYIRVSTDEQVELSPASQLVEIRKWAARNGYIVPDEFVFMDEGISGRGVKKRDEFRRMIGVAKSKPKPFDAILLWKFSRFARNRDDAVMYKSILRKQLGIDVISISEPVAEGGMGLITEALIEAMDEYYSINLAQEVKRGMEEKHRRGEVQCAPPYGYGLKDHVYVPKPPEDDYVRELFRRYLAGEGFFPLARWLNSCGQRTHRGGKFENRTIEYILRNPVYIGKLRWNAAGHTRRDYANENVVLSDGKHEPLIDEETFNAVQHRIDEQKLLYPKFSRRSGTQKYWVSGLVHCAACGGTLVANTPEYMVCNNYIRGACLVRQSIRRDVLEDALLSRLREDAARGSSPEFEVVRSGDGGMSAMAALEASRDSAARMLDRLRDAYLTGADTVEEYKASKAAVQQRIADLDAQISAMQKEDRAAANPKLLRSALRAVVKTLQSPDATAAEKNAAVRSVVDTIAWNKAANTLTVHYRLVL

SEQ ID NO: 5935 - protein, 498 aa, Unknown
  Description of Unknown: Integrase B5936 sequence
  SM00857,IPR006118,G3DSA:1.10.10.2600,IPR036162,PS51737, G3DSA:3.40.50.1390,IPR006119,IPR038109,PF07508,SSF53041, IPR011109,PF00239,PTHR30461,PS00397,PS51736, Coil,cd00338
MTPPKGFTSPVPAPLPNLRIAAAYIRVSTDEQVELSPASQLVEIRKWAARNGYIVPDEFVFMDEGISGRGVKKRDEFRRMIGVAKSKPKPFDAILLWKFSRFARNRDDAVMYKSILRKQLGIDVISISEPVAEGGMGLITEALIEAMDEYYSINLAQEVKRGMEEKHRRGEVQCAPPYGYGLKDHVYVPKPPEDDYVREIFRRYLAGEGFFPLARWLNSCGQRTHRGGKFENRTVEYILRNPVYIGKLRWNPTGRTRRDYKNENVVLSDGKHAPLIDEETFSAVQRRIDEQKLLYPKYSRQSWTQKHWVSGLVHCAACGGSLVVNTPEHLVCKNYIHGSCLVRQSIRRDVLEDALLSRFREDAARGSSPEFEVVRSGDNGVSAMAALEASRDSAARMLDRLRDAYLTGADTVEEYKASKAAVQQRIADLDAQIAAMQKEDRAAADPKLLRSALRSVVKTLQSPDATVAEKNAAVRSVAENITWNKAANTLTVHYRLVL

SEQ ID NO: 5936 - protein, 498 aa, Unknown
  Description of Unknown: Integrase B5937 sequence
  cd03768,PTHR30461:SF3,SM00857,G3DSA:1.10.10.2600,IPR036162, PF13408,PS51737,IPR025827,G3DSA:3.40.50.1390,IPR006119, IPR038109,PF07508,IPR011109,SSF53041,PTHR30461, PS51736,Coil,PF00239
MNNRIDAIYARQSVDKKDSISIESQIEFCKYELKGGNCKEYTDKGYSGKNTDRPKFQELVRDIKRGLIAKVIVYKLDRISRSILDFANMMELFQQYDVEFVSSTEKFDTSTPMGRAMLNICIVFAQLERETIQKRVADSYYSRSLKGFRMGGKAPYGFHTEPIKIDGINTKKLVANPEEAEQVKLMFEMYAEPGTSYGDIVRHFAEHGIKDFSRPALASLLCNPIYVKADLDIYEFFKSQGTVIINDAADFTGTNGCYFYRGRGMKGDTKHNLQGHTLVMAPSEGLVSSELWLKCRKKILANASYQAGRKAVNTWLAGKIKCGRCQKALKAEGSYGRWYFRCSKRSDNKSCEGAGTLRIPDTEAIIYAAMVKKLKPFQTIKGRKNAMKSNPKLTALQVELAQVQHEIETLIDTLTGANPILLSYVNSKIEELDGRKQELVKKIAELSVDTISPEQVKEISGYLDTWEEVDFDDKRRVVDLMISAIYATSESINIVWKI

SEQ ID NO: 5937 - protein, 498 aa, Unknown
  Description of Unknown: Integrase B5938 sequence
  PTHR30461:SF3,cd00338,SM00857,G3DSA:1.10.10.2600,IPR036162, PF13408,PS51737,G3DSA:3.40.50.1390,IPR025827,IPR006119, IPR038109,PF07508,IPR011109,SSF53041,PTHR30461, PS51736,Coil,PF00239
MKRAVFYGRYSSDRQTEQSIEGQRRVCEEFAKAEQIQIVGEYIDRATSGTSTEHREQFQKMLKDSKNGGWDYVLVYKLDRFARSRYDSAISKQQLKKNGVKVLSATERITDSPEGILIEGLLESMDEYFSRELSRKCKRGIRESIIKGHNFGGRVLYGYDRKDKRFVINEEQAVNVRRIFKSYLSGCTIQSIADQLNADGYRTNYGNEFKRYTVSDILHNDKYTGIHYIDGIEEPETCPAIISQTTFERVKEKLNQSAHRSREHATGHTYALSGLLQCGVCGRYVCGSSVERKYFYYACRSREHAENSVHIHADKLEQVVIDALQTFFTEEQVSTLAERLYQIYTTDMDGKPDRSKRLNEIEKQIQGTVNALIACPSSKALQEKLTQLEEQKAEIEKMPILQPQLKKEHFENYFHWLALRLEHIEDRQTFFHTVIHKVLVYPEKAVIILNMTDEMADPPKREQVEAFMSNVGEVSPCPTLYKLYVTSFAIFIRAALIK

SEQ ID NO: 5938 - protein, 498 aa, Unknown
  Description of Unknown: Integrase B5939 sequence
  IPR036162,PS51737,IPR011109,PTHR30461,PS00397, PF00239,G3DSA:1.10.10.2600,IPR006119,SSF53041,cd00338, SM00857,IPR025827,IPR038109,PS51736,IPR006118, PF13408,G3DSA:3.40.50.1390,PF07508,Coil
MTPPKGFTSSVHAPLPVIRIAAAYIRVSTDEQVELSPASQLVEIRKWAARNGYIVPDEFVFMDEGISGRGVKKRDEFRRMIGVAKSKPKPFDAILLWKFSRFARNRDDAVMYKSILRKQLGIDVISISEPVAEGGMGLITEALIEAMDEYYSINLAQEVKRGMEEKHRRGEVQCAPPYGYGLKDHVYVPKPPEDDYVRELFHRYLAGEGFFPLARWLNSCGQRTHRGGKFENRTIEYILRNPVYIGKLRWNAAGHTRRDYANENVVLSDGKHEPLIDEETFNAVQHRIDEQKLLYPKFSRRSGTQKYWVSGLVHCAACGGTLVANTPEYMVCNNYIRGACLVRQSIRRDVLEDALLSRLREDAARGSSPEFEVVRSGDGGMSAMTALEASRDSAARMLDRLRDAYLTGADTVEEYKASKAAVQQRIADLDAQIAAMQKEDKAAADPKLLRSALRSVVKTLQSPDATVAEKNAAVRSVAENITWNKAANTLTVHYRLVL

SEQ ID NO: 5939 - protein, 498 aa, Unknown
  Description of Unknown: Integrase B5940 sequence
  IPR036162,PS51737,IPR011109,PTHR30461,PS00397, PF00239,G3DSA:1.10.10.2600,IPR006119,SSF53041,cd00338, SM00857,IPR025827,IPR038109,PS51736,IPR006118, PF13408,G3DSA:3.40.50.1390,PF07508,Coil
MNQNESLKTAFGYIRVSTHMQEEISPEAQKHELQKWAKQHNILITQWFQDNGISGKKAENRTAFQNMIALAKEKDHPDYILAWKFSRFARNQEESIVYKSLLRKNGVQVVSISEPLPDGPFAPLIERIIEWMDEYYSIRLSGEVKRGMKEKAKKGGYQSAPPLGYRREKGDTVPAIYEPEAKIYRLIKKYFIQDEYNPTTIARTLNDQGYRTRQGNRFEARVIIYILRNPFYIGKIRWNRSSHGGYYENSPDEVIVSDGQHEPLCTNEEWDIISKRIKKYTPGSTGRRRSKTLLPHYLSGGLFRCPICGASMCYQRGVSKKLPRAYPYFCCWKYAKGIHSENVNVGSPKTEEALLNSLQEFVDHGHSNITYTVEKVEEPSGNDAAQYEQLLDKLAIQKQRAKEAYLDGIDTKEEYRENRELIDAEVKSIKEKLATLETAAVITTTEEFHVDIREIILKLKDDTLSTLEKHTALASILDYMEYDKERDEYSFYYKFEME

SEQ ID NO: 5940 - protein, 498 aa, Unknown
  Description of Unknown: Integrase B5941 sequence
  IPR036162,PS51737,IPR011109,PTHR30461,PS00397, PF00239,G3DSA:1.10.10.2600,IPR006119,SSF53041,cd00338, SM00857,IPR025827,IPR038109,PS51736,IPR006118, PF13408,G3DSA:3.40.50.1390,PF07508,Coil
MTPPKGFSSSAHAPLPDLRIAAAYIRVSTDDQVELSPASQLVEIRKWAARNGYIVPDEFVFMDEGISGRGVKKRDEFRRMIGVAKTKPKPFDAILLWKFSRFARNRDDAVMYKSILRKQLGIDVISISEPVAEGGMGLITEALIEAMDEYYSINLAQEVKRGMEEKHRRGEVQSNPPYGYGIKDHVFVPKPPEDGFVKELFRRYLAGEGCFPLARWMNECGQRTHRGGRFENRTIEYILRNPVYIGKLRWNPAGRTRRDFSNENVVLVDGKHEPLIDEETFNAVQRRIDEQKLLYPRYARASGTQKHWISGLVRCAACGGGLIVNTPDYMACNNYVRGSCRVRQTVRRDALEAALISRLREDAARGSSLTFDVVRSSDGSASSLSAVEAARDSAVRMLDRLRDAYLTGADTVEEYKASKAAVQQRIADLDAQIAAMQKEDRAAADPKLLRSALRAVVKTLESPDTTVAEKNAAVRSVADNITWNKAANTLTIHYRLVL

SEQ ID NO: 5941 - protein, 498 aa, Unknown
  Description of Unknown: Integrase B5942 sequence
  cd03768,PTHR30461:SF3,SM00857,G3DSA:1.10.10.2600,IPR036162, PF13408,PS51737,G3DSA:3.40.50.1390,IPR025827,IPR006119, IPR038109,PF07508,SSF53041,IPR011109,PTHR30461, PS51736,Coil,PF00239
MKIAIYTRKSVAVERSESIQTQIEMCKKYFKGKNEFEIFEDEGFSGGNTNRPSFKKMMSLVKLGKFDAVAVYKVDRIARNIVDFFKIFDELEKYNVKLISITEGFDPSTPSGKMMMVMLAGFADMERENIRQRVKDNMIALAKKGCYTGGFVPFGCVTVNIEGKSYLQVKDKDLIKLIFKKYYELGSLYSTQKYLKENGFKTLSNRSSLNRILRNPVYAKSSKEINDYFKTNGYLVHGTPNGKGYITYGKTVNESMLIVSNHSAPISSELFLKVNKMLDEKRDNVAKRFSKTYWLTGTLYCPFCEGKYTIANSNRKTYYMCSNRLNRKNDDTGLDTKKEKCINNKYINAEVLEKKVEELIKRLEASELFEKYYKTSVENNEDNEDNEIDILRKTFNENELAIKNLIDKLALVSNEASRYIVEKIDSLTEKNKEISLSIDNLKLKRLEKSVKITKEEVKELIVRFNKISDVNEKRMMLNKIFEKLAYNPFEDTLDIYFN

SEQ ID NO: 5942 - protein, 498 aa, Unknown
  Description of Unknown: Integrase B5943 sequence
  SM00857,G3DSA:1.10.10.2600,IPR036162,PF13408,IPR025827, G3DSA:3.40.50.1390,PS51737,IPR006119,IPR038109,PF07508, SSF53041,IPR011109,PTHR30461,PS51736,cd00338, PF00239
MVKNRAAIYARFSSHNQRSESIEIQVENSRAYCEREGLQVVREYCDYAQTGRNVNRAEFQRMMNDAKLGLFDFVVIYKVTRIMRNRDEMALARIMLRKAGVEILYAGEEIASGSSGVLQLGMLEVLAEWESAIDSERIRDGIQKNAARCLANGHSLYGWDIVDGRYSVNEREAALMRKMKNMLFSGHSVADIVRALEGEKTRNGKPFNQDKVTKLLRRVQNGGTYSYAGHVVEGGMPGLWPQAEQDMIESVLNDRHRPRRKVDSSKEFPLSGKLYCTKCGMPMAGMSGTSKTGKAYHYYRCRKCRRTVRRDLIEDAVVDMTLQAVARDDVRQRIAQGMALYQSEQEETKPESYYLKKELRRIDAAFERIWQAIENGIAPPGGKERTDELKRRKSEIEAQLRIVERGESLTFGVDELMLWLDEIATELTPLDILNKFVRFAEIDSKNNRVRVYFAFDKHGDGFTPNDVDKGEHLYEERCSPNSTLVEARRIELRSTKAP

SEQ ID NO: 5943 - protein, 498 aa, Unknown
  Description of Unknown: Integrase B5944 sequence
  PTHR30461:SF3,SM00857,G3DSA:1.10.10.2600,IPR036162,PF13408, IPR025827,G3DSA:3.40.50.1390,PS51737,IPR006119,IPR038109, PF07508,SSF53041,IPR011109,PTHR30461,Coil, PS51736,cd00338,PF00239
MKKAVIYARYSSDMQREESIDAQVRACTYYAHQYQFEILRTYADRAQTGKRTKNREQFLQMIADAESHEFEVILVHKLNRFGRNTLEVLEYKDSLEDMGIELISVTERLESTPEGKLMLIIIAGMNEFYSDNLSQEVMKGLKENAYQCKFTGGTPPLGYKVDPESKKLIIDEDEAVIVRLIFQRYANGYGYNSIINELTSLGYHTKSGKLFGKNSLYELLRNEKYIGVYTYNRAAKRKKDGTRNYHSYKDSSDIIRIPGGCPALVDQKTWHCVQKIMEQNKKVHLQQHGQRVYILSGKVFCGLCGAKMYGNCKTTRGKIHYYYVCSNGWRKHTCSSRHIPAEELEEEVIEILEKKIFTLEFSKEVSEQLQNNIQKNQEITQKQRGSISAQLQNVNSKIKNLLNLLARGIDFDELEETLSSLKQEKENLIRSLEVLDQQPKALLHQDFTQNLSKLRDLRPREQSTFLQQYIDKITVFAPKGSNEKVEVEIYIQSNIIQK

SEQ ID NO: 5944 - protein, 498 aa, Unknown
  Description of Unknown: Integrase B5945 sequence
  PTHR30461:SF3,cd00338,SM00857,G3DSA:1.10.10.2600,IPR036162, PF13408,IPR025827,PS51737,G3DSA:3.40.50.1390,IPR006119, IPR038109,PF07508,SSF53041,IPR011109,PTHR30461, PS51736,Coil,PF00239
MYEDIKTACLYVRFSSHNQTEQSIEGQTRVCRDFCKRHNIRIVEIYADRATSASKDIEKRVQFLKMIKDSEKGLFDAVIVYKLDRFARSRYDSATYKYRLKRNGVQLISATENISNDPEGIILESVLEGMAEFYSAELSQKINRGMRESAYKHNSIGGAIPLGYKIEDKKLVIDPKTAPIVKEAFEKYADGETVAEICRQFNARGYKTSKGTAFGKSSFTKIFRNERYIGVYTFHDYRAEDAIPAIIDKDLWDRVQLRVGKIKNAPARNKAKVVYLLSGKIFCGHCGSKMNGNCNAGNYCYYQCYGKKNGNVDCKKKNIRKEFIERLVAQDALSLLTDEYIEQIATIACEKNQHEIELDSALPTIRDRIHQVDLSLNNLLKAIESGSAPDMLVKRMGELEKEKKDLQVQAKKESEDIVELDKAQVIYWLEQFRGGSIEDEEFCRMLIDLFVNSVTVWDEDDGSYKVTVAYNLTSLPTKTYRLNKGGTLSDFTSNAPAL

SEQ ID NO: 5945 - protein, 498 aa, Unknown
  Description of Unknown: Integrase B5946 sequence
  PTHR30461:SF3,cd00338,SM00857,G3DSA:1.10.10.2600,IPR036162, PF13408,PS51737,G3DSA:3.40.50.1390,IPR025827,IPR006119, IPR038109,PF07508,IPR011109,SSF53041,PTHR30461, PS51736,Coil,PF00239
MKRAVFYGRYSSDRQTEQSIEGQRRVCEEFAKAEQIQIVGEYIDRATSGTSTEHREQFQKMLKDSKNGGWDYVLVYKLDRFARSRYDSAISKQQLKKNGVKVLSATERITDSPEGILIEGLLESMDEYFSRELSRKCKRGIRESIIKGHNFGGRVLYGYDRKDKRFVINEEQAVNVRRIFKSYLSGCTIQSIADQLNADGYRTNYGNEFKRYTVSDILHNDKYTGIHYIDGIEEPETCPAIISQTTFERVKEKLNQSAHRSREHATGHTYALSGLLQCGVCGRYVCGSSVERKYFYYACRSREHAENSVHIHADKLEQVVIDALQTFFTEEQVSTLAERLYQIYTTDMDGKPDRSKRLNEIEKQIQGTVNALIACPSSKALQEKLTQLEEQKAEIEKMPILQPQLKKEHFENYFRWLALRLEHIEDRQTFFHTVIHKVLVYPEKAVIILNMTDEMADPPKREQVEAFMSNVGEVSPCPTLYKLYVTPFAIFIHAALIK

SEQ ID NO: 5946 - protein, 498 aa, Unknown
  Description of Unknown: Integrase B5947 sequence
  PTHR30461:SF3,cd00338,SM00857,G3DSA:1.10.10.2600,IPR036162, PF13408,PS51737,G3DSA:3.40.50.1390,IPR025827,IPR006119, IPR038109,PF07508,IPR011109,SSF53041,PTHR30461, PS51736,Coil,PF00239
MKRAVFYGRYSSDRQTEQSIEGQRRVCEEFAKAEQIQIVGEYIDRATSGTSTEHREQFQKMLKDSKNGGWDYVLVYKLDRFARSRYDSAISKQQLKKNGVKVLSATERITDSPEGILIEGLLESMDEYFSRELSRKCKRGIRESIIKGHNFGGRVLYGYDRKDKRFVINEEQAVNVRRIFKSYLSGCTIQSIADQLNADGYRTNYGNEFKRYTVSDILHNDKYTGIHYIDGIEEPETCPAIISQTTFERVKEKLNQSSHRSREHATGHTYALSGLLQCGVCGRYVCGSSVERKYFYYACRSREHAENSVHIHADKLEQVVIDALQTFFTEEQVSTLAERLYQIYTTDMDGKPDRSKRLNEIEKQIQGTVNALIACPSSKALQEKLTQLEEQKAEIEKMPILQPQLKKEHFENYFRWLALRLEHIEDRQTFFHTVIHKVLVYPEKAVIILNMTDEMADPPKREQVEAFMSNVGEVSPCPTLYKLYVTPFAIFIRAALIK

SEQ ID NO: 5947 - protein, 498 aa, Unknown
  Description of Unknown: Integrase B5948 sequence
  IPR036162,PS51737,IPR011109,PTHR30461,PS00397, PF00239,G3DSA:1.10.10.2600,IPR006119,SSF53041,cd00338, SM00857,IPR025827,IPR038109,PS51736,IPR006118, PF13408,G3DSA:3.40.50.1390,PF07508,Coil
MTPPKGFSSSAHAPLPDLRIAAAYIRVSTDDQVELSPASQLVEIRKWASRNGYIVPDEFVFMDEGISGRGVKKRDEFRRMIGVAKTKPKPFDAILLWKFSRFARNRDDAVMYKSILRKQLGIDVISISEPVAEGGMGLITEALIEAMDEYYSINLAQEVKRGMEEKHRRGEVQSNPPYGYGIKDHVFVPKPPEDGFVKELFRRYLAGEGCFPLARWMNECGQRTHRGGRFENRTIEYILRNPVYIGKLRWNPAGRTRRDFANENVVLVDGKHEPLIDEETFNAVQRRIDEQKLLYPRYARASGTQKHWISGLVRCAACGGGLIVNTPDYMACNNYVRGSCRVRQTVRRDALEAALISRLREDAARGSSLTFDVVRSSDGSASSLSAVEAARDSAVRMLDRLRDAYLTGADTVEEYKASKAAVQQRIADLDAQIAAMQKEDRAAADPKLLRSALRAVVKTLESPDATVAEKNAAVRSVTDNITWNKAANTLTIHYRLVL

SEQ ID NO: 5948 - protein, 498 aa, Unknown
  Description of Unknown: Integrase B5949 sequence
  IPR036162,PS51737,IPR011109,PTHR30461,PS00397, PF00239,G3DSA:1.10.10.2600,IPR006119,SSF53041,cd00338, SM00857,IPR025827,IPR038109,PS51736,IPR006118, PF13408,G3DSA:3.40.50.1390,PF07508,Coil
MTPPKGFTSPVPAPLPDLRIAAAYIRVSTDEQVELSPASQLVEIRKWAARNGYIVPDEFVFMDEGISGRGVKKRDEFRRMIGVAKSKPKPFDAILLWKFSRFARNRDDAVMYKSILRKQLGIDVISISEPVAEGGMGLITEALIEAMDEYYSINLAQEVKRGMEEKHRRGEVQCAPPYGYGLKDHVYVPKPPEDDYVREIFRRYLAGEGFFPLARWLNSCGQRTHRGGKFENRTVEYILRNPVYIGKLRWNTTGRTRRDYANENVVLSDGKHVPLIDEETFSAVQRRIDEQKLLYPKYSRQSWTQKHWVSGLVHCAACGGSLVVNTPEYLVCKNYIHGSCLVRQSIRRDVLEDALLSRFREDAARGSSPEFEVVRSGDNGVSAMAALEASRDSAARMLDRLRDAYLTGADTVEEYKASKAAVQQRIADLDAQIAAMQKEDKAAADPKLLRSALRSVVKTLQSPDATVAEKNAAVRSVAENITWNKAANTLTVHYRLVL

SEQ ID NO: 5949 - protein, 498 aa, Unknown
  Description of Unknown: Integrase B5950 sequence
  IPR036162,PS51737,IPR011109,PTHR30461,PS00397, PF00239,G3DSA:1.10.10.2600,IPR006119,SSF53041,cd00338, SM00857,IPR025827,IPR038109,PS51736,IPR006118, PF13408,G3DSA:3.40.50.1390,PF07508,Coil
MNQNESLKTAFGYIRVSTHMQEEISPEAQKHELQKWAKQHNILITQWFQDNGISGKKAENRTAFQNMIALAKEKDHPDYILAWKFSRFARNQEESIVYKSLLRKNNVQVVSISEPLPDGPFAPLIERIIEWMDEYYSIRLSGEVKRGMKEKAKKGGYQSAPPLGYRREKGDTVPAIYEPEAKIYRLIKKYFIQDEYNPTTIARTLNDQGYRTRQGNRFEARVVIYILRNPFYIGKIRWNRSSHGGYYENSPEDVIVSDGQHEPLCTSEEWDTISKRIKKYTPGSTGRRRSKTLLPHYLSGGLFRCPICGASMCYQRGVSKKLPRAYPYFCCWKYAKGIHSENVNASAPKTEEALLNSLQEFVDHGHSDITYTVEKVEEPSGNNAAQYEQLLDKLAIRKQRAKEAYLDGIDTKEEYRENRELIDAEVKSIKEKLATLETAAVITTTEEFHVDIREIILKLKDDTLSTLEKHTALASILDYMEYDKEKDEYSFYYKFEAE

SEQ ID NO: 5950 - protein, 498 aa, Unknown
  Description of Unknown: Integrase B5951 sequence
  IPR036162,PS51737,IPR011109,PTHR30461,PS00397, PF00239,G3DSA:1.10.10.2600,IPR006119,SSF53041,cd00338, SM00857,IPR025827,IPR038109,PS51736,IPR006118, PF13408,G3DSA:3.40.50.1390,PF07508,Coil
MTPPKGFTSPAPAPLPDLRIAAAYIRVSTDEQVELSPASQLVEIRKWAARNGYIVPDEFVFMDEGISGRGVKKRDEFRRMIGVAKSKPKPFDAILLWKFSRFARNRDDAVMYKSILRKQLGIDVISISEPVAEGGMGLITEALIEAMDEYYSINLAQEVKRGMEEKHRRGEVQCAPPYGYGLKDHVYVPKPPEDDYVREIFRRYLAGEGFFPLARWLNSCGQRTHRGGKFENRTVEYILRNPVYIGKLRWNPTGRTRRDYKNENVVLSDGKHVPLIDEETFNAVQRRIDEQKLLYPKYSRQSWTQKHWVSGLVHCAACGGSLVVNTPEYLVCKNYIHGSCLVRQSIRRDVLEDALLSRFREDAARGSSPEFEVVRSGDNGVSAMAALEASRDSAVRMLDRLRDAYLTGADTVEEYKASKAAVQQRIADLDAQIAAMQKEDRAAADPKLLRSALRAVVKTLQSSDATVAEKNAAVRSVAENITWNKAANTLTVHYRLVL

SEQ ID NO: 5951 - protein, 498 aa, Unknown
  Description of Unknown: Integrase B5952 sequence
  IPR036162,PS51737,IPR011109,PTHR30461,PS00397, PF00239,G3DSA:1.10.10.2600,IPR006119,SSF53041,cd00338, SM00857,IPR025827,IPR038109,PS51736,IPR006118, PF13408,G3DSA:3.40.50.1390,PF07508,Coil
MNQNESLKTAFGYIRVSTHMQEEISPEAQKHELQKWAKQHNILITQWFQDNGISGKKAENRTAFQNMIALAKEKDHPDYILAWKFSRFARNQEESIVYKSLLRKNNVQVVSISEPLPDGPFAPLIERIIEWMDEYYSIRLSGEVKRGMKEKAKKGGYQSAPPLGYRREKGDTVPVIYEPEAKIYRLIKKYFIQDEYNPTTIARTLNDQGYRTRQGNRFEARVIIYILRNPFYIGKIRWNRSSHGGYYENSPEDVIVSDGQHEPLCTNEEWDIISKRIKKYTPGSTGRRRSKTLLPHYLSGGLFRCPICGASMCYQRGVSKKLPRAYPYFCCWKYAKGIHSENVNASAPKTEDALLNSLQEFVDHGHSNITYTVEKVEEPSGNDAAQYEQLLDKLAIRKQRAKEAYLDGIDTKEEYRENRELIDAEVKSIKEKLATLETAAVITTTEEFHVDIREIILKLKDNTLSTLEKHTALASILDYMEYDKEKDEYSFYYKFEAE

SEQ ID NO: 5952 - protein, 498 aa, Unknown
  Description of Unknown: Integrase B5953 sequence
  PTHR30461:SF3,cd00338,SM00857,G3DSA:1.10.10.2600,IPR036162, PF13408,IPR025827,PS51737,G3DSA:3.40.50.1390,IPR006119, IPR038109,PF07508,IPR011109,SSF53041,PTHR30461, PS51736,Coil,PF00239
MKRAVFYGRYSSDRQTEQSIEGQRRVCEEFAKAEQIQIVGEYIDRATSGTSTEHREQFQKMLKDSKNCGWDYVLVYKLDRFARSRYDSAISKQQLKKNGVKVLSATERITDSPEGILIEGLLESMDEYFSRELSRKCKRGIRESIIKGHNFGGRVLYGYDRKDKRFVINEEQAVNVRRIFKSYLSGCTIQSIADQLNADGYRTNYGNEFKRYTVSDILHNDKYTGIHYIDGIEEPETCPAIISQTTFERVKEKLNQSAHRSREHTTGHTYALSGLLQCGVCGRYVCGSSVERKYFYYACRSREHAENSVHIHADKLEQVVIDALQTFFTEEQVSTLAERLYQIYTTDMDGKPDRSKRLNEIEKQIQGTVNALIACPSSKALQEKLTQLEEQKAEIEKMPILQPQLKKEHFENYFRWLALRLEHIEDRQTFFHTVIHKVLVYPEKAVIILNMTDEMADPPKREQVEAFMSNVGEVSPCPTLYKLYVTPFAIFIRAALIK

SEQ ID NO: 5953 - protein, 498 aa, Unknown
  Description of Unknown: Integrase B5954 sequence
  PTHR30461:SF3,IPR036162,PS51737,IPR011109,PTHR30461, PS00397,PF00239,G3DSA:1.10.10.2600,IPR006119,SSF53041, SM00857,IPR025827,IPR038109,PS51736,cd03768, IPR006118,PF13408,G3DSA:3.40.50.1390,PF07508,Coil
MDSARLRVACYVRVSTREQAEKGYSVSEQQERLKAYCLAKDWVVAQVITDPGFSGAKLERPGMQQLISLVQTKKCGAVLVWKLDRLSRSQKDTLYLIEDVFLKNGCAFVSMNENFDTSTAFGRAMIGILSVFAQLEREQIRERMAVGRVGRAKAGLFHGGGYAPIGYDYKTIAEGGDGLVVNEYEAMQVREVFSLYLQGWPVNRIRKYMAAHYTTKDGDWGSDTTVRDVLKNPLYTGKINWAKKVYDGQHEPLISQETFDAAAARLATSSWKRTCSDGMERNSPFKSTHLLGGIIWCARCGARYFASGNYSGRGENKRYWPYYVCYSRAKSAKHMIRDPNCQNDRWAVAKLDAIIEGEIRKLAFDPAALELAVSGPQQDEDVAQRRAALQQRLNDLRAQMGRVLDLYQMGGSLPASMVGDRVAKLQAEIDGVEAALAEAVEEPPTQRLDAARAALVGAEDVLDNGTLDERRELVHSLIRRIDLDGENIDIHWSFSPEA

SEQ ID NO: 5954 - protein, 498 aa, Unknown
  Description of Unknown: Integrase B5955 sequence
  PTHR30461:SF3,IPR036162,PS51737,IPR011109,PTHR30461, PF00239,G3DSA:1.10.10.2600,IPR006119,SSF53041,cd00338, SM00857,IPR025827,IPR038109,PS51736,mobidb-lite, PF13408,G3DSA:3.40.50.1390,PF07508,Coil
MEEKLRAAAYGRVSTNSKEQTHSFENQSEYWSKKLANDAKYEYVGLYADKGISGRHLHCRPQMLALLDACRRGEVQIIFTKSVQRFARNTVELLETVRELRDMNVAVIFEKENINTLTAESELYLTIAAAVAEEDLNRYGENVAWTIKDRFEKGDISVVGIRMLGYRMKNKEFEIIPHEAEVVKEMFELYATGNYSTRVLADIMNKSGYRTMHGCLWTQQHILQTLTNEKYKGDSLLYKRTNVNGQQVMNRGVKDMLYVENSHDAIVSPELWNKVAEVINARGNMKLRGKTIDRYPFTSLIKCPICGQSYIHKINNSGTKYTCPIWKCRTLLADGKKGCSNSGIKDSVLKEKFIEAYNEFIENRNFGNDEDAAERELKKLNAEENELISLHVRGLISKHDYEHDKNDIRARRKALEQKVRDYRQAHIKRGAAKPINEFDEELVGRLIKGVTIKDYVVTFEFYNGVTISRAYTNGPSGNQKGWKEKKRLKEAQTNGSSN

SEQ ID NO: 5955 - protein, 498 aa, Unknown
  Description of Unknown: Integrase B5956 sequence
  PTHR30461:SF3,IPR036162,PS51737,IPR011109,PTHR30461, PS00397,PF00239,G3DSA:1.10.10.2600,IPR006119,SSF53041, cd00338,SM00857,IPR025827,IPR038109,PS51736, IPR006118,PF13408,G3DSA:3.40.50.1390,PF07508,Coil
MADIQPVKNGALYIRVSTHLQEELSPDAQKRLLMEYAEAHNIIVLKEHIYIDSGISGRSARQRPQFNNMIAEAKSKEHPFDVILVWKYSRFARNQEESIVYKSMLKRENVDVISVSEPISDDPFGSLIERIIEWMDEYYSIRLSGEVSRGMAENAMRGNYQARPPLGYRIPGYRQTPVIVPEEAELIQLIFDLYTEKKMGIFEIVRYLNEHGYQTGHKKPFQRRSVTYILKNPTYIGKTIWNQHDQDHKLRDKSEWIIADGKHEPIISKEQFDKAQKRIESTYKPAYRKPTSVCHHWLSSLLKCSSCGRTLVVKRTASKKKDRMYVNFQCYGYQKGICNTNQSISAIKLEPVIMHSLEDAITSGKIHFDVLNPTTLDSSQKQQLLTRLNEIEKKEERIKRAYRDGIDTLEEYKENKSIIQTEKEMLLKKIEHIEEPALSPEEAKPIMMDRIKNVYEVITNPDIGMEEKNKAARSIIEKIVFDRATGSVNIFFYLANCP

SEQ ID NO: 5956 - protein, 498 aa, Unknown
  Description of Unknown: Integrase B5957 sequence
  cd00338,SM00857,G3DSA:1.10.10.2600,IPR036162,PS51737, G3DSA:3.40.50.1390,IPR006119,IPR038109,PF07508,IPR011109, SSF53041,PTHR30461,PS51736,Coil,PF00239
MTQKTAVIYARFSCSKQREASIDDQLRVCREWCDREGYEVVREYSDYAMSGRSDDRPQFQEMIANAGESDIVLVYMMDRFSRSEYDAPIYKKELAKHGVEVVSAMEALPDGPEKILIEKIYEGLAAVESAKTSIRVKRGMGGNALKCLTNGVRIYGYRTAEDGRFEIDPDAAENVKWAYKMRLRGIAVNQIGTMLAERGVKNSTGGACNYNLARKILSDERYTGVYIWDDVRIEGGMPQIIDRGTFMEAQEVRSRKCRADESWGDYALKGKALCGECGRSLQGISGYGNKGVRYEYYSCPGKCQKNIRRDLLEGEIVHALRSMLSDRSTAMMIARALCGLQSHKALNIEKERAQKSLSDAEKSLKNLLSAVEQGIIVPGTKERIQELEAQKMRALRDLESAQSEEVDPEGFADFLMYGEELDDRNLLRAFVYQVMLMPESVVVTLNYDEENGEPARINFKRVRGKLEWCPIAMLSRTLGHQVCIAVFGKSILLRITFG

SEQ ID NO: 5957 - protein, 498 aa, Unknown
  Description of Unknown: Integrase B5958 sequence
  PTHR30461:SF3,SM00857,G3DSA:1.10.10.2600,IPR036162,PF13408, IPR025827,G3DSA:3.40.50.1390,PS51737,IPR006119,IPR038109, PF07508,SSF53041,IPR011109,PF00239, PTHR30461,PS51736,Coil,cd00338
MTAVIYARYSSDNQREESIEGQIRECTAYAEKNGITVIKHYIDRALSAKTDNRPEFQQMIKDSEKRLFDIVLVWKLDRFARNRYDSAHYEYQLERNHVKLVSATEPISEGPAGIMVKSMLTGMAEYYSAELSEKVVRGMTENVLKGKYNGGTIPIGYTVDEEKFFQIDPLKAPFVVEAFQRYNDGATMKELMNWLNDSGVTTNRNQKFTYNSIQTLLTNRRYIGENRFKDIVMPDSIPVIIEKELFDSVQDKIAKNRRAPARHKAEDDYLLTTKLFCGMCGAMMFGECGTSRNKNVHHYYKCANAKRTKTCKKKTVRKEWLEDLVVCETMKMIHDDDCIQSIVDAVMILQEQENTVLPLLEKQMKDIENGIENLLNAIQAGVLTSSTKGRLEKLEAQQKELEIRIAEEKLAKPKVSADFVKFWLTNFRKLDPNVKSHRETLINTFVNAVYLYDEKVLITFNYKDGTKTITFDEIAAKDAPEGNGSDLGCFAPPKKFNV

SEQ ID NO: 5958 - protein, 498 aa, Unknown
  Description of Unknown: Integrase B5959 sequence
  PTHR30461:SF3,SM00857,G3DSA:1.10.10.2600,IPR036162,PF13408, PS51737,G3DSA:3.40.50.1390,IPR025827,IPR006119,IPR038109, PF07508,SSF53041,IPR011109,PTHR30461,Coil, PS51736,cd00338,PF00239
MLGTLPGCAKIYHTRYNIPSAFIILSRHDGKLKEIDKNCGDIMRNKEIAPALVRVALYIRVSGEEQKIKGLSLEAQQERLEAYARERGWVIVGIYIDAAKTARKNIHKRTEFQRMMDSVKRDEVDILLFARLDRWFRSVADYYKVMEILQAHNCDWKTTDEEYDTTTANGRLYINVKLSIAQNEADIDGERIDVVFDSKIAHGTVVSGSAPFGFRVNEEKRLEVVPEDAAIVQDAFNYFENTVSQRATVRYVRETYGVNWCDATFRRMLKEKLYTGVYDRGGRYNDQFCPAIIDRQQFDRVQALLTRNVRSAPSGKVYIFTSILTCAECGHKLVGYKSSDYFYYRCNQHFQRGRCSHNHSVREDVVEAWLFDHLGEELERCQLEWDVEAAKKKASVARTDKAALKRKLTKLKELYVNDLIDIEDYKKDYQIYVSALNQIPEPAQEAPPDFAAVRRLLDNSFRTIYDTLTREEKRTLWRSVIKEIRIDNDQNITGVVFG

SEQ ID NO: 5959 - protein, 498 aa, Unknown
  Description of Unknown: Integrase B5960 sequence
  PTHR30461:SF3,IPR036162,PS51737,IPR011109,PTHR30461, PS00028,PF00239,G3DSA:1.10.10.2600,IPR006119,SSF53041, IPR013087,cd00338,SM00857,IPR025827,IPR038109, PS51736,PF13408,G3DSA:3.40.50.1390,PF07508,Coil
MKKELINGVIYARYSPGPNQTDQSIEGQVHDCEEYARRNNIRIIKIYADRHLSGKDSVHRNEFQQMLRDAESQQFSTVITWKIDRFGRNREEIALNKYRLRKSGVSVRYALENIPTGPEGIILESMLEGMAEYYSAELAQKIRRGQRESVAKGRILGVKGTYGYKKDKDLHFVVDEPAAAVVREIFQQYADGMMQKDIISLLNSKSIKKADGRPFTPNAIRRLLSNRQYIGEYRYGDNINMDAIPPIVPVELFNAVQERLATTSKTKAASQARSTVNYLLSGTISCAECGSTYQGESGTGKHGERHYYYKCHGKKNRKTVCHSKNFSKAWLEDFVVQHTVEDVLTDDMISLIADRVVELQQADSVSYAIHALEAQLAACTKKLNNLLAAIEEGIVTPTTKERLLALETEKAEISTALSEEKIKRVPFTRDHVVYWLELFRAGDINSFSFREKLIHTFINHIVIDDDMMFIAYNVSGKEACVPLNSVIEGVRLRSRGVD

SEQ ID NO: 5960 - protein, 498 aa, Unknown
  Description of Unknown: Integrase B5961 sequence
  SM00857,IPR006118,G3DSA:1.10.10.2600,IPR036162,PS51737, G3DSA:3.40.50.1390,IPR006119,IPR038109,PF07508,SSF53041, IPR011109,PF00239,PTHR30461,PS00397,PS51736, Coil,cd00338
MNQNESLKTAFGYIRVSTHMQEEISPEAQKHELQKWAKQHNILITQWFQDNGISGKKAENRTAFQNMIALAKEKDHPDYILAWKFSRFARNQEESIVYKSLLRKNNVQVVSISEPLPDGPFAPLIERIIEWMDEYYSIRLSGEVKRGMKEKAKKGGYQSAPPLGYRREKGDTVPVIYEPEAKIYRLIKKYFIQDEYNPTTIARTLNDQGYRTRQGNRFEARVVIYILRNPFYIGKIRWNRSSHGGYYENSPEDVIISDGQHEPLCTNEEWEIICKRIKKYTPGSTGRRRSKTLLPHYLSGGLFRCPICGASMCYQRGVSKKLPRAYPYFCRWKYAKGIHPENVNASAPKTEEALLNSLQEFVDHGHSDITYTVEKVEEPSGNNAAQYEQLLDKLAIRKQRAKEAYLDGIDTKEEYRENRELIDAEVKSIKEKLATLETAAVITTTEEFHVDIREIILKLKDDTLSTLEKHTALASILDYMEYDKEKDEYSFYYKFEAE

SEQ ID NO: 5961 - protein, 498 aa, Unknown
  Description of Unknown: Integrase B5962 sequence
  PTHR30461:SF3,cd00338,SM00857,G3DSA:1.10.10.2600,IPR036162, PF13408,PS51737,G3DSA:3.40.50.1390,IPR025827,IPR006119, IPR038109,PF07508,IPR011109,SSF53041,PTHR30461, PS51736,Coil,PF00239
MKTAVIYARYSSDKQTEQSIEGQLYDCYNYAKANNITVIGEYIDRAMTGRNDDRPDFQRMISDSAKHTFELVLVWKLDRFARSTEDAAYNRGKLKRNGVRLLSIKEDFGDSSAGDLMMHVMESFNEFYSADLREKTVRGMHQSALKCQSTGGQIPIGYKIEGKKYVIDESARFIPETVFRMYAEGKRLAEIARYLNEKGYRTRMGRKFTTGSFYTMLSNEKYIGVYKYGDVRIEGGYEAMIDPVLFDAVQKKLVENKKRAPKISERENFYLTGKLFCGHCGEPMNGMSGNSAKGKHLYYRCNGVRKHTGCDKRTERKEELENEIIGAIQRAFANADPEELTRKVIENYEKNFRPADQVKVMKAELQKITNKVDNVVNAIAEMGGNETLYTQLRQLTEQKEQKETEIRIAEHKADDMPTVELVKKILDLIQNADTMTDEGRQLLIDGAVSRIYVYDDSLDIYFKGGKNTEIPLNPANKDDVSDNSFACCKEWGAKLSLK

SEQ ID NO: 5962 - protein, 498 aa, Unknown
  Description of Unknown: Integrase B5963 sequence
  PTHR30461:SF3,IPR036162,PS51737,IPR011109,PTHR30461, PS00397,PF00239,G3DSA:1.10.10.2600,IPR006119,SSF53041, cd00338,SM00857,IPR025827,IPR038109,PS51736, IPR006118,PF13408,G3DSA:3.40.50.1390,PF07508,Coil
MADIQPVKNGALYIRVSTHLQEELSPDAQKRLLMEYAEAHNIIVLKEHIYIDSGISGRSARQRPQFNNMIAEAKSKEHPFDVILVWKYSRFARNQEESIVYKSMLKRENVDVISVSEPISDDPFGSLIERIIEWMDEYYSIRLSGEVSRGMAENAMRGNYQARPPLGYRIPGYRQTPVIVPEEAELIQLIFNLYTEEKMGIFEIVRYLNEHGYQTGHKKPFQRRSVTYILKNPTYIGKTIWNQHDQDHKLRDKSEWIIADGKHEPIISKEQFDKAQKRIESTYKPAYRKPTSVCHHWLSSLLKCSSCGRTLIVKRTASKQKDRMYVNFQCYGYQKGICNTNQSISAIKLEPVIMHSLEDAMTSGKIHFDVLNPTTLDSSQKQQLLTRLNEIEKKEERIKRAYRDGIDTLEEYKENKSIIQTEKEMLLKKIEHIEEPALSQEEAKPIMMDRIKNVYEVITNPDIGMEEKNKAARSIIEKIVFDRATGSVNIFFYLANCP

SEQ ID NO: 5963 - protein, 497 aa, Unknown
  Description of Unknown: Integrase B5964 sequence
  IPR036162,PS51737,IPR011109,PTHR30461,PS00397, PF00239,G3DSA:1.10.10.2600,IPR006119,SSF53041,cd00338, SM00857,IPR025827,IPR038109,PS51736,IPR006118, PF13408,G3DSA:3.40.50.1390,PF07508,Coil
MNQNESLKTAFGYIRVSTHMQEEISPEAQKHELQKWAKQHNILITQWFQDNGISGKKAENRTAFQNMIALAKEKDHPDYILAWKFSRFARNQEESIVYKSLLRKNNVQVVSISEPLPDGPFAPLIERIIEWMDEYYSIRLSGEVKRGMKEKAKKGGYQSAPPLGYRREKGDTVPAIYEPEAKIYRLIKKYFIQDEYNPTTIARTLNDQGYRTRQGNRFEARVVIYILRNPFYIGKIRWNRSSHGGYYENSPEDVIVSDGQHEPLCTNEEWDIISKRIKKYTPGSTGRRRSKTLLPHYLSGGLFRCPICGASMCYQRGVSKKLPRAYPYFCCWKYAKGIHPENVNASAPKTEEALLNSLQEFVDHGHSDITYTVEKIEEPSGNDAAQYEQLLDKLAIRKQRAKEAYLDGIDTKEEYRENRELIDAEVKSIKEKLATLETAAVITTTEEFHVDIREIILKLKDDTLSTLEKHTALASILDYMEYDKEKDEYSFYYKFEE

SEQ ID NO: 5964 - protein, 497 aa, Unknown
  Description of Unknown: Integrase B5965 sequence
  PTHR30461:SF3,IPR036162,PS51737,IPR011109,PTHR30461, PS00397,PF00239,G3DSA:1.10.10.2600,IPR006119,SSF53041, cd00338,SM00857,IPR025827,IPR038109,PS51736, IPR006118,PF13408,G3DSA:3.40.50.1390,PF07508,Coil
MSEKLKEVCAYIRVSTDKQEELSPESQIRLIKDYAEQHNMLLTRIYQEDKGISGKKADKRPAFQEMIATCKEKSHPYDAILLWKFSRFARNIDESTYYKSVLRKKCNVDVISISEPITEGMYGRLIEMVIEWSDEFYLYNLSGEVMRGMTQKALKGGYNSNVPIGYIKERGRDKIPQIEPKGAEIVRKIFNMYTEQNIPMGDIAARLNQSGYRTARGSLFETRVIGYILENPFYIGKIRWNFFDKQSNKRKNPDDVIISDGKHEAIISEEQFSKAANRRAHDRLRTGYNKKRRPAPLLANWLSGMIKCSKCGASLGFARGGSKSVPNFCCWKHSKGLCSVHNGITLKNAEKEVLSILEELSGSGYFYNYNLNVINTENTERGYILKELKSLDAKMKRIKDAYINEIDTLEEYKTNKELILKRRTELNEKLEAATITIHPASVHKDVDFQGLIDIIKDENSNDTKKHNALLEVVDHFVWDKETQEMTVVLNGNILTAK

SEQ ID NO: 5965 - protein, 497 aa, Unknown
  Description of Unknown: Integrase B5966 sequence
  IPR036162,PS51737,IPR011109,PTHR30461,PS00397, PF00239,G3DSA:1.10.10.2600,IPR006119,SSF53041,cd00338, SM00857,IPR025827,IPR038109,PS51736,IPR006118, PF13408,G3DSA:3.40.50.1390,PF07508,Coil
MNQNESLKTAFGYIRVSTHMQEEISPEAQKHELQKWAKQHNILITQWFQDNGISGKKAENRTAFQNMIALAKEKDHPDYILAWKFSRFARNQEESIVYKSLLRKNNVQVVSISEPLPDGPFAPLIERIIEWMDEYYSIRLSGEVKRGMKEKAKKGGYQSAPPLGYRREKGDTVPVIYEPEAKIYRLIKKYFIQDEYNPTTIARTLNDQGYRTRHGNRFEARVVIYILRNPFYIGKIRWNRSSHGGYYENSPEDVIVSDGQHEPLCTNEEWDIISKRIKKYTPGSTGRKRSKTLLPHYLSGGLFRCPICGASMCYQRGVSKKLPRAYPYFCCWKYAKGIHPENVNASAPKTEEALLNSLQEFVDHGHSDITYTVEKAEEPSGNDAAQYEQLLDKLAIRKQRAKEAYLDGIDTKEEYRENRELIDAEVKSIKEKLATLETAAVITTTEEFHVDIREIIMKLKDDTLSTLEKHTALASILDYMEYDKEKDEYSFYYKFEE

SEQ ID NO: 5966 - protein, 497 aa, Unknown
  Description of Unknown: Integrase B5967 sequence
  PTHR30461:SF3,SM00857,G3DSA:1.10.10.2600,IPR036162,PS51737, G3DSA:3.40.50.1390,IPR006119,IPR038109,PF07508,SSF53041, IPR011109,PTHR30461,Coil,PS51736,cd00338, PF00239
MRYAIYLRKSRADDTSEPLEVTLQRHRQMLEKYMQQHDIAVQDEDVFEEVVSGDSLYARPQMLRLLEAVEAGTYTGVLCVDIQRLGRGSMQDQGMILDAFKWSDTKIITPTRTYDLSNDMDETYTEFESFMGRQEYKMIKKRLRRGLNATIENGGYIANAPYGYDKTKIGKTPSLKINEAEAKFIHMIFDLYQGGMGALTIATTIDRLGAKPRRGEHFARSTILKILKNDVYRGKIVWNRKTCVRPGQRGNEHHLTIYNAPEKWTVVDGLHPAIIDNEQFEAVQRILAGHYHPPANTGKRINPLAGLVLCGNCGRPLQRIAIQSAGGPLLGCQVPGCIVSSKLEYVEQAVLREIQKEFDKLCANAEQKQQESQIDYAAMAKSIDAEISTAHQQLGRLYDLVEQGVYTIEVFNERRGALLSRISALEDERKNLVPPQQLDLEKMRANIEAVFDAYPTADFNTKNQLLKSIIDKIVYNKQKGVQPKGFTLEVFLHCLYL

SEQ ID NO: 5967 - protein, 497 aa, Unknown
  Description of Unknown: Integrase B5968 sequence
  PTHR30461:SF3,IPR036162,PS51737,IPR011109,PTHR30461, PS00397,PF00239,G3DSA:1.10.10.2600,IPR006119,SSF53041, cd00338,SM00857,IPR025827,IPR038109,PS51736, IPR006118,PF13408,G3DSA:3.40.50.1390,PF07508,Coil
MENIFHTAAIYARVSTKKQAREGFSLESQIKACRKKANELGITNIVEYTDETSGTTLNRPGLLKLRKEIKNGTIDIVICYDQDRLSRKLGQQLFITEEFEKFCKKLVFVYGDYKHSVDGRLSYLIKGAIAEYEREKILERCMRGKKEKFLKGEITNSHLFGYKYNKNKKTYEINDDEAKVVRRIFDLYINGMSSRQILMLFQMENIPKFFRGKSVGWNDPSVILRILKNDSYTGVFHAFKHNSPKEKNRYKDKSEWINIPIPAIIDKEQFELANKKIKENTDNSSRNEKRTHLLSRIARCTCGRSIYSRTANNKDYYICASKNYKKKDESKYNNCLTSRFMLADKVDEIFWKALSKICISKENIEKYVNQQENNIKVDSILLQIKKIEESINKKKKEQNKIIEWFTDSLIDDNLAKEKLEKISKLLINLKKQKEELTKSVNRKNKPEFIYNIFKNEKKVTLEEKRNLIRKIVDKVYVERIDDNKNSKMDIRIYIIFK

SEQ ID NO: 5968 - protein, 497 aa, Unknown
  Description of Unknown: Integrase B5969 sequence
  IPR036162,PS51737,IPR011109,PTHR30461,PS00397, PF00239,G3DSA:1.10.10.2600,IPR006119,SSF53041,cd00338, SM00857,IPR025827,IPR038109,PS51736,IPR006118, PF13408,G3DSA:3.40.50.1390,PF07508,Coil
MNQNESLKTAFGYIRVSTHMQEEISPEAQKHELQKWAKQHNILITQWFQDNGISGKKAENRTAFQNMIALAKEKDHPDYILAWKFSRFARNQEESIVYKSLLRKNNVQVVSISEPLPDGPFAPLIERIIEWMDEYYSIRLSGEVKRGMKEKAKKGGYQSAPPLGYRREKGDTVPVIYEPEAKIYRLIKKYFIQDEYNPTTIARTLNDQGYRTRQGNRFEARVVIYILRNPFYIGKIRWNRSSHGGYYENSPEDVIVSDGQHEPLCTNEEWDIISKRIKKYTPGSTGRRRSKTLLPHYLSGGLFRCPICGASMCYQRGVSKKLPRAYPYFCCWKYAKGIHPENVNASAPKTEEALLNSLQEFVDHGHSDITYTVEKVEEPSGNDAAQYEQLLDKLAIRKQRAKEAYLDGIDTKEEYRENRELIDAEVKSIKEKLATLETAAVITTTEEFHVDIREIILKLKDDTLSTLEKHTALAAILDYMEYDKEKDEYSFYYKFEE

SEQ ID NO: 5969 - protein, 497 aa, Unknown
  Description of Unknown: Integrase B5970 sequence
  PTHR30461:SF3,cd00338,SM00857,G3DSA:1.10.10.2600,IPR036162, PF13408,PS51737,G3DSA:3.40.50.1390,IPR025827,IPR006119, IPR038109,PF07508,IPR011109,SSF53041,PTHR30461, PS51736,Coil,PF00239
MKYLIYARVSERGSGFEGQTTIPMQIKICEDYIRIMGGEVFDSRSDEFISGKNIEDRPAFRSIMEELRSGTAEWDAIIVYKFSRISRSLRDSLNIVAELQEHDKGFVSATEHFDCTTTTGQLFFNMLQSFNEFERKRTADTIRDKMMSIAEAGLWPAGRTPYGYKRGGRKDNNLYVDERAAEVIRDIFNQYLSDTPVWSIVRKYRNIMSRSRIFLTLKNPVYVGAIPYGGKIFPGKHQAIINKDVFERVQAKLPTKNGNIRPKAHRYPYLLGGIIFCRCGHRMTPETAKSGRYAYYRCVDAEYCKRRISAEKVEKSVIDFFRNTMRSERIIEKTLAQIDADAAKQAENNQPEITRLKSVITTVKAERERIFRMLLSSELSQSLVNMANTKIADLDEELSGLTERLVLLENQKKIGSEAHNLAKTLLLRTRNFAEALETAGSISKEELRQILLVYIQKVVSIDDKTCDVIVKLGKSSTKDMEWYTQSVEPTTRSLSSK

SEQ ID NO: 5970 - protein, 497 aa, Unknown
  Description of Unknown: Integrase B5971 sequence
  PTHR30461:SF3,IPR036162,PS51737,IPR011109,PTHR30461, PS00397,PF00239,G3DSA:1.10.10.2600,IPR006119,SSF53041, cd00338,SM00857,IPR025827,IPR038109,PS51736, IPR006118,PF13408,G3DSA:3.40.50.1390,PF07508,Coil
MSEKLKEVCAYIRVSTDKQEELSPESQIRLIKDYAEQHNMLLTRIYQEDKGISGKKADKRPAFQEMIATCKDKAHPYDAILLWKFSRFARNIDESTYYKSVLRKKCNVDVISVSEPIVEGMYGRLIEMVIEWSDEFYLYNLSGEVMRGMTQKALKGGYNSNVPIGYIKERGRDKIPQIEPQGAEIVRKIFDMYTEQNITMGDIAARLNKSGYRTSRNSRFETRTVGYILENPFYIGKVRWNYYDRQNNQRKNPDDVIISDGKHEAIVSEEQFSKAASRRAHDRLRTGYNKKRRSAPLLANWLSGMLKCSKCGASLGFARGNSKSVPNFSCWKHSKGLCSVHNGITLKNAEKEVLAILEELSGAEYFFNYNLNVINTENAERGYILKELKSLDSKMKRIKDAYINEIDTLEEYKANKELIARRRTELNERLASATVTTHPASARRAVDFQKLIDIITDENSNDTEKHNALLEVVDHFVWDKETQEMTVVLNQDIVTCI

SEQ ID NO: 5971 - protein, 497 aa, Unknown
  Description of Unknown: Integrase B5972 sequence
  IPR036162,PS51737,IPR011109,PTHR30461,PS00397, PF00239,G3DSA:1.10.10.2600,IPR006119,SSF53041,cd00338, SM00857,IPR025827,IPR038109,PS51736,IPR006118, PF13408,G3DSA:3.40.50.1390,PF07508,Coil
MNQNESLKTAFGYIRVSTHMQEEISPEAQKHELQKWAKQHNILITQWFQDNGISGKKAENRTAFQNMIALAKEKDHPDYILAWKFSRFARNQEESIVYKSLLRKNNVQVVSISEPLPDGPFAPLIERIIEWMDEYYSIRLSGEVKRGMKEKAKKGGYQSAPPLGYRREKGDTVPVIYEPEAKIYRLIKKYFIQDEYNPTTIARTLNDQGYRTRQGNRFEARVVIYILRNPFYIGKIRWNRSSHGGYYENSPEDVIVSDGQHEPLCTNEEWDIISKRIKKYTPGSTGRRRSKTLLPHYLSGGLFRCPICGASMCYQRGVSKKLPRAYPYFCCWKYAKGIHPENVNAGAPKTEEALLNSLQEFVDHGHSDITYTVEKVEEPSGNDAAQYERLLNKLAIRKQRAKEAYLDGIDTKEEYRENRELIDAEVKSIKEKLATLETAAVITTTEEFHVDIREIILKLKDNTLSTLEKHTALASILDYMEYDKEKDEYSFYYKFEE

SEQ ID NO: 5972 - protein, 497 aa, Unknown
  Description of Unknown: Integrase B5973 sequence
  PTHR30461:SF3,SM00857,G3DSA:1.10.10.2600,IPR036162,PS51737, G3DSA:3.40.50.1390,IPR006119,IPR038109,PF07508,IPR011109, SSF53041,PTHR30461,Coil,PS51736,cd00338, PF00239
MNRYAEYIRKSRADDPHESLEETLQKHKEILAKLVLEKGYVVRPEDMYEEVVSGESLYSRPQMLKLLEAVEAGKYAGVLCVDIQRLGRGSMTDQGVILDAFKSSGTKIITPTREYDLANETDETYTEFETFMSRQEYKLIRRRLQRGLRSTIEAGGYIANAPFGYEKCKVGKTPSLRIYEPEAKFVRLAYDLYCQGVGCQHIADRLNAEGAKPHRGDQFNRNSVRFMLTNPVYIGKIVWDRKKHIRKGAKGNAKHITLYTPKDQWTVTQGLHPPLITQDKWDQVQEIFAKRYHTPSYTGVIENPLAGLMICGNCGKHMQRAAHMRGGPFLLCTNRGCIPMSKLPLVEEQALLGISKKLEELRYKADGTQDAEADTSKQEKAAIQAQIETARRQDAKLHDLLEQGVYDIDTFLQRHGVLVDRIKHYEEVLSSIRPTKQLDTDAMADRVEYVLSAYHGATPEERNHLLKSVVEKIVYHKEKGAKPADFTLDVYLLPIYL

SEQ ID NO: 5973 - protein, 497 aa, Unknown
  Description of Unknown: Integrase B5974 sequence
  IPR036162,PS51737,IPR011109,PTHR30461,PS00397, PF00239,G3DSA:1.10.10.2600,IPR006119,SSF53041,cd00338, SM00857,IPR025827,IPR038109,PS51736,IPR006118, PF13408,G3DSA:3.40.50.1390,PF07508,Coil
MNQNESLKTAFGYIRVSTHMQEEISPEAQKHELQKWAKQHNILITQWFQDNGISGKKAENRTAFQNMIALAKEKDHPDYILAWKFSRFARNQEESIVYKSLLRKNNVQVVSISEPLPDGPFAPLIERIIEWMDEYYSIRLSGEVKRGMKEKAKKGGYQSAPPLGYRREKGDTVPVIYEPEAKIYRLIKKYFIQDEYNPTTIARTLNDQGYRTRQGNRFEARVVIYILRNPFYIGKIRWNRSSHGGYYENSPEDVIVSDGQHEPLCTNEEWDIISKRIKKYTPGSTGRRRSKTLLPHYLSGGLFRCPICGASMCYQRGVSKKLPRAYPYFCCWKYAKGIHPENVNASAPKTEEALLNSLQEFVDHGHSDITYTVEKIEEPSGNDAAQYEQLLDKLAIRKQRAKEAYLDGIDTKEEYRENRELIDAEVKSIKEKLATLETAAVITTTEEFHVDIREIILKLKDDTLSTLEKHTALASILDYMEYDKEKDEYSFYYKFEE

SEQ ID NO: 5974 - protein, 497 aa, Unknown
  Description of Unknown: Integrase B5975 sequence
  PTHR30461:SF3,SM00857,G3DSA:1.10.10.2600,IPR036162,PS51737, G3DSA:3.40.50.1390,IPR006119,IPR038109,PF07508,IPR011109, SSF53041,PTHR30461,Coil,PS51736,cd00338, PF00239
MRYAIYLRKSRADDTSEPLEVTLQRHRQMLEKYMQQHDIAVQDEDVFEEVVSGDSLYARPQMLRLLEAVEAGTYTGVLCVDIQRLGRGSMQDQGMILDAFKWSDTKIITPTRTYDLSNDMDETYTEFESFMGRQEYKMIKKRLRRGLNATIENGGYIANAPYGYDKTKIGKTPSLKINEAEAKFIHMIFDLYQGGMGTATIATTIDRLGARPRRGEHFARSTVLKILKNDVYRGKIVWNRKTCVRPGQRGNEQHLTIYNAPEKWTVVDGLHPAIIDNEQFEAVQRILAGHYHPPANTGKRINPLAGLVLCGNCGRPLQRIAIQSAGGPLLGCQVPGCIVSSKLEYVEQAVLLEIQKEFDKLCANAEQKQQESQIDYAAMAKSIDAEISTAHQQLGRLYDLVEQGVYTIEVFNERRGALLSRISALEDERKNLVPPQQLDLEKMRANIEAVFDAYPTADFNTKNQLLKSIIDKIVYNKQKGVQPKGFTLEVFLHCLYL

SEQ ID NO: 5975 - protein, 497 aa, Unknown
  Description of Unknown: Integrase B5976 sequence
  PTHR30461:SF3,cd00338,SM00857,G3DSA:1.10.10.2600,IPR036162, PF13408,PS51737,IPR025827,G3DSA:3.40.50.1390,IPR006119, IPR038109,PF07508,IPR011109,SSF53041,PTHR30461, PS51736,Coil,PF00239
MPKTEEKQAIKAVIYARYSSDRQREESIEGQLRVCEDYAHRNNMTILHTYADRAMTGRSDQRPEFQMMVRDAATMTFDVVLVYKLNRFARNRYDSAKYKHKLKKYGVKVVSAMENIADDPSGILLESVIEGMAEYYSAELAENVTRGMTENALEGKWPGGYVPLGYKLDEQHHLVIDEPKAEIVRMIFQLVLEGHSQKHIIDELNRRHYTTGSGRPFTYNTLRTIFKNEKYIGRLDWGTVHRENALPAILDKRTFEAVQKQLHFRKKNHIRSCNESFLLTGKLFCGCCHSKMVGVSGTSKTGAIYYYYACSAHLKKKCKARNVRKDAIEDLVCEVTTRILSDPEAVEAIARQAIEMQKNKKDSLELQAIKNQIADINKKLQNCVRAVENGLISKTITNHINDYEKQLTRLKDDAARVKLLDGDVELTQQHIEFFFWSIAQKIKTADKYKSILLSSIVRSVIVDKDYIEIQYNYKNELPILQNPVRIESSYLNQMVTR

SEQ ID NO: 5976 - protein, 497 aa, Unknown
  Description of Unknown: Integrase B5977 sequence
  IPR036162,PS51737,IPR011109,PTHR30461,PS00397, PF00239,G3DSA:1.10.10.2600,IPR006119,SSF53041,cd00338, SM00857,IPR025827,IPR038109,PS51736,IPR006118, PF13408,G3DSA:3.40.50.1390,PF07508,Coil
MNQNESLKTAFGYIRVSTHMQEEISPEAQKHELQKWAKQHNILITQWFQDNGISGKKAENRTAFQNMIALAKEKDHPDYILAWKFSRFARNQEESIVYKSLLRKNNVQVVSISEPLPDGPFAPLIERIIEWMDEYYSIRLSGEVKRGMKEKAKKGGYQSAPPLGYRREKGDTVPVIYEPEAKIYRLIKKYFIQDEYNPTTIARTLNDQGYRTRQGNRFEARVIIYILRNPFYIGKIRWNRSSHGGYYENSPEDVIVSDGQHEPLCTNEEWDIISKRIKKYTPGSTGRRRSKTLLPHYLSGGLFRCPICGASMCYQRGVSKKLPRAYPYFCCWKYAKGIHSENVNASAPKTEDALLNSLQEFVDHGHSNITYTVEKVEEPSGNDAAQYEQLLDKLAIRKQRAKEAYLDGIDTKEEYRENRELIDAEVKSIKEKLATLETAAVITTTEEFHVDIREIILKLKDNTLSTLEKHTALASILDYMEYDKEKDEYSFYYKFEE

SEQ ID NO: 5977 - protein, 497 aa, Unknown
  Description of Unknown: Integrase B5978 sequence
  PTHR30461:SF3,SM00857,G3DSA:1.10.10.2600,IPR036162,PS51737, G3DSA:3.40.50.1390,IPR006119,IPR038109,PF07508,IPR011109, SSF53041,PTHR30461,Coil,PS51736,cd00338, PF00239
MRYAIYLRKSRADDTSEPLEVTLQRHLQMLEKYMQQHDIAVQDEDVFEEVVSGDSLYARPQMLRLLEAVEAGTYTGVLCVDIQRLGRGSMQDQGMILDAFKWSDTKIITPTRTYDLSNDMDETYTEFESFMGRQEYKMIKKRLRRGLNATIENGGYIANAPYGYDKTKIGKTPSLKINEAEAKFIHMIFDLYQGGMGTATIATTIDRLGARPRRGEHFARSTVLKILKNDVYRGKIVWNRKTCVRPGQRGNEHHLTIYNAPEKWTVVDGLHPAIIDNEQFEAVQRILAGHYHPPANTGKRINPLAGLVLCGNCGRPLQRIAIQSAGGPLLGCQVPGCIVSSKLEYVEQAVLLEIQKEFDKLCANAEQKQQESQIDYAAMAKSIDAEISTAHQQLGRLYDLVEQGVYTIEVFNERRGALLSRISALEDERKNLVPPQQLDLEKMRANIEAVFDAYPTADFNTKNQLLKSIIDKIVYNKQKGVQPKGFTLEVFLHCLYL

SEQ ID NO: 5978 - protein, 497 aa, Unknown
  Description of Unknown: Integrase B5979 sequence
  PTHR30461:SF3,cd00338,SM00857,G3DSA:1.10.10.2600,IPR036162, PF13408,IPR025827,G3DSA:3.40.50.1390,PS51737,IPR006119, IPR038109,PF07508,SSF53041,IPR011109,PTHR30461, PS51736,Coil,PF00239
MYEDIKTACLYVRFSSHNQTEQSIEGQTRVCRDFCKRHNIRIVEIYADRATSASKDIEKRVQFLKMIKDSEKGLFDAVIVYKLDRFARSRYDSATYKYRLKRNGVQLISATENISNDPEGIILESVLEGMAEFYSAELSQKINRGMRESAYKHNSIGGAVPLGYKIEDKKLVIDPKTAPIVKEAFEKYADGETVAEICRQFNARGYKTSKGTAFGKSSFTKIFRNERYIGVYTFHDYRAEDAIPAIIDKDLWDRVQLRVGKIKNAPARNKAKVVYLLSGKIFCGHCGSKMNGNCNAGNYYYYQCYGKKNGNVDCKKKNIRKEFIERLVAQDALSLLTDEYIEQIATIACEKNQHEIELDSALPTIRDRIHQVDLSLNNLLKAIESGSAPDMLVKRMGELEKEKKDLQAQAKKESEDIVELDKAQVIYWLEQFRGGSIEDEEFCRMLIDLFVNSVTVWDEDDNTYKVTVAYNLTSLPTKTYRLNKGGTLSDFTSNAPA

SEQ ID NO: 5979 - protein, 497 aa, Unknown
  Description of Unknown: Integrase B5980 sequence
  IPR036162,PS51737,IPR011109,PTHR30461,PS00397, PF00239,G3DSA:1.10.10.2600,IPR006119,SSF53041,cd00338, SM00857,IPR025827,IPR038109,PS51736,IPR006118, PF13408,G3DSA:3.40.50.1390,PF07508,Coil
MNQNESLKTAFGYIRVSTHMQEEISPEAQKHELQKWAKQHNILITQWFQDNGISGKKAENRTAFQNMIALAKEKDHPDYILAWKFSRFARNQEESIVYKSLLRKNGVQVVSISEPLPDGPFAPLIERIIEWMDEYYSIRLSGEVKRGMKEKAKKGGYQSAPPLGYRREKGDTVPAIYEPEAKIYRLIKKYFIQDEYNPTTIARTLNDQGYRTRQGNRFEARVIIYILRNPFYIGKIRWNRSSHGGYYENSPDEVIVSDGQHEPLCTNEEWDIISKRIKKYTPGSTGRRRSKTLLPHYLSGGLFRCPICGASMCYQRGVSKKLPRAYPYFCCWKYAKGIHSENVNVGSPKTEEALLNSLQEFVDHGHSNITYTVEKVEEPSGNDAAQYEQLLDKLAIRKQRAKEAYLDGIDTKEEYRENRELIDAEVKSIKEKLATLETAAVITTTEEFHVDIREIILKLKDDTLSTLEKHTALASILDYMEYDKEKDEYSFYYKFEE

SEQ ID NO: 5980 - protein, 497 aa, Unknown
  Description of Unknown: Integrase B5981 sequence
  IPR036162,PS51737,IPR011109,PTHR30461,PS00397, PF00239,G3DSA:1.10.10.2600,IPR006119,SSF53041,cd00338, SM00857,IPR025827,IPR038109,PS51736,IPR006118, PF13408,G3DSA:3.40.50.1390,PF07508,Coil
MNQNESLKTAFGYIRVSTHMQEEISPEAQKHELQKWAKQHNILITQWFQDNGISGKKAENRTAFQNMIALAKEKDHPDYILAWKFSRFARNQEESIVYKSLLRKNNVQVVSISEPLPDGPFAPLIERIIEWMDEYYSIRLSGEVKRGMKEKAKKGGYQSAPPLGYRREKGDTVPAIYEPEAKIYRLIKKYFIHDEYNPTTIARTLNDQGYRTRQGNRFEARVIIYILRNPFYIGKIRWNRSSHGGYYENSPEDVIVSDGQHEPLCTNEEWDIISKRIKKYTPGSTGRRRSKTLLPHYLSGGLFRCPICGASMCYQRGVSKKLPRAYPYFCCWKYAKGIHSENVNAGAPKTEEALLNSLQEFVDHGHSNITYTVEKVEEPSGNDAAQYEQLLDKLAIRKQRAKEAYLDGIDTKEEYRENRELIDAEVMSIKEKLATLETAAVITTTEEFHVDISEIILKLKDDTLSTLEKHTALASILDYMEYDKEKDEYSFYYKFEE

SEQ ID NO: 5981 - protein, 497 aa, Unknown
  Description of Unknown: Integrase B5982 sequence
  cd03768,PTHR30461:SF3,SM00857,G3DSA:1.10.10.2600,IPR036162, PF13408,PS51737,IPR025827,G3DSA:3.40.50.1390,IPR006119, IPR038109,PF07508,IPR011109,SSF53041,PTHR30461, PS51736,Coil,PF00239
MNAIYARQSVDRADSISIESQIEFCQYEMRGEQYKVYTDRGYSGKNTDRPAFAEMMNDIENGVIGKVVVYKLDRISRSILDFSNMMEQFGTHKVEFVSTTEKFDTSSPMGRAMLNICIVFAQLERETIQKRVADAYYSRSQKSFYMGGRVPYGFRLIPTTIDGVKTSMYEINTEEAEQVRLIYELYSKPECSYGDIIRYFQSHGILKNGKPWGRTRLADVLRNPIYVRSDLSVYEFYQNQGAIMANDPADFIGTNGCYYYKGKDSTGRKQMNLEGNHLVLAPHEGIIPADLWLKCRAKCLEAQQIKPYQKAKNTWLAGKIKCGICGYALVDKHYSTTRSRYLLCSNKMNAKACAGPGTIYTDEFEQLIYDEMRKKLTQFRKLRRCKGNRINPELTALSIQLTQAESEIAALMERLSAADDTMFRYISGRIKELDGKKQELMKRISELKLHKEADYTEISNHLTMWDELSFDDKRQTVDQLIRVIYATSDSIKIEWRI

SEQ ID NO: 5982 - protein, 497 aa, Unknown
  Description of Unknown: Integrase B5983 sequence
  IPR036162,PS51737,IPR011109,PTHR30461,PS00397, PF00239,G3DSA:1.10.10.2600,IPR006119,SSF53041,cd00338, SM00857,IPR025827,IPR038109,PS51736,IPR006118, PF13408,G3DSA:3.40.50.1390,PF07508,Coil
MNQNESLKTAFGYIRVSTHMQEEISPEAQKHELQKWAKQHNILITQWFQDNGISGKKAENRTAFQNMIALAKEKDHPDYILAWKFSRFARNQEESIVYKSLLRKNNVQVVSISEPLPDGPFAPLIERIIEWMDEYYSIRLSGEVKRGMKEKAKKGGYQSAPPLGYRREKGDTVPVIYEPEAKIYRLIKKYFIQDEYNPTTIARTLNDQGYRTRQGNRFEARVVIYILRNPFYIGKIRWNRSSHGGYYENSPEDVIVSDGQHEPLCTNEEWDIISKRIKKYTPGSTGRRRSKTLLPHYLSGGLFRCPICGASMCYQRGVSKKLPRAYPYFCCWKYAKGIHSENVNASAPKTEEALLNSLQEFVNHGHSNITYTVEKVEEPSGNDAAQYEQLLDKLAIRKQRAKEAYLDGIDTKEEYRENRELIDAEVKSIKEKLATLETAAVITTTEEFHVDIREIILKLKDDTLSTLEKHTALASILDYMEYDKEKNEYSFYYKFEE

SEQ ID NO: 5983 - protein, 497 aa, Unknown
  Description of Unknown: Integrase B5984 sequence
  PTHR30461:SF3,SM00857,G3DSA:1.10.10.2600,IPR036162,PS51737, G3DSA:3.40.50.1390,IPR006119,IPR038109,PF07508,IPR011109, SSF53041,PTHR30461,Coil,PS51736,cd00338, PF00239
MRYAIYLRKSRADDTSEPLEVTLQRHRQMLEKYMQQHDIAVQDEDVFEEVVSGDSLYARPQMLRLLEAVEAGTYTGVLCVDIQRLGRGSMQDQGMILDAFKWSDTKIVTPTRTYDLSNDMDETYTEFESFMGRQEYKMIKKRLRRGLNATIENGGYIANAPYGYDKTKIGKTPSLKINEAEAKFIHMIFDLYQGGMGTATIATTIDRLGARPHRGEHFARSTVLKILKNDVYRGKIVWNRKTCVRPGQRGNEHHLTIYNAPEKWTVVDGLHPAIIDNEQFEAVQRILAGHYHPPANTGKRINPLAGLVLCGNCGRPLQRIAIQSAGGPLLGCQVPGCIVSSKLEYVEQAVLREIQKEFDKLCANAEQKQQESQIDYAAMAKSIDAEISTAHQQLGRLYDLVEQGVYTIEVFNERRGALLSRISALEDERKNLVPPQQLDLEKMRANIEAVFDAYPTADFNTKNQLLKSIIDKIVYNKQKSVQPKGFTLEVFLHCLYL

SEQ ID NO: 5984 - protein, 497 aa, Unknown
  Description of Unknown: Integrase B5985 sequence
  PTHR30461:SF3,SM00857,G3DSA:1.10.10.2600,IPR036162,PS51737, G3DSA:3.40.50.1390,IPR006119,IPR038109,PF07508,SSF53041, IPR011109,PTHR30461,Coil,PS51736,cd00338, PF00239
MRYAIYLRKSRADDTSEPLEVTLQRHRQMLEKYMQQHDIAVQDEDVFEEVVSGDSLYARPQMLRLLEAVEAGTYTGVLCVDIQRLGRGSMQDQGMILDAFKWSDTKIITPTRTYDLSNDMDETYTEFESFMGRQEYKMIKKRLRRGLNATIENGGYIANAPYGYDKTKIGKTPSLKINEAEAKFIHMIFDLYQGGMGALTIATTIDRLGAKPRRGEHFARSTILKILKNDVYRGKIVWNRKTCVRPGQRGNEHHLTIYNAPEKWTVVDGLHPAIIDNEQFEAVQRILAGHYHPPANTGKRINPLAGLVLCGNCGRPLQRIAIQSAGGPLLGCQVPGCIVSSKLEYVEQAVLLEIQKEFDKLCANAEQKQQESQIDYAAMAKSIDAEISTAHQQLGRLYDLVEQGVYTIEVFNERRGALLGRISALEDERKNLVPPQQLDLEKMRANIEAVFDAYPTADFNTKNQLLKSIIDKIVYNKQKGVQPKGFTLEVFLHCLYL

SEQ ID NO: 5985 - protein, 497 aa, Unknown
  Description of Unknown: Integrase B5986 sequence
  PTHR30461:SF3,SM00857,G3DSA:1.10.10.2600,IPR036162,PS51737, G3DSA:3.40.50.1390,IPR006119,IPR038109,PF07508,IPR011109, SSF53041,PTHR30461,Coil,PS51736,cd00338, PF00239
MRYAIYLRKSRADDTSEPLEVTLQRHRQMLEKYMQQHDIAVQDEDVFEEVVSGDSLYARPQMLRLLEVVEAGTYTGVLCVDIQRLGRGSMQDQGMILDAFKWSDTKIITPTRTYDLSNDMDETYTEFESFMGRQEYKMIKKRLRRGLNATIENGGYIANAPYGYDKTKIGKTPSLKINEAEAKFIHMIFDLYQGGMGALTIATTIDRLGAKPRRGEHFARSTILKILKNDVYRGKIVWNRKTCVRPGQRGNEHHLTIYNAPEKWTVVDGLHPAIIDNEQFEAVQRILAGHYHPPANTGKRINPLAGLVLCGNCGRPLQRIAIQSAGGPLLGCQVPGCIVSSKLEYVEQAVLREIQKEFDKLCANAEQKQQESQIDYAAMAKSIDAEISTAHQQLGRLYDLVEQGVYTIEVFNERRGALLRRISALEDERKNLVPPQQLDLEKMRANIEAVFDAYPTADFNTKNQLLKSIIDKIVYNKQKGVQPKGFTLEVFLHCLYL

SEQ ID NO: 5986 - protein, 497 aa, Unknown
  Description of Unknown: Integrase B5987 sequence
  IPR036162,PS51737,IPR011109,PTHR30461,PS00397, PF00239,G3DSA:1.10.10.2600,IPR006119,SSF53041,cd00338, SM00857,IPR025827,IPR038109,PS51736,IPR006118, PF13408,G3DSA:3.40.50.1390,PF07508,Coil
MNQNESLKTAFGYIRVSTHMQEEISPEAQKHELQKWAKQHNILITQWFQDNGISGKKAENRTAFQNMIALAKEKDHPDYILAWKFSRFARNQEESIVYKSLLRKNNVQVVSISEPLPDGPFAPLIERIIEWMDEYYSIRLSGEVKRGMKEKAKKGGYQSAPPLGYRREKGDTVPVIYEPEAKIYRLIKKYFIQDEYNPTTIARTLNDQGYRTRQGNRFEARVIIYILRNPFYIGKIRWNRSSHGGYYENSPEDVIVSDGQHEPLCTNEEWDIISKRIKKYTPGSTGRRRSKTLLPHYLSGGLFRCPICGASMCYQRGVSKKLPRAYPYFCCWKYAKGIHSENVNASAPKTEDALLNSLQEFVDHGHSNITYTVEKVEEPSGNDAAQYEQLLDKLAIRKQRAKEAYLDGIDTKEEYRENRELIDAEVKSIKEKLATLETAAVITTTEEFHVDIREIILKLKDDTLSTLEKHTALASILDYMEYDKEKDEYSFYYKFEE

SEQ ID NO: 5987 - protein, 497 aa, Unknown
  Description of Unknown: Integrase B5988 sequence
  IPR036162,PS51737,IPR011109,PTHR30461,PS00397, PF00239,G3DSA:1.10.10.2600,IPR006119,SSF53041,cd00338, SM00857,IPR025827,IPR038109,PS51736,IPR006118, PF13408,G3DSA:3.40.50.1390,PF07508,Coil
MNQNESLKTAFGYIRVSTHMQEEISPEAQKHELQKWAKQHNILITQWFQDNGISGKKAENRTAFQNMIALAKEKDHPDYILAWKFSRFARNQEESIVYKSLLRKNNVQVVSISEPLPDGPFAPLIERIIEWMDEYYSIRLSGEVKRGMKEKAKKGGYQSAPPLGYRREKGDTVPVIYEPEAKIYRLIKKYFIQDEYNPTTIARTLNDQGYRTRQGNRFEARVVIYILRNPFYIGKIRWNRSSHGGYYENSPEDVIVSDGQHEPLCTNEEWDIISKRIKKYTPGSTGRRRSKTLLPHYLSGGLFRCPICGASMCYQRGVSKKLPRAYPYFCCWKYAKGIHSENVNASAPKTEEALLNSLQEFVDHGHSNITYTVEKVEEPSGNDAAQYEQLLDKLAIRKQRAKEAYLDGIDTKEEYRENRELIDAEVKSIKEKLATLETAAVITTTEEFHVDIREIILKLKDDTLSTLEKHTALASILDYMEYDKEKDEYSFYYKFEE

SEQ ID NO: 5988 - protein, 497 aa, Unknown
  Description of Unknown: Integrase B5989 sequence
  PTHR30461:SF3,cd00338,SM00857,G3DSA:1.10.10.2600,IPR036162, PF13408,PS51737,G3DSA:3.40.50.1390,IPR025827,IPR006119, IPR038109,PF07508,IPR011109,SSF53041,PTHR30461, Coil,PF00239
MYEEIKTACLYLRYSSSNQTEQSIEGQMHVCQDFCKRHNIRIVEMYIDRATSASKDIEKRVEFLKMIKDSEKGNFNAVIVYKLDRFARSRYDSATYKYRLKRNGVQLISATENITQDPEGIILESVLEGMAEFYSAELSQKINRGMRESAMKHNSIGGAIPLGYKTVDKKLVIDETTAPIVREAFQMYADGESVAEICRTFNNRGYKTSKGTRFGKSSFTKIFRNEKYIGVYKYHDYRAEDVIPPIIDKDLWDRVQVRVGKIKKAPARNKARHTYLLTGKLFCGHCGSAMNADGNSQGYLYYRCYGKKNLDKQCNKRNMEKNLIERLVAQDAMSFLTDEYIEKIATIACDRNKQEIESDSPIPVIRDRIRQVDVSLNNLLKAIETGSAPDMLVKRMGELETEKKDMEVQLKKEMAHQVYIDKEQVIFWLEKFREGDINDEEFCQTVIDLFVNSVTVWDEPDDKFKITIAYNLTSIPQKTYRLSKDGRLSDYASNTPL

SEQ ID NO: 5989 - protein, 497 aa, Unknown
  Description of Unknown: Integrase B5990 sequence
  PTHR30461:SF3,IPR036162,PS51737,IPR011109,PTHR30461, PS00397,PF00239,G3DSA:1.10.10.2600,IPR006119,SSF53041, cd00338,SM00857,IPR025827,IPR038109,PS51736, IPR006118,PF13408,G3DSA:3.40.50.1390,PF07508,Coil
MSEKLKEVCAYIRVSTDKQEELSPESQIRLIKDYAEQHNMLLTRIYQEDHGISGKKADKRPAFQEMIATCKDKSHPYDAILLWKFSRFARNIDESTYYKSVLRKKCNVDVISVSEPIVEGMYGRLIEMVIEWSDEFYLYNLSGEVMRGMTQKALKGGYNSNVPIGYIKERGRDKIPQIEPQGAEIVRKIFDMYTEQNIPMGDIAARLNKSGYRTSRNSRFETRTVGYILENPFYIGKVRWNYYDRQNNQRKNPDDVIISNGKHEAIISEEQFSKAASRRAHDRLRTGYNKKRRSAPLLANWLSGMLKCSKCGASLGFARGNSKSVPNFSCWKHSKGLCSVHNGITLKNAEKEVLAILEELSGAEYFFNYNLNVINTENAERGYILKELKSLDSKMKRIKDAYINEIDTLEEYKANKELIARRRTELNERLASATVTTHPASARRAVDFQKLIDIITDENSNDTEKHNALLEVVDHFVWDKETQEMTVVLNEDILAAK

SEQ ID NO: 5990 - protein, 497 aa, Unknown
  Description of Unknown: Integrase B5991 sequence
  PTHR30461:SF3,SM00857,G3DSA:1.10.10.2600,IPR036162,PS51737, G3DSA:3.40.50.1390,IPR006119,IPR038109,PF07508,SSF53041, IPR011109,PTHR30461,Coil,PS51736,cd00338, PF00239
MRYAIYLRKSRADDTSEPLEVTLQRHRQMLEKYMQQHDIAVQDEDVFEEVVSGDSLYARPQMLRLLEAVEAGTYTGVLCVDIQRLGRGSMQDQGMILDAFKWSDTKIITPTRTYDLSNDMDETYTEFESFMGRQEYKMIKKRLRRGLNATIENGGYIANAPYGYDKTKIGKTPSLKINEAEAKFIHMIFDLYQSGMGTATIATTIDRLGARPHRGEHFARSTVLKILKNDVYRGKIVWNRKTCVRPGQRGNEQHLTIYNAPEKWTVVDGLHPAIIDNEQFEAVQRILAGHYHPPANTGKRINPLAGLVLCGNCGRPLQRIAIQSAGGPLLGCQVPGCIVSSKLEYVEQAVLLEIQKEFDKLCANAEQKQQESQIDYAAMAKSIDTEISTAHQQLGRLYDLVEQGVYTIEVFNERRGALLSRISALEDERKNLVPPQQLDLEKMRANIEAVFDAYPTADFNTKNQLLKSIIDKIVYNKQKGVQPKGFTLEVFLHCLYL

SEQ ID NO: 5991 - protein, 497 aa, Unknown
  Description of Unknown: Integrase B5992 sequence
  cd00338,SM00857,G3DSA:1.10.10.2600,IPR036162,PF13408, PS51737,IPR025827,G3DSA:3.40.50.1390,IPR006119,IPR038109, PF07508,SSF53041,IPR011109,PTHR30461,PS51736, Coil,PF00239
MTAVIYARYSSDNQREESIEGQIRECTAYAEKNGITVVKHYIDRALSAKTDNRPDFQQMIKDSEKRLFDIVLVWKLDRFARNRYDSAHYEYQLERNHVKLVSATEPISDSPAGIMVKSMLTGMAEYYSAELSEKVVRGMTENVLKGKCNGGTIPIGFKVDEEKFFQIDPLKAPFVVEAFQRYNDGATMKELMNWLNDSGVTTNRNQKFTYNSVQTMLTNKRYIGENHFKDIVMPDSIPAIVDKDLFEEVQQKIKKNSRAPARHKAEDDYLLTTKLFCGMCGAMMFGECGTGRNKVVHHYYKCATAKRFKTCKKKTVRKEWLEDLVIAETMKLIQDDAVIDAIVAEVMELQDQENTTLPLLEKQMREVENGIENMLNAIQAGVLTNSTKSRLEKLEAQQKELEVRIAEEKIARPRLSENQVRFWLTRFRKLDPNVKSHRETLINTFVNAVYLHDEKVLITFNYKDGTKTITFDEIAAKDAPEGNGSDLGCFAPPKKNT

SEQ ID NO: 5992 - protein, 497 aa, Unknown
  Description of Unknown: Integrase B5993 sequence
  PTHR30461:SF3,SM00857,G3DSA:1.10.10.2600,IPR036162,PS51737, G3DSA:3.40.50.1390,IPR006119,IPR038109,PF07508,SSF53041, IPR011109,PTHR30461,Coil,PS51736,cd00338, PF00239
MRYAIYLRKSRADDTSEPLEVTLQRHRQMLEKYMQQHDIAVQDEDVFEEVVSGDSLYARPQMLRLLEAVEAGTYTGVLCVDIQRLGRGSMQDQGMILDAFKWSDTKIITPTRTYDLSNDMDETYTEFESFMGRQEYKMIKKRLRRGLNATIENGGYIANAPYGYDKTKIGKTPSLKINEAEAKFIHMIFDLYQSGMGTATIATTIDRLGARPRRGEHFARSTVLKILKNDVYRGKIVWNRKTCVRPGQRGNEHHLTIYNAPEKWTVVDGLHPAIIDNEQFEAVQRILAGHYHPPANTGKRINPLAGLVLCGNCGRPLQRIAIQSAGGPLLGCQVPGCIVSSKLEYVEQAVLLEIQKEFDKLCANAEQKQQESQIDYAAMAKSIDAEISTAHQQLGRLYDLVEQGVYTIGVFNERRGALFSRISALEDERKNLVPPQQLDLEKMRANIEAVFDAYPTADFNTKNQLLKSIIDKIVYNKQKGVQPKGFTLEVFLHCLYL

SEQ ID NO: 5993 - protein, 497 aa, Unknown
  Description of Unknown: Integrase B5994 sequence
  cd03768,PTHR30461:SF3,SM00857,IPR036162,PF13408, IPR025827,G3DSA:3.40.50.1390,PS51737,IPR006119,PF07508, SSF53041,IPR011109,PTHR30461,PS51736,Coil, PF00239
MVAIYARQSIDKKDSISIDSQIELCKREAFGEEVRTYVDKGFSGKNTDRPQFQALMNDIKSKEIHKVVVYRLDRISRALIDFAKIMEDFNKYNIEFVSTTEKFDTSTPMGKAMLSIVMVFAQLERETIQQRIKDNYYARGKKGFYLGGKPPYGFKKEKTKVDGISTSILHNNEFEIDVLTDIFDKYANSDLALGGIVKYLNNKNIPAPHGGRWESTKIARILRNPVYVKADADIYVYYKNKGCKISNELTEFTDENGCYLYGKRDRSAAKYTDVTDHVLSLAPHKGVIDSEIFLRCQHRLDTNKQVKNSGKGKHSWLTGLTKCGLCGYAMTVNATKKYKYFICRGKTSYNACEGPENTIYVDDIEEHVEKAIKDKAVSLSKMKSKVTKNESNVTNAEKIKIIEIDQQIENLLEQMAKSNAVVTEYINDKITKLHNEKNEILKTISEKNEKPNSNLEDILHKINNWDTLEFDEKKMVTKELIQKIDLSDDKINIVWKY

SEQ ID NO: 5994 - protein, 497 aa, Unknown
  Description of Unknown: Integrase B5995 sequence
  PTHR30461:SF3,cd00338,SM00857,G3DSA:1.10.10.2600,IPR036162, PF13408,PS51737,G3DSA:3.40.50.1390,IPR025827,IPR006119, IPR038109,PF07508,IPR011109,SSF53041,PTHR30461, PS51736,Coil,PF00239
MYEDIKTACLYVRFSSHNQTEQSIEGQTRVCRDFCKRHNIRIVEIYADRATSASKDIEKRVQFLKMIKDSERGLFDAVIVYKLDRFARSRYDSATYKYRLKRNGVQLISATENISNDPEGIILESVLEGMAEFYSAELSQKINRGMRESAYKHNSIGGAVPLGYKIEDKKLVIDPKTAPIVKEAFEKYADGETVAEICRQFNARGYKTSKGTTFGKSSFTKIFRNERYIGVYSFHDYRAEDAIPAIIDKDLWDRVQLRVGKIKNAPARNKAKVVYLLSGKIFCGHCGSKMNGNCNAGNYYYYQCYGKKNGNVDCKKKNIRKEFIERLVAQDALSLLTDEYIEQIATIACEKNQHEIELDSALPTIRDRIHQVDLSLNHLLKAIESGSAPDMLVKRMGELEKEKKDLQAQAKKESEDIVELDKAQVIYWLEQFRGGSIEDQEFCRMLIDLFVNSVTVWDEDDNTYKVTVAYNLTSLPTKTYRLNKGGTLSDFASNAPS

SEQ ID NO: 5995 - protein, 497 aa, Unknown
  Description of Unknown: Integrase B5996 sequence
  SM00857,G3DSA:1.10.10.2600,IPR036162,PF13408,PS51737, IPR025827,G3DSA:3.40.50.1390,IPR006119,IPR038109,PF07508, IPR011109,SSF53041,PTHR30461,PS51736,cd00338, PF00239
MEVTKIPKQKAQKPKIGVYVRVSTKREEQEDSFAFQSQYWNKRFENDSSIEYVGLFADEGISGKSMKNRKGLNSLLKKAKRGEIDKIYTKSISRFARNYTDLLTVVHELRDLGVPIIFEKENIDTLDPKCNLVLTIMSSLAEQELISMSQNQKWAARKRFAEGSIELSRILGYEYKKGKLTIIPEEAAIVRRIYELYLQGNGVEKISVILKDEGYLTVHGSTEWKKATLATILKNEKYTGNSLLQKNVYDLKVRKKNKGEAPQYYVENSHEAIISMEDFQKVQEMMREKAEKFHPNGLDYSIRKYPLSGKIKCGICGSRYKRKTAAKGTTYECIKWVCLVKEIKGKKTCDSHEIKNVVLEKLLTEAYNECLDKNFEYSGLAEEYKKLKSLLETERELKALHVKGYISDVKYKAESTKILDEIKTREQTIQTLQSNKMVEKQFTKSAVFTKDMADFLIQATVKDWKITFEFANGIKITKSYTNGRAGNVNGKLCKRKA

SEQ ID NO: 5996 - protein, 497 aa, Unknown
  Description of Unknown: Integrase B5997 sequence
  IPR036162,PS51737,IPR011109,PTHR30461,PS00397, PF00239,G3DSA:1.10.10.2600,IPR006119,SSF53041,cd00338, SM00857,IPR025827,IPR038109,PS51736,IPR006118, PF13408,G3DSA:3.40.50.1390,PF07508,Coil
MNQNESLKTAFGYIRVSTHMQEEISPEAQKHELQKWAKQHNILITQWFQDNGISGKKAENRTAFQNMIALAKEKDHPDYILAWKFSRFARNQEESIVYKSLLRKNNVQVVSISEPLPDGPFAPLIERIIEWMDEYYSIRLSGEVKRGMKEKAKKGGYQSAPPLGYRREKGDTVPVIYEPEAKIYRLIKKYFILDEYNPTTIARTLNDQGYRTRQGNRFEARVVIYILRNPFYIGKIRWNRSSHGGYYENSPEDVIISDGQHEPLCTNEEWEIICKRIKKYTPGSTGRRRSKTLLPHYLSGGLFRCPICGASMCYQRGISKKLPRAYPYFCCWKYAKGIHPENVNASAPKTEEALLNSLQEFVDHGHSNITYTVEKVEEPSGNDAAQYEQLLDKLAIRKQRAKEAYLDGIDTKEEYRENRELIDAEVKSIKEKLATLETAAVITTTEEFHVDIREIILKLKDNTLSTLEKHTALASILDYMEYDKEKDEYSFYYKFEE

SEQ ID NO: 5997 - protein, 497 aa, Unknown
  Description of Unknown: Integrase B5998 sequence
  PTHR30461:SF3,SM00857,G3DSA:1.10.10.2600,IPR036162,PS51737, G3DSA:3.40.50.1390,IPR006119,IPR038109,PF07508,IPR011109, SSF53041,PTHR30461,Coil,PS51736,cd00338, PF00239
MRYAIYLRKSRADDTSEPLEVTLQRHRQMLEKYMQQHDIAVQDEDVFEEVVSGDSLYARPQMLRLLEVVEAGTYTGVLCVDIQRLGRGSMQDQGMILDAFKWSDTKIITPTRTYDLSNDMDETYTEFESFMGRQEYKMIKKRLRRGLNATIENGGYIANAPYGYDKTKIGKTPSLKINEAEAKFIHMIFDLYQSGMGTATIATTIDRLGAKPRRGEHFARSTILKILKNDVYRGKIVWNRKTCVRPGQRGNEHHLTIYNAPEKWTVVDGLHPAIIDNEQFEAVQRILAGHYHPPANTGKRINPLAGLVLCGNCGRPLQRIAIQSAGGPLLGCQVPGCIVSSKLKYVEQAVLLEIQKEFDKLCANAEQKQQESQIDYAAMAKSIDAEISTAHQQLGRLYDLVEQGVYTIEVFNERRGALLSRISALEDERKNLVPPQQLDLEKMRANIEAVFDAYPTADFNTKNQLLKSIIDKIVYNKQKGVQPKGFTLEVFLHCLYL

SEQ ID NO: 5998 - protein, 497 aa, Unknown
  Description of Unknown: Integrase B5999 sequence
  PTHR30461:SF3,SM00857,G3DSA:1.10.10.2600,IPR036162,PS51737, G3DSA:3.40.50.1390,IPR006119,IPR038109,PF07508,IPR011109, SSF53041,PTHR30461,Coil,PS51736,cd00338, PF00239
MRYAIYLRKSRADDTSEPLEVTLQRHRQMLEKYMQQHDIAVQDEDVFEEVVSGDSLYARPQMLRLLEVVEAGTYTGVLCVDIQRLGRGSMQDQGMILDAFKWSDTKIITPTRTYDLSNDMDETYTEFESFMGRQEYKMIKKRLRRGLNATIENGGYIANAPYGYDKTKIGKTPSLKINEAEAKFIHMIFDLYQSGMGTATIATTIDRLGAKPRRGEHFARSTILKILKNDVYRGKIVWNRKTCVRPGQRGNEHHLTIYNAPEKWTVVDGLHPAIIDNEQFEAVQRILAGHYHPPANTGKRINPLAGLVLCGNCGRPLQRIAIQSAGGPLLGCQVPGCIVSSKLEYVEQAVLLEIQKEFDKLCANAEQKQQESQIDYAAMAKSIDAEISTAHQQLGRLYDLVEQGVYTIEVFNERRGALLSRISALEDERKNLVPPQQLDLEKMRANIEAVFDAYPTADFNTKNQLLKSIIDKIVYNKQKGVQPKGFTLEVFLHCLYL

SEQ ID NO: 5999 - protein, 497 aa, Unknown
  Description of Unknown: Integrase B6000 sequence
  SM00857,G3DSA:1.10.10.2600,IPR036162,PF13408,PS51737, G3DSA:3.40.50.1390,IPR025827,IPR006119,IPR038109,PF07508, IPR011109,SSF53041,PF00239,PTHR30461,PS51736, Coil,cd00338
MTAVIYARYSSDNQREESIEGQIRECTAYAEKNGITVIKHYIDRALSAKTDNRPDFQQMIKDSEKRLFDIVLVWKLDRFARNRYDSAHYEYQLERNHVKLVSATEPISDSPAGIMVKSMLTGMAEYYSAELSEKVVRGMTENVLKGKYNGGTIPIGFKVDEEKFFQIDPLKAPFVVEAFQRYNDGATMKELMNWLNDSGVTTNRNQKFTYNSVQKLLTNKRYIGENHFKDIVMPDSIPAIVDKDLFEEVQQKIKKNSRAPARHKAEDDYLLTTKLFCGMCGAMMFGECGTGRNKVVHHYYKCATAKRFKTCKKKTVRKEWLEDLVVAETMKLIQDDAVIDAIVAEVMELQDQENTTLPLLEKQMREVENGIENMLNAIQAGVLTNSTKSRLEKLEAQQKELEVRIAEEKIARPRLSENQVRFWLTRFRKLDPNVKSHRETLINTFVNAVYLYDEKVLITFNYKDGTKIITFDKIAAKDAPEGNGSDLGCFAPPKGPA

SEQ ID NO: 6000 - protein, 497 aa, Unknown
  Description of Unknown: Integrase B6001 sequence
  cd03768,PTHR30461:SF3,SM00857,G3DSA:1.10.10.2600,IPR036162, PF13408,PS51737,G3DSA:3.40.50.1390,IPR025827,IPR006119, IPR038109,PF07508,IPR011109,SSF53041,PTHR30461, PS51736,Coil,PF00239
MNAIYARQSVDRADSISIESQIEFCQYEMRGEQYKVYTDRGYSGKNTDRPAFAEMMNDIESGVIGKVVVYKLDRISRSILDFSNMMEQFGTHKVEFVSTTEKFDTSSPMGRAMLNICIVFAQLERETIQKRVADAYYSRSQKSFYMGGRVPYGFRLIPTTIDGVKTSMYEINTEEAEQVRLIYELYSKPECSYGDIIRYFQSHGILKNGKPWGRTRLADVLRNPIYVRSDLSVYEFYRDQGAIMANDPGDFIGTNGCYYYKGKDSTGRKQMNLEGNHLVLAPHEGIIPADLWLKCRAKCLEAQQIKPYQKAKNTWLAGKIKCGVCGYALVDKHYSTTRSRYLLCSNKMNAKACEGPGTIYTDEFEQIIYDEMRKKLAQFRKLRQCKGNRINPELTALSIQLTQAESEIAALMERLSAADDTMFRYISGRIKELDGKKQELMKRISERKLHKEADYTEINNHLTMWDELSFDDKRQTVDQLIRVIYATSDSIKIEWRI

SEQ ID NO: 6001 - protein, 497 aa, Unknown
  Description of Unknown: Integrase B6002 sequence
  PTHR30461:SF3,IPR036162,PS51737,IPR011109,PTHR30461, PS00397,PF00239,G3DSA:1.10.10.2600,IPR006119,SSF53041, cd00338,SM00857,IPR025827,IPR038109,PS51736, IPR006118,PF13408,G3DSA:3.40.50.1390,PF07508,Coil
MKQRYAYGYVRVSTDKQEELSPDSQEKLLREYARKNNMIILKIFFEIGVSGRKADKRPSFQEMIGSAKSKDHPVDAILVWKYSRFARNQEESIVYKSLLKKQNNVDVISVSEPLIDGPFGSLIERIIEWMDEYYSIRLSGEVFRGMKENALRGSFQARPPLGYKIVKHGEPPVIVPEEAKVVKIIFEKYVNENMSFFDIARYLNSLGFKTSRNKNFECRSIEYIIQNPIYCGMIRWNRTKNDTNEIKDRSEWIVTDGEHEAIISKELFDKAQEQYKVTYKPRGKRPPSTYKHWLSGLLKCPDCGRTLVATTLHRANGDYYAYFKCYGYCKGKCPRANGISSLVIEKAVMDSLKKVIYTRNIEFELKNYQPVEIINERSLLEERLHGLENKEERIKASYREGIDTLEEYKENKLLIQKEREEIEEQLSEFSKTESTDQQDDKDVLLKKVSNIYSIISSDKYTDAQKNAALRQVIDRIVYNRQNDTLKIYYFLYKSNCG

SEQ ID NO: 6002 - protein, 497 aa, Unknown
  Description of Unknown: Integrase B6003 sequence
  SM00857,G3DSA:1.10.10.2600,IPR036162,PF13408,IPR025827, PS51737,G3DSA:3.40.50.1390,IPR006119,IPR038109,PF07508, SSF53041,IPR011109,PF00239,PTHR30461,PS51736, Coil,cd00338
MKIHVITPTSETPEKLRVCAYCRVSTESEDQENSLDNQRNHYEELIQSNPAYEFVNVYYDFGISGFKEMRPGFHQMMSDARKGKIDLIIVKSVSRFARNTVTILKAARELKELGIGIFFELQNINTLTEAGELMLTVLAAFAQAESETYSQLSKMGIQRKYEKGEPIQRLQYSFGYAKDENGEYVLNPVEAPWVKKIYEMIADDYSSADVKRYLNDQGVKTVKGAEFTESSVLRIVESEIYKGDFIMQKYFVNADRKIVKNEGQVDSWYIENDHPAIVSRRLWQKAQDALAAKRAYLAEGSVVGENTEELYPYKNHIFCSKCGFPLYRRVYSNGNRVNWGCSGQKRYKNEFCTGINIPDSYFRKLGDFEDNLYFRESKDALGKSSFKYCTETAWSRKHRKKEPIAVPELNEKNYPYFKKLYCKECGSRLVRYIESRQHVKWICNGNKRKGTGFCKGVRVLDSTVRGWEIDTDVLVEGKVGKDGEKSYSYTCKTGQSK

SEQ ID NO: 6003 - protein, 497 aa, Unknown
  Description of Unknown: Integrase B6004 sequence
  PTHR30461:SF3,SM00857,G3DSA:1.10.10.2600,IPR036162,PS51737, G3DSA:3.40.50.1390,IPR006119,IPR038109,PF07508,SSF53041, IPR011109,PTHR30461,Coil,PS51736,cd00338, PF00239
MRYAIYLRKSRADDTSEPLEVTLQRHRQMLEKYMQQHDIAVQDEDVFEEVVSGDSLYARPQMLRLLEAVEAGTYTGVLCVDIQRLGRGSMQDQGMILDAFKWSDTKIITPTRTYDLSNDMDETYTEFESFMGRQEYKMIKKRLRRGLNATIENGGYIANAPYGYDKTKIGKTPSLKINEAEAKFIHMIFDLYQSGMGTATIATTIDRLGARPRRGEHFARSTVLKILKNDVYRGKIVWNRKTCVRPGQRGNEHHLTIYNAPEKWTVVDGLHPAIIDNEQFEAVQRILAGHYHPPANTGKRINPLAGLVLGGNCGRPLQRIAIQSAGGPLLGCQVPGCIVSSKLEYVEQAVLLEIQKEFDKLCANAEQKQQESQIDYAAMAKSIDTEISTAHQQLGRLYDLVEQGVYTIEVFNERRGALLSRISALEDERKNLVPPQQLDLEKMRANIEAVFDAYPTADFNTKNQLLKSIIDKIVYNKQKGVQPKGFTLEVFLHCLYL

SEQ ID NO: 6004 - protein, 497 aa, Unknown
  Description of Unknown: Integrase B6005 sequence
  PTHR30461:SF3,SM00857,G3DSA:1.10.10.2600,IPR036162,PS51737, G3DSA:3.40.50.1390,IPR006119,IPR038109,PF07508,SSF53041, IPR011109,PTHR30461,Coil,PS51736,cd00338, PF00239
MRYAIYLRKSRADDTSEPLEVTLQRHRQMLEKYMQQHDIAVQDEDVFEEVVSGDSLYARPQMLRLLEAVEAGTYTGVLCVDIQRLGRGSMQDQGMILDAFKWSDTKIITPTRTYDLSNDMDETYTEFESFMGRQEYKMIKKRLRRGLNATIENGGYIANAPYGYDKTKIGKTPSLKINEAESKFIHMIFDLYQGGMGTATIATTIDRLGARPRRGEHFARSTVLKILKNDVYRGKIVWNRKTCVRPGQRGNEQHLTIYNAPEKWTVVDGLHPAIIDNEQFEAVQRILAGHYHPPANTGKRINPLAGLVLCGNCGRPLQRIAIQSAGGPLLGCQVPGCIVSSKLEYVEQAVLLEIQKEFDKLCANAEQKQQESQIDYAAMAKSIDTEISTAHQQLGRLYDLVEQGVYTIEVFNERRGALLSRISALEDERKNLVPPQQLDLEKMRANIEAVFDAYPTADFNTKNQLLKSIIDKIVYNKQKGVQPKGFTLEVFLHCLYL

SEQ ID NO: 6005 - protein, 497 aa, Unknown
  Description of Unknown: Integrase B6006 sequence
  PTHR30461:SF3,SM00857,G3DSA:1.10.10.2600,IPR036162,PS51737, G3DSA:3.40.50.1390,IPR006119,IPR038109,PF07508,IPR011109, SSF53041,PTHR30461,Coil,PS51736,cd00338, PF00239
MNRYAEYIRKSRADDPHESLEETLQKHKEILAKLVLEKGYVVRPEDMYEEVVSGESLYSRPQMLKLLEAVEAGKYAGVLCVDIQRLGRGSMTDQGVILDAFKSSGTKIITPTREYDLANETDETYTEFETFMSRQEYKLIRRRLQRGLRSTIEAGGYIANAPFGYEKCKVGKTPSLRIYEPEAKFVRLAYDLYCQGVGCQHIADRLNAEGAKPHRGDQFNRNSVRFMLTNPVYIGKIVWDRKKHIRKGAKGNAKHITLYTPKDQWTVTQGLHPPLITQDKWDQVQEIFAKRYRTPSYTGVIENPLAGLMICGNCGKHMQRAAHMRGGPFLLCTNRGCIPMSKLPLVEEQALLGISKKLEELRYKADGTQDAEADTSKQEKAAIQAQIETARRQDAKLHDLLEQGVYDIDTFLQRHGVLVDRIKHYEEVLSSIRPTKQLDTDAMADRVEYVLSAYHGATPEERNHLLKSVVEKIVYHKEKGAKPADFTLDVYLLPIYL

SEQ ID NO: 6006 - protein, 497 aa, Unknown
  Description of Unknown: Integrase B6007 sequence
  SM00857,G3DSA:1.10.10.2600,IPR036162,PS51737,G3DSA:3.40.50.1390, IPR006119,IPR038109,PF07508,SSF53041,IPR011109, PF00239,PTHR30461,PS51736,Coil,cd00338
MRYAMYLRKSRADDASEPIEVTLQRHRQALENYMVQHDLTVLPEDVYEEVVSGDSLYARPQMLRMLESIEAGKYTGVLCMDIQRLGRGSMQDQGMILDAFKYSGTKIITPAKTYDLSDDIDETYTEFESFMGRQEYKMIKKRLRRGIKATIENGGYIANAPYGYDKARVGKLPSLKINEEEARFVRMMFDLYQQGMGSKTIADTVSRLGAKPRRGERFARTTVTKILKNPVYCGKIVWDRKTHLRPGQRGNEKHVTIYNAPEKWTIVDGVHPAIISQEQFDAVQVILSGHYHPPSNTGKRRNPLSGVVLCGNCGHPMQRIAIQSAGGPLLGCATPGCIVSSKLEYVEEAVLDSIQKEFNRICSEADADKKADAMNYTEMAKAIDGEIRKAKQQLGRLHDLLEQGVYDVETFSERRQRLLGRISALEDERKNLVPPKQLDLEAMRRQIEKVMEVYPNSDSDTQNHLLKSIVEKVVYHKEKGAKPKDFALEVYLRKVYL

SEQ ID NO: 6007 - protein, 497 aa, Unknown
  Description of Unknown: Integrase B6008 sequence
  IPR036162,PS51737,IPR011109,PTHR30461, PS00397,PF00239,G3DSA:1.10.10.2600,IPR006119, SSF53041,cd00338,SM00857,IPR025827,IPR038109,PS51736 ,IPR006118,PF13408,G3DSA:3.40.50.1390,PF07508,Coil
MNQNESLKTAFGYIRVSTHMQEEISPEAQKHELQKWAKQHNILITQWFQDNGISGKKAENRTAFQNMIALAKEKDHPDYILAWKFSRFARNQEESIVYKSLLRKNNVQVVSISEPLPDGPFAPLIERIIEWMDEYYSIRLSGEVKRGMKEKAKKGGYQSAPPLGYRREKGDTVPAIYEPEAKIYRLIKKYFIQDEYNPTTIARTLNDQGYRTRQGNRFEARVVIYILRNPFYIGKIRWNRSSHGGYYENSPEDVIVSDGQHEPLCTNEEWDIISKRIKKYAPGSTGRRRSKTLLPHYLSGGLFRCPICGASMCYQRGVSKKLPRAYPYFCCWKYAKGIHPENVNASAPKTEEALLNSLQEFVDHGHSDITYTVEKVEEPSGNDAAQYEQLLDKLAIRKQRAKEAYLDGIDTKEEYRENRELIDAEVKSMKEKLATLETAAVITTTEEFHVDIREIILKLKDDTLSTLEKHTALASILDYMEYDKEKDEYSFYYKFEE

SEQ ID NO: 6008 - protein, 497 aa, Unknown
  Description of Unknown: Integrase B6009 sequence
  PTHR30461:SF3,IPR036162,PS51737,IPR011109,PTHR30461, PS00397,PF00239,G3DSA:1.10.10.2600,IPR006119,SSF53041, cd00338,SM00857,IPR025827,IPR038109,PS51736, IPR006118,PF13408,G3DSA:3.40.50.1390,PF07508,Coil
MSEKLKEVCAYIRVSTDKQEELSPESQIRLIKDYAEQHNMLLTRIYQEDKGISGKKADKRPAFQEMIATCKEKSHPYDAILLWKFSRFARNIDESTYYKSVLRKKCNVDVISISEPITEGMYGRLIEMVIEWSDEFYLYNLSGEVMRGMTQKALKGGYNSNVPIGYIKERGRDKIPQIEPKGAEIVRKIFNMYTEQNIPMGDIAAKLNKSGYRTARGSLFETRVVGYILENPFYIGKIRWNFFDKQSNKRKNPDDVIISDGKHETIISEEQFSKAANRRAHDRLRTGYNKKRRPAPLLANWLSGMIKCSKCGASLGFARGGSKSVPNFCCWKHSKGLCSVHNGITLKNAEKEVLSILEELSGSGYFYNYNLNVINTENTERGYILKELKSLDAKMKRIKDAYINEIDTLEEYKTNKELILKRRTELNEKLEAATITIHPASVHKDVDFQGLIDIIKDENSNDTKKHNALLEVVDHFVWDKETQEMTVVLNGNILTAK

SEQ ID NO: 6009 - protein, 497 aa, Unknown
  Description of Unknown: Integrase B6010 sequence
  SM00857,G3DSA:1.10.10.2600,IPR036162,PF13408,PS51737, G3DSA:3.40.50.1390,IPR025827,IPR006119,IPR038109,PF07508, IPR011109,SSF53041,PF00239,PTHR30461,PS51736, Coil,cd00338
MNKKRAAAYARVSTNSRAQEHSFEFQSRYWNQTLGNNDDYDYIGLFADKGISGKYVNRRPQFLALMELCNRGDVDIIFTKSVQRFARNAEELLKYVRALREKGIEVYFEKENIHTLNPDTELYLTIAAAIAEEDLTRYSNNVAWSIKDRFERGEMILGPRIYGYRKTAENRLIVYPDEARIVRLIFEEYIKGDVSTLKIAKKLNSMGIPSPNGGEWLCSQISYIIKNEKYYGDMILQKTFVEGGVKYANRGERIRYYVENSHEPIISKEIWDKAQEVLGQRANPHLVGAKLKSYPFTGLIVCGACGANYTHKVNNSGTISQANFWKCHIAIQKGVKYCHNPGIKEKVLYDLFVDCYNEFVTEGYYKKTVDNTEALDRLARLNESETELTLLMTRGVINQNQYLEEQQRIRFEMQSIQRKLHEERTYLVQGSDFHPIKKFDEDKLYKFIKRVVVKDWTVTFEFFNGVCITRSYTNGQPGNIKDWKLKQKQRREEQNGQ

SEQ ID NO: 6010 - protein, 497 aa, Unknown
  Description of Unknown: Integrase B6011 sequence
  PTHR30461:SF3,IPR036162,PS51737,IPR011109,PTHR30461, PS00397,PF00239,G3DSA:1.10.10.2600,IPR006119,SSF53041, SM00857,IPR025827,IPR038109,PS51736,cd03768, IPR006118,PF13408,G3DSA:3.40.50.1390,PF07508,Coil
MKVKKNNEIPAATGTIRVAVYVRVSTNEQAEEGHSIGVQTEKLQAYCVARGWEVFKVYTDPGFSGSNMDRPALKSLFSDIESGLINTVLVYKLDRLSRSQRDTLYMIEDVFLAQGVDFISMTENFDTSTPLGRAMIGILSVFAQLEREQIKERMAMGNIARAASGLWRGGSGAPIGYDYIDGGLVVNEYEAMQIRLIFDLFLKGYTFHAIKVELQNRGYTNKYGSWKNAAIISKVLRNTTYIGRVRYAGKEYEGQHDPLISMDAWDATQLRLAEVTRGLSDHQKSPFVATKLLTGCIWCGDCGARYFYHGCNKKNAKGEMIHYDYYICYTRAAHKTMRRAKHCNGRTWKQPELDAIIIGEIKKLALSKDVIENMVSEHRSGSSVDARADAIGKRLEELDKQLNKVMDLYTLGSIPLASVQAKADAINQEKAALSAELESLHKEQPQLSASKAFDLASMADDIFTNGTTEEQRNLVQSLIDKIELNADGSIAIYWKFA

SEQ ID NO: 6011 - protein, 497 aa, Unknown
  Description of Unknown: Integrase B6012 sequence
  PTHR30461:SF3,cd00338,SM00857,G3DSA:1.10.10.2600,IPR036162, PF13408,PS51737,G3DSA:3.40.50.1390,IPR025827,IPR006119, IPR038109,PF07508,SSF53041,IPR011109,PTHR30461, PS51736,Coil,PF00239
MYEDIKTACLYVRFSSHNQTEQSIEGQTRVCRDFCKRHNIRIVEIYADRATSASKDIEKRVQFLKMIKDSEKGLFDAVIVYKLDRFARSRYDSATYKYRLKRNGVQLISATENISNDPEGIILESVLEGMAEFYSAELSQKINRGMRESAYKHNSIGGAVPLGYKIEDKKLVIDPKTAPIVKEAFEKYADGETVAEICRQFNARGYKTSKGTAFGKSSFTKIFRNERYIGVYSFHDYRAEDAIPAIIDKDLWDRVQLRVGKIKNAPARNKAKVVYLLSGKIFCGHCGSKMNGNCNAGNYYYYQCYGKKNGNVDCKKKNIRKEFIERLVAQDALSLLTDEYIEQIATIACEKNQHEIELDSALPTIRDRIHQVDLSLNNLLKAIESGSAPDMLVKRMGELEKEKKDLQVQAKKESEDIVELDKAQVIYWLEQFRGGSIEDEEFCRMLIDLFVNSVTVWDEDDGSYKVTVAYNLTSLPTKTYRLNKGGTLSDFTSNAPP

SEQ ID NO: 6012 - protein, 497 aa, Unknown
  Description of Unknown: Integrase B6013 sequence
  PTHR30461:SF3,IPR036162,PS51737,IPR011109,PTHR30461, PS00397,PF00239,G3DSA:1.10.10.2600,IPR006119,SSF53041, cd00338,SM00857,IPR025827,IPR038109,PS51736, IPR006118,PF13408,G3DSA:3.40.50.1390,PF07508,Coil
MSEKLKEVCAYIRVSTDKQEELSPESQIRLIKDYAEQHNMLLTRIYQEDKGISGKKADKRPAFQEMIATCKEKSHPYDAILLWKFSRFARNIDESTYYKSVLRKKCNVDVISISEPITEGMYGRLIEMVIEWSDEFYLYNLSGEVMRGMTQKALKGGYNSNVPIGYIKERGRDKIPQIEPKGAEIVRKIFDMYTEQNIPMGDIAARLNQSGYRTARGSLFETRVVGYILENPFYIGKIRWNFFDKQSNKRKNPDDVIISDGKHEAIISEEQFSKAANRRAHDRLRTGYNKKRRPAPLLANWLSGMIKCSKCGASLGFAHGGTKTVPNFCCWKYSKGLCSTRNGITLKNAEKEVLSILEELSGSGYFYNYNLNVINTENTERGYILKELKSLDAKMKRIKDAYINEIDTLEEYKTNKELILKRRTELNEKLEAATITIHPASVHKDVDFQGLIDIIKDENSNDTKKHNALLEVVDHFVWDKETQEMTVVLNGNILTAK

SEQ ID NO: 6013 - protein, 497 aa, Unknown
  Description of Unknown: Integrase B6014 sequence
  PTHR30461:SF3,IPR036162,PS51737,IPR011109,PTHR30461, PS00397,PF00239,G3DSA:1.10.10.2600,IPR006119,SSF53041, cd00338,SM00857,IPR025827,IPR038109,PS51736, IPR006118,PF13408,G3DSA:3.40.50.1390,PF07508,Coil
MGKSITKTGALYIRVSTGKQEELSPDAQKRLLLEYAAKNQIIISKEHIYIEGGISGRKADKRPEFKDMIAEAKSKEHPFDVILVWKYSRFARNQEESIVYKSMLKRENVDVISVSEPISDDPFGSLIERIIEWMDEYYSIRLSGEVSRGMAENAMRGNYQARPPLGYRIPGYRQTPVIVPEEAELIQLIFDLYTEKKMGIFEIVRYLNEHGYQTGHKKPFQRRSVTYILKNPTYIGKTIWNQHDQDHKLRDKSEWIIADGKHEPIISKEQFDKAQKRIESTYKPAYRKPTSVCHHWLSSLLKCSSCGRTLVVKRTASKKKDRMYVNFQCYGYQKGICNTNQSISAIKLEPVIMHSLEDAMTSGKIHFDVLNPTTLDSSQKQQLLTRLSEIEKKEERIKRAYRDGIDTLEEYKENKSIIQTEKEMLLKKIEHIEEPALSQEEAKPIMMDRIKNVYEVITNPDIGMEEKNKAARSIIEKIVFDRATGSVNIFFYLANCP

SEQ ID NO: 6014 - protein, 497 aa, Unknown
  Description of Unknown: Integrase B6015 sequence
  IPR036162,PS51737,IPR011109,PTHR30461,PS00397, PF00239,G3DSA:1.10.10.2600,IPR006119,SSF53041,cd00338, SM00857,IPR025827,IPR038109,PS51736,IPR006118, PF13408,G3DSA:3.40.50.1390,PF07508,Coil
MNQNESLKTAFGYIRVSTHMQEEISPEAQKHELQKWAKQHNILITQWFQDNGISGKKAENRTAFQNMIALAKEKDHPDYILAWKFSRFARNQEESIVYKSLLRKNNVQVVSISEPLPDGPFAPLIERIIEWMDEYYSIRLSGEVKRGMKEKAKKGGYQSAPPLGYRREKGDTVPAIYEPEAKIYRLIKKYFIQDEYNPTTIARTLNDQGYRTRQGNRFEARVVIYILRNPFYIGKIRWNRSSHGGYYENSPEDVIISDGQHEPLCTNEEWEIICKRIKKYTPGSTGRRRSKTLLPHYLSGGLFRCPICGASMCYQRGVSKKLPRAYPYFCCWKYAKGIHSENVNAGAPKTEEALLNSLQEFVDHGHSNITYTVEKVEEPSGNDAAQYEQLLDKLAIRKQRAKEAYLDGIDTKEEYRENRELIDAEVKSIKEKLATLETAAVITTTEEFHVDIREIILKLKDNTLSTLEKHTALASILDYMEYDKEKDEYSFYYKFEE

SEQ ID NO: 6015 - protein, 497 aa, Unknown
  Description of Unknown: Integrase B6016 sequence
  PTHR30461:SF3,cd00338,SM00857,G3DSA:1.10.10.2600,IPR036162, PS51737,G3DSA:3.40.50.1390,IPR006119,IPR038109,PF07508, SSF53041,IPR011109,PTHR30461,PS51736,Coil, PF00239
MGGRAAIYARFSSHNQRGESIEIQVEKSRAYCAENDLRVVATYCDFAQTGTNTDRAEFQRMMADAKRGLFDFVVIYKVTRIMRNRDEMAMARIMLRRCRVEILYAGEDISDGSAGVLQLGMLEVLAEYESALDGERIRDGIQKNAERCMANGCVRYGWDIVDGRYVVNEEEAAAIRLGVRMVLSGKSVADVVRAWEPYRTKRGGKWRFQTVRRILMRRENGGEYRYAGVVVPGGMPAIVPMDDEERVIRMLEDSHRPRAKTEAWDFPLTGKLYDGRDGGLMTGTSGTGKSGRPYHYYRCRSCGRTVRRDVVEKRVADAVREALGSADSRERIARMLADAEEERADEKPLSETIKGELAKIETAFSNIWAAIESGIAPPGGKERIDALKQRQALLKDELRTAEALEAARLDYDRALFWLEGMAAAEVDDAQLLRTFVARVVLGGPDDDDGLRVAFTFDDSAGLGDNPSLPGAIGPGGEVFDRMNASSTIRSPVELYPL

SEQ ID NO: 6016 - protein, 497 aa, Unknown
  Description of Unknown: Integrase B6017 sequence
  IPR036162,PS51737,IPR011109,PTHR30461,PS00397, PF00239,G3DSA:1.10.10.2600,IPR006119,SSF53041,cd00338, SM00857,IPR025827,IPR038109,PS51736,IPR006118, PF13408,G3DSA:3.40.50.1390,PF07508,Coil
MNQNESLKTAFGYIRVSTHMQEEISPEAQKHELQKWAKQHNILITQWFQDNGISGKKAENRTAFQNMIALAKEKDHPDYILAWKFSRFARNQEESIVYKSLLRKNNVQVVSISEPLPDGPFAPLIERIIEWMDEYYSIRLSGEVKRGMKEKAKKGGYQSAPPLGYRREKGDTVPVIYEPEAKIYRLIKKYFIQDEYNPTTIARTLNDQGYRTRQGNRFEARVIIYILRNPFYIGKIRWNRSSHGGYYENSPEDVIVSDGQHEPLCTNEEWDIISKRIKKYTPGSTGRRRSKTLLPHYLSGGLFRCPICGASMCYQRGVSKKLPRAYPYFCCWKYAKGIHSENVNASAPKTEDALLNSLQEFVDHGHSNITYTVEKVEEPSGNDAAQYEQLLDKLAIRKQRAKEAYLDGIDTKEEYRENRELIDAEVKSIKEKLATLETAAVITTTEEFHVDIREIILKLKDNTLSTLEKHTALASILDYMEYDKENDEYSFYYKFEE

SEQ ID NO: 6017 - protein, 497 aa, Unknown
  Description of Unknown: Integrase B6018 sequence
  IPR036162,PS51737,IPR011109,PTHR30461,PS00397, PF00239,G3DSA:1.10.10.2600,IPR006119,SSF53041,cd00338, SM00857,IPR025827,IPR038109,PS51736,IPR006118, PF13408,G3DSA:3.40.50.1390,PF07508,Coil
MNQNESLKTAFGYIRVSTHMQEEISPEAQKHELQKWAKQHNILITQWFQDNGISGKKAENRTAFQNMIALAKEKDHPDYILAWKFSRFARNQEESIVYKSLLRKNNVQVVSISEPLPDGPFAPLIERIIEWMDEYYSIRLSGEVKRGMKEKAKKGGYQSAPPLGYRREKGDTVPVIYEPEAKIYRLIKKYFIQDEYNPTTIARTLNDQGYRTRQGNRFEARVVIYILRNPFYIGKIRWNRSSHGGYYENSPEDVIISDGQHEPLCTNEEWEIICKRIKKYTPGSTGRRRSKTLLPHYLSGGLFRCPICGASMCYQRGISKKLPRAYPYFCCWKYAKGIHPENVNASAPKTEEALLNSLQEFVDHGHSDITYTVEKVEESSGNDAAQYEQLLDKLAIRKQRAKEAYLDGIDTKEEYRENRELIDAEVKSIKEKLATLETAAVITTTEEFHVDIREIILKLKDDTLSTLEKHTALASILDYMEYDKEKDEYSFYYKFEE

SEQ ID NO: 6018 - protein, 496 aa, Unknown
  Description of Unknown: Integrase B6019 sequence
  PTHR30461:SF3,cd00338,SM00857,G3DSA:1.10.10.2600,IPR036162, PF13408,PS51737,IPR025827,G3DSA:3.40.50.1390,IPR006119, IPR038109,PF07508,IPR011109,SSF53041,PTHR30461, PS51736,Coil,PF00239
MNDRKRAVAYIRVSTKSDAQLHSFGYQESYWRDTIAASNQYDFAGIYSDFGISGRSLNRRPQLQRLIADAEQKKFDVVFTKSVARFGRNVEEIVATVRKLREYGIRIFFEKEQIDTFDPNMELYMTLAASIAENDLKIYSENMTWSIRERYKKGWISIGSQIFGYRMNKEDNTLIVEPTEAETVKRIYDLYEEGLGQVAISHILEEEQRANIYGEVKWDVGAIRYIITNEKYKGCALTQKGIYVHGIKHKNDNLAPQWYMENTHEAIITPEQFNRVQELIKERARKSKRAKPGDYVFARKIECGCCGGGYSHKFNNTNKPWRNEIWICSKQNTYGAGHCTNTRIKDEVLKKLFVECYNEFVRENGNTDELMKLRDSQRKLLEQERELNALRVNRMIEISDYNTEIAKVREQITECNKQIALHEMRGARKEDLVEIKEFDDSKVEIFLEKAVVLNHTITFTFINGMSISREYTNGHGGNTAGWLDRRLDRLSKEGKQ

SEQ ID NO: 6019 - protein, 496 aa, Unknown
  Description of Unknown: Integrase B6020 sequence
  PTHR30461:SF3,IPR036162,PS51737,IPR011109,PTHR30461, PS00397,PF00239,G3DSA:1.10.10.2600,IPR006119,SSF53041, cd00338,SM00857,IPR025827,IPR038109,PS51736, IPR006118,PF13408,G3DSA:3.40.50.1390,PF07508,Coil
MEKLRNGALYIRVSTDKQEELSPDAQRRLLLDYAAKNNIILSNEYIFEEDGISGRKADKRPNFQRMIGLAKSKEHPFDVILVWKFSRFARNQEESIVYKSLLRKNNVEVISVSEPLVDGPFGTLIERIIEWMDEYYSIRLSGEVTRGMTENAMRGNFQSSPPLGYMVPAHKEVPVIVESEAAIVRLIFDMYTEQGYPLIDITRQLNALGYRTRAGNEFENRGIKYILSNEVYTGKTVWNKRDSSSRTRSKDEWIIADGSHEPIITPEQFEKARNRLSSNYRPKYAKPSGVCSHWLSGIVKCSACGRTLSISLSGANRYGKRYIYLQCYGYLKGKCNVSHRISEKKIVPMVLDALRSAITAEDLAFNVIDSEQTDNSPAALDIYQNQLNAIAKKENRIKMAYVDGIDTLEEYKKNKQLLQEERRSIEERINLLPAPAAKMNESAALRSKIKTVYDGLLDDSLSMQSKNELIKSVVEKIVFNKKSENIDVYFYTLKPL

SEQ ID NO: 6020 - protein, 496 aa, Unknown
  Description of Unknown: Integrase B6021 sequence
  PTHR30461:SF3,IPR036162,PS51737,IPR011109,PTHR30461, PS00397,PF00239,G3DSA:1.10.10.2600,IPR006119,SSF53041, cd00338,SM00857,IPR025827,IPR038109,PS51736, IPR006118,PF13408,G3DSA:3.40.50.1390,PF07508,Coil
MEKLRTGALYIRVSTDKQEELSPDAQRRLLLEYAAKNNIILSNEYIFEEDGISGRKADKRPNFQRMIGLAKSKEHPFDVILVWKFSRFARNQEESIVYKSLLRKNNVEVISVSEPLVDGPFGTLIERIIEWMDEYYSIRLSGEVTRGMTENAMRGNFQASPPLGYSITAHKATPVIVESEAEIVRMIFNLYTEQGYSIIEITRQLNALGYKTRAGKSFENRGIKYILTNEVYTGKSVWNKRDSASRPKDKTEWIIADGAHEPIISPEQFQRAKVRLESNYRPRYAKPSGVCSHWLSGIVKCSACGRSLSISLAGANKQGKRYIYLQCYGYLKGKCNVSHAISEKKIVPMVLAALKDAISSENLSFKVINTDSQSNYPAAIDIYQNQLDELAKKEKRIKMAYMDGIDTIEEYRKNKELLLEERNSIENRINALPKPAAKSDTTAALRSKIKTVYDSLLNEDLSMQTRNDLLKSVVEKIVFNKKESTIDVYFYTSNPL

SEQ ID NO: 6021 - protein, 496 aa, Unknown
  Description of Unknown: Integrase B6022 sequence
  SM00857,G3DSA:1.10.10.2600,IPR036162,PF13408,IPR025827, PS51737,G3DSA:3.40.50.1390,IPR006119,IPR038109,SSF53041, IPR011109,PTHR30461,Coil,PS51736,cd00338, PF00239
MVKNRAAIYARFSSHNQRSESIEIQVENSREYCEREGLQVVREYCDYAQTGRNVDRAEFQRMMRDAKLGLFDFVVIYKVTRIMRNRDEMALARIMLRKAGVEILYAGEEIASGSSGVLQLGMLEVLAEWESAIDSERIRDGIQKNAERCMANGRTLYGWDIVEGRYAINEREAAVLRRMKNLLFSGNSVAEIVRAVDGERSKRGAKFNQDTVTKLLKRVQNAGVYKYAGHEVEDGMPALWSQAEQDMINSILGDRHRPRRKIDSALEFPLSGKLYCARCGMPMAGTSGTSKNGSAYHYYKCRKCRRTVRRDLIEDAVVDMTYEAVKQTDVRKRIAKTLAGYEAERVTEEKPESYFIKKEIRRIDTAFERIWQAIEDGIAPPGGRERTTELKRQRAELEARLRVAEQSEALEPSVGDVLLWLDDLANDTTPLEILNEFVRFVEIDGKDVTVYFMFDELPDDFTPKQKKAEHPCYQRCSTNSLMVEVRRIELRSTKAP

SEQ ID NO: 6022 - protein, 496 aa, Unknown
  Description of Unknown: Integrase B6023 sequence
  SM00857,G3DSA:1.10.10.2600,IPR036162,PF13408,PS51737, G3DSA:3.40.50.1390,IPR025827,IPR006119,IPR038109,PF07508, IPR011109,SSF53041,PTHR30461,PS51736,cd00338, PF00239
MVKNRAAIYARFSSHNQRSESIEIQVENSRRYCEQEGLQVVREYCDYAQTGRNVDRAEFQRMMRDAKLGLFDYVVIYKVTRIMRNRDEMALARIMLRKSGVEILYAGEEIASGSSGVLQLGMLEVLAEWESAIDSERIRDGIQKNAQRCMANGRTLYGWDIVDGRYVVNEREAAVMRRMKNMLFSGSSVADIVRAVSAERSKRGAKFTNDTVSKLLRRVQNAGVYKYAGNEVEDGMPALWPQREQYMINSILDDRHRPRRKIDSAREFPLTGKLYCSTCGAPMFGTSGTSKNGSAYHYYKCRECRRTVRRDLIEGAVADMTYEAVKRNDVRARIAETLAGYEAEQGSDEKPESYFIKKEIRRIDTTFERIWHAIEDGIAPPGGKERIEELNRQKSELEARLCAIEKSESCEVSVDDVLLWLDSLANDTTPLEILNEWVRFVDIDGKDISVYFMFDDLPDDFNPTKKKAEHPCYQRCSTNSLMVEPRRIELRSTTAP

SEQ ID NO: 6023 - protein, 496 aa, Unknown
  Description of Unknown: Integrase B6024 sequence
  PTHR30461:SF3,cd00338,SM00857,G3DSA:1.10.10.2600,IPR036162, PF13408,IPR025827,G3DSA:3.40.50.1390,PS51737,IPR006119, IPR038109,PF07508,IPR011109,SSF53041,PTHR30461, PS51736,Coil,PF00239
MDDRKRAVAYIRVSTKSDAQLHSFGYQESYWRDAISASNQYDFAGIYSDFGISGRSLNRRPQLQRLIADAEQKKFDVVFTKSVARFGRNVEEIVATVRKLREFGIRIFFEKEQIDTFDPNMELYMTLAASIAENDLKIYSENMTWSIRERYKKGWISIGSQIFGYRMNKENNTLIVEPTEAETVKRIYDLYEEGLGQVAISHVLEEEQRANIYGEVKWDVGAIRYILTNEKYKGCALTQKGIYVHGIKQKNDNLAPQWYMENTHEAIITPEQFERVQELIKERARKSKGAKPGDYVFARKIECGCCGGGYSHKFNNTNKPWRNEIWICSKQNTYGAGHCTNTRIKDEVLKKLFVECYNEFVRENGNTDELMELRDSQRKLLEQERELNALRVNRMIEISDYNVEIAKVREQITECNKQIALHEMRGARKEDLVEIKEFDDSKVEIFLEKAVVLNHKITFTFINGMSISREYTNGHGGNTAGWLDRRLDRLSKEGKQ

SEQ ID NO: 6024 - protein, 496 aa, Unknown
  Description of Unknown: Integrase B6025 sequence
  PTHR30461:SF3,IPR036162,PS51737,IPR011109,PTHR30461, PS00397,PF00239,G3DSA:1.10.10.2600,IPR006119,SSF53041, cd00338,SM00857,IPR025827,IPR038109,PS51736, IPR006118,PF13408,G3DSA:3.40.50.1390,PF07508,Coil
MEKLRTGALYIRVSTDKQEELSPDAQRRLLLEYAAKNNIILSNEYIFEEDGISGRKADKRPNFQRMIGLAKSKEHPFDVILVWKFSRFARNQEESIVYKSLLRKNNVEVISVSEPLVDGPFGTLIERIIEWMDEYYSIRLSGEVTRGMTENAMRGNFQASPPLGYSITAHKATPVIVESEAEIVRMIFNLYTEQGYSIIEITRQLNALGYKTRAGKSFENRGIKYILTNEVYTGKSVWNKRDSASRPKDKTEWIIADGAHEPIISPEQFQRAKVRLESNYRPRYAKPSGVCSHWLSGIVKCSACGRSLSITLAGANKQGKRYIYLQCYGYLKGKCNVSHAISEKKIVPMVLAALKDAISSENLSFKVINTDSQSNYPAAIDIYQNQLDELAKKEKRIKMAYMDGIDTIEEYRKNKELLLEERNSIESRINALPKPAAKSDTTAALRSKIKTVYDSLLNEELSMQTRNDLLKSVVEKIVFNKKEATIDVYFYTSNPL

SEQ ID NO: 6025 - protein, 496 aa, Unknown
  Description of Unknown: Integrase B6026 sequence
  PTHR30461:SF3,IPR036162,PS51737,IPR011109,PTHR30461, PS00397,PF00239,G3DSA:1.10.10.2600,IPR006119,SSF53041, cd00338,SM00857,IPR025827,IPR038109,PS51736, IPR006118,PF13408,G3DSA:3.40.50.1390,PF07508,Coil
MEKLRNGALYIRVSTDKQEELSPDAQRRLLLEYAAKNNIILSNEYIFEEDGISGRKADKRPNFQRMIGLAKSKEHPFDVILVWKFSRFARNQEESIVYKSLLRKNNVEVISVSEPLVDGPFGTLIERIIEWMDEYYSIRLSGEVTRGMTENAMRGNFQSSPPLGYMVPAHKEVPVIVEREAAIVRLIFDMYTEQGYPLIDITRQLNALGYRTRAGNEFENRGIKYILSNEVYTGKTVWNKRDSSSRTKSKDEWIIADGSHQPIITPEQFEKAHNRLSSNYRPKYAKPSGVCSHWLSGIVKCSACGRSLSISLAGANKQGKRYIYLQCYGYLKGKCNVSHAISEKKIVPMVLAALKDAISSENLSFKVINTDSQSNYPAAIDIYQNQLDELIKKEKRIKMAYMDGIDTIEEYRKNKELLLEERNSIESRINALPKPAAKSDTTAALRSKIKTVYDSLLNEDLSMQTRNDLLKSVVEKIVFNKKEATIDVYFYTSNPL

SEQ ID NO: 6026 - protein, 496 aa, Unknown
  Description of Unknown: Integrase B6027 sequence
  PTHR30461:SF3,IPR036162,PS51737,IPR011109,PTHR30461, PS00397,PF00239,G3DSA:1.10.10.2600,IPR006119,SSF53041, cd00338,SM00857,IPR025827,IPR038109,PS51736, IPR006118,PF13408,G3DSA:3.40.50.1390,PF07508,Coil
MEKLRNGALYIRVSTDKQEELSPDAQRRLLLDYAAKNNIILSNEYIFEEDGISGRKADKRPNFQRMIGLAKSKEHPFDVILVWKFSRFARNQEESIVYKSLLRKNNVEVISVSEPLVDGPFGTLIERIIEWMDEYYSIRLSGEVTRGMTENAMRGNFQSSPPLGYMVPAHKEVPVIVESEAAIVRLIFDMYTKQGYPLIDITRQLNALGYRTRAGNAFENRGIKYILSNEVYTGKTVWNKRDSSSRTRSKDEWIIADGSHEPIITPEQFEKARNRLSSNYRPKYAKPSGVCSHWLSGIVKCSACGRTLSISLSGANRYGKRYIYLQCYGYLKGKCNVSHRISEKKIVPMVLDALRSAITAEDLAFNVIDSEQTDNSPAALDIYQNQLDAIAKKENRIKMAYVDGIDTLEEYKKNKQLLQEERRSIEERINLLPAPAAKMNESAALRSKIRTVYDGLLDDSLSMQSKNELIKSVVEKIVFNKKSENIDVYFYTLKPL

SEQ ID NO: 6027 - protein, 496 aa, Unknown
  Description of Unknown: Integrase B6028 sequence
  PTHR30461:SF3,IPR036162,PS51737,IPR011109,PTHR30461, PS00397,PF00239,G3DSA:1.10.10.2600,IPR006119,SSF53041, cd00338,SM00857,IPR025827,IPR038109,PS51736, IPR006118,PF13408,G3DSA:3.40.50.1390,PF07508,Coil
MEKLRTGALYIRVSTDKQEELSPDAQRRLLLEYAAKNNIILSNEYIFEEDGISGRKADKRPNFQRMIGLAKSKEHPFDVILVWKFSRFARNQEESIVYKSLLHKNNVEVISVSEPLVDGPFGTLIERIIEWMDEYYSIRLSGEVTRGMTENAMRGNFQASPPLGYSITAHKATPVIVKSEAEIVRMIFNLYTEQGYSIIDITRQLNALGYKTRAGKSFENRGIKYILTNEVYTGKSVWNKRDSASRPKDKTEWIIADGAHEPIISPEQFQRAKVRLESNYRPRYAKPSGVCSHWLSGIVKCSACGRSLSISLAGANKQGKRYIYLQCYGYLKGKCNVSHAISEKKIVPMVLAALKDAISSENLSFKVINTDSQSNYPAAIDIYQNQLDELIKKEKRIKMAYMDGIDTIEEYRKNKELLLEERNSIESRINALPKPAAKSDTTAALRSKIKTVYDSLLNENLSMQTRNDLLKSVVEKIVFNKKESTIDVYFYTSNPL

SEQ ID NO: 6028 - protein, 496 aa, Unknown
  Description of Unknown: Integrase B6029 sequence
  PTHR30461:SF3,IPR036162,PS51737,IPR011109,PTHR30461, PS00397,PF00239,G3DSA:1.10.10.2600,IPR006119,SSF53041, cd00338,SM00857,IPR025827,IPR038109,PS51736, IPR006118,PF13408,G3DSA:3.40.50.1390,PF07508,Coil
MEKLRTGALYIRVSTDKQEELSPDAQRRLLLEYAAKNNIILSNEYIFEEDGISGRKADKRPNFQRMIGLAKSKEHPFDVILVWKFSRFARNQEESIVYKSLLRKNNVEVISVSEPLVDGPFGTLIERIIEWMDEYYSIRLSGEVTRGMTENAMRGNFQASPPLGYSITAHKATPVIVESEAEIVRMIFNLYTEQGYSIIEITRQLNALGYKTRAGKSFENRGIKYILTNEVYTGKSVWNKRDSASRPKDKTEWIIADGAHEPIISPEQFQRAKVRLESNYRPRYAKPSGVCSHWLSGIVKCSACGRSLSISLAGANKQGKRYIYLQCYGYLKGKCNVSHAISEKKIVPMVLAALKDAISSENLSFKVINTDSQSNYPAAIDIYQNQLDELAKKEKRIKMAYMDGIDTIEEYRKNKELLLEERNSIESRINALPKPAAKSDTTAALRSKIKTVYDSLLNEDLSMQTRNDLLKSVVEKIVFNKKESTIDVYFYTSNPL

SEQ ID NO: 6029 - protein, 496 aa, Unknown
  Description of Unknown: Integrase B6030 sequence
  PTHR30461:SF3,cd00338,SM00857,G3DSA:1.10.10.2600,IPR036162, PF13408,IPR025827,G3DSA:3.40.50.1390,PS51737,IPR006119, IPR038109,PF07508,SSF53041,IPR011109,PTHR30461, PS51736,Coil,PF00239
MYEDIKTACLYVRFSSHNQTEQSIEGQTRVCRDFCKRHNIRIVEIYADRATSASKDIEKRVQFLKMIKDSEKGLFDAVIVYKLDRFARSRYDSATYKYRLKRNGVQLISATENISNDPEGIILESVLEGMAEFYSAELSQKINRGMRESAYKHNSIGGAVPLGYKIEDKKLVIDPKTAPIVKEAFEKYADGETVAEICRQFNARGYKTSKGTAFGKSSFTKIFRNERYIGVYTFHDYRAEDAIPAIIDKDLWDRVQLRVGKIKNAPARNKAKVVYLLSGKIFCGHCGSKMNGNCNAGNYCYYQCYGKKNGNVDCKKKNIRKEFIERLVAQDALSLLTDEYIEQIATIACEKNQHEIELDSAIPTIRDRIHQVDLSLNHLLKAIESGSAPDMLVKRMGELEKEKKDLQAQAKKESEDIVELDKAQVIYWLEQFRGGSIEDEEFCRMLIDLFVNSVTVWDEDDNTYKVTVAYNLTSLPTKTYRLNKGGTLSDFASNAP

SEQ ID NO: 6030 - protein, 496 aa, Unknown
  Description of Unknown: Integrase B6031 sequence
  PTHR30461:SF3,IPR036162,PS51737,IPR011109,PTHR30461, PS00397,PF00239,G3DSA:1.10.10.2600,IPR006119,SSF53041, cd00338,SM00857,IPR025827,IPR038109,PS51736, IPR006118,PF13408,G3DSA:3.40.50.1390,PF07508,Coil
MEKLRTGALYIRVSTDKQEELSPDAQRRLLLEYAAKNNIILSNEYIFEEDGISGRKADKRPNFQRMIGLAKSKEHPFDVILVWKFSRFARNQEESIVYKSLLRKNNVEVISVSEPLVDGPFGTLIERIIEWMDEYYSIRLSGEVTRGMTENAMRGNFQASPPLGYSITAHKATPVIVESEAEIVRMIFNLYTEQGYSIIEITRQLNALGCKTRAGKSFENRGIKYILTNEVYTGKSVWNKRDSASRPKDKTEWIIADGAHEPIISPEQFQRAKVRLESNYRPRYAKPSGVCSHWLSGIVKCSACGRSLSISLAGANKQGKRYIYLQCYGYLKGKCNVSHAISEKKIVPMVLAALKDAISSENLSFKVINTDSQSNYPAAIDIYQNQLDELAKKKKRIKMAYMDGIDTIEEYRKNKELLLEERNSIESRINALPKPAAKSDTTAALRSKIKTVYDSLLNEDLSMQTRNDLLKSVVEKIVFNKKESTIDVYFYTSNPL

SEQ ID NO: 6031 - protein, 496 aa, Unknown
  Description of Unknown: Integrase B6032 sequence
  PTHR30461:SF3,IPR036162,PS51737,IPR011109,PTHR30461, PS00397,PF00239,G3DSA:1.10.10.2600,IPR006119,SSF53041, cd00338,SM00857,IPR025827,IPR038109,PS51736, IPR006118,PF13408,G3DSA:3.40.50.1390,PF07508,Coil
MEKLRTGALYIRVSTDKQEELSPDAQRRLLLEYAAKNNIILSNEYIFEEDGISGRKADKRPNFQRMIGLAKSKEHPFDVILVWKFSRFARNQEESIVYKSLLRKNNVEVISVSEPLVDGPFGTLIERIIEWMDEYYSIRLSGEVTRGMTENAMRGNFQASPPLGYSITAHKATPVIVESEAEIVRMIFNLYTEQGYSIIEITRQLNALGYKTRAGKSFENRGIKYILTNEVYTGKSVWNKRDSASRPKDKTEWIIADGAHEPIISPEQFQRAKVRLESNYRPRYAKPSGVCSHWLSGIVKCSACGRSLSISLAGANKQGKRYIYLQCYGYLKGKCNVSHAISEKKIVPMVLAALKDAISSENLSFKVINTDSQSNYPAAIDIYQNQLDELAKKEKRIKMAYMDGIDTIEEYRKNKELLLEERNSIESRINALPKPAAKSDTTAALRSKIKTVYDSLLNEELSMQTRNDLLKSVVEKIVFNKKEATIDVYFYTSNPL

SEQ ID NO: 6032 - protein, 496 aa, Unknown
  Description of Unknown: Integrase B6033 sequence
  PTHR30461:SF3,IPR036162,PS51737,IPR011109,PTHR30461, PS00397,PF00239,G3DSA:1.10.10.2600,IPR006119,SSF53041, cd00338,SM00857,IPR025827,IPR038109,PS51736, IPR006118,PF13408,G3DSA:3.40.50.1390,PF07508,Coil
MEKLRTGALYIRVSTDKQEELSPDAQRRLLLEYAAKNNIILSNEYIFEEDGISGRKADKRPNFQRMIGLAKSKEHPFDVILVWKFSRFARNQEESIVYKSLLRKNNVEVISVSEPLVDGPFGTLIERIIEWMDEYYSIRLSGEVTRGMTENAMRGNFQASPPLGYSITAHKATPVIVESEAEIVRMIFNLYTEQGYSIIEITRQLNALGYKTRAGKSFENRGIKYILTNEVYTGKSVWNKRDSASRPKDKTEWIIADGAHEPIISPEQFQRAKVRLESNYRPRYAKPSGVCSHWLSGIVKCSACGRSLSISLAGANKQGKRYIYLQCYGYLKGKCNVSHAISEKKIVPMVLAALKDAISSENLSFKVINTDSQSNYPAAIDIYQNQLDELAKKEKRIKMAYMDGIDTIEEYRKNKELLLEERNSIESRINALPKPAAKSDTTAALRSKIKTVYDSLLNENLSMQTRNDLLKSVVEKIVFNKKEATIDVYFYTSNPL

SEQ ID NO: 6033 - protein, 496 aa, Unknown
  Description of Unknown: Integrase B6034 sequence
  PTHR30461:SF3,cd00338,SM00857,G3DSA:1.10.10.2600,IPR036162, PF13408,IPR025827,PS51737,G3DSA:3.40.50.1390,IPR006119, IPR038109,PF07508,SSF53041,IPR011109,PTHR30461, PS51736,Coil,PF00239
MYEDIKTACLYVRFSSHNQTEQSIEGQTRVCRDFCKRHNIRIVEIYADRATSASKDIEKRVQFLKMIKDSEKGLFDAVIVYKLDRFARSRYDSATYKYRLKRNGVQLISATENISNDPEGIILESVLEGMAEFYSAELSQKINRGMRESAYKHNSIGGAVPLGYKIEDKKLVIDPKTAPIVKEAFEKYADGETVAEICRQFNARGYKTSKGTAFGKSSFTKIFRNERYIGVYTFHDYRAEDAIPAIIDKDLWDRVQLRVGKIKNAPARNKAKVVYLLSGKIFCGHCGSKMNGNCNAGNYCYYQCYGKKNGNVDCKKKNIRKEFIERLVAQDALSLLTDEYIEQIATIACEKNQHEIELDSALPTIRDRIHQVDLSLNHLLKAIESGSAPDMLVKRMGELEKEKKDLQAQAKKESEDIVELDKAQVIYWLEQFRGGSIKDEEFCRMLIDLFVNSVTVWDEDDNTYKVTVAYNLTSLPTKTYRLNKGGTLSDFASNAP

SEQ ID NO: 6034 - protein, 496 aa, Unknown
  Description of Unknown: Integrase B6035 sequence
  PTHR30461:SF3,IPR036162,PS51737,IPR011109,PTHR30461, PS00397,PF00239,G3DSA:1.10.10.2600,IPR006119,SSF53041, cd00338,SM00857,IPR025827,IPR038109,PS51736, IPR006118,PF13408,G3DSA:3.40.50.1390,PF07508,Coil
MEKLRTGALYIRVSTDKQEELSPDAQRRLLLEYAAKNNIILSNEYIFEEDGISGRKADKRPNFQRMIGLAKSKEHPFDVILVWKFSRFARNQEESIVYKSLLRKNNVEVISVSEPLVDGPFGTLIERIIEWMDEYYSIRLSGEVTRGMTENAMRGNFQASPPLGYSITAHKATPVIVESEAEIVRMIFNLYTEQGYSIIEITRQLNALGYKTRAGKSFENRGIKYILTNEVYTGKSVWNKRDSASRPKDKTEWIIADGAHEPIISPEQFQRAKVRLESNYRPRYAKPSGVCSHWLSGIVKCSACGRSLSISLAGANKQGKRYIYLQCYGYLKGKCNVSHAISEKKIVPMVLAALKDAISSENLSFKVINTDSQSNYPAAIDIYQNQLDELAKKEKRIKMAYMDGIDTIEEYRKNKELLIEERNNIESRINALPKPAAKSDTTAALRSKIKTVYDSLLNEDLSMQTRNDLLKSVVEKIVFNKKESTIDVYFYTSNPL

SEQ ID NO: 6035 - protein, 496 aa, Unknown
  Description of Unknown: Integrase B6036 sequence
  PTHR30461:SF3,IPR036162,PS51737,IPR011109,PTHR30461, PS00397,PF00239,G3DSA:1.10.10.2600,IPR006119,SSF53041, cd00338,SM00857,IPR025827,IPR038109,PS51736, IPR006118,PF13408,G3DSA:3.40.50.1390,PF07508,Coil
MEKLRTGALYIRVSTDKQEELSPDAQRRLLLEYAAKNNIILSNEYIFEEDGISGRKADKRPNFQRMIGLAKSKEHPFDVILVWKFSRFARNQEESIVYKSLLRKNNVEVISVSEPLVDGPFGTLIERIIEWMDEYYSIRLSGEVTRGMTENAMRGNFQASPPLGYSITAHKATPVIVESEAEIVRMIFNLYTEQGYSIIEITRHLNTLGYKTRAGKSFENRGIKYILTNEVYTGKSVWNKRDSASRPKDKTEWIIADGAHEPIISPEQFQRAKVRLESNYRPRYAKPSGVCSHWLSGIVKCSACGRSLSISLAGANKQGKRYIYLQCYGYLKGKCNVSHAISEKKIVPMVLAALKDAISSENLSFKVINTDSQSNYPAAIDIYQNQLDELAKKEKRIKMAYMDGIDTIEEYRKNKKLLLEERNSIESRINALPKPAAKSDTTAALRSKIKTVYDSLLNEELSMQTRNDLLKSVVEKIVFNKKEATIDVYFYTSNPL

SEQ ID NO: 6036 - protein, 496 aa, Unknown
  Description of Unknown: Integrase B6037 sequence
  PTHR30461:SF3,IPR036162,PS51737,IPR011109,PTHR30461, PS00397,PF00239,G3DSA:1.10.10.2600,IPR006119,SSF53041, cd00338,SM00857,IPR025827,IPR038109,PS51736, IPR006118,PF13408,G3DSA:3.40.50.1390,PF07508,Coil
MEKLRTGALYIRVSTDKQEELSPDAQRRLLLEYAAKNNIILSNEYIFEEDGISGRKADKRPNFQRMIGLAKSKEHPFDVILVWKFSRFARNQEESIVYKSLLRKNNVEVISVSEPLVDGPFGTLIERIIEWMDEYYSIRLSGEVTRGMTENAMRGNFQASPPLGYSITAHKATPVIVESEAEIVRLIFNLYTEQGYSIIEITRQLNALGYKTRAGKSFENRGIKYILTNEVYTGKSVWNKRDSASRPKDKTEWIIADGAHEPIISPEQFQRAKVRLESNYRPRYAKPSGVCSHWLSGIVKCSACGRSLSISLAGANKQGKRYIYLQCYGYLKGKCNVSHAISEKKIVPMVLAALKDAISSENLSFKVINTDSQSNYPAAIDIYQNQLDELAKKEKRIKMAYMDGIDTIEEYRKNKELLLEERNSIESRINALPKPAAKSDTTAALRSKIKTVYDSLLNEDLSMQTRNDLLKSVVEKIVFNKKESTIDVYFYTSNPL

SEQ ID NO: 6037 - protein, 496 aa, Unknown
  Description of Unknown: Integrase B6038 sequence
  PTHR30461:SF3,SM00857,G3DSA:1.10.10.2600,IPR036162,PF13408, PS51737,G3DSA:3.40.50.1390,IPR025827,IPR006119,IPR038109, PF07508,IPR011109,SSF53041,PTHR30461,Coil, PS51736,cd00338,PF00239
MQAAAYARYSTEHQTDSSIAYQMRKIEEYCAENGITISARYADEAMSGTNTQRPAFQSLCRDAAQRKFDAVVIYDISRGSRDVADWFGFRKQMAVLGIQVISVEDHIGDILNPADYLTELITVGLGQHHVLTSRQKSMDSIATKAKTGQFLGGTPNFGYDIVDGKYVINPAESKIVQTIFQMYAAGKSYGEILGEIGEVRGKRGKIMGKNSLYYILRNERYAGVYSWCKYHSKIMGKYAGRTPNENAVRIEDSIPAIIDKDTWEAVQMRMEDKKHRACNKAKRSYLLSGLIECTECGASYVGHTSTNKRGYSTRYYCCGNKYRNHTCHSQNINAEELEVFVVQNLRQYLVNLDYEQMAQQIAGQINGATADLKAERKELANIIFQLENGTKAILKGIDYPELQEEMLRLRVRKSELEDIIQRGKEKNPVSVEKLVQLFRDAMERLDTDTKQVCKAMVKVYAHSNGDCDLEVGVHMDGCGSQQHALCTIIYFIKEMA

SEQ ID NO: 6038 - protein, 496 aa, Unknown
  Description of Unknown: Integrase B6039 sequence
  PTHR30461:SF3,IPR036162,PS51737,IPR011109,PTHR30461, PS00397,PF00239,G3DSA:1.10.10.2600,IPR006119,SSF53041, cd00338,SM00857,IPR025827,IPR038109,PS51736, IPR006118,PF13408,G3DSA:3.40.50.1390,PF07508,Coil
MNAAIYARVSTDWQAEHGYSIETQLESCRAKAKEIGATVIKEYVDDGYSGGFLERPGLDALRDAVSDGLYDVVIFHDPDRMARKLIHQLIITEELEKAGASPVFVLERFDSSPEGQMNYQMKGVFAEYERAKIRERTMRGKRAKLRAGKAICDSHIYGYDFDRAASSYVVNPAEAAVVRRVYHLYVVERVGGCETIAEILNADNIPSPTGRKWSPSSVRNMLSRPHYTGHYYANTTYHKKTGPHSEKRLPRPREEWIEMSCPQIIPAEMHEKALAIKAGQRTYKVWKRNAKVALLQGIAYCGSCGSRIYVSGGGKRGRRFYECGAARASSYCPARLMEVPVADDLFWNILERICKSPAALEKYIGENVAEKGSRPAAAEKPEKIARRLEKIAGEKKAIMSWFSQSLLTQSEATERLSALKTEELRLQSELADLRAKSSREPEKIAPSDICAAVAACSVDLAARRRVVLAVVERVDVLRRDFNYGHKYIVDFKIKFK

SEQ ID NO: 6039 - protein, 496 aa, Unknown
  Description of Unknown: Integrase B6040 sequence
  PTHR30461:SF3,IPR036162,PS51737,IPR011109,PTHR30461, PS00397,PF00239,G3DSA:1.10.10.2600,IPR006119,SSF53041, cd00338,SM00857,IPR025827,IPR038109,PS51736, IPR006118,PF13408,G3DSA:3.40.50.1390,PF07508,Coil
MEKLRTGALYIRVSTDKQEELSPDAQRRLLLEYAAKNNIILSNEYIFEEDGISGRKADKRPNFQRMIGLAKSKEHPFDVILVWKFSRFARNQEESIVYKSLLRKNNVEVISVSEPLVDGPFGTLIERIIEWMDEYYSIRLSGEVTRGMTENAMRGNFQASPPLGYSITAHKATPVIVESEAEIVRMIFNLYTEQGYSIIEITRQLNSLGYKTRAGKSFENRGIKYILTNEVYTGKSVWNKRDSASRPKDKTEWIIADGAHEPIISPEQFQRAKVRLESNYRPRYAKPSGVCSHWLSGIVKCSACGRSLSITLAGANKQGKRYIYLQCYGYLKGKCNVSHAISEKKIVPMVLAALKDAISSENLSFKVINTDSQSNYPATIDIYQNQLDELAKKEKRIKMAYMDGIDTIEEYRKNKELLLEERNSIENRINALPKPAAKSDTTAALRSKIKTVYDSLLNEELSMQTRNDLLKSVVEKIVFNKKESTIDVYFYTSNPL

SEQ ID NO: 6040 - protein, 496 aa, Unknown
  Description of Unknown: Integrase B6041 sequence
  PTHR30461:SF3,IPR036162,PS51737,IPR011109,PTHR30461, PS00397,PF00239,G3DSA:1.10.10.2600,IPR006119,SSF53041, cd00338,SM00857,IPR025827,IPR038109,PS51736, IPR006118,PF13408,G3DSA:3.40.50.1390,PF07508,Coil
MEKLRNGALYIRVSTDKQEELSPDAQRRLLLDYAAKNNIILSNEYIFEEDGISGRKADKRPNFQRMIGLAKSKEHPFDVILVWKFSRFARNQEESIVYKSLLRKNNVEVISVSEPLVDGPFGTLIERIIEWMDEYYSIRLSGEVTRGMTENAMRGNFQSSPPLGYMVPAHKEVPVIVESEAAIVRLIFDMYTEQGYPLIDITRQLNALGYRTRAGNEFENRGIKYILSNEVYTGKTVWNKRDSSSRTKSKDEWIIADGSHEPIITPEQFEKARNRLSSNYRPKYAKPSGVCSHWLSGIVKCSACGRTLSISLSGANRYGKRYIYLQCYGYLKGKCNVSHRISEKKIVPMVLDALRSAITAEDLAFNVIDSEQTDNSPAALDIYQNQLDAIAKKENRIKMAYVDGIDTLEEYKKNKQLLQEERRSIEERINLLPAPAAKMNESAALRSKIKTVYDGLLDDSLSMQSKNELIKSVVEKIVFNKKLQNIDVYFYTLKPL

SEQ ID NO: 6041 - protein, 496 aa, Unknown
  Description of Unknown: Integrase B6042 sequence
  PTHR30461:SF3,IPR036162,PS51737,IPR011109,PTHR30461, PS00397,PF00239,G3DSA:1.10.10.2600,IPR006119,SSF53041, cd00338,SM00857,IPR025827,IPR038109,PS51736, IPR006118,PF13408,G3DSA:3.40.50.1390,PF07508,Coil
MEKLRTGALYIRVSTDKQEELSPDAQRRLLLDYAAKNNIILSNEYIFEEDGISGRKADKRPNFQRMIGLAKSKEHPFDVILVWKFSRFARNQEESIVYKSLLRKNNVEVISVSEPLVDGPFGTLIERIIEWMDEYYSIRLSGEVTRGMTENAMRGNFQASPPLGYSITAHKAIPVIVESEAEIVRMIFNLYTEQGYSIIEITRQLNALGYKTRAGKSFENRGIKYILTNEVYTGKSVWNKRDSASRPKDKTEWIIADGAHEPIISPEQFQRAKVRLESNYRPRYAKPSGVCSHWLSGIVKCSACGRSLSISLAGANKQGKRYIYLQCYGYLKGKCNVSHAISEKKIVPMVLAALKDAISSENLSFKVINTDSQNNYPAAIDIYQNQLDELAKKEKRIKMAYMDGIDTIEEYRKNKELLLEERNSIESRINALPKPAAKSDTTAALRSKIKTVYDSLLNEDLSMQTRNDLLKSVVEKIVFNKKESTIDVYFYTSNPL

SEQ ID NO: 6042 - protein, 496 aa, Unknown
  Description of Unknown: Integrase B6043 sequence
  PTHR30461:SF3,IPR036162,PS51737,IPR011109,PTHR30461, PS00397,PF00239,G3DSA:1.10.10.2600,IPR006119,SSF53041, cd00338,SM00857,IPR025827,IPR038109,PS51736, IPR006118,PF13408,G3DSA:3.40.50.1390,PF07508,Coil
MEKLRTGALYIRVSTDKQEELSPDAQRRLLLEYAAKNNIILSNEYIFEEDGISGRKADKRPNFQRMIGLAKSKEHPFDVILVWKFSRFARNQEESIVYKSLLRKNNVEVISVSEPLVDGPFGTLIERIIEWMDEYYSIRLSGEVTRGMTENAMRGNFQASPPLGYSITAHKATPVIVESEAEIVRMIFNLYTEQGYSIIEITRQLNALGYKTRAGKSFENRGIKYILTNEVYTGKSVWNKRDSASRPKDKTEWIIADGAHDPIISPEQFQRAKVRLESNYRPRYAKPSGVCSHWLSGIVKCSACGRSLSISLAGANKQGKRYIYLQCYGYLKGKCNVSHAISEKKIVPMVLAALKDAISSENLSFKVINTDSQSNYPAAIDIYQNQLDELAKKEKRIKMAYMDGIDTIEEYRKNKKLLLEERNSIESRINALPKPAAKSDTTAALRSKIKTVYDSLLNEELSMQTRNDLLKSVVEKIVFNKKEATIDVYFYTSNPL

SEQ ID NO: 6043 - protein, 496 aa, Unknown
  Description of Unknown: Integrase B6044 sequence
  PTHR30461:SF3,cd00338,SM00857,G3DSA:1.10.10.2600,IPR036162, PF13408,PS51737,G3DSA:3.40.50.1390,IPR025827,IPR006119, IPR038109,PF07508,IPR011109,SSF53041,PTHR30461, PS51736,Coil,PF00239
MKKAVIYARYSSDMQREESIDAQVRACTYYARQYQYEIVHVYADRAQSGKRTKNREQFLQMINDASDGEFEVILVHKLNRFGRNTLEVLEYKNNLEDMGIELISVTERLESTPEGKLMLIIIAGMNEFYSDNLSQEVMKGLKENAYQCKFTGGVPALGYKVDPESKKLIIDEREAPIVQLIFRRYANGWSYNMIIDELTRLGYHTKYGKPFGKNSLFELLRNEKYIGVYTFNRAAKRKRDGTRNYHATKDPSEIIRIPGGCPALIDKETFEKVQNIMSENRKMSLQQHGQKVYILSGKLFCANCGARMYGNCKTTRGKTHFYYVCSNSWRKHKCSSRHIPAEELEDEIIEMLQTLICSPEFLQKVSQQLQNDAQKNQEITRKQRKSAAKRLQSINFKIKNLLNLVSQGIDFEEVAETLSTLKQEKETLMNTLDILDNLPPTAEETLPHKLSRLSSLEAAEQAALIRQYVDKIFVLAPKESQFPVKVDIYLRSDLFE

SEQ ID NO: 6044 - protein, 496 aa, Unknown
  Description of Unknown: Integrase B6045 sequence
  PTHR30461:SF3,IPR036162,PS51737,IPR011109,PTHR30461, PS00397,PF00239,G3DSA:1.10.10.2600,IPR006119,SSF53041, cd00338,SM00857,IPR025827,IPR038109,PS51736, IPR006118,PF13408,G3DSA:3.40.50.1390,PF07508,Coil
MEKLRTGALYIRVSTDKQEELSPDAQRRLLLEYAAKNNIILSNEYIFEEDGISGRKADKRPNFQRMIGLAKSKEHPFDVILVWKFSRFARNQEESIVYKSLLRKNNVEVISVSEPLVDGPFGTLIERIIEWMDEYYSIRLSGEVTRGMTENAMRGNFQASPPLGYSITAHKATPVIVESEAEIVRMIFNLYTEQGYSIIEITRHLNALGYKTRAGKSFENRGIKYILTNEVYTGKSVWNKRDSASRPKDKTEWIIADGAHEPIISPEQFQRAKVRLESNYRPRYAKPSGVCSHWLSGIVKCSACGRSLSISLAGANKQGKRYIYLQCYGYLKGKCNVSHAISEKKIVPMVLAALKDAISSENLSFKVINTDSQSNYPAAIDIYQNQLDELTKKEKRIKMAYMDGIDTIEEYRKNKELLLEERNSIENRINALPKPAAKSDTTAALRSKIKTVYDSLLNEELSMQTRNDLLKSVVEKIVFNKKESTIDVYFYTSNPL

SEQ ID NO: 6045 - protein, 496 aa, Unknown
  Description of Unknown: Integrase B6046 sequence
  PTHR30461:SF3,SM00857,G3DSA:1.10.10.2600,IPR036162,PF13408, PS51737,IPR025827,G3DSA:3.40.50.1390,IPR006119,IPR038109, PF07508,SSF53041,IPR011109,PF00239,PTHR30461, PS51736,Coil,cd00338
MKNAVIYARYSSDKQRDESITGQLRECRAFAEKECLVIVHEYIDRAMSARTDKRPDFLRMIADSSRHRFEFVIVYQLDRFARNRYDSAIYKRKLKLNGVRVLSAKEHITSDPSGIIMESLLEGWAEYYSAELSQKVERGMTDNLLEKKWPGGTIPYGFMLDERHHLVQDPAASQAVHSIVDMYISGCTEPEVRQWLADHGYTYRSGRKFSRGFLLKFVKNRLLIGDFTWGGKTYPDFVEPYLSPADWERLQAAIRRRHTPGYKNHRRRRCANYALVGKLFCGVCGRPMTGTCGTSRNGSRHYYYTCSSHNNQKGSGNVACACRNVQKERLENAVLVATVNMLSNPEMIHTIAAAAAAAQKKYGSARQKISDLKNQLRDVQKKLQNSVKAVEAGVVSETLAANIPRYEQKAKELRLELERTKFDVPEKIDPDFIEFYLTRILKKAESEKRRWNVFSTFISRILLCTDHVEIDYTYGQPSSAILPIPGGSDDALVVTQ

SEQ ID NO: 6046 - protein, 496 aa, Unknown
  Description of Unknown: Integrase B6047 sequence
  PTHR30461:SF3,IPR036162,PS51737,IPR011109,PTHR30461, PS00397,PF00239,G3DSA:1.10.10.2600,IPR006119,SSF53041, cd00338,SM00857,IPR025827,IPR038109,PS51736, IPR006118,PF13408,G3DSA:3.40.50.1390,PF07508,Coil
MEKLRTGALYIRVSTDKQEELSPDAQRRLLLEYAAKNNIILSNEYIFEEDGISGRKADKRPNFQRMIGLAKSKEHPFDVILVWKFSRFARNQEESIVYKSLLRKNNVEVISVSEPLVDGPFGTLIERIIEWMDEYYSIRLSGEVTRGMTENAMRGNFQASPPLGYSITAHKATPVIVESEAEIVRMIFNLYTEQGYSIIEITRQLNALGYKTRVGKSFENRGIKYILTNEVYTGKSVWNKRDSASRPKDKTEWIIADGAHEPIISPEQFQRAKVRLESNYRPRYAKPSGVCSHWLSGIVKCSACGRSLSISLAGANKQGKRYIYLQCYGYLKGKCNVSHAISEKKIVPMVLAALKDAISSENLSFKVINTDSQSNYPAAIDIYQNQLDELAKKEKRIKMAYMDGIDTIEEYRKNKELLLEERNSIESRINALPKPAAKSDTTAALRSKIKTVYDSLLNEDLSMQTRNDLLKSVVEKIVFNKKESTIDVYFYTSNPL

SEQ ID NO: 6047 - protein, 496 aa, Unknown
  Description of Unknown: Integrase B6048 sequence
  PTHR30461:SF3,IPR036162,PS51737,IPR011109,PTHR30461, PS00397,PF00239,G3DSA:1.10.10.2600,IPR006119,SSF53041, SM00857,IPR025827,IPR038109,PS51736,cd03768, IPR006118,PF13408,G3DSA:3.40.50.1390,PF07508,Coil
MKHILSPASVLDNVVDLYIRVSSTEQAEEGYSVGEQEARLRNYSAAMGYTIHAVHVDPGFSGASLHRPGIQRVIEDVNNGSCKKVIVWKLDRLSRSQKDTLILLEDVFLANDCHFISLMESFDTSTPFGRCIVGILAAFAQMERENIKLRTTMGRQARIRAGHFHGSHAPIGYKFERTADGTLLSNDLVVDPYASILIKEVYQLFLSGKSLNQISQYMASTYGSQLYDWGHNTAVRRVLANPVYCGKVKAGKEWFPGIHEALVSESDWYMAAALLEHNRAINKRTYTYRNPDGYFSDNLLTGLLYCGDCGARMYARKVSSKKKKYICHSVARTAPAMIKSDHCTNRLHPFTVEQLDALVLGEVEKLALDRSYFDALTSSEAPAPDNDSEVFKDRLAEVQRQIDRLLNLYQTGLVDLPAISSRLGDLNREKEQLEINIESLSHQNYIDLKEAAWETVSDFPAVLESGDMESVHRIIHTLIDKVVVLNTDVTIYWSFC

SEQ ID NO: 6048 - protein, 496 aa, Unknown
  Description of Unknown: Integrase B6049 sequence
  PTHR30461:SF3,IPR036162,PS51737,IPR011109,PTHR30461, PS00397,PF00239,G3DSA:1.10.10.2600,IPR006119,SSF53041, cd00338,SM00857,IPR025827,IPR038109,PS51736, IPR006118,PF13408,G3DSA:3.40.50.1390,PF07508,Coil
MEKLRTGALYIRVSTDKQEELSPDAQRRLLLEYAAKNNIILSNEYIFEEDGISGRKADKRPNFQRMIGLAKSKEHPFDVILVWKFSRFARNQEESIVYKSLLRKNNVEVISVSEPLVDGPFGTLIERIIEWMDEYYSIRLSGEVTRGMTENAMRGNFQASPPLGYSITAHKTTPVIVESEAEIVRLIFNLYTEQGYSIIEITRQLNALGYKTRAGKSFENRGIKYILTNEVYTGKSVWNKRDSASRPKDKTEWIIADGAHEPIISPEQFQRAKVRLESNYRPRYAKPSGVCSHWLSGIVKCSACGRSLSITLAGANKQGKRYIYLQCYGYLKGKCNVSHAISEKKIVPMVLAALKDAISSENLSFKVINTDSQSNYPAAIDIYQNQLDELAKKEKRIKMAYMDGIDTIEEYRKNKELLLEERNSIESRINALPKPAAKSDTTAALRSKIKTVYDSLLNEDLSMQTRNDLLKSVVEKIVFNKKEATIDVYFYTSNPL

SEQ ID NO: 6049 - protein, 496 aa, Unknown
  Description of Unknown: Integrase B6050 sequence
  cd03768,SM00857,G3DSA:1.10.10.2600,IPR036162,PF13408, PS51737,G3DSA:3.40.50.1390,IPR025827,IPR006119,IPR038109, PF07508,IPR011109,SSF53041,PTHR30461,PS51736, Coil,PF00239
  MOD_RES (491)..(494): Any amino acid
MNNRIDAIYARQSVDKKDSISIESQIEFCKYELKGGNCKEYTDKGYSGKNTDRPKFQELVRDIKRGLIAKVVVYKLDRISRSILDFANMMELFQQYNVEFVSSTEKFDTSTPMGRAMLNICIVFAQLERETIQKRVTDAYYSRSQRGFKMGGKAPYGFHTEPIKMDGINTKKLVVNPDEAANIRLMFEMYAQPTTSYGDITRYFAEQGILFNGKELIRPTLAQMLRNPVYVQADLDVYEFFKSQGTVIVNDAADFTGMNGCYLYQGRDVKPSKKNDLKDQMLVLAPHEGIVPSDIWLTCRKKLMNNMKIQSARKATHTWLAGKIKCGNCGYALMSIFNPSGKQYLRCTKRLDNKSCPGCGKIITSELEAVVYQQMIKKLASYKTLTGRKKAAKANPKIAALQVELLHVDSEIEKLVDSLTGANNVLLSYVNVKIAELDGRKQELVKQIAELTVEAISPEQVNQISGYLDTWDNVSFDDKRRVVDLMITTVXXXXIL

SEQ ID NO: 6050 - protein, 496 aa, Unknown
  Description of Unknown: Integrase B6051 sequence
  PTHR30461:SF3,IPR036162,PS51737,IPR011109,PTHR30461, PS00397,PF00239,G3DSA:1.10.10.2600,IPR006119,SSF53041, cd00338,SM00857,IPR025827,IPR038109,PS51736, IPR006118,PF13408,G3DSA:3.40.50.1390,PF07508,Coil
MEKLRTGALYIRVSTDKQEELSPDAQRRLLLEYAAKNNIILSNEYIFEEDGISGRKADKRPNFQRMIGLAKSKEHPFDVILVWKFSRFARNQEESIVYKSLLRKNNVEVISVSEPLVDGPFGTLIERIIEWMDEYYSIRLSGEVTRGMTENAMRGNFQASPPLGYSITAHKATPVIVESEAEIVRMIFNLYTEQGYSIIEITRQLNALGYKTRAGKSFENRGIKYILTNEVYTGKSVWNKRDSASRPKDKTEWIIADGAHEPIISPEQFERAKVRLESNYRPRYAKPSGVCSHWLSGIVKCSACGRSLSISLAGANKQGKRYIYLQCYGYLKGKCNVSHAISEKKIVPMVLAALKDAISSENLSFKVINTDSQSNYPAAIDIYQNQLDELAKKEKRIKMAYMDGIDTIEEYRKNKELLLEERNSIESRINALPKPAAKSDTTAALRSKIKTVYDSLLNEDLSMQTRNDLLKSVVEKIVFNKKESTIDVYFYTSNPL

SEQ ID NO: 6051 - protein, 496 aa, Unknown
  Description of Unknown: Integrase B6052 sequence
  PTHR30461:SF3,SM00857,G3DSA:1.10.10.2600,IPR036162,PF13408, IPR025827,G3DSA:3.40.50.1390,PS51737,IPR006119,IPR038109, PF07508,SSF53041,IPR011109,PF00239,PTHR30461, PS51736,Coil,cd00338
MPKADKQPVKAVIYARYSSDRQREESIEGQLRVCEDYARRNNITILHTYADRAMTGRSDQRPEFQMMIRDAATMAFDIVLVYKLNRFARNRYDSARYKHKLKQYGVRVVSAMENITDDPSGILLESVIEGLSEYYSVELAENVTRGMTENALEGKWPGGIVPLGYKLDEHHHLIIDKAKAEIVRKIYHLALEGHNQKYIIDELNSHHYTNSAGGLFSYNTLRTILKNERYTGVLVWGNVRKENALPVIIDKMTFEAVQKHLQFRKKNKIRSCNEDFHLTGKLFCGQCGSKMVGISGTSKGGSIYYYYACTSHLKKKCQAKSIRRDILENLVCEVTTRILSSPEAIKAIAKQAIKMQKEKKESLEIQSFKAQIADISKKLKNCIKAVENGLVSDVMINHIKDYEKRLEGLKEEVTRLKLLEGTTELTEQHIEFFFWSISQKIKTADRYKSILLSSIVRSVVIQDGYIEIQYNYKNELPILQNPVKVESSYLNQMVTR

SEQ ID NO: 6052 - protein, 496 aa, Unknown
  Description of Unknown: Integrase B6053 sequence
  PTHR30461:SF3,SM00857,G3DSA:1.10.10.2600,IPR036162,PF13408, PS51737,IPR025827,G3DSA:3.40.50.1390,IPR006119,IPR038109, PF07508,IPR011109,SSF53041,PTHR30461,IPR011578, cd00338,G3DSA:3.40.91.30,PF00239
MNEIRAIQTEYRGYLFRSRLEVRWAVFFDACGVDWEYEPEGYDLGNGLYYLPDFLLHGVTINHGYFKKNCDIYVEVKGQMNDADAEKINRFYAAGYPEGNDWGVSHTAVLVVGNIPDGEDMCEILDNLQTEAYHDHHGWPNLYNFETVDEDYFGAYPGVDKHGKFNLFGDDSTYLWSMNSDVTERAYRLARQARFREFGFIKIDMIITKSISRFSRNTVDCLKYTRQLKELNIAVFFEKENINTLDAKGEVLMTIMAALAQQESESLSANVRLGIQFRNQQGKVQINHNWFLGYTKDEDGKLVIVPEEAAVVRRIYAEYLEGASFLQIKRSLEADGIQNGAKHDKWYESNIKQILTNEKYIGDALLQKTYTVSILDKKRATNKGNLPKYYVEGSHEAIIAKDIFLRVQAEIARRANITPDGKKRIYSSRYALSSIVFCGHCGDIYRRIKWNNRGCKSTVWRCVSRVLKKDSGIDCPARTLREEDLHAAVLTAINDA

SEQ ID NO: 6053 - protein, 496 aa, Unknown
  Description of Unknown: Integrase B6054 sequence
  PTHR30461:SF3,IPR036162,PS51737,IPR011109,PTHR30461, PS00397,PF00239,G3DSA:1.10.10.2600,IPR006119,SSF53041, cd00338,SM00857,IPR025827,IPR038109,PS51736, IPR006118,PF13408,G3DSA:3.40.50.1390,PF07508,Coil
MEKLRTGALYIRVSTDKQEELSPDAQRRLLLEYAAKNNIILSNEYIFEEDGISGRKADKRPNFQRMIGLAKSKEHPFDVILVWKFSRFARNQEESIVYKSLLRKNNVEVISVSEPLVDGPFGTLIERIIEWMDEYYSIRLSGEVTRGMTENAMRGNFQASPPLGYSITAHKATPVIVESEAEIVRLIFNLYTEQGYSIIEITRQLNALGYKTRAGKSFENRGIKYILTNEVYTGKSVWNKRDSASRPKDKAEWIIADGAHEPIISPEQFQRAKVRLESNYRPRYAKPSGVCSHWLSGIVKCSACGRSLSITLAGANKQGKRYIYLQCYGYLKGKCNVSHAISEKKIVPMVLAALKDAISSENLSFKVINTDSQSNYPAAIDIYQNQLDELAKKEKRIKMAYMDGIDTIEEYRKNKELLLEERNSIESRINALPKPAAKSDTTAALRSKIKTVYDSLLNEDLSMQTRNDLLKSVVEKIVFNKKESTIDVYFYTSNPL

SEQ ID NO: 6054 - protein, 496 aa, Unknown
  Description of Unknown: Integrase B6055 sequence
  PTHR30461:SF3,cd00338,SM00857,G3DSA:1.10.10.2600,IPR036162, PF13408,IPR025827,G3DSA:3.40.50.1390,PS51737,IPR006119, IPR038109,PF07508,SSF53041,IPR011109,PTHR30461, Coil,PF00239
MFYYIMYLRKSRADDPNESIDEVLAKHERILQNYALLNYKDKIPEENIYREVVSGETIDDRPEINHVFERMQDKECRGVLVVDPQRLSRGDLIDCGTILRLFKYTNTLIVTPRKSFDLSDKYDEKSIKNELMQGSEYLDYIKEIMARGREQSVLLENNYIWPVPPYGYKKVVEGKHQKLVVDPIEGPYVTYAFKRSAEGVGARRIGNEIEAMGARPRKAEHFLPDYINRILQNKVYLGHLCWQKTKTIKRVDGKNLVSKRICNQEYLVIEDTHEALIDEETFNLVQEKHRAPRVKSSKVLQNPLAGLLKCKKCGSSVERKTIKGKRPRYFCRRTQYCKNRSVYMDAVINAVIKGLKEKLEDFEIKVTSNDGSEMDQKVKMITSIDLKLESLEEKQNRLYDFLENGIYTKDVFMNRNELIEKEKKTLINEKKNVEQIISSFKPTKEKIASLHKAIDMLSDPSLPAENVNIFLKSFIKVMYYEKGCTSEDIQLEILLK

SEQ ID NO: 6055 - protein, 496 aa, Unknown
  Description of Unknown: Integrase B6056 sequence
  SM00857,G3DSA:1.10.10.2600,IPR036162,PF13408,PS51737, IPR025827,G3DSA:3.40.50.1390,IPR006119,IPR038109,PF07508, IPR011109,SSF53041,PF00239,PTHR30461,PS51736, Coil,cd00338
MDDRKRAVAYIRVSTKSDAQLHSFGYQESYWRDAIAASNQYDFAGIYSDFGISGRSLNRRPQLQRLIADAEQKKFDVVFTKSVARFGRNVEEIVATVRKLREYGIRIFFEKEQIDTFDPNMELYMTLAASIAENDLKIYSENMTWSIRERYKKGWISIGSQIFGYRMNKENNTLIVEPTEAETVKRIYDLYEEGLGQVAISHILEEEQRANIYGKVKWDVGAIRYILTNEKYKGCALTQKGIYVHGIKQKNDNLAPQWYMENTHEAIITPEQFERVQELIKERARKSKGAKPGDYVFARKIECGCCGGGYSHKFNNTNKPWRNEIWICSKQNTYGAGHCTNTRIKDEVLKNLFVECYNEFVRENGNTDELMELRDSQRKLLEQERELNALRVNRMIEISDYNAEIAKVREQITECNKQIALHEMRGARKEDLVEIKEFDDSKVEIFLEKAVVLNHTITFTFINGMSISREYTNGHGGNTAGWLDRRLDRLSKEGKQ

SEQ ID NO: 6056 - protein, 496 aa, Unknown
  Description of Unknown: Integrase B6057 sequence
  PTHR30461:SF3,IPR036162,PS51737,IPR011109,PTHR30461, PS00397,PF00239,G3DSA:1.10.10.2600,IPR006119,SSF53041, cd00338,SM00857,IPR025827,IPR038109,PS51736, IPR006118,PF13408,G3DSA:3.40.50.1390,PF07508,Coil
MEKLRTGALYIRVSTDKQEELSPDAQRRLLLEYAAKNNIILSNEYIFEEDGISGRKADKRPNFQRMIGLAKSKEHPFDVILVWKFSRFARNQEESIVYKSLLRKNNVEVISVSEPLVDGPFGTLIERIIEWMDEYYSIRLSGEVTRGMTENAMRGNFQASPPLGYSITAHKATPVIVESEAEIVRMIFNLYTEQGYSIIEITRQLNALGYKTRAGKSFENRGIKYILTNEVYTGKSVWNKRDSASRQKDKTEWIIADGAHEPIISPEQFQRAKVRLESNYRPRYAKPSGVCSHWLSGIVKCSACGRSLSITLAGANKQGKRYIYLQCYGYLKGKCNVSHAISEKKIVPMVLAALKDAISSENLSFKVINTDSQSNYPAAIDIYQNQLDELAKKEKRIKMAYMDGIDTIEEYRKNKELLLEERNSIENRINALPKPAAKSDTTAALRSKIKTVYDSLLNDDLSMQTRNDLLKSVVEKIVFNKKESTIDVYFYTSNPL

SEQ ID NO: 6057 - protein, 496 aa, Unknown
  Description of Unknown: Integrase B6058 sequence
  PTHR30461:SF3,SM00857,G3DSA:1.10.10.2600,IPR036162,PF13408, IPR025827,PS51737,G3DSA:3.40.50.1390,IPR006119,IPR038109, PF07508,SSF53041,IPR011109,PTHR30461,Coil, PS51736,cd00338,PF00239
MDRKLKVAAYGRVSTNSKQQSHSFDNQSDYWNKRLAEDPRYEYVGLYADKGISGKYMKYRPQMLGMLDACRCGKIDMIFTKSVQRFARNTIELLEVVRELRDMNIAVYFEKENINTLTAESELYLTIAAAVAEEDLNRYGQNVAWTIQDRFEKGDISVVGIRMLGYETRNKKLHIIPSEAAVVQQMFELYSTGNYSTRQMAELLNSRGYKTAKGNEWTSQTILGILTNEKYKGDALLYKRINVNGQQLMNHGLRDMLYVENSHDAIISKELWDKVRDVLDKKGNKKLRGKTIDNYPFTSLITCPICGKSYIHKVNNAGTKYACPIWRCKMQLTYGKSACSNTGIKDSVLKEKFIDVYNEFIESKRFGETNSEAEQQLKKFINDENELIALHVRGLINKIDLENERVELRKQRILLEQQINEYRQSHIKNLELKPITEFNEELVGRVLKQVTIQDWIITFEFYNGVKISRQYTNGPSGNQKGWKEKIKGGLRAKWKR

SEQ ID NO: 6058 - protein, 496 aa, Unknown
  Description of Unknown: Integrase B6059 sequence
  PTHR30461:SF3,SM00857,G3DSA:1.10.10.2600,IPR036162,PF13408, IPR025827,PS51737,G3DSA:3.40.50.1390,IPR006119,IPR038109, PF07508,IPR011109,SSF53041,PTHR30461,PS51736, cd00338,PF00239
MLGTLPGRAKICHTRYNNTVCNFDYITSRRETKGNAGDTIVKKIDLSPELVRVALYIRVSGEEQKIKGLSLEAQQERLEAYARERGWVIVGIYIDAAKTARKNIHKRTDFQRMMDSVKRDEVNILLFCRLDRWFRSVADYYKIMEVLEAHNCDWKTTDEEYDTTTANGRLYINVKLSIAQNEADIDGERIDVVFDSKIAHGTVVSGSAPFGFRVNEEKRLEVVPEDAAIVQDAFNYFETSISQRATVRYIRETYGVNWCDATFRRMLKEKLYTGVYDRGGRFNDHFCPAIISKQQFDRVQALLERNARSVPSGKVYIFTSILTCAECGHKLVGYKSSDYYYYRCNQHFQRGRCSHNHSAREDVVEKWLFEHLTEELERCQLEWEVAAAKKKASVARTDKAALKRKLTKLKELYVNDLIDIEDYKRDYQIYTAALKQIPEPSIEPPPDFAAVRRLLDNDFKTIYENLTREEKRTLWRSAIKEIRIDNDQNITGVVFG

SEQ ID NO: 6059 - protein, 496 aa, Unknown
  Description of Unknown: Integrase B6060 sequence
  PTHR30461:SF3,IPR036162,PS51737,IPR011109,PTHR30461, PS00397,PF00239,G3DSA:1.10.10.2600,IPR006119,SSF53041, cd00338,SM00857,IPR025827,IPR038109,PS51736, IPR006118,PF13408,G3DSA:3.40.50.1390,PF07508,Coil
MEKLRTGALYIRVSTDKQEELSPDAQRRLLLEYAAKNNIILSNEYIFEEDGISGRKADKRPNFQRMIGLAKSKEHPFDVILVWKFSRFARNQEESIVYKSLLRKNNVEVISVSEPLVDGPFGTLIERIIEWMDEYYSIRLSGEVTRGMTENAMRGNFQASPPLGYSITAHKATPVIVESEAEIVRMIFNLYTEQGYSIIEITRQLNALGYKTRAGKSFENRGIKYILTNEVYTGKSVWNKRDSASRPKDKTEWIIADGAHEPIISPEQFQRAKVRLESNYRPRYAKPSGVCSHWLSGIVKCSACGRSLSISLAGANKQGKRYIYLQCYGYLKGKCNVSHAISEKKIVPMVLAALKDAISSENLSFKVINTDSQSNYPAAIDIYQNQLDELAKKEKRIKMAYMDGIDTIEEYRKNKELLLEERNSIESRINALPKPAAKSDTTAALRSKIKTVYDSLLNEELSMQTRNDLLKSVVEKIVFNKKESTIDVYFYTSNPL

SEQ ID NO: 6060 - protein, 496 aa, Unknown
  Description of Unknown: Integrase B6061 sequence
  PTHR30461:SF3,cd00338,SM00857,G3DSA:1.10.10.2600,IPR036162, PF13408,PS51737,G3DSA:3.40.50.1390,IPR025827,IPR006119, IPR038109,PF07508,IPR011109,SSF53041,PTHR30461, PS51736,Coil,PF00239
MKTAVIYARYSSDKQTEQSIEGQLYDCYNYAKANNITVIGEYIDRAMTGRNDDRPDFQRMIADSAKHTFELVLVWKLDRFARSTEDAAYNRGKLKRNGVRLLSIKEDFGDSSAGDLMMHVMESFNEFYSADLREKTVRGMHQSALKCQSTGGQIPIGYKIEGKKYVIDEATRFIPETVFRMYAEGKRLAEIARYLNEKGYRTRMGRKFTTGSFYTMLSNEKYIGVYKYGDVRIEGGYEAMIDPVLFDAVQKKLVENKKRAPKISERENFYLTGKLFCGHCGEPMNGMSGNSTKGKHLYYRCNGVRKHTGCDKRTERKEELENEIIGAIQRAFANADPEELTRKVIENYEKNSRPADQVKVMKAELQKITNKVDNVVNAIAEMGGNETLYTQLRQLTEQKEQKETEIRIAEHKADDMPTVELVKKILDLIQNADTMTDEGRQLLIDGAVSRIYVYDDSLDIYFKGGKNTEIPLNPANKDDVSDNSFACCKEWGANHA

SEQ ID NO: 6061 - protein, 496 aa, Unknown
  Description of Unknown: Integrase B6062 sequence
  PTHR30461:SF3,IPR036162,PS51737,IPR011109,PTHR30461, PS00397,PF00239,G3DSA:1.10.10.2600,IPR006119,SSF53041, cd00338,SM00857,IPR025827,IPR038109,PS51736, IPR006118,PF13408,G3DSA:3.40.50.1390,PF07508,Coil
MNAAIYARVSTDWQAEHGYSIETQLESCRAKAKEIGATVIKEYIDDGYSGGFLERPGLDALRDAVSDGLYDVVIFHDPDRMARKLIHQLIITEELEKAGASPVFVLERFDSSPEGQMNYQMKGVFAEYERAKIRERTMRGKRAKLRAGKAICDSHIYGYDFDRASSSYVVNPAEAAVVRRVYQLYVVERVGGCETIADILNADNIPSPTGRKWSPSSVRNMLSRPHYTGHYYANTTYHKKTGPRSEKRLPRPREEWIEMSCPQIIPAEMHEKALAIKAGQRTYKVWKRNAKVALLQGIAYCGSCGSRIYVSGGGKRGRRFYECGAARAPSYCPARLMEVPVADDLFWSVLEKICKSPAALEKYIGENVAEKGSRPAAAEKPVKIARRLERIAGEKKAVMAWFSQSLLTQSEATERLSALKSEELRLQSELADLRAKSSREPEKIDPSDICAAVATCSVDLAARRRVVLAVVERVDVLRRDFNYGHKYIVDFKIKFK

SEQ ID NO: 6062 - protein, 496 aa, Unknown
  Description of Unknown: Integrase B6063 sequence
  PTHR30461:SF3,IPR036162,PS51737,IPR011109,PTHR30461, PS00397,PF00239,G3DSA:1.10.10.2600,IPR006119,SSF53041, cd00338,SM00857,IPR025827,IPR038109,PS51736, IPR006118,PF13408,G3DSA:3.40.50.1390,PF07508,Coil
MEKLRNGALYIRVSTDKQEELSPDAQRRLLLDYAAKNNIILSNEYIFEEDGISGRKADKRPNFQRMIGLAKSKEHPFDVILVWKFSRFARNQEESIVYKSLLRKNNVEVISVSEPLVDGPFGTLIERIIEWMDEYYSIRLSGEVTRGMTENAMRGNFQASPPLGYSITAHKATPVIVESEAEIVRMIFNLYTEQGYSIIEITRQLNALGYKTRAGKSFENRGIKYILTNEVYTGKSVWNKRDSASRPKDKTEWIIADGAHEPIISPEQFQRAKVRLESNYRPRYAKPSGVCSHWLSGIVKCSACGRSLSISLAGANKQGKRYIYLQCYGYLKGKCNVSHAISEKKIVPMVLAALKDAISSENLSFKVINTDSQSNYPAAIDIYQNQLDELAKKEKRIKMAYMDGIDTIEEYRKNKELLLEERNSIENRINALPKPAAKSDTTAALRSKIKTVYDSLLNEDLSMQTRNDLLKSVVEKIVFNKKEATIDVYFYTSNPL

SEQ ID NO: 6063 - protein, 496 aa, Unknown
  Description of Unknown: Integrase B6064 sequence
  PTHR30461:SF3,IPR036162,PS51737,IPR011109,PTHR30461, PS00397,PF00239,G3DSA:1.10.10.2600,IPR006119,SSF53041, cd00338,SM00857,IPR025827,IPR038109,PS51736, IPR006118,PF13408,G3DSA:3.40.50.1390,PF07508,Coil
MEKLRTGALYIRVSTDKQEELSPDAQRRLLLEYAAKNNIILSNEYIFEEDGISGRKADKRPNFQRMIGLAKSKEHPFDVILVWKFSRFARNQEESIVYKSLLRKNNVEVISVSEPLVDGPFGTLIERIIEWMDEYYSIRLSGEVTRGMTENAMRGNFQASPPLGYSITARKSTPVIVESEAEIVRMIFNLYTEQGYSIIEITRQLNALGYKTRAGKSFENRGIKYILTNEVYTGKSVWNKRDSASRPKDKTEWIIADGAHEPIISPEQFQRAKVRLESNYRPRYAKPSGVCSHWLSGIVKCSACGRSLSISLAGANKQGKRYIYLQCYGYLKGKCNVSHAISEKKIVPMVLAALKDAISSENLSFKVINTDSQSNYPAAIDIYQNQLDELAKKEKRIKMAYMDGIDTIEEYRKNKELLLEERNSIENRINALPKPAAKSDTTAALRSKIKTVYDSLLNEDLSMQTRNDLLKSVVEKIVFNKKEATIDVYFYTSNPL

SEQ ID NO: 6064 - protein, 496 aa, Unknown
  Description of Unknown: Integrase B6065 sequence
  PTHR30461:SF3,cd00338,SM00857,G3DSA:1.10.10.2600,IPR036162, PS51737,G3DSA:3.40.50.1390,IPR006119,IPR038109,PF07508, IPR011109,SSF53041,PTHR30461,PS51736,Coil, PF00239
MAEKAVIYARFSSDKQREESIEDQVRVCSQFAASKGFEIIKTYTDEARSGTNAAGRPGFQKMILDAQAQRWTKVIVYKTDRFARSRYDSAVYKAKLRKCGVEIVTAAESVPDGPDGIILESVLEGMAEYYSANLAQNVKRGMEGNALKCKHNGVSIFGYDRGADGYYAVNEHEAAGVRMAFDMCAAGETKAEIMRRLNGLGYKTVTGRSFSNEAVSRLLNCERYIGTYTWGDFKKENGMPSIINRDLWDSAHAHMASRGRKRRGKMNAEYLLSGKIYDADGNQFESDCGYGENGKRYHYYRCRKTKVSMRRDEVEDKVIGACARLLNENPDLDERIVDMVLARQDKDAEQEISAREALRRRITDVEREIDNAIDLACKLGSTDRMAVKINGLQDELTALKAELDEIKRGAPLIDRDMILFALYKMRQSDGPRGMVAAFVDRVTVNEDGSLLVQFILCRPTCENKKPEPSNGEFGKLSCGSPYQIRTGDLRLERAAS

SEQ ID NO: 6065 - protein, 496 aa, Unknown
  Description of Unknown: Integrase B6066 sequence
  PTHR30461:SF3,SM00857,G3DSA:1.10.10.2600,IPR036162,PF13408, IPR025827,G3DSA:3.40.50.1390,PS51737,IPR006119,IPR038109, PF07508,SSF53041,IPR011109,PTHR30461,PS51736, cd00338,PF00239
MLGTLPRHAKICHTRYNNTVCNFDYITSRRETKGNAGDTIVKKIDLSPELVRVALYIRVSGEEQKIKGLSLEAQQERLEAYARERGWVIVGIYIDAAKTARKNIHKRTDFQRMMDSVKRDEVDILLFCRLDRWFRSVADYYKIMEVLEAHNCDWKTTDEEYDTTTANGRLYINVKLSIAQNEADIDGERIDVVFDSKIAHGTVVSGSAPFGFRVNEEKRLEVVPEDAAIVQDAFNYFETSISQRATVRYIRETYGVNWCDATFRRMLKEKLYTGVYDRGGRFNDHFCPAIISKQQFDRVQALLERNARSVPSGKVYIFTSILTCAECGHKLVGYKSSDYYYYRCNQHFQRGRCSHNHSAREDVVEKWLFEHLAEELERCQLEWEVAAAKKKASVARTDKAALKRKLTKLKELYVNDLIDIEDYKRDYQIYTAALKQIPEPSIEPPPDFAAVRRLLDNDFKTIYENLTREEKRTLWRSVIKEIRIDNDQNITGVVFG

SEQ ID NO: 6066 - protein, 495 aa, Unknown
  Description of Unknown: Integrase B6067 sequence
  PTHR30461:SF3,IPR036162,PS51737,IPR011109,PTHR30461, PS00397,PF00239,G3DSA:1.10.10.2600,IPR006119,SSF53041, cd00338,SM00857,IPR025827,IPR038109,PS51736, IPR006118,PF13408,G3DSA:3.40.50.1390,PF07508,Coil
MSLKYAYGYIRVSTHDQEEISPDSQEHLLRDYAAKNNIVILKIFTDLGISGRKADKRPGFQEMIGLAKGSDHPVDCILVWKFSRFARNQEESIVYKSLLKKQHNVDVISISEPLADGPFGSLIERIIEWMDEYYSIRLSGEVFRGMKENATRGAYQARPPLGYKVIERGKPPVIVPEEAAIVRMIFDKYVNGKMSFFDIARHLNSLGLKTSHGKAFERRSIEYIIQNPSYCGMIRWNRMENATNRIKDQDEWIIADGMQEAIISKELFDASQERLKKIYKPVGKRPSSTYKHWLSGLLKCPVCGRTLTATTMKRANGEKYAYFSCYGYSKGKCDKPHGVSSLVIEKEVLKALEEALGSNSIVYEMREIRPQELSNERTLISERLASLKSKEDRIRASYREGIDTLEEYKENKALIAKERDSLERQLAELEENTPDKIPDDPTPKMLDRVSSVHDILVSDSYSLVQKNEALKQIIDKIVYDRESDTLKIHFFLYHS

SEQ ID NO: 6067 - protein, 495 aa, Unknown
  Description of Unknown: Integrase B6068 sequence
  PTHR30461:SF3,IPR036162,PS51737,IPR011109,PTHR30461, PS00397,PF00239,G3DSA:1.10.10.2600,IPR006119,SSF53041, cd00338,SM00857,IPR025827,IPR038109,PS51736, IPR006118,PF13408,G3DSA:3.40.50.1390,PF07508,Coil
MMSELRYAYGYIRVSTHDQEEISPDSQENLLREYAARNNIVILKIFSDLGISGRKAEKRPGFQEMVGLAKGSDHPVDLILVWKFSRFARNQEESIVYKSLLKKQHNVEVVSISEPLSDNPFGSLIERIIEWMDEYYSIRLSGEVFRGMKENATRGAYQARPPLGYKVVEHGKPPVIIPEEAEIVRMIFNWYVNEGIGFFDIARRLNNLGLKTSQGKPFERRSIEYIIQNPSYCGMIRWNRTENSTNRIKDKDEWIVTEGQQPAIITKELFDAAQKRFETTYSPSGKRPSSTYKHWLSGLLKCPACGRTLTAATMKRANGEKYSYFSCYGYHKGKCEKPHGISSLILEKEVLACVKESLSSGNISYTLKERQPIEVSNEKNILTSRLESLSGKEERIKASYREGIDTLEEYKANKTLLQKERIHLEEQLKELEDNTPKDAPDPAANMMLRVQGVYDILVSDSFTAAQKNEALKQIVDKIIYNREQDSLKIYYFLYQ

SEQ ID NO: 6068 - protein, 495 aa, Unknown
  Description of Unknown: Integrase B6069 sequence
  PTHR30461:SF3,IPR036162,PS51737,IPR011109,PTHR30461, PS00397,PF00239,G3DSA:1.10.10.2600,IPR006119,SSF53041, cd00338,SM00857,IPR025827,IPR038109,PS51736, IPR006118,PF13408,G3DSA:3.40.50.1390,PF07508,Coil
MSLKYAYGYIRVSTHDQEEISPDSQEHLLRDYAAKNNIVILKIFTDLGISGRKADKRPGFQEMIGLAKGPDHPVDCILVWKFSRFARNQEESIVYKSLLKKQHNVDVISISEPLADGPFGSLIERIIEWMDEYYSIRLSGEVFRGMKENATRGAYQARPPLGYKVIERGKPPVIVPEEAAIVRMIFDKYVNGKMSFFDIARYLNSLGLKTSHGKAFERRSIEYIIQNPSYCGMIRWNRMENATNRIKDQDEWIIADGMQEAIISKELFDAAQERLKKIYKPVGKRPSSTYKHWLSGLLKCPVCGRTLTATTMERANGEKYAYFSCYGYSKGKCDKPHGVSSLVIEKEVLKALEEALGSNSIVYEMREIRPQELSNERTLISERLASLKGKEDRIRASYREGIDTLEEYKENKALIAKERDSLERQLAELEENTPDKIPDDPTPKMLDRVSSVHDILVSDSYSLVQKNEALKQIIDKIVYDRESDTLKIHFFLYHS

SEQ ID NO: 6069 - protein, 495 aa, Unknown
  Description of Unknown: Integrase B6070 sequence
  PTHR30461:SF3,IPR036162,PS51737,IPR011109,PTHR30461, PS00397,PF00239,G3DSA:1.10.10.2600,IPR006119,SSF53041, cd00338,SM00857,IPR025827,IPR038109,PS51736, IPR006118,PF13408,G3DSA:3.40.50.1390,PF07508,Coil
MSLKYAYGYIRVSTHDQEEISPDSQEHLLRDYAAKNNIVILKIFTDLGISGRKADKRPGFQEMIGLAKGPDHPVDCILVWKFSRFARNQEESIVYKSLLKKQHNVDVISISEPLADGPFGSLIERIIEWMDEYYSIRLSGEVFRGMKENATRGAYQARPPLGYKVVERGKPPVIVPEEAAIVRMIFDKYVNGKMSFFDIARHLNSLGLKTSHGKAFERRSIEYIIQNPSYCGMIRWNRMENATNRIKDQDEWIIADGMQEAIISKELFDAAQERLKKIYKPVGKRPSSTYKHWLSGLLKCPVCGRTLTATTMKRANGEKYAYFSCYGYSKGKCDKPHGVSSLVIEKEVLKALEEALGSNSIVYEMREIRPQELSNERTLISERLASLKGKEDRIRASYREGIDTLEEYKENKALIAKERDSLERQLAELEENTPDKIPDDPTPKMLDRVSSVHDILVSDSYSLVQKNEALKQIIDKIVYDRESDTLKIHFFLYHS

SEQ ID NO: 6070 - protein, 495 aa, Unknown
  Description of Unknown: Integrase B6071 sequence
  PTHR30461:SF3,IPR036162,PS51737,IPR011109,PTHR30461, PS00397,PF00239,G3DSA:1.10.10.2600,IPR006119,SSF53041, cd00338,SM00857,IPR025827,IPR038109,PS51736, IPR006118,PF13408,G3DSA:3.40.50.1390,PF07508,Coil
MMSELRYAYGYIRVSTHDQEEISPDSQENLLREYATRNNIVILKIFSDLGISGRKAEKRPGFQEMVGLAKGSDHPVDLILVWKFSRFARNQEESIVYKSLLKKQHNVEVVSISEPLSDNPFGSLIERIIEWMDEYYSIRLSGEVFRGMKENATRGAYQARPPLGYKVVEHGKPPMIVPEEAEIIRMIFNWYANEGIGFFDIARRLNNLGLKTSQGKPFERRSIEYIIQNPSYCGMIRWNRTENSTNRIKDKDEWIVTEGQQPAIITKELFDAAQKRFETTYRPSGKRPSSTYKHWLSGLLKCPACGRTLTAATMKRANGEKYSYFSCYGYHKGKCEKPHGISSLVLEKEVLACVKESLSSGNISYTLKERQPIEVSNEKNILTSRLESLSGKEERIKASYREGIDTLEEYKANKALLQKERIHLEEQLKELEDNAPKDTPDPAANMLLRVQGVYDILVSDSFTAAQKNEALKQIVDKIVYDREQDSLKIYYFLYQ

SEQ ID NO: 6071 - protein, 495 aa, Unknown
  Description of Unknown: Integrase B6072 sequence
  PTHR30461:SF3,IPR036162,PS51737,IPR011109,PTHR30461, PS00397,PF00239,G3DSA:1.10.10.2600,IPR006119,SSF53041, cd00338,SM00857,IPR025827,IPR038109,PS51736, IPR006118,PF13408,G3DSA:3.40.50.1390,PF07508,Coil
MSLKYAYGYIRVSTHDQEEISPDSQEHLLRDYAAKNNIVILKIFTDLGISGRKADKRPGFQEMIGLAKGPDHPVDCILVWKFSRFARNQEESIVYKSLLKKQHNVDVISISEPLADGPFGSLIERIIEWMDEYYSIRLSGEVFRGMKENATRGAYQARPPLGYKVVERGKPPVIVPEEAAIVRMIFDKYVNGKMSFFDIARHLNSLGLKTSHGKAFERRSIEYIIQNPSYCGMIRWNRMENATNRIKNQDEWIIADGMQEAIISKELFDAAQERLKKIYKPVGKRPSSTYKHWLSGLLKCPVCGRTLTATTMERANGEKYAYFSCYGYSKGKCDKPHGVSSLVIEKEVLKALEEALGSNSIVYEMREIRPQELSNERTLISERLASLKGKEDRIRASYREGIDTLEEYKENKALIAKERDALEQQLAELEENAPDKTPEDSTPKMLDRVSSVHDILVSDSYSLVQKNEALKQIIDKIVYDRESDTLKIHFFLYHS

SEQ ID NO: 6072 - protein, 495 aa, Unknown
  Description of Unknown: Integrase B6073 sequence
  PTHR30461:SF3,IPR036162,PS51737,IPR011109,PTHR30461, PS00397,PF00239,G3DSA:1.10.10.2600,IPR006119,SSF53041, cd00338,SM00857,IPR025827,IPR038109,PS51736, IPR006118,PF13408,G3DSA:3.40.50.1390,PF07508,Coil
MSLKYAYGYIRVSTHDQEEISPDSQEHLLRDYAAKNNIVILKIFTDLGISGRKADKRPGFQEMIGLAKGSDHPVDCILVWKFSRFARNQEESIVYKSLLKKQHNVDVISISEPLADGPFGSLIERIIEWMDEYYSIRLSGEVFRGMKENATRGAYQARPPLGYKVVERGKPPVIVPEEAAIVRMIFDKYVNGKMSFFDIARHLNSLGLKTSHGKAFERRSIEYIIQNPSYCGMIRWNRMENATNRIKDQDEWIIADGMQKAIISKELFDAAQERLKKIYKPVGKRPSSTYKHWLSGLLKCPVCGRTLTATTMKRANGEKYAYFSCYGYSKGKCDKPHGVSSLVIEKEVLKALEEALGSNSIVYEMREIRPQELSNERTLISERLASLKGKEDRIRASYREGIDTLEEYKENKALIAKERDSLERQLAELEENAPDKTPEDPTPKMLDRVSSVHDILVSDSYSLVQKNEALKQIIDKIVYDRESDTLKIHFFLYHS

SEQ ID NO: 6073 - protein, 495 aa, Unknown
  Description of Unknown: Integrase B6074 sequence
  PTHR30461:SF3,IPR036162,PS51737,IPR011109,PTHR30461, PS00397,PF00239,G3DSA:1.10.10.2600,IPR006119,SSF53041, cd00338,SM00857,IPR025827,IPR038109,PS51736, IPR006118,PF13408,G3DSA:3.40.50.1390,PF07508,Coil
MSVKYAYGYIRVSTHDQEEISPDSQEHLLRDYAAKNNIVILKIFTDLGISGRKADKRPGFQEMIGLAKGPDHPVDCILVWKFSRFARNQEESIVYKSLLKKQHNVDVISISEPLADGPFGSLIERIIEWMDEYYSIRLSGEVFRGMKENATRGAYQARPPLGYQVIERGKPPVIVPEEAAIVRMIFDKYVNGKMSFFDIARHLNSLGLKTSHGKAFERRSIEYIIQNPSYCGMIRWNRMENATNRIKDQDEWIIADGMQEAIISKELFDAAQERLKKIYKPVGKRPSSTYKHWLSGLLKCPVCGRTLTATTMKRANGEKYAYFSCYGYSKGKCDKPHGVSSLVIEKEVLKALEEALGSNSIVYEMREIRPQELSNERTLISERLASLKGKEDRIRASYREGIDTLEEYKENKALIAKERDSLERQLAELEENAPDKTPEDPTPKMLDRVSSVHDILVSDSYSLVQKNEALKQIIDKIVYDRESDTLKIHFFLYHS

SEQ ID NO: 6074 - protein, 495 aa, Unknown
  Description of Unknown: Integrase B6075 sequence
  PTHR30461:SF3,IPR036162,PS51737,IPR011109,PTHR30461, PS00397,PF00239,G3DSA:1.10.10.2600,IPR006119,SSF53041, cd00338,SM00857,IPR025827,IPR038109,PS51736, IPR006118,PF13408,G3DSA:3.40.50.1390,PF07508,Coil
MMSELRYAYGYIRVSTHDQEEISPDSQENLLREYATRNNIVILKIFSDLGISGRKAEKRPGFQEMVGLAKGSDHPVDLILVWKFSRFARNQEESIVYKSLLKKQHNVEVVSISEPLSDNPFGSLIERIIEWMDEYYSIRLSGEVFRGMKENATRGAYQARPPLGYKVVEHGKPPVIIPEEAEIVRMIFNWYANEGIGFFDIARRLNNLGLKTSQGKPFERRSIEYIIQNPSYCGMIRWNRTENSTNRIKDKDEWIVTEGQQPAIITKELFDAAQKRFETTYRPSGKRPSSTYKHWLSGLLKCPACGRTLTAATMKRANGEKYSYFSCYGYHKGKCEKPHGISSLVLEKEVLACVKESLSSGNISYTLKERQPIEISNEKNILTSRLESLSGKEERIKASYREGIDTLEEYKANKALLQKERIHLEEQLKELEDNAPKDTPDPAANMLLRVQGVYDILVSDSFTVAQKNEALKQIVDKIVYDREQDSLKIYYFLYQ

SEQ ID NO: 6075 - protein, 495 aa, Unknown
  Description of Unknown: Integrase B6076 sequence
  PTHR30461:SF3,IPR036162,PS51737,IPR011109,PTHR30461, PS00397,PF00239,G3DSA:1.10.10.2600,IPR006119,SSF53041, cd00338,SM00857,IPR025827,IPR038109,PS51736, IPR006118,PF13408,G3DSA:3.40.50.1390,PF07508,Coil
MSLKYAYGYIRVSTHDQEEISPDSQEHLLRDYAAKNNIVILKIFTDLGISGRKADKRPSFQEMIGLAKGPDHPVDCILVWKFSRFARNQEESIVYKSLLKKQHNVDVISISEPLADGPFGSLIERIIEWMDEYYSIRLSGEVFRGMKENATRGAYQARPPLGYKVVERGKPPVIVPEEAAIVRMIFDKYVNGKMSFFDIARHLNSLGLKTSHGKAFERRSIEYIIQNPSYCGMIRWNRTENATNRIKDQDEWIITDGMQEAIISKELFDAAQERLKKIYKPVGKRPSSTYKHWLSGLLKCPVCGRTLTATTMKRANGEKYAYFSCYGYSKGKCDKPHGVSSLLIEKEVLKALEEALGSNSIVYEMREIRPQELSNERTLISERLVSLKGKEDRIRASYREGIDTLEEYKENKALIAKERDSLERQLAELEENTSDKIPDDPTPKMLDRVSSVHDILVSDSYSLVQKNEALKQIIDKIVYDRESDTLKIHFFLYHS

SEQ ID NO: 6076 - protein, 495 aa, Unknown
  Description of Unknown: Integrase B6077 sequence
  PTHR30461:SF3,IPR036162,PS51737,IPR011109,PTHR30461, PS00397,PF00239,G3DSA:1.10.10.2600,IPR006119,SSF53041, cd00338,SM00857,IPR025827,IPR038109,PS51736, IPR006118,PF13408,G3DSA:3.40.50.1390,PF07508,Coil
MSLKYAYGYIRVSTHDQEEISPDSQEHLLRDYAAKNNIVILKIFTDLGISGRKADKRPGFQEMIGLAKGPDHPVDCILVWKFSRFARNQEESIVYKSLLKKQHNVDVISISEPLADGPFGSLIERIIEWMDEYYSIRLSGEVFRGMKENATRGAYQARPPLGYKVIERGKPPVIVPEEAAIVRMIFDKYVNGKMSFFDIARHLNSLGLKTSHGKTFERRSIEYIIQNPSYCGMIRWNRMENATNRIKDQDEWIIADGMQEAIISKELFDAAQERLKKIYKPVGKRPSSTYKHWLSGLLKCPVCGRTLTATTMKRANGEKYAYFSCYGYSKGKCDKPHGVSSLVIEKEVLKALEEALGSNSIVYEMREIRPQELSNERTLISERLASLKGKEDRIRASYREGIDTLEEYKENKTLIAKERNSLEQQLAELEENTPDKIPDDPTPKMLDRVSSVHDILVSDSYSLVQKNEALKQIIDKIVYDRESDTLKIHFFLYHS

SEQ ID NO: 6077 - protein, 495 aa, Unknown
  Description of Unknown: Integrase B6078 sequence
  PTHR30461:SF3,IPR036162,PS51737,IPR011109,PTHR30461, PS00397,PF00239,G3DSA:1.10.10.2600,IPR006119,SSF53041, cd00338,SM00857,IPR025827,IPR038109,PS51736, IPR006118,PF13408,G3DSA:3.40.50.1390,PF07508,Coil
MSLKYAYGYIRVSTHDQEEISPDSQEHLLRDYAAKNNIVILKIFTDLGISGRKADKRPGFQEMIGLAKGPDHPVDCILVWKFSRFARNQEESIVYKSLLKKQHNVDVISISEPLADGPFGSLIERIIEWMDEYYSIRLSGEVFRGMKENATRGAYQARPPLGYKVIERGKPPVIVPEEAAIVRMIFDKYVNGKMSFFDIARHLNSLGLKTSHGKAFERRSIEYIIQNPSYCGMIRWNRMENATNRIKDQDEWIIADGMQEAIISKELFDAAQERLKKIYKPVGKRPSSTYKHWLSGLLKCPVCGRTLTATTMKRANGEKYAYFSCYGYSKGKCDKPHGVSSLVIEKEVLKALEEALGSNSIVYEMREIRPQELSNERTLISERLASLKGKEDRIRASYREGIDTLEEYKENKALIAKERDSLERQLAELEENTPDKIPDDPTPKMLDRVSSVHDILVSDSYSLVQKNEALKQIIDKIVYDRESDTLKIHFFLYHS

SEQ ID NO: 6078 - protein, 495 aa, Unknown
  Description of Unknown: Integrase B6079 sequence
  PTHR30461:SF3,cd00338,SM00857,G3DSA:1.10.10.2600,IPR036162, PF13408,PS51737,G3DSA:3.40.50.1390,IPR025827,IPR006119, IPR038109,PF07508,SSF53041,IPR011109,PTHR30461, PS51736,Coil,PF00239
MSNAVIYARYSSDKQSEDSIEAQLRACRQYAATKGYNIVAVYADEAISGKGSMTASRAQYQKMLRDCNKGTFDTILIHKYDRVARSLGEHVNLDTRLQKMGITLIAVGQDFGFGPESKIMRALMWSMSEYYIDNLASETKKGEREIALKGLHNGGYPPFGYDIVNQKYVINPYEAEYVRKIFAAVKNHEGTKDIIAEMAAVGIVGKRGKPLKYSAVYEILRNEKYTGTYIYCVDEEKDRSKRRSKPNAIRIENALPIIIDKATFDEVQKIMDSRKQSGPKTSYLCSGLVYCSCGAKMHAHISTKKGHIYHYYRCSKKCGAPMISMDIVDDAAKTYLRTLLSEENQKAIAKAMRKYKCGEPERAADFKKIVASKISEKQKQYDTLMTNMSSGVLPADVIKDIGAKMNQLRSEIEALKKTEMPKDYTSDQISIWLKALHDSPDDKAIRLLISRIDIKNTTEINIQSTLTSVVGTIGCGRPQHIFPTILFKFLYFFQR

SEQ ID NO: 6079 - protein, 495 aa, Unknown
  Description of Unknown: Integrase B6080 sequence
  PTHR30461:SF3,SM00857,G3DSA:1.10.10.2600,IPR036162,PF13408, IPR025827,G3DSA:3.40.50.1390,PS51737,IPR006119,IPR038109, PF07508,IPR011109,SSF53041,PF00239,PTHR30461, PS51736,Coil,cd00338
MSQKTAVLYARFSCSKQREASIEDQLRVCRAWCAQNGYAIVAEYCDYAISGRTDDRPQFQRMIANAGESDIVLVYMMDRFSRDPFDAPIYKRELQRKGVKLVSALEAIPDSPEGIIYEKLLEGLAACESRKTSIRSRRGMEGNALKCKTNGVRCFGYRTGDDGRYEIDPEEAEIVREVFCRRILGESVNSIATDLRQRGVVSRACNPIKDTFVNNMLHNDKYRGIYSWGGITKKDGMPRIISEEVFMKAQKVKGKKQRRNEEWGEFALSGRVICSACGRNMRGVSGRGSSKRKYEYYSCGSCKEVKPARRDWLEEQIVEALRELLSKPEEARRIAEMCVEAGEPKEIAEGRKRAADSHRAAQTGLSNILKAVEQGIVVPGTKERAEELEDQKERAERELAMYNRKRIDPENFARFLQFGATLTDELLLDAFVYQVMVSNEAVVVTMNFDAENNEPARLEVSRVRTSCKWCPVCKNTRTMMTVVNGAVYLMLQRAA

SEQ ID NO: 6080 - protein, 495 aa, Unknown
  Description of Unknown: Integrase B6081 sequence
  PTHR30461:SF3,IPR036162,PS51737,IPR011109,PTHR30461, PS00397,PF00239,G3DSA:1.10.10.2600,IPR006119,SSF53041, cd00338,SM00857,IPR025827,IPR038109,PS51736, IPR006118,PF13408,G3DSA:3.40.50.1390,PF07508,Coil
MSLKYAYGYIRVSTHDQEEISPDSQEHLLRDYAAKNNIVILKIFTDLGISGRKADKRPGFQEMIGLAKGPDHPVDCILVWKFSRFARNQEESIVYKSLLKKQHNVDVISISEPLADGPFGSLIERIIEWMDEYYSIRLSGEVFRGMKENATRGAYQARPPLGYKVIERGKPPVIVPEEAAIVRMIFDKYVNGKMNFFDIARYLNSLGLKTSHGKAFERRSIEYIIQNPSYCGMIRWNRMENATNRIKDQDEWIIADGMQEAIISKELFDAAQERLKKIYKPVGKRPSSTYKHWLSGLLKCPVCGRTLTATTMERANGEKYAYFSCYGYSKGKCDKPHGVSSLVIEKEVLKALEEALGSNSIVYEMREIRPQELSNERTLISERLASLKGKEDRIRASYREGIDTLEEYKENKALIAKERDSLERQLAELEENTPDKIPDDPTPKMLDRVSSVHDILVSDSYSLVQKNEALKQIIDKIVYDRESDTLKIHFFLYHS

SEQ ID NO: 6081 - protein, 495 aa, Unknown
  Description of Unknown: Integrase B6082 sequence
  PTHR30461:SF3,IPR036162,PS51737,IPR011109,PTHR30461, PS00397,PF00239,G3DSA:1.10.10.2600,IPR006119,SSF53041, cd00338,SM00857,IPR025827,IPR038109,PS51736, IPR006118,PF13408,G3DSA:3.40.50.1390,PF07508,Coil
MSLKYAYGYIRVSTHDQEEISPDSQEHLLRDYAAKNNIVILKIFTDLGISGRKADKRPGFQEMIGLAKGPDHPVDCILVWKFSRFARNQEESIVYKSLLKKQHNVDVISISEPLADGPFGSLIERIIEWMDEYYSIRLSGEVFRGMKENATRGAYQARPPLGYKVIERGKPPVIIPEEAAIVRMIFDKYVNGKMSFFDIARHLNSLGLKTSHGKAFERRSIEYIIQNPSYCGMIRWNRMENATNRIKDQDEWIIADGMQEAIISKELFDAAQERLKKIYKPVGKRPSSTYKHWLSGLLKCPVCGRTLTATTMKRANGEKYAYFSCYGYSKGKCDKPHGVSSLVIEKEVLKALEEALGSNSIVYEMREIRPQELSNERTLISERLASLKGKEDRIRASYREGIDTLEEYKENKTLIAKERDSLEQQLAELEENTPDKIPDDPTPKMLDRVSSVHDILVSDSYSLVQKNEALKQIIDKIIYDRESDTLKIHFFLYHS

SEQ ID NO: 6082 - protein, 495 aa, Unknown
  Description of Unknown: Integrase B6083 sequence
  PTHR30461:SF3,IPR036162,PS51737,IPR011109,PTHR30461, PS00397,PF00239,G3DSA:1.10.10.2600,IPR006119,SSF53041, cd00338,SM00857,IPR025827,IPR038109,PS51736, IPR006118,PF13408,G3DSA:3.40.50.1390,PF07508,Coil
MSLKYAYGYIRVSTHDQEEISPDSQEHLLRDYAAKNNIVILKIFTDLGISGRKADKRPGFQEMIGLAKAPDHPVDCILVWKFSRFARNQEESIVYKSLLKKQHNVDVISISEPLADGPFGSLIERIIEWMDEYYSIRLSGEVFRGMKENATRGAYQARPPLGYKVIERGKPPVIVPEEAAIVRMIFDKYVNGKMSFFDIARHLNSLGLKTSHGKAFERRSIEYIIQNPSYCGMIRWNRMENATNRIKDQDEWIIADGMQEAIISKELFDAAQERLKKIYKPVGKRPSSTYKHWLSGLLKCPVCGRTLTATTMKRANGEKYAYFSCYGYSKGKCDKPHGVSSLVIEKEVLKALEEALGSNSIVYEMREIRPQELSNERILISERLASLKGKEDRIRASYREGIDTLEEYKENKALIAKERGSLERQLAELEENTPDKIPDDPTPKMLDRVSSVHDILVSDSYSLVQKNEALKQIIDKIVYDRESDTLKIHFFLYHS

SEQ ID NO: 6083 - protein, 495 aa, Unknown
  Description of Unknown: Integrase B6084 sequence
  PTHR30461:SF3,SM00857,G3DSA:1.10.10.2600,IPR036162,PF13408, IPR025827,G3DSA:3.40.50.1390,PS51737,IPR006119,IPR038109, PF07508,IPR011109,SSF53041,PF00239,PTHR30461, PS51736,Coil,cd00338
MSQKTAVLYARFSCSKQREASIEDQLRVCRDWCSREGYAIVAEYCDYAISGRTDDRPQFQKMIANAGESDIVLVYMMDRFSRDPFDAPIYKRELQAHGVRLVSALEAIPDSPEGIIYEKLLEGLAACESRKTSIRSRRGMEGNALQCKTNGVRCFGYRTGEDGRYEIVPEEAEIVREVFRRRTHGESVNSIAMDLRQRGVVSRAGNPIKDTFVNNMLHNDKYRGIYSWGGITQKDGMPRIISEEVFMKAQRVKGKKQRQNEQWGDFALSGRVICSACGRNMRGVSGRGSSKRKYEYYACGSCKEVKPVRRDWLEGQIVKALRELLSQPEEARRIAEMCVDGGEPKEIAEGRKRAAAALRAAQTGLSNILKAVEQGIVVPGTKERAEELEAQKDRAERELAMYDRKRIDPENFARFLQFGATLTDELLLDAFVYQVMVSDEAVVVTMNFDAESNEPARLEVSRVRTFFKWCPVCKNTRTMMTVVNGAVYLMMPRAA

SEQ ID NO: 6084 - protein, 495 aa, Unknown
  Description of Unknown: Integrase B6085 sequence
  PTHR30461:SF3,IPR036162,PS51737,IPR011109,PTHR30461, PS00397,PF00239,G3DSA:1.10.10.2600,IPR006119,SSF53041, cd00338,SM00857,IPR025827,IPR038109,PS51736, IPR006118,PF13408,G3DSA:3.40.50.1390,PF07508,Coil
MSLKYAYGYIRVSTHDQEEISPDSQEHLLRDYAAKNNIVILKIFTDLGISGRKADKRPGFQEMIGLSKGPDHPVDCILVWKFSRFARNQEESIVYKSLLKKQHNVDVISISEPLADGPFGSLIERIIEWMDEYYSIRLSGEVFRGMKENATRGAYQARPPLGYKVVERGKPPVIVPEEAAIVRMIFDKYVNGKMSFFDIARYLNSLGLKTSHGKAFERRSIEYIIQNPSYCGMIRWNRMENATNRIKDKDEWIIADGMQEAIISKELFDAAQERLKKIYKPVGKRPSSTYKHWLSGLLKCPVCGRTLTATTMKRANGEKYAYFSCYGYSKGKCDKPHGVSSLVIEKEVLKALEEALGSNSIVYEMREIRPQELSNERTLISERLASLKGKEDRIRASYREGIDTLEEYKENKALIAKERDSLERQLAELEENTPDKIPDDPTPKMLDRVSSVHDILVSDSYSLVQKNEALKQIIDKIVYDRESDTLKIHFFLYHS

SEQ ID NO: 6085 - protein, 495 aa, Unknown
  Description of Unknown: Integrase B6086 sequence
  SM00857,G3DSA:1.10.10.2600,IPR036162,PS51737,G3DSA:3.40.50.1390, IPR006119,IPR038109,PF07508,IPR011109,SSF53041, PTHR30461,Coil,PS51736,cd00338,PF00239
MPTARTAVIYARFSCNKQREASIDDQLRICRQWCQREKYAIVAEYCDYAISGRTDDRPEFQRMVANAGESDIVLVYMMDRFSRGEYDAPIYKRELAQHGVKLVSALEQIPDSPEGIIYEKLLEGLAACESKKTAIRTRRGMEGNALKCKTNGVRVFGYASNEADEYVINEDEAAFVREAFKRRIAKETTNSIARDFAARGVKTSQGNPCGYSMVERMVKNRKYTGRYEWGGVVKEGGMPAIIDEVTFMEAQGIRAAKERSAESWGDFALSGKAICAGCGRNLQGVSGRGRGNRKYEYYRCHDGCVKPVRREELEGEIVKALRALLQDREEALRIARMVAESSDGAEVAARRKQAAQSLSAAERGLRNILNAIEQGIIAPGAKERIAELEHQRDRAKLDLEAIRDDQIDPERLADFLQCGSALDDATLLKAFVYQASVSDEECIVTLNYDVENNEPARLDVQRVRTKCKWCTVCASPRTEVCAVGTIIFVRIPRAA

SEQ ID NO: 6086 - protein, 495 aa, Unknown
  Description of Unknown: Integrase B6087 sequence
  PTHR30461:SF3,IPR036162,PS51737,IPR011109,PTHR30461, PS00397,PF00239,G3DSA:1.10.10.2600,IPR006119,SSF53041, cd00338,SM00857,IPR025827,IPR038109, PS51736,IPR006118,PF13408,G3DSA:3.40.50.1390,PF07508,Coil
MEKLRTGALYIRVSTDKQEELSPDAQRRLLLEYAAKNNIILSNEYIFEEDGISGRKADKRPNFQRMIGLAKSKEHPFDVILVWKFSRFARNQEESIVYKSLLRKNNVEVISVSEPLVDGPFGTLIERIIEWMDEYYSIRLSGEVTRGMTENAMRGNFQASPPLGYSITAHKATPVIVESEAEIVRMIFNLYTEQGYSIIEITRQLNALGYKTRAGKSFENRGIKYILTNEVYTGKSVWNKRDSASHPKDKTEWIIADGAHEPIISPEQFQRAKVRLESNYRPRYAKPSGVCSHWLSGIVKCSACGRSLSISLAGANKQGKRYIYLQCYGYLKGKCNVSHAISEKKIVPMVLAALKDAISSENLSFKVINDSQSNYPAAIDIYQNQLDELAKKEKRIKMAYMDGIDTIEEYRKNKELLLEERNSIESRINALPKPAAKSDTTAALRSKIKTVYDSLLNEDLSMQTRNDLLKSVVEKIVFNKKESTIDVYFYTSNPL

SEQ ID NO: 6087 - protein, 495 aa, Unknown
  Description of Unknown: Integrase B6088 sequence
  PTHR30461:SF3,IPR036162,PS51737,IPR011109,PTHR30461, PS00397,PF00239,G3DSA:1.10.10.2600,IPR006119,SSF53041, cd00338,SM00857,IPR025827,IPR038109,PS51736, IPR006118,PF13408,G3DSA:3.40.50.1390,PF07508,Coil
MMSELRYAYGYIRVSTHDQEEISPDSQENLLREYATRNNIVILKIFSDLGISGRKAEKRPGFQEMVGLAKGSDHPVDLILVWKFSRFARNQEESIVYKSLLKKQHNVEVVSISEPLSDNPFGSLIERIIEWMDEYYSIRLSGEVFRGMKENATRGAYQARPPLGYKVVEHGKPPVIIPEEAEIVRMIFNWYANEGIGFFDIARRLNNLGLKTSQGKPFERRSIEYIIQNPSYCGMIRWNRTENSTNRIKDKDEWIVTEGQQPAIIAKELFDAAQKRFETTYRPSGKRPSSTYKHWLSGLLKCPACGRTLTAATMKRANGEKYSYFSCYGYHKGKCEKPHGISSLVLENEVLACVKESLSSGSISYTLKERQPIEVSNEKNILTSRLESLSGKEERIKASYREGIDTLEEYKANKALLQKERIHLEEQLKELEDNAPKDAPDPAANMLLRVQGVYDILVSDSFTAAQKNEALKQIVDKIIYDREQDSLKIYYFLYQ

SEQ ID NO: 6088 - protein, 495 aa, Unknown
  Description of Unknown: Integrase B6089 sequence
  SM00857,G3DSA:1.10.10.2600,PS51736,IPR036162,PS51737, G3DSA:3.40.50.1390,PF13408,IPR025827,IPR006119,IPR038109, PF07508,IPR011109,SSF53041,PF00239,PTHR30461, mobidb-lite,Coil,cd00338
MVKNRAAIYARFSSHNQRSESIEIQVENSRAYCEREGLQVVREYCDYAQTGRNIDRAEFQRMMSDARHGLFDYVVIYKVTRIMRNRDEMSLARIMLRKAGVEILYAGEDISSGSSGVLQLGMLEVLAEYESALDSERIRDGIQKNAQRCMANGRTLYGWDIVEGRYVINEREASVLRRMKNMLFAGSSVADIVRAVSTERSKRGAKFNQDTVTKLLKRVQNAGVYKYAGHEVPDGMPAIWSQVEQDMIDNILGDRHKPRRKINSTLEFPLSGKLYCAKCGAPMAGTSGTSCTGATYHYYKCRKCRRTVRRDLVEDVVCDMTLQAVAREDVRQRIASGMVAFQAEQPKEQSRSYAIKKELKRIDRTFERIWQAIEDGIAPPGGRERTEELKQRKSELEAELRIAEREETFNIGVDELMLWLDDAAENLTPEVILGTFVRFVEIDGKTLNIYFAFDHYGDDFRPKQKKAEPCPEGHSSTNSPMVEARRIELRSTKAP

SEQ ID NO: 6089 - protein, 495 aa, Unknown
  Description of Unknown: Integrase B6090 sequence
  PTHR30461:SF3,IPR036162,PS51737,IPR011109,PTHR30461, PS00397,PF00239,G3DSA:1.10.10.2600,IPR006119,SSF53041, cd00338,SM00857,IPR025827,IPR038109,PS51736, IPR006118,PF13408,G3DSA:3.40.50.1390,PF07508,Coil
MSLKYAYGYIRVSTHDQEEISPDSQEHLLRDYAAKNNIVILKIFTDLGISGRKADKRPGFQEMIGLSKGPDHPVDCILVWKFSRFARNQEESIVYKSLLKKQHNVDVISISEPLADGPFGSLIERIIEWMDEYYSIRLSGEVFRGMKENATRGAYQARPPLGYQVIERGKPPVIVPEEAAIVRMIFDKYVNGKMSFFDIARHLNSLGLKTSHGKAFERRSIEYIIQNPSYCGMIRWNRMENATNRIKDQDEWIIADGMQEAIISKELFDAAQERLKKIYKPVGKRPSSTYKHWLSGLLKCPVCGRTLTATTMERANGEKYAYFSCYGYSKGKCDKPHGVSSLVIEKEVLKALEEALGSNSIVYEMREIRPQELSNERTLISERLASLKGKEDRIRASYREGIDTLEEYKENKALIAKERDSLERQLAELEENTPDKIPDDPTPKMLDRVSSVHDILVSDSYSLVQKNEALKQIIDKIVYDRESDTLKIHFFLYHS

SEQ ID NO: 6090 - protein, 495 aa, Unknown
  Description of Unknown: Integrase B6091 sequence
  PTHR30461:SF3,SM00857,G3DSA:1.10.10.2600,IPR036162,PF13408, PS51737,IPR025827,G3DSA:3.40.50.1390,IPR006119,IPR038109, PF07508,SSF53041,IPR011109,PF00239,PTHR30461, PS51736,Coil,cd00338
MSNAVIYARYSSDKQSEDSIEAQLRACRQYAATKGYNIVAVYADEAISGKGSMTASRAQYQKMLRDCNKGTFDTILIHKYDRVARSLGEHVNLDARLQKMGITLIAVGQDFGFGPESKIMRALMWSMSEYYIDNLANETKKGEREVALKGLHNGGYPPFGYDIVDQKYVINPYEAEYVRKIFAAVKNHEGTKDIIAEMAAVGIVGKRGKPLKYSAVYEILRNEKYTGTYIYCVDEEKDRSKRRSKPNAIRIENALPMIIDKATFDEVQKIMDSRKQSGPKTSYLCSGLVYCSCGAKMHAHISTKKGHVYHYYRCSKKCGAPMISMDIVDDAAKTYLRTLLNEENQKAIAKAMRKYKCGEPERAADFKKIVASKISEKQKQYDTLMTNMSSGVLPADVIEDIGAKMNQLRSEIEALKKTEMPKDYTTDQISLWLKALHDSPDDKAIRLLISRIDIKNTTEINIQSTLTSVVGTIGCGRPQHIFPTILFKFLYFFQR

SEQ ID NO: 6091 - protein, 495 aa, Unknown
  Description of Unknown: Integrase B6092 sequence
  PTHR30461:SF3,IPR036162,PS51737,IPR011109,PTHR30461, PS00397,PF00239,G3DSA:1.10.10.2600,IPR006119,SSF53041, cd00338,SM00857,IPR025827,IPR038109,PS51736, IPR006118,PF13408,G3DSA:3.40.50.1390,PF07508,Coil
MSLKYAYGYIRVSTHDQEEISPDSQEHLLRDYAAKNNIVILKIFTDLGISGRKADKRPGFQEMIGLAKGPDHPVDCILVWKFSRFARNQEESIVYKSLLKKQHNVDVISISEPLADGPFGSLIERIIEWMDEYYSIRLSGEVFRGMKENATRGAYQARPPLGYKVVERGKPPVIVPEEAAIVRMIFDKYVNGKMSFFDIARHLNSLGLKTSHGKAFERRSIEYIIQNPSYCGMIRWNRMENATNRIKNQDEWIIADGMQEAIISKELFDAAQERLKKIYKPVGKRPSSTYKHWLSGLLKCPVCGRTLTATTMERANGEKYAYFSCYGYSKGKCDKPHGVSSLVIEKEVLKALEEALGSNSIVYEMREIRPQELSNERTLISERLASLKGKEDRIRASYREGIDTLEEYKENKALIAKERDSLERQLAELEENAPDKTPEDPTPKMLDRVSSVHDILVSDSYSLVQKNEALKQIIDKIVYDRESDTLKIHFFLYHS

SEQ ID NO: 6092 - protein, 495 aa, Unknown
  Description of Unknown: Integrase B6093 sequence
  PTHR30461:SF3,cd00338,SM00857,G3DSA:1.10.10.2600,IPR036162, PF13408,IPR025827,G3DSA:3.40.50.1390,PS51737,IPR006119, IPR038109,PF07508,IPR011109,SSF53041,PTHR30461, PS51736,Coil,PF00239
MRGVIYARYSPGPHQTEQSIEGQVADCQQYAEEHGIDIIEIYADRHVSGKSVVGRDEFQRMLRDAEKGRFDCVLVWKIDRFGRDRQDIAMGKMALKRAGVKLMYARESVPEGPEGIILESVLEGLAEYYSADLRQKVIRGMKETAKKGQYCGQSLPIGYKVDAERHIVVDEREAAAVREAFKLHIAGGQIRDIVQLFADRGIMGRRGKPVSNAVVYRMLRNEKYLGEFYIQDVKLNVEPIIDQATFLEAARHFKTSRNNAAGRAKVNYLLSCKMFCGYCGSMISAEAGTGKLGKVYRYYKCGDKKRGKKCELKPFPKDHLEDAIILATVNDMLTDEMIEKLTVRILEVQEQENADDPVVGLRRRLDSNKKRQRNLLDAIEEGGARGLVSRLAALEEEEEQLVLEIQRAEIKRPRLTHEVVEAWLRSFRVGDVTDDDFRARLVDTFIARVELRNDEALIFYNIREKGPHSRVRVRPEWWSRGESNPINKFKKLLRH

SEQ ID NO: 6093 - protein, 495 aa, Unknown
  Description of Unknown: Integrase B6094 sequence
  PTHR30461:SF3,IPR036162,PS51737,IPR011109,PTHR30461, PS00397,PF00239,G3DSA:1.10.10.2600,IPR006119,SSF53041, cd00338,SM00857,IPR025827,IPR038109,PS51736, IPR006118,PF13408,G3DSA:3.40.50.1390,PF07508,Coil
MEKLRTGALYIRVSTDKQEELSPDAQRRLLLEYAAKNNIILSNEYIFEEDGISGRKADKRPNFQRMIGLAKSKEHPFDVILVWKFSRFARNQEESIVYKSLLRKNNVEVISVSEPLVDGPFGTLIERIIEWMDEYYSIRLSGEVTRGMTENAMRGNFQSSPPLGYMVPAHKEVPVIVESEAAIVRLIFDMYTEQGYPLIDITRQLNALGYRTRAGNEFENRGIKYILSNEVYTGKTVWNKRDSSSRTKSKDEWIIADGSHQPIITPEQFEKAHNRLSSNYRPKYAKPSGVCSHWLSGIVKCSACGRSLSISLAGANKQGKRYIYLQCYGYLKGKCNVSHAISEKKIVPMVLAALKDAISSENLSFKVINDSQSNYPAAIDIYQNQLDELAKKEKRIKMAYMDGIDTIEEYRKNKELLLEERNSIEGRINALPKPAAKPDTTAALRSKIKTVYDSLLNEELSMQTRNDLLKSVVEKIVFNKKESTIDVYFYTSNPL

SEQ ID NO: 6094 - protein, 495 aa, Unknown
  Description of Unknown: Integrase B6095 sequence
  PTHR30461:SF3,IPR036162,PS51737,IPR011109,PTHR30461, PS00397,PF00239,G3DSA:1.10.10.2600,IPR006119,SSF53041, cd00338,SM00857,IPR025827,IPR038109,PS51736, IPR006118,PF13408,G3DSA:3.40.50.1390,PF07508,Coil
MSLKYAYGYIRVSTHDQEEISPDSQEHLLRDYAAKNNIVILKIFTDLGISGRKADKRPGFQEMIGLAKGPDHPVDCILVWKFSRFARNQEESIVYKSLLKKQHNVDVISISEPLADGPFGSLIERIIEWMDEYYSIRLSGEVFRGMKENATRGAYQARPPLGYKVIERGKPPVIVPEEAAIVRMIFDKYVNGKMSFFDIARHLNSLGLKTSHGKAFERRSIEYIIQNPSYCGMIRWNRMENATNRIKDQDEWIIADGMQEAIISKELFDAAQERLKKIYKPVGKRPSSTYKHWLSGLLKCPVCGRTLTATTMKRANGEKYAYFSCYGYSKGKCDKPHGVSSLVIEKEVLKALEEALGSNSIVYEMREIRPQELSNERTLISERLASLKGKEDRIRASYREGIDTLEEYKENKALIAKERDSLERQLAELEENTPDKIPDDPTLKMLDRVSSVHDILVSDSYSLVQKNEALKQIIDKIVYDRESDTLKIHFFLYHS

SEQ ID NO: 6095 - protein, 495 aa, Unknown
  Description of Unknown: Integrase B6096 sequence
  PTHR30461:SF3,IPR036162,PS51737,IPR011109,PTHR30461, PS00397,PF00239,G3DSA:1.10.10.2600,IPR006119,SSF53041, cd00338,SM00857,IPR025827,IPR038109,PS51736, IPR006118,PF13408,G3DSA:3.40.50.1390,PF07508,Coil
MSLKYAYGYIRVSTHDQEEISPDSQEHLLRDYAAKNNIVILKIFTDLGISGRKADKRPGFQEMIGLAKGPDHPVDCILVWKFSRFARNQEESIVYKSLLKKQHNVDVISISEPLADGPFGSLIERIIEWMDEYYSIRLSGEVFRGMKENATRGAYQARPPLGYKVIERGKPPVIVPEEAAIVRMIFDKYVNGKMSFFDIARYLNSLGLKTSHGKAFERRSIEYIIQNPSYCGMIRWNRMENATNRIKDQDEWIIADGMQEAIISKELFDAAQERLKKIYKPVGKRPSSTYKHWLSGLLKCPVCGRTLTATTMERANGEKYAYFSCYGYSKGKCDKPHGVSSLVIEKEVLKALEEALGSNSIVYEMREIRPQELSNERTLISERLASLKGKEDRIRASYREGIDTLEEYKENKALIAKERDSLERQLAELEENTPDKISDDPTPKMLDRVSSVHDILVSDSYSLVQKNEALKQIIDKIVYDRESDTLKIHFFLYHS

SEQ ID NO: 6096 - protein, 495 aa, Unknown
  Description of Unknown: Integrase B6097 sequence
  PTHR30461:SF3,IPR036162,PS51737,IPR011109,PTHR30461, PS00397,PF00239,G3DSA:1.10.10.2600,IPR006119,SSF53041, cd00338,SM00857,IPR025827,IPR038109,PS51736, IPR006118,PF13408,G3DSA:3.40.50.1390,PF07508,Coil
MSLKYAYGYIRVSTHDQEEISPDSQEHLLRDYAAKNNIVILKIFTDLGISGRKADKRPGFQEMIGLAKGPDHPVDCILVWKFSRFARNQEESIVYKSLLKKQHNVDVISISEPLADGPFGSLIERIIEWMDEYYSIRLSGEVFRGMKENATRGAYQARPPLGYKVIERGKPPVIVPEEAAIVRMIFDKYVNGKMSFFDIARHLNSLGLKTSHGKAFERRSIEYIIQNPSYCGMIRWNRMENATNRIKDQDEWIIADGMQEAIISKELFDAAQERLKKSYKPVGMRPSSTYKHWLSGLLKCPVCGRTLTATTMKRANGEKYAYFSCYGYSKGKCDKPHGVSSLVIEKEVLKALEEALGSNSIVYEMREIRPQELSNERTLISERLASLKGKEDRIRASYREGIDTLEEYKENKVLIAKERDSLERQLAELEENTPDKIPDDPTPKMLDRVSSVHDILVSDSYSLVQKNEALKQIIDKIVYDRESDTLKIHFFLYHS

SEQ ID NO: 6097 - protein, 495 aa, Unknown
  Description of Unknown: Integrase B6098 sequence
  PTHR30461:SF3,IPR036162,PS51737,IPR011109,PTHR30461, PS00397,PF00239,G3DSA:1.10.10.2600,IPR006119,SSF53041, cd00338,SM00857,IPR025827,IPR038109,PS51736, IPR006118,PF13408,G3DSA:3.40.50.1390,PF07508,Coil
MSLKYAYGYIRVSTHDQEEISPDSQEHLLRDYAAKNNIVILKIFTDLGISGRKADKRPGFQEMISLAKGPDHPVDCILVWKFSRFARNQEESIVYKSLLKKQHNVDVISISEPLADGPFGSLIERIIEWMDEYYSIRLSGEVFRGMKENATRGAYQARPPLGYKVIERGKPPVVVPEEAAIVRMIFDKYVNGKMSFFDIARHLNSLGLKTSHGKAFERRSIEYIIQNPSYCGMIRWNRMENATNRIKDQDEWIIADGMQEAIISKELFDTAQERLKKIYKPVGKRPSSTYKHWLSGLLKCPVCGRTLTATTMKRANGEKYAYFSCYGYSKGKCDKPHGVSSLVIEKEVLKALEEALGSNSIVYEMREIRPQELSNERTLISERLASLKGKEDRIRASYREGIDTLEEYKENKALIAKERDSLERQLAELEENTPDKIPDDPTPKMLDRVSSVHDILVSDSYSLVQKNEALKQIIDKIVYDRESDTLKIHFFLYHS

SEQ ID NO: 6098 - protein, 495 aa, Unknown
  Description of Unknown: Integrase B6099 sequence
  PTHR30461:SF3,SM00857,G3DSA:1.10.10.2600,IPR036162,PS51737, G3DSA:3.40.50.1390,IPR006119,IPR038109,PF07508,IPR011109, SSF53041,PTHR30461,Coil,PS51736,cd00338, PF00239
MDAAQYLRKSRMEEGMDTEEVLAKHRKALAEYAAAHGIHIIETYYEVVSGESLYARPEMLRLLEDVEDGKYDAVLCMDLDRLSRGRMKDQGIILDAFKDSGTLIVTPEKTYDLSDEIDDELAEFKTFMSRREYKIINKRLQRGKAQTIRDGCYVANAPYGYRKVTIDRKPTLEIVESEAAYVRMMFEMYADGYGCVAIARHINTLGAKPRRCDAFNRSTVALILKNPVYIGKVVWDRTKHVRKGARGNPKHITIQQPRDHWVIVDGLHPAIIDKELFGQVQDIMAGRYIPPANDGTIKSPLAGLVKCAVCGRNMQRMGMNTDTLYLLCNTPGCCAGAKLAFVELRILQHLQRTLAELSIETPAVRIKDTSAQEASLAVIRKEQKAADAQKSRLYDLLEMGEYDIPTFRERMAKVKDKIAALEQKEAELLRVIDQAHTADPAELARRIKAVLDAYDTSDAAHRNALLKGVIQTVWYRKKKKTAPSDFQLTIDLKYN

SEQ ID NO: 6099 - protein, 495 aa, Unknown
  Description of Unknown: Integrase B6100 sequence
  PTHR30461:SF3,IPR036162,PS51737,IPR011109,PTHR30461, PS00397,PF00239,G3DSA:1.10.10.2600,IPR006119,SSF53041, cd00338,SM00857,IPR025827,IPR038109,PS51736, IPR006118,PF13408,G3DSA:3.40.50.1390,PF07508,Coil
MSLKYAYGYIRVSTHDQEEISPDSQEHLLRDYAAKNNIVILKIFTDLGISGRKADKRPGFQEMIGLAKGPDHPVDCILVWKFSRFARNQEESIVYKSLLKKQHNVDVISISEPLADGPFGSLIERIIEWMDEYYSIRLSGEVFRGMKENATRGAYQARPPLGYKVIERGKPPVIVPEEAAIVRMIFDKYVNGKMSFFDIARHLNSLGLKTSHGKAFERRSIEYIIQNPSYCGMIRWNRMENATNRIKDQDEWIIADGMQEAIISKELFDAAQERLKKIYKPVGKRPSSTYKHWLSGLLKCPVCGRTLTATTMKRANGKKYAYFSCYGYSKGKCDKPHGVSSLVIEKEVLKALEEALGSNSIVYEMREIRPQELSNERTLISERLASLKGKEDRIRASYREGIDTLEEYKENKALIAKERDSLERQLAELEENTPDKIPDDPTPKMLDRVSSVHDILVSDSYSLVQKNEALKQIIDKIVYDRESDTLKIHFFLYHS

SEQ ID NO: 6100 - protein, 495 aa, Unknown
  Description of Unknown: Integrase B6101 sequence
  PTHR30461:SF3,cd00338,SM00857,G3DSA:1.10.10.2600,IPR036162, PF13408,IPR025827,G3DSA:3.40.50.1390,PS51737,IPR006119, IPR038109,PF07508,IPR011109,SSF53041,PTHR30461, PS51736,Coil,PF00239
MIALYGRVSTEEQATKGYSLRNQIEECRRKANTKEIVEYVDDGYSGEFLERPALTKLREDVKGNRITKVYCYDPDRLSRKLMNALIIDDEFRSKGVDIIYINGEYADSPEGKLFYSLRGAISEFEKAKITERMSSGRKRKAQEGKIVKNHKMYGYDYDKEKAMYVVNEHEASVVKMIFHKFVVEQIGMNSIAKELTAKGVKTKTGKDVWHRQVVRQILMNESYTGDYYQNKWNTEGMIRNKYTDNPDNKIKMRHRDKSEWIPINIPQIIERTQYEEAAELLKQSRRRYAKAAVNQYLLSGLLRCGTCGNTMVGTKTTWWGKPHFIYTDRKSHAGAKHPGCVLDIKMEKLDEEVWKDVEQFVYNPELLFKYDNTKDVSMELKQAEKLKEDIKKAEKGRKKLYSLFAISDDLDEEELKKEIVELQDKQRKAEERLMEVEKEINKNKNDRDIDSIKETINELISKEDRITFDVKKSLIRVLVKEVIVEGKEKININYF

SEQ ID NO: 6101 - protein, 495 aa, Unknown
  Description of Unknown: Integrase B6102 sequence
  PTHR30461:SF3,IPR036162,PS51737,IPR011109,PTHR30461, PS00397,PF00239,G3DSA:1.10.10.2600,IPR006119,SSF53041, cd00338,SM00857,IPR025827,IPR038109,PS51736, IPR006118,PF13408,G3DSA:3.40.50.1390,PF07508,Coil
MSLKYAYGYIRVSTHDQEEISPDSQEHLLRDYAAKNNIVILKIFTDLGISGRKADKRPGFQEMIGLAKGPDHPVDCILVWKFSRFARNQEESIVYKSLLKKQHNVDVISISEPLADGPFGSLIERIIEWMDEYYSIRLSGEVFRGMKENATRGAYQARPPLGYKVIERGKPPVIVPEEAAIVRMIFDKYVNGKMSFFDIARHLNSLRLKTSHGKAFERRSIEYIIQNPSYCGMIRWNRMENATNRIKDQDEWIIADGMQEAIISKELFDAAQERLKKIYKPVGKRPSSTYKHWLSGLLKCPVCGRTLTATTMKRANGEKYAYFSCYGYSKGKCDKPHGVSSLVIEKEVLKALEEALGSNSIVYEMREIRPQELSNERTLISERLASLKGKEDRIRASYREGIDTLEEYKENKALIAKERDSLERQLAELEENTPDKIPDDPTPKMLDKVSSVHDILVSDSYSLVQKNEALKQIIDKIVYDRESDTLKIHFFLYHS

SEQ ID NO: 6102 - protein, 495 aa, Unknown
  Description of Unknown: Integrase B6103 sequence
  PTHR30461:SF3,IPR036162,PS51737,IPR011109,PTHR30461, PS00397,PF00239,G3DSA:1.10.10.2600,IPR006119,SSF53041, cd00338,SM00857,IPR025827,IPR038109,PS51736, IPR006118,PF13408,G3DSA:3.40.50.1390,PF07508,Coil
MMSELRYAYGYIRVSTHDQEEISPDSQENLLREYATRNNIVILKIFSDLGISGRKAEKRPGFQEMVGLAKGSDHPVDLILVWKFSRFARNQEESIVYKSLLKKQHNVEVVSISEPLSDNPFGSLIERIIEWMDEYYSIRLSGEVFRGMKENATRGAYQARPPLGYKVVEHGKPPMIVPEEAEIIRMIFNWYANEGIGFFDIARRLNNLGLKTSQGKPFERRSIEYIIQNPSYCGMIRWNRTENSTNRIKDKDEWIVTEGQQPAIITKELFDAAQKRFETTYRPSGKRPSSTYKHWLSGLLKCPACGRTLTAATMKRANGEKYSYFSCYGYHKGKCEKPHGISSLVLEKEVLACVKESLSSGNISYTLKERQPIEISNEKNILTSRLESLSGKEERIKASYREGIDTLEEYKANKALLQKERIHLEEQLKKLEDNAPKDTQDPAANMLLRVQGVYDILVSDSFTAAQKNEALKQIVDKIVYNREQDSLKIYYFLYQ

SEQ ID NO: 6103 - protein, 495 aa, Unknown
  Description of Unknown: Integrase B6104 sequence
  PTHR30461:SF3,IPR036162,PS51737,IPR011109,PTHR30461, PS00397,PF00239,G3DSA:1.10.10.2600,IPR006119,SSF53041, cd00338,SM00857,IPR025827,IPR038109,PS51736, IPR006118,PF13408,G3DSA:3.40.50.1390,PF07508,Coil
MMSELRYAYGYIRVSTHDQEEISPDSQENLLREYATRNNIVILKIFSDLGISGRKAEKRPGFQEMVGLAKGSDHPVDLILVWKFSRFARNQEESIVYKSLLKKQHNVEVVSISEPLSDNPFGSLIERIIEWMDEYYSIRLSGEVFRGMKENATRGAYQARPPLGYKVVEHGKPPMIVPEEAEIIRMIFNWYANEGIGFFDIARRLNNLGLKTSQGKPFERRSIEYIIQNPSYCGMIRWNRTENSTNRIKDKDEWIVTEGQHPAIITKELFDAAQKRFETTYRPSGKRPSSTYKHWLSGLLKCPACGRTLTAATMKRANGEKYSYFSCYGYHKGKCEKPHGISSLVLEKEVLACVKESLSSGNISYTLKERQPIEVSNEKNILTSRLESLSGKEERIKASYREGIDTLEEYKANKALLQKERIHLEEQLKELEDNAPKDTPDPAANILLRVQGVYDILVSDSFTAAQKNEALKQIVDKIVYDREQDSLKIYYFLYQ

SEQ ID NO: 6104 - protein, 495 aa, Unknown
  Description of Unknown: Integrase B6105 sequence
  SM00857,G3DSA:1.10.10.2600,IPR036162,PF13408,IPR025827, PS51737,G3DSA:3.40.50.1390,IPR006119,IPR038109,IPR011109, SSF53041,PF00239,PTHR30461,PS51736,Coil, cd00338
MVKNRAAIYARFSSHNQRSESIEIQVENSRAFCEREGLQVVREYCDYAQTGRNIDRAEFQRMMNDARHGLFDYVVIYKVTRIMRNRDEMSLARIMLRKAGVEILYAGEDISSGSSGVLQLGMLEVLAEYESALDSERIRDGIQKNAQRCMANGRTLYGWDIVEGRYVINEREASVLRKMKNMLFAGSSVADIVRAVSAERSKRGAKFNQDTVTKLLKRVQNAGVYKYAGHEVPDGMPAIWSQVEQDMIDNILCDRHKPRRKINSTLEFPLSGKLYCSKCGSPMAGTSGTSCTGATYHYYKCRNCRRTVRRDLVEDVVCDMTLQAVAREDVRRRIVSGMVEFQEEQPKEQSRSYAIKKELKRIDRTFERIWQAIEDGIAPPGGRERTEELKQRKSELEAELRIAEREEAFNIGVDELMLWLDDAAENLTPEVILGTFVRFVEIDGKTLNVYFAFDHYGDGFRPKQKKAELCPEGHSSTNSLMVEARRIELRSTKVP

SEQ ID NO: 6105 - protein, 495 aa, Unknown
  Description of Unknown: Integrase B6106 sequence
  PTHR30461:SF3,IPR036162,PS51737,IPR011109,PTHR30461, PS00397,PF00239,G3DSA:1.10.10.2600,IPR006119,SSF53041, cd00338,SM00857,IPR025827,IPR038109,PS51736, IPR006118,PF13408,G3DSA:3.40.50.1390,PF07508,Coil
MSLKYAYGYIRVSTHDQEEISPDSQEHLLRDYAAKNNIVILKIFTDLGISGRKADKRPGFQEMIGLAKGPDHPVDCILVWKFSRFARNQEESIVYKSLLKKQHNVDVISISEPLADGPFGSLIERIIEWMDEYYSIRLSGEVFRGMKENATRGAYQARPPLGYKVIERGKPPVIVPEEAAIVRMIFDKYVNGKMSFFDIARHLNSLGLKTSHGKAFERRSIEYIIQNPSYCGMIRWNRMENATNRIKDQDEWIIADGMQEAIISKELFDAAQERLKKIYKPVGKRPSSTYKHWLSGLLKCPVCGRTLTATTMERANGEKYAYFSCYGYSKGKCDKPHGVSSLVIEKEVLKALEEALGSNSIVYEMREIRPQELSNERTLISERLVSLKGKEDRIRASYREGIDTLEEYKENKALIAKERDSLERQLAELEENTPDKIPDDPTPKMLDRVSSVHDILVSDSYSLVQKNEALKQIIDKIVYDRESDTLKIHFFLYHS

SEQ ID NO: 6106 - protein, 495 aa, Unknown
  Description of Unknown: Integrase B6107 sequence
  PTHR30461:SF3,cd00338,SM00857,G3DSA:1.10.10.2600,IPR036162, PF13408,PS51737,IPR025827,G3DSA:3.40.50.1390,IPR006119, IPR038109,PF07508,SSF53041,IPR011109,PTHR30461, PS51736,Coil,PF00239
MSNAVIYARYSSDKQSEDSIEAQLRACRQYAATRGYNIVAVYADEAISGKGSMTASRAQYQKMLRDCNKGTFDTILIHKYDRVARSLGEHVNLDARLQKMGITLIAVGQDFGFGPESKIMRALMWSMSEYYIDNLANETKKGEREVALKGLHNGGYPPFGYDIVDQKYVINPYEAEYVRKIFAAVKNHEGTKDIIAEMAAVGIVGKRGKPLKYSAVYEILRNEKYTGTYIYCVDEEKDRSKRRSKPNAIRIENALPMIIDKATFDEVQKIMDSRKQSGPKTSYLCSGLVYCSCGAKMHAHISTKKGHVYHYYRCSKKCGAPMISMDIVDDAAKTYLRTLLNEENQKAIATAMRKYKCGEPERAADFKKIVASKISEKQKQYDTLMTNMSSGVLPADVIEDIGAKMNQLRSEIEALKKTEMPKDYTTDQISLWLKALHDSPDDKAIRLLISRIDIKNTTEINIQSTLTSVVGTIGCGRPQHIFPTILFKFLYFFQR

SEQ ID NO: 6107 - protein, 495 aa, Unknown
  Description of Unknown: Integrase B6108 sequence
  PTHR30461:SF3,IPR036162,PS51737,IPR011109,PTHR30461, PS00397,PF00239,G3DSA:1.10.10.2600,IPR006119,SSF53041, cd00338,SM00857,IPR025827,IPR038109,PS51736, IPR006118,PF13408,G3DSA:3.40.50.1390,PF07508,Coil
MSLKYAYGYIRVSTHDQEEISPDSQEHLLRDYAAKNNIVILKIFTDLGISGRKADKRPGFQEMIGLAKGPDHPVDCILVWKFSRFARNQEESIVYKSLLKKQHNVDVISISEPLADGPFGSLIERIIEWMDEYYSIRLSGEVFRGMKENATRGAYQARPPLGYKVIERGKPPVIVPEEAAIVRMIFDKYVNGKMSFFDIARHLNSLGLKTSHGKAFERRSIEYIIQNPSYCGMIRWNRMENATNRIKDQDEWIIADGMQEAIISKELFDAAQERLKKIYKPVGKRPSSTYKHWLSGLLKCPVCGRTLTATTMKRANGEKYAYFSCYGYSKGKCDKPHGVSSLVIEKEVLKALEEALGSNSIVYEMREIRPQELSNERTLISERLASLKGKEDRIRASYREGIDTLEEYKENKALIAKERDSLERQLTELEENTPDKIPDDPTPKMLDRVSSVHDILVSDSYSLVQKNEALKQIIDKIVYDRESDTLKIHFFLYHS

SEQ ID NO: 6108 - protein, 495 aa, Unknown
  Description of Unknown: Integrase B6109 sequence
  PTHR30461:SF3,IPR036162,PS51737,IPR011109,PTHR30461, PS00397,PF00239,G3DSA:1.10.10.2600,IPR006119,SSF53041, cd00338,SM00857,IPR025827,IPR038109,PS51736, IPR006118,PF13408,G3DSA:3.40.50.1390,PF07508,Coil
MSLKYAYGYIRVSTHDQEEISPDSQEHLLRDYAAKNNIVILKIFTDLGISGRKADKRPGFQEMIGLAKGSDHPVDCILVWKFSRFARNQEESIVYKSLLKKQHNVDVISISEPLADGPFGSLIERIIEWMDEYYSIRLSGEVFRGMKENATRGAYQARPPLGYKVIERGKPPVIVPEEAAIVRMIFDKYVNGKMSFFDIARHLNSLGLKTSNGKAFERRSIEYIIQNPSYCGMIRWNRMENATNRIKDQDEWIIADGMQEAIISKELFDAAQERLKKIYKPVGKRPSSTYKHWLSGLLKCPVCGRTLTATTMKRANGEKYAYFSCYGYSKGKCDKPHGVSSLVIEKEVLKALEEALGSNSIVYEMREIRPQELSNERTLISERLAGLKGKEDRIRASYREGIDTLEEYKENKALIAKERDSLERQLAELEENTPDKIPDDPTPKMLDRVSSVHDILVSDSYSLVQKNEALKQIIDKIVYDRESDTLKIHFFLYHS

SEQ ID NO: 6109 - protein, 495 aa, Unknown
  Description of Unknown: Integrase B6110 sequence
  PTHR30461:SF3,IPR036162,PS51737,IPR011109,PTHR30461, PS00397,PF00239,G3DSA:1.10.10.2600,IPR006119,SSF53041, cd00338,SM00857,IPR025827,IPR038109,PS51736, IPR006118,PF13408,G3DSA:3.40.50.1390,PF07508,Coil
MMSELRYAYGYIRVSTHDQEEISPDSQENLLREYAARNNIVILKIFSDLGISGRKAEKRPGFQEMVGLAKGSDHPVDLILVWKFSRFARNQEESIVYKSLLKKQHNVEVVSISEPLSDNPFGSLIERIIEWMDEYYSIRLSGEVFRGMKENAIRGAYQARPPLGYKVVEHGKPPMIVPKEAEIVRMIFNWYANEGIGFFDIARRLNNLGLKTSQGKPFERRSIEYIIQNPSYCGMIRWNRTENSTNRIKDKDEWIVTEGQQPAIITKELFDAAQKRFETTYRPSGKRPSSTYKHWLSGLLKCPACGRTLTAATMKRANGEKYSYFSCYGYHKGKCEKPHGISSLVLEKEVLACVKESLSSGNISYTLKERQPIEVSNEKNILTSRLESLSGKEERIKASYREGIDTLEEYKTNKALLQKERIHLEEQLKELEDHAPKDTPDPAANMMLRVQGVYDILVSDSFTAAQKNEALKQIVDKIVYEREQDSLKIYYFLYL

SEQ ID NO: 6110 - protein, 495 aa, Unknown
  Description of Unknown: Integrase B6111 sequence
  PTHR30461:SF3,IPR036162,PS51737,IPR011109,PTHR30461, PS00397,PF00239,G3DSA:1.10.10.2600,IPR006119,SSF53041, cd00338,SM00857,IPR025827,IPR038109,PS51736, IPR006118,PF13408,G3DSA:3.40.50.1390,PF07508,Coil
MSLKYAYGYIRVSTHDQEEISPDSQEHLLRDYAAKNNIVILKIFTDLGISGRKADKRPGFQEMISLAKGPDHPVDCILVWKFSRFARNQEESIVYKSLLKKQHNVDVISISEPLADGPFGSLIERIIEWMDEYYSIRLSGEVFRGMKENATRGAYQARPPLGYKVIERGKPPVIVPEEAAIVRMIFDKYVNGKMNFFDIARYLNSLGLKTSHGKAFERRSIEYIIQNPSYCGMIRWNRMENATNRIKDQDEWIIADGMQEAIISKELFDAAQERLKKIYKPIGKRPSSTYKHWLSGLLKCPVCGRTLTATTMERANGEKYAYFSCYGYSKGKCDKPHGISSLVIEKEVLKALEEALGSNSIVYEMREIRPQELSNERTLISERLASLKGKEDRIRASYREGIDTLEEYKENKALIAKERDSLERQLAELEENTPDKIPDDPTPKMLDRVSSVHDILVSDSYSLVQKNEALKQIIDKIVYDRESDTLKIHFFLYHS

SEQ ID NO: 6111 - protein, 495 aa, Unknown
  Description of Unknown: Integrase B6112 sequence
  PTHR30461:SF3,IPR036162,PS51737,IPR011109,PTHR30461, PS00397,PF00239,G3DSA:1.10.10.2600,IPR006119,SSF53041, cd00338,SM00857,IPR025827,IPR038109,PS51736, IPR006118,PF13408,G3DSA:3.40.50.1390,PF07508,Coil
MSLKYAYGYIRVSTHDQEEISPDSQEHLLRDYAAKNNIVILKIFTDLGISGRKADKRPGFQEMIGLAKGPDHPVDCILVWKFSRFARNQEESIVYKSLLKKQHNVDVISISEPLADGPFGSLIERIIEWMDEYYSIRLSGEVFRGMKENATRGAYQARPPLGYKVVERGKPPVIVPEEAAIVRMIFDKYVNGKMSFFDIARHLNSLGLKTSHGKAFERRSIEYIIQNPSYCGMIRWNRMENATNRIKDQDEWIIADGMQEAIISKELFDAAQERLKKIYKPVGKRPSSTYKHWLSGLLKCPVCGRTLTATTMKRANREKYAYFSCYGYSKGKCDKPHGVSSLVIEKEVLKALEEALGSNSIVYEMREIRPQELSNERTLISERLASLKGKEDRIRASYREGIDTLEEYKENKALIAKERDSLERQLAELEENTPDKIPDDPTPKMLDRVSSVHDILVSDSYSLVQKNEALKQIIDKIVYDRESDTLKIHFFLYHS

SEQ ID NO: 6112 - protein, 495 aa, Unknown
  Description of Unknown: Integrase B6113 sequence
  PTHR30461:SF3,IPR036162,PS51737,IPR011109,PTHR30461, PS00397,PF00239,G3DSA:1.10.10.2600,IPR006119,SSF53041, cd00338,SM00857,IPR025827,IPR038109,PS51736, IPR006118,PF13408,G3DSA:3.40.50.1390,PF07508,Coil
MSLKYAYGYIRVSTHDQEEISPDSQEHLLRDYAAKNNIVILKIFTDLGISGRKADKRPGFQEMISLAKGPDHPVDCILVWKFSRFARNQEESIVYKSLLKKQHNVDVISISEPLADGPFGSLIERIIEWMDEYYSIRLSGEVFRGMKENATRGAYQARPPLGYKVIERGKPPVIVPEEAAIVRMIFDKYVNGKMSFFDIARHLNSLGLKTSHGKAFERRSIEYIIQNPSYCGMIRWNRTENATNRIKDQDEWIIADGMQEAIISKELFDAAQERLKKIYKPVGKRPSSTYKHWLSGLLKCPVCGRTLTATTMKRANGEKYAYFSCYGYGKGKCDKPHGVSSLVIEKEVLKALEEALGSNSIVYEMREIRPQELSNERTLISERLASLKGKEDRIRASYREGIDTLEEYKENKALIAKERDSLERQLVELEENAPDKTPEDPTPKMLDRVSSVHDILVSDSYSLVQKNEALKQIIDKIVYDRESDTLKIHFFLYHS

SEQ ID NO: 6113 - protein, 495 aa, Unknown
  Description of Unknown: Integrase B6114 sequence
  PTHR30461:SF3,IPR036162,PS51737,IPR011109,PTHR30461, PS00397,PF00239,G3DSA:1.10.10.2600,IPR006119,SSF53041, cd00338,SM00857,IPR025827,IPR038109,PS51736, IPR006118,PF13408,G3DSA:3.40.50.1390,PF07508,Coil
MSLKYAYGYIRVSTHDQEEISPDSQEHLLRDYAAKNNIVILKIFTDLGISGRKADKRPGFQEMIGLAKGPDHPVDCILVWKFSRFARNQEESIVYKSLLKKQHNVDVISISEPLADGPFGSLIERIIEWMDEYYSIRLSGEVFRGMKENATRGAYQARPPLGYKVIERGKPPVIVPEEAAIVRMIFDKYVNGKMNFFDIARYLNSLGLKTSHGKAFERRSIEYIIQNPSYCGMIRWNRMENATNRIKDQDEWIIADGMQEAIISKELFDAAQERLKKIYKPVGKRPSSTYKHWLSGLLKCPVCGRTLTATTMERANGEKYAYFSCYGYSKGKCDKPHGVSSLVIEKEVLKALEEALGSNSIVYEMREIRPQELSNERTLISERLASLKGKEDRIRASYREGIDTLEEYKENKALIAKERGSLERQLAELEENTPDKIPDNPTPKMLDRVSSVHDILVSDSYSLVQKNEALKQIIDKIVYDRESDTLKIHFFLYHS

SEQ ID NO: 6114 - protein, 495 aa, Unknown
  Description of Unknown: Integrase B6115 sequence
  PTHR30461:SF3,IPR036162,PS51737,IPR011109,PTHR30461, PS00397,PF00239,G3DSA:1.10.10.2600,IPR006119,SSF53041, cd00338,SM00857,IPR025827,IPR038109,PS51736, IPR006118,PF13408,G3DSA:3.40.50.1390,PF07508,Coil
MMSELRYAYGYIRVSTHDQEEISPDSQENLLREYAARNNIVILKIFSDLGISGRKAEKRPGFQEMVGLAKGSDHPVDLILVWKFSRFARNQEESIVYKSLLKKQHNVEVVSISEPLSDNPFGSLIERIIEWMDEYYSIRLSGEVFRGMKENATRGAYQARPPLGYKVVEHGKPPVIIPEEAEIVRIIFNWYANEGIGFFDIARRLNNLGLKTSQGKPFERRSIEYIIQNPSYCGMIRWNRTENSTNRIKDKDEWIVTEGQQPAIITKELFDAAQKRFETTYRPSGKRPSSTYKHWLSGLLKCPACGRTLTAATMKRANGEKYSYFSCYGYHKGKCEKPHGISSLVLEKEVLTCVKESLSSGNISYTLKERQPIEISNEKNILTSRLESLSGKEERIKASYREGIDTLEEYKANKALLQKERIHLEEQLKELEDNAPKDTPDPAANMLLRVQGVYDILVSDSFTVAQKNEALKQIVDKIVYDREQDSLKIYYFLYQ

SEQ ID NO: 6115 - protein, 495 aa, Unknown
  Description of Unknown: Integrase B6116 sequence
  SM00857,G3DSA:1.10.10.2600,IPR036162,PF13408,PS51737, G3DSA:3.40.50.1390,IPR025827,IPR006119,IPR038109,PF07508, IPR011109,SSF53041,PTHR30461,Coil,PS51736, cd00338,PF00239
MVKNRAAIYARFSSHNQRSESIEIQVENSRAFCEREGLQVVHEYCDYAQTGRNIDRAEFQRMMSDARHGLFDYVVIYKVTRIMRNRDEMSLARIMLRKAGVEILYAGEDISSGSSGVLQLGMLEVLAEYESALDSERIKDGIQKNAQRCMANGRTLYGWDIVEGRYVINEREASVLRKMKNMLFSGSSVADIVRAVSTERSKRGAKFNQDTVTKLLKRVQNAGVYKYAGHEIEDGMPAIWTQDEQDMINNILGDRHRPRRKVNSTLEFPLSGKLYCSKCGAPMAGTSGTSCTGATYHYYKCRKCRRTVRRDLIEDVVCDMTLQAVAREDVRRRIASGMVEFQEEQPKEQSRSYAIKKELKRIDRTFERIWQAIEDGIAPPGGRERTEELKQRKSELEAELRIAEREEAFNIGVDELMLWLDDAAENLTPEVILNSFVRFAEIDGKTLNVYFAFDHYGNDFSPKKKKAEPCPEGHSSTNSCMVEVRRIELRSKASP

SEQ ID NO: 6116 - protein, 495 aa, Unknown
  Description of Unknown: Integrase B6117 sequence
  PTHR30461:SF3,IPR036162,PS51737,IPR011109,PTHR30461, PS00397,PF00239,G3DSA:1.10.10.2600,IPR006119,SSF53041, cd00338,SM00857,IPR025827,IPR038109,PS51736, IPR006118,PF13408,G3DSA:3.40.50.1390,PF07508,Coil
MMSELRYAYGYIRVSTHDQEEISPDSQENLLREYATRNNIVILKIFSDLGISGRKAEKRPGFQEMVGLAKGSDHPVDLILVWKFSRFARNQEESIVYKSLLKKQHNVEVVSISEPLSDNPFGSLIERIIEWMDEYYSIRLSGEVFRGMKENATRGAYQARPPLGYKVVEHGKPPMIVPEEAEIIRMIFNWYANEGIGFFDIARRLNNLGLKTSQGKPFERRSIEYIIQNPSYCGMIRWNRTENSTNRIKDKDEWIVTEGQQPAIITKELFEAAQKRFEATYRPSGKRPSSTYKHWLSGLLKCPACGRTLTAATMKRANGEKYSYFSCYGYHKGKCEKPHGISSLVLENEVLACVKESLSSGNISYTLKERQPIEVSNEKNILTSRLESLSGKEERIKASYREGIDTLEEYKANKALLQKERIHLEEQLKELEDNAPKDAPNPAANMLLRVQGVYDILVSDSFTAAQKNEALKQIVDKIVYNREQDSLKIYYFLYQ

SEQ ID NO: 6117 - protein, 495 aa, Unknown
  Description of Unknown: Integrase B6118 sequence
  PTHR30461:SF3,IPR036162,PS51737,IPR011109,PTHR30461, PS00397,PF00239,G3DSA:1.10.10.2600,IPR006119,SSF53041, cd00338,SM00857,IPR025827,IPR038109,PS51736, IPR006118,PF13408,G3DSA:3.40.50.1390,PF07508,Coil
MSLKYAYGYIRVSTHDQEEISPDSQEHLLRDYAAKNNIVILKIFTDLGISGRKADKRPGFQEMIGLAKGPDHPVDCILVWKFSRFARNQEESIVYKSLLKKQHNVDVISISEPLADGPFGSLIERIIEWMDEYYSIRLSGEVFRGMKENATRGAYQARPPLGYKVIERGKPPVIVPEEAAIVRMIFDKYVNGKMSFFDIARHLNSLGLKTSHGKAFERRSIEYIIQNPSYCGMIRWNRMENATNRIKDQDEWIIADGMQEAIISKELFDAAQERLKKSYKPVGMRPSSTYKHWLSGLLKCPACGRTLTATTMKRANGEKYAYFSCYGYSKGKCDKPHGVSSLVIEKEVLKALEEALGSNSIVYEMREIRPQELSNERTLISERLASLKGKEDRIRASYREGIDTLEEYKENKALIAKERDSLERQLAELEENTPDKIPDDPTPKMLDRVSSVHDILVSDSYSLVQKNEALKQIIDKIVYDRESDTLKIHFFLYHS

SEQ ID NO: 6118 - protein, 495 aa, Unknown
  Description of Unknown: Integrase B6119 sequence
  PTHR30461:SF3,IPR036162,PS51737,IPR011109,PTHR30461, PS00397,PF00239,G3DSA:1.10.10.2600,IPR006119,SSF53041, cd00338,SM00857,IPR025827,IPR038109,PS51736, IPR006118,PF13408,G3DSA:3.40.50.1390,PF07508,Coil
MSLKYAYGYIRVSTHDQEEISPDSQEHLLRDYAAKNNIVILKIFTDLGISGRKADKRPGFQEMISLAKGPDHPVDCILVWKFSRFARNQEESIVYKSLLKKQHNVDVISISEPLADGPFGSLIERIIEWMDEYYSIRLSGEVFRGMKENATRGAYQARPPLGYKVIERGKPPVIVPEEAAIVRMIFDKYVNGKMSFFDIARHLNSLGLKTSHGKAFERRSIEYIIQNPSYCGMIRWNRMENATNRIKDQDEWIIADGMQEAIISKELFDAAQERLKKSYKPVGMRPSSTYKHWLSGLLKCPVCGRTLTATTMKRANGEKYAYFSCYGYSKGKCDKPHGVSSLVIEKEVLKALEEALGSNSIVYEMREIRPQELSNERTLISERLASLKGKEDRIRASYREGIDTLEEYKENKALIAKERDSLERQLAELEENAPDKTPEDPTPKMLDRVSSVHDILVSDSYSLVQKNEALKQIIDKIVYDRESDTLKIHFFLYHS

SEQ ID NO: 6119 - protein, 495 aa, Unknown
  Description of Unknown: Integrase B6120 sequence
  PTHR30461:SF3,IPR036162,PS51737,IPR011109,PTHR30461, PS00397,PF00239,G3DSA:1.10.10.2600,IPR006119,SSF53041, cd00338,SM00857,IPR025827,IPR038109,PS51736, IPR006118,PF13408,G3DSA:3.40.50.1390,PF07508,Coil
MSLKYAYGYIRVSTHDQEEISPDSQEHLLRDYAAKNNIVILKIFTDLGISGRKADKRPGFQEMIGLAKGPDHPVDCILVWKFSRFARNQEESIVYKSLLKKQHNVDVISISEPLADGPFGSLIERIIEWMDEYYSIRLSGEVFRGMKENATRGAYQARPPLGYKVIERGKPPVIVPEEAAIVRMIFDKYVNGKMNFFDIARYLNSLGLKTSHGKAFERRSIEYIIQNPSYCGMIRWNRMENATNRIKDQDEWIIADGMQEAIISKELFDAAQERLKKIYKPVGKRPSSTYKHWLSGLLKCPVCGRTLTATTMKRANGEKYAYFSCYGYSKGKCDKPHGVSSLVIEKEVLKALEEALGSNSIVYEMREIHPQELSNERTLISERLASLKGKEDRIRASYREGIDTLEEYKENKALIAKERDSLERQLAELEENTPDKIPDDPTPKMLDRVSSVHDILVSDSYSLVQKNEALKQIIDKIVYDRESDTLKIHFFLYHS

SEQ ID NO: 6120 - protein, 495 aa, Unknown
  Description of Unknown: Integrase B6121 sequence
  PTHR30461:SF3,IPR036162,PS51737,IPR011109,PTHR30461, PS00397,PF00239,G3DSA:1.10.10.2600,IPR006119,SSF53041, cd00338,SM00857,IPR025827,IPR038109,PS51736, IPR006118,PF13408,G3DSA:3.40.50.1390,PF07508,Coil
MMSELRYAYGYIRVSTHDQEEISPDSQENLLREYAARNNIVILKIFSDLGISGRKAEKRPGFQEMVGLAKGSDHPVDLILVWKFSRFARNQEESIVYKSLLKKQHNVEVVSISEPLSDNPFGSLIERIIEWMDEYYSIRLSGEVFRGMKENATRGAYQARPPLGYKVVEHGKPPVIIPEEAEIVRMIFNWYANEGIGFFDIARRLNNLGLKTSQGKPFERRSIEYIIQNPSYCGMIRWNRTENSTNRIKDKDEWIVTEGQQPSIITKELFDAAQKRFETTYRPSGKRPSSTYKHWLSGLLKCPVCGRTLTAATMKRANGEKYSYFSCYGYHKGKCEKPHGISSLVLEKEVLACVKESLSSGNISYTLKERQPIEASNEKNILTSRLESLSGKEERIKASYREGIDTLEEYKANKALLQKERIHLEEQLKELEDNAPKDTPDPAANMLLRVQGVYDILVSDSFTAAQKNEALKQIVDKIIYDREQDSLKIYYFLYQ

SEQ ID NO: 6121 - protein, 495 aa, Unknown
  Description of Unknown: Integrase B6122 sequence
  PTHR30461:SF3,IPR036162,PS51737,IPR011109,PTHR30461, PS00397,PF00239,G3DSA:1.10.10.2600,IPR006119,SSF53041, cd00338,SM00857,IPR025827,IPR038109,PS51736, IPR006118,PF13408,G3DSA:3.40.50.1390,PF07508,Coil
MSLKYAYGYIRVSTHDQEEISPDSQEHLLRDYAAKNNIVILKIFTDLGISGRKADKRPGFQEMIGLAKGPDHPVDCILVWKFSRFARNQEESIVYKSLLKKQHNVDVISISEPLADGPFGSLIERIIEWMDEYYSIRLSGEVFRGMKENATRGAYQARPPLGYKVVERGKPPVIVPEEAAIVRMIFDKYVNGKMSFFDIARHLNSLGLKTSHGKAFERRSIEYIIQNPSYCGMIRWNRMENATNRIKNQDEWIIADGMQEAIISKELFDTAQERLKKIYKPVGKRPSSTYKHWLSGLLKCPVCGRTLTATTMERANGEKYAYFSCYGYSKGKCDKPHGVSSLVIEKEVLKALEEALGSNSIVYEMREIRPQELSNERTLISERLASLKGKEDRIRASYREGIDTLEEYKENKALIAKERDALEQQLAELEENAPDKTPEDSTPKMLDRVSSVHDILVSDSYSLVQKNEALKQIIDKIVYDRESDTLKIHFFLYHS

SEQ ID NO: 6122 - protein, 495 aa, Unknown
  Description of Unknown: Integrase B6123 sequence
  PTHR30461:SF3,IPR036162,PS51737,IPR011109,PTHR30461, PS00397,PF00239,G3DSA:1.10.10.2600,IPR006119,SSF53041, cd00338,SM00857,IPR025827,IPR038109,PS51736, IPR006118,PF13408,G3DSA:3.40.50.1390,PF07508,Coil
MSLKYAYGYIRVSTHDQEEISPDSQEHLLRDYAAKNNIVILKIFTDLGISGRKADKRPGFQEMIGLAKGPDHPVDCILVWKFSRFARNQEESIVYKSLLKKQHNVDVISISEPLADGPFGSLIERIIEWMDEYYSIRLSGEVFRGMKENATRGAYQARPPLGYKVIERGKPPVIIPEEAAIVRMIFDKYVNGKMSFFDIARHLNSLGLKTSHGKAFERRSIEYIIQNPSYCGMIRWNRMENATNRIKDQDEWIIADGMQEAIISKELFDAAQERLKKIYKPVGKRPSSTYKHWLSGLLKCPVCGRTLTATTMKRTNGEKYAYFSCYGYSKGKCDKPHGVSSLVIEKEVLKALEEALGSNSIVYEMREIRPQELSNERTLISERLASLKGKEDRIRASYREGIDTLEEYKENKTLIAKERNSLEQQLAELEENTPDKIPDDPTPKMLDRVSSVHDILVSDSYSLVQKNEALKQIIDKIVYDRESDTLKIHFFLYHS

SEQ ID NO: 6123 - protein, 495 aa, Unknown
  Description of Unknown: Integrase B6124 sequence
  PTHR30461:SF3,IPR036162,PS51737,IPR011109,PTHR30461, PS00397,PF00239,G3DSA:1.10.10.2600,IPR006119,SSF53041, cd00338,SM00857,IPR025827,IPR038109,PS51736, IPR006118,PF13408,G3DSA:3.40.50.1390,PF07508,Coil
MSLKYAYGYIRVSTHDQEEISPDSQEHLLRDYAAKNNIVILKIFTDLGISGRKADKRPGFQEMIGLAKGPDHPVDCILVWKFSRFARNQEESIVYKSLLKKQHNVDVISISEPLADGPFGSLIERIIEWMDEYYSIRLSGEVFRGMKENATRGAYQARPPLGYKVIERGKPPVIVPEEAAIVRMIFDKYVNGKMSFFDIARHLNSLGLKTSHGKAFERRSIEYIIQNPSYCGMIRWNRIENATNRIKDQDEWIIADGMQEAIISKELFDAAQERLKKIYKPVGKRPSSTYKHWLSGLLKCPVCGRTLTATTMKRANGEKYAYFSCYGYSKGKCDKPHGVSSLVIEKEVLKALEEALGSNSIVYEMREIRPQELSNERTLISERLASLKGKEDRIRASYREGIDTLEEYKENKALIAKERDSLERQLAELEENTPDKILDDPTPKMLDRVSSVHDILVSDSYSLVQKNEALKQIIDKIVYDRESDTLKIHFFLYHS

SEQ ID NO: 6124 - protein, 495 aa, Unknown
  Description of Unknown: Integrase B6125 sequence
  PTHR30461:SF3,IPR036162,PS51737,IPR011109,PTHR30461, PS00397,PF00239,G3DSA:1.10.10.2600,IPR006119,SSF53041, cd00338,SM00857,IPR025827,IPR038109,PS51736, IPR006118,PF13408,G3DSA:3.40.50.1390,PF07508,Coil
MSLKYAYGYIRVSTHDQEEISPDSQEHLLRDYATKNNIVILKIFTDLGISGRKADKRPGFQEMIGLAKGPDHPVDCILVWKFSRFARNQEESIVYKSLLKKQHNVDVISISEPLADGPFGSLIERIIEWMDEYYSIRLSGEVFRGMKENATRGAYQARPPLGYKVIERGKPPVIVPEEAAIVRMIFDKYVNRKMSFFDIARHLNSLGLKTSHGKAFERRSIEYIIQNPSYCGMIRWNRMENATNRIKDQDEWIIADGMQEAIISKELFDAAQERLKKIYKPVGKRPSSTYKHWLSGLLKCPVCGRTLTATTMKRANGEKYAYFSCYGYSKGKCDKPHGVSSLVIEKEVLKALEEALGSNSIVYEMREIRPQELSNERTLISERLVSLKGKEDRIRVSYREGIDTLEEYKENKALIAKERDSLERQLAELEGNTPDKIPDDPTPKMLDRVSSVHDILVSDSYSLVQKNEALKQIIDKIVYDRESDTLKIHFFLYHS

SEQ ID NO: 6125 - protein, 495 aa, Unknown
  Description of Unknown: Integrase B6126 sequence
  PTHR30461:SF3,IPR036162,PS51737,IPR011109,PTHR30461, PS00397,PF00239,G3DSA:1.10.10.2600,IPR006119,SSF53041, cd00338,SM00857,IPR025827,IPR038109,PS51736, IPR006118,PF13408,G3DSA:3.40.50.1390,PF07508,Coil
MEKLRTGALYIRVSTDKQEELSPDAQRRLLLEYAAKNNIILSNEYIFEEDGISGRKADKRPNFQRMIGLAKSKEHPFDVILVWKFSRFARNQEESIVYKSLLRKNNVEVISVSEPLVDGPFGTLIERIIEWMDEYYSIRLSGEVTRGMTENAMRGNFQASPPLGYSITAHKATPVIVESEAEIVRMIFNLYTEQGYSIIEITRQLNALGYKTRAGKSFENRGIKYILTNEVYTGKSVWNKRDSASRPKDKAEWIIADGAHEPIISPEQFQRAKVRLESNYRPRYAKPSGVCSHWLSGIVKCSACGRSLSISLAGANKQGKRYIYLQCYGYLKGKCNVSHAISEKKIVPMVLAALKDAISSENLSFKVINDSQSNYPAAIDIYQNQLDELAKKEKRIKMAYMDGIDTIEEYRKNKELLLEERNSIESRINALPKPAAKSDTTAALRSKIKTVYDSLLNEDLSMQTRNDLLKSVVEKIVFNKKESTIDVYFYTSNPL

SEQ ID NO: 6126 - protein, 495 aa, Unknown
  Description of Unknown: Integrase B6127 sequence
  cd03768,PTHR30461:SF3,SM00857,G3DSA:1.10.10.2600,IPR036162, PF13408,IPR025827,G3DSA:3.40.50.1390,PS51737,IPR006119, IPR038109,PF07508,SSF53041,IPR011109,PTHR30461, PS51736,Coil,PF00239
MRIAIYTRKSVAVENSESIETQIQLCKKYFQGENEFEIFEDEGFSGGNTNRPSFKRLMSLIKLGKFDIVAIYKVDRISRNIVDFFKIYEELEKYNVKLISISEGFDPSTPGGKMMMIMLSAFADMERENIRQRVKDNMISLAKKGCFTGGFVPFGCTIEKKEGKSFLKIEDDKIIKLMFDKYLELGSLYATQKYLLDNGIKTLTTRSSLGKILRNPVYCKSDERVSDYLLNKGFEVVGKANKKGYMTYGKTSDYPTLIVSKHNAPIDAELFLKVNLLLDKNKDKATKRESKTYWLTEILYCPFCGSKYVLVNSGKNTYYVCSSRINRASNEMGINKDKVKCENNKYVNAETIEEKVSILINNLEDDREFKKYKGNMVVDNKQNEIDILLKSIDDNKKAIDNLVEKLMLLSNAAAEPLTRKIEELTSENIELEAKIDELRINQLDAITKKNDSELQQAIREFRNIKDNKEKRNKVRIIFNKLIYNPFDDSIDIEFT

SEQ ID NO: 6127 - protein, 495 aa, Unknown
  Description of Unknown: Integrase B6128 sequence
  PTHR30461:SF3,IPR036162,PS51737,IPR011109,PTHR30461, PS00397,PF00239,G3DSA:1.10.10.2600,IPR006119,SSF53041, cd00338,SM00857,IPR025827,IPR038109,PS51736, IPR006118,PF13408,G3DSA:3.40.50.1390,PF07508,Coil
MMSELRYAYGYIRVSTHDQEEISPDSQENLLREYATRNNIVILKIFSDLGISGRKAEKRPGFQEMVGLAKGSDHPVDLILVWKFSRFARNQEESIVYKSLLKKQHNVEVVSISEPLSDNPFGSLIERIIEWMDEYYSIRLSGEVFRGMKENATRGAYQARPPLGYKVVEHGKPPVIIPEEAEIVRMIFNWYANEGIGFFDIARRLNNLGLKTSQGKPFERRSIEYIIQNPSYCGMIRWNRTENSTNRIKDKDEWIVTEGQQPAIITKELFDAAQKRFETTYRPSGKRPSSTYKHWLSGLLKCPACGRTLTAATMKRANGEKYSYFSCYGYHKGKCEKPHGISSLVLEKEVLACIKESLSSGNISYTLKERQPIEVSNEKNILTSRLESLSGKEERIKASYREGIDTLEEYKANKALLQKERIHLEEQLKELEDNAPKDTPDPAANMLLRVQGVYDILVSDSFTAAQKNEALKQIVDKIIYDREQDSLKIYYFLYQ

SEQ ID NO: 6128 - protein, 495 aa, Unknown
  Description of Unknown: Integrase B6129 sequence
  PTHR30461:SF3,IPR036162,PS51737,IPR011109,PTHR30461, PS00397,PF00239,G3DSA:1.10.10.2600,IPR006119,SSF53041, cd00338,SM00857,IPR025827,IPR038109,PS51736, IPR006118,PF13408,G3DSA:3.40.50.1390,PF07508,Coil
MSLKYAYGYIRVSTHDQEEISPDSQEHLLRDYAAKNNIVILKIFTDLGISGRKADKRPGFQEMIGLAKGSDHPVDCILVWKFSRFARNQEESIVYKSLLKKQHNVDVISISEPLADGPFGSLIERIIEWMDEYYSIRLSGEVFRGMKENATRGAYQARPPLGYKVIERGKPPVIVPEEAAIVRMIFDKYVNGKMSFFDIARHLNSLGLKTSHGKAFERRSIEYIIQNPSYCGMIRWNRMENATNRIKDQDEWIIADGMQEAIISKELFDASQERLKKIYKPVGKRPSSTYKHWLSGLLKCPVCGRTLTATTMKRANGEKYAYFSCYGYSKGKCDKPHGVSSLVIEKEGLKALEEALGSNSIVYEMREIRPQELSNERTLISERLASLKSKEDRIRASYREGIDTLEEYKENKALIAKERDSLERQLAELEENTPDKIPDDPTPKMLDRVSSVHDILVSDSYSLVQKNEALKQIIDKIVYDRESDTLKIHFFLYHS

SEQ ID NO: 6129 - protein, 495 aa, Unknown
  Description of Unknown: Integrase B6130 sequence
  PTHR30461:SF3,IPR036162,PS51737,IPR011109,PTHR30461, PS00397,PF00239,G3DSA:1.10.10.2600,IPR006119,SSF53041, cd00338,SM00857,IPR025827,IPR038109,PS51736, IPR006118,PF13408,G3DSA:3.40.50.1390,PF07508,Coil
MSLKYAYGYIRVSTHDQEEISPDSQEHLLRDYAAKNNIVILKIFTDLGISGRKADKRPGFQEMIGLAKGPDHPVDCILVWKFSRFARNQEESIVYKSLLKKQHNVDVISISEPLADGPFGSLIERIIEWMDEYYSIRLSGEVFRGMKENATRGAYQARPPLGYKVIERGKPPVIVPEEAAIVRMIFDKYVNGKMSFFDIARHLNSLGLKTSHGKAFERRSIEYIIQNPSYCGMIRWNRMENATNRIKDQDEWIIADGMQEAIISKELFDAAQERLKKIYKPVGKRPSSTYKHWLSGLLKCPVCGRTLTATTMKRANGEKYAYFSCYGYSKGKCDKPHGVSSLVIEKEVLKALEEALGSNSIVYEMREIRPQELSNERTLISERLVSLKGKEDRIRASYREGIDTLEEYKENKALIAKERNSLERQLAELEENTPDKILDDPTPKMLDRVSSVHDILVSDSYSLVQKNEALKQIIDKIVYDRESDTLKIHFFLYHS

SEQ ID NO: 6130 - protein, 495 aa, Unknown
  Description of Unknown: Integrase B6131 sequence
  PTHR30461:SF3,IPR036162,PS51737,IPR011109,PTHR30461, PS00397,PF00239,G3DSA:1.10.10.2600,IPR006119,SSF53041, cd00338,SM00857,IPR025827,IPR038109,PS51736, IPR006118,PF13408,G3DSA:3.40.50.1390,PF07508,Coil
MSLKYAYGYIRVSTHDQEEISPDSQEHLLRDYAAKNNIVILKIFTDLGISGRKADKRPGFQEMIGLAKGPDHPVDCILVWKFSRFARNQEESIVYKSLLKKQHNVDVISISEPLADGPFGSLIERIIEWMDEYYSIRLSGEVFRGMKENATRGAYQARPPLGYKVIERGKPPVIVPEEAAIVRMIFDKYVNGKMSFFDIARHLNSLGLKTSHGKAFERRSIEYIIQNPSYCGMIRWNRMENATNRIKDQDEWIIADGMQEAIISKELFDAAQERLKKIYKPVGKRPSSTYKHWLSGLLKCPACGRTLTATTMKRANGEKYAYFSCYGYSKGKCDKPHGVSSLVIEKEVLKALEEALGSNSIVYEMREIRPQELSNERTLISERLASLKGKEDRIRASYREGIDTLEEYKENKTLIAKERDSLERQLAELEENTPDKIPDDPTPKMLDRVSSVHDILVSDSYSLVQKNEALKQIIDKIIYDRESDTLKIHFFLYHS

SEQ ID NO: 6131 - protein, 495 aa, Unknown
  Description of Unknown: Integrase B6132 sequence
  PTHR30461:SF3,IPR036162,PS51737,IPR011109,PTHR30461, PS00397,PF00239,G3DSA:1.10.10.2600,IPR006119,SSF53041, cd00338,SM00857,IPR025827,IPR038109,PS51736, IPR006118,PF13408,G3DSA:3.40.50.1390,PF07508,Coil
MMSELRYAYGYIRVSTHDQEEISPDSQENLLREYATRNNIVILKIFSDLGISGRKAEKRPGFQEMVGLAKGSDHPVDLILVWKFSRFARNQEESIVYKSLLKKQHNVEVVSISEPLSDNPFGSLIERIIEWMDEYYSIRLSGEVFRGMKENATRGAYQARPPLGYKVVEHGKPPMIVPEEAEIIRMIFNWYANEGIGFFDIARRLNNLGLKTSQGKPFERRSIEYIIQNPSYCGMIRWNRTENSTNRIKDKDEWIVTEGQQPAIITKELFDAAQKRFETTYRPSGKRPSSTYKHWLSGLLKCPACGRTLTAATMKRANGEKYSYFSCYGYHKGKCEKPHGISSLVLEKEVLACVKESLSSGNISYTLKERQPIEVSNEKNILTSRLESLAGKEERIKASYREGIDTLEEYKANKALLQKERIHLEEQLKELEDNAPKDAPDPAANMLLRVQGVYDILVSDSFTAAQKNEALKQIVDKIVYNREQDSLKIYYFLYQ

SEQ ID NO: 6132 - protein, 495 aa, Unknown
  Description of Unknown: Integrase B6133 sequence
  cd00338,SM00857,G3DSA:1.10.10.2600,IPR036162,PF13408, PS51737,G3DSA:3.40.50.1390,IPR025827,IPR006119,IPR038109, PF07508,IPR011109,SSF53041,PTHR30461,PS51736, Coil,PF00239
MSQKTAVLYARFSCSKQREESIEGQLRVCRDWCAREGYAIVAEYCDYAISGTTDERPQFQQMIANAGESDIVLVYMMDRFSRDPFDAPIYKRELQKRGVRLVSALEAIPDSPEGIIYEKLLEGLAACESRKTSVRVKRDMTTNAMKCRTNGVRCFGYRTGDDGRYEIDPDEAEIVREVFRRRVHGETVNSIAMDLRRRGVVSRAGNPIKDTFVNHMLHNEKYRGIYSWGGVTKKDGMPRIVSDETFRRAQMVKSKKQRRNEEWGEFALSGRVICSACGRNMRGVSGRGSSNRKYEYYSCGSCKEVRPVRRDWLEGSIIDALRELLSQPDEARRIAEMCVGAGEPKEVAEHRKQAAAALRAAETGLSNILKAVEQGIVVPGTKERAEELEAQKERAEHELAMYDRKVFSVENFTRFLQFGATLTDDLLLQGFVYQVMVSDEEVVVTMNFDAEKNEPARLRLSRVRTSFEWCPVCKNTRTMMAVLNGAVYLRFSRAA

SEQ ID NO: 6133 - protein, 495 aa, Unknown
  Description of Unknown: Integrase B6134 sequence
  PTHR30461:SF3,IPR036162,PS51737,IPR011109,PTHR30461, PS00397,PF00239,G3DSA:1.10.10.2600,IPR006119,SSF53041, cd00338,SM00857,IPR025827,IPR038109,PS51736, IPR006118,PF13408,G3DSA:3.40.50.1390,PF07508,Coil
MMSELRYAYGYIRVSTHDQEEISPDSQENLLREYAARNNIVILKIFSDLGISGRKAEKRPGFQEMVGLAKGSDHPVDLILVWKFSRFARNQEESIVYKSLLKKQHNVEVVSISEPLSDNPFGSLIERIIEWMDEYYSIRLSGEVFRGMKENATRGAYQARPPLGYKVVEHGKPPVIIPEEAEIVRMIFNWYANEGIGFFDIARRLNNLGLKTSQGKPFERRSIEYIIQNPSYCGMIRWNRTENSTNRIKDKDEWIVTEGQQPAIITKELFDAAQKRFETTYSPSGKRPSSTYKHWLSGLLKCPACGRTLTAATMKRANGEKYSYFSCYGYHKGKCEKPHGISSLILEKEVLACVKESLSSGSISYTLKERQPIEVSNEKNILTSRLESLSGKEERIKASYREGIDTLEEYKANKTLLQKERIHLEEQLKELEDNTPKDTPDPAANILLRVQGVYDILVSDSFTTAQKNEALKQIVDKIVYDREQDSLKIYYFLYQ

SEQ ID NO: 6134 - protein, 495 aa, Unknown
  Description of Unknown: Integrase B6135 sequence
  PTHR30461:SF3,IPR036162,PS51737,IPR011109,PTHR30461, PS00397,PF00239,G3DSA:1.10.10.2600,IPR006119,SSF53041, cd00338,SM00857,IPR025827,IPR038109,PS51736, IPR006118,PF13408,G3DSA:3.40.50.1390,PF07508,Coil
MSLKYAYGYIRVSTHDQEEISPDSQEHLLRDYAAKNNIVILKIFTDLGISGRKADKRPGFQEMIGLAKGPDHPVDCILVWKFSRFARNQEESIVYKSLLKKQHNVDVISISEPLADGPFGSLIERIIEWMDEYYSIRLSGEVFRGMKENATRGAYQARPPLGYKVIERGKPPVIVPEEASIVRMIFDKYVNGKMNFFDIARHLNSLGLKTSHGKAFERRSIEYIIQNPSYCGMIRWNRMENATNRIKDQDEWIIADGMQEAIISKELFDAAQERLKKIYKPVGKRPSSTYKHWLSGLLKCPVCGRTLTATTMKRANGEKYAYFSCYGYSKGKCDKPHGVSSLVIEKEVLKALEEALGSNSIVYEMREIRPQELSNERTLISERLASLKGKEDRIRASYREGIDTLEEYKENKALIAKERDSLERQLAELEENTPDKIPDDPTPKMLDKVSSVHDILVSDSYSLVQKNEALKQIIDKIVYDRESDTLKIHFFLYHS

SEQ ID NO: 6135 - protein, 495 aa, Unknown
  Description of Unknown: Integrase B6136 sequence
  PTHR30461:SF3,IPR036162,PS51737,IPR011109,PTHR30461, PS00397,PF00239,G3DSA:1.10.10.2600,IPR006119,SSF53041, cd00338,SM00857,IPR025827,IPR038109,PS51736, IPR006118,PF13408,G3DSA:3.40.50.1390,PF07508,Coil
MKDGALYIRVSTHMQDELSPDAQKRLLLDYAKQNDILVSHNHIFIENGVSGRKADKRPEFQKMISLAKTKPRPFDTILVWKYSRFARNQEESIVYKSLLRKQCGIDVISVSEPIIDGPFGSLIERIIEWMDEYYSTRLSGEVSRGMTEKALRGGYQARPPLGYKIVEKGKPPVIVPEEAKIVRIIFDKYVNEKRSFFDIARYLNKLGYKTSHGKPFETRSIDYIIQNPTYCGMIRWNRTENETNRIKDESEWVVTEGQHEPIISKELFDMAQERFKSTYTPKGARPSSTYKHWLSGLLKCSHCGRTMIAKTAKKKSDGSYYVYFSCYGYCKGKCLVSNSISSLKIEPAIIAALKEVLDTQELQFEYKFLQPIEVVDERKALDERLDALAIKEERIKLAYREGIDTIEEYRHNRDIIENERKEILEEIAGLPDNKQDDTHDNEIMMRKIKNVYEVISSPDYSNQQKNEMLRTIVDKFVFDKKNDRLDVYYYLAKTQ

SEQ ID NO: 6136 - protein, 495 aa, Unknown
  Description of Unknown: Integrase B6137 sequence
  PTHR30461:SF3,IPR036162,PS51737,IPR011109,PTHR30461, PS00397,PF00239,G3DSA:1.10.10.2600,IPR006119,SSF53041, cd00338,SM00857,IPR025827,IPR038109,PS51736, IPR006118,PF13408,G3DSA:3.40.50.1390,PF07508,Coil
MMSELRYAYGYIRVSTHDQEEISPDSQENLLREYATRNNIVILKIFSDLGISGRKAEKRPGFQEMVGLAKGSDHPVDLILVWKFSRFARNQEESIVYKSLLKKQHNVEVVSISEPLSDNPFGSLIERIIEWMDEYYSIRLSSEVFRGMKENATRGAYQARPPLGYKVVEHGKPPVIIPEEAEIVRMIFNWYANEGIGFFDIARRLNNLELKTSQGKPFERRSIEYIIQNPSYCGMIRWNRTENSTNRIKDKDEWIVTEGQQPAIITKELFEAAQKRFEATYRPSGKRPSSTYKHWLSGLLKCPACGRTLTAATMKRANGEKYSYFSCYGYHKGKCEKPHGISSLVLEKEVLACVKESLSSGNISYTLKERQPTEISNEKNILTSRLESLSGKEERIKASYREGIDTLEEYKANKSLLLKERIHLEEQLKELEDNAPKDAPDPAANMLLRVQGVYDILVSDSFTAAQKNEALKQIVDKIVYDREQDSLKIYYFLYQ

SEQ ID NO: 6137 - protein, 495 aa, Unknown
  Description of Unknown: Integrase B6138 sequence
  PTHR30461:SF3,IPR036162,PS51737,IPR011109,PTHR30461, PS00397,PF00239,G3DSA:1.10.10.2600,IPR006119,SSF53041, cd00338,SM00857,IPR025827,IPR038109,PS51736, IPR006118,PF13408,G3DSA:3.40.50.1390,PF07508,Coil
MKTGALYIRVSTHMQDELSPDAQKRLLLEYAKANDILVSSDYIFIETGISGRKVDKRPEFQKMISLAKTKPAPFDSILVWKFSRFARNQEESVVYKSLLRKQCNVDVISVSEPLIDGPFGSLIERIIEWMDEYYSIRLSGEVTRGMTEKALRGGYQARPPLGYKIAVKGEPPIIVPEEAKIVRIIFQKYVYEKQGYFDIARYLNSLGYKTSHGKSFEARSIDYIIQNPTYCGMIRWNRTENETNRIKDKDEWIITEGHHEPIISKELFDAAQDRYKSTYRPRGARPSSTYRHWLSGLLKCPHCGRTMIAKRVVKKSNGANYAYFTCYGYSKGKCLIPSNVSSLKLEPAVLSSLKEILDTKTLSFEYKVIEQTEQVDEKALLEEQLQQIALKEQRIKTAYREGIDTIEEYKHNREIIERERDEIQQKIYELESVDMDTSDDKAIMLKKIQNVYEVVSSSDYTDQQKNEMLKTIVDKYVYDKENDTLNAYYYLAKPQ

SEQ ID NO: 6138 - protein, 495 aa, Unknown
  Description of Unknown: Integrase B6139 sequence
  PTHR30461:SF3,IPR036162,PS51737,IPR011109,PTHR30461, PS00397,PF00239,G3DSA:1.10.10.2600,IPR006119,SSF53041, cd00338,SM00857,IPR025827,IPR038109,PS51736, IPR006118,PF13408,G3DSA:3.40.50.1390,PF07508,Coil
MSLKYAYGYIRVSTHDQEEISPDSQEHLLRDYAVKNNIVILKIFTDLGISGRKADKRPGFQEMIGLAKGPDHPVDCILVWKFSRFARNQEESIVYKSLLKKQHNVDVISISEPLADGPFGSLIERIIEWMDEYYSIRLSGEVFRGMKENATRGAYQARPPLGYKVVERGKPPVIVPEEAAIVRMIFDKYVNGKMSFFDIARYLNSLGLKTSHGKAFERRSIEYIIQNPSYCGMIRWNRIENATNRIKDQDEWIIAAGMQEAIISKELFDAAQERLKKIYKPVGKRPSSTYKHWLSGLLKCPVCGRTLTATTMKRANGEKYAYFSCYGYSKGKCDKPHGVSSLVIEKEVLKALEEALGSNSIVYEMREIRPQELSNERTLISERLASLKGKEDRIRASYREGIDTLEEYKENKALIAKERDSLERQLAELEENTPDKIPDDPTPKMLDRVSSVHDILVSDSYSLVQKNEALKQIIDKIVYDRESDSLKIHFFLYHS

SEQ ID NO: 6139 - protein, 495 aa, Unknown
  Description of Unknown: Integrase B6140 sequence
  PTHR30461:SF3,IPR036162,PS51737,IPR011109,PTHR30461, PS00397,PF00239,G3DSA:1.10.10.2600,IPR006119,SSF53041, cd00338,SM00857,IPR025827,IPR038109,PS51736, IPR006118,PF13408,G3DSA:3.40.50.1390,PF07508,Coil
MSLKYAYGYIRVSTHDQEEISPDSQEHLLRDYAAKNNIVILKIFTDLGISGRKADKRPSFQEMIGLAKGPDHPVDCILVWKFSRFARNQEESIVYKSLLKKQHNVDVISISEPLADGPFGSLIERIIEWMDEYYSIRLSGEVFRGMKENATRGAYQARPPLGYKVIERGKPPVIIPEEAAIVRIIFDKYVNGKMSFFDIARHLNSLGLKTSHGKAFERRSIEYIIQNPSYCGMIRWNRMENATNRIKDQDEWIIADGMQEAIISKELFDAAQERLKKIYKPVGKRPSSTYKHWLSGLLKCPVCGRTLTATTMERANGEKYVYFSCYGYSKGKCDKPHGVSSLVIEKEVLKALEEALGSNSIVYEMREIRPQELSNERTLISERLTSLKGKEDRIRASYREGIDTLEEYKENKALIAKERDSLERQLAELEENTPDKIPDDPTPKMLDRVSSVHDILVSDSYSLVQKNEALKQIIDKIVYDRESDTLKIHFFLYHS

SEQ ID NO: 6140 - protein, 495 aa, Unknown
  Description of Unknown: Integrase B6141 sequence
  PTHR30461:SF3,IPR036162,PS51737,IPR011109,PTHR30461, PS00397,PF00239,G3DSA:1.10.10.2600,IPR006119,SSF53041, cd00338,SM00857,IPR025827,IPR038109,PS51736, IPR006118,PF13408,G3DSA:3.40.50.1390,PF07508,Coil
MSVKYAYGYIRVSTHDQEEISPDSQEHLLRDYAAKNNIVILKIFTDLGISGRKADKRPGFQEMIGLAKGPDHPVDCILVWKFSRFARNQEESIVYKSLLKKQHNVDVISISEPLADGPFGSLIERIIEWMDEYYSIRLSGEVFRGMKENATRGAYQARPPLGYKVIERGKPPVIVPEEAAIVRMIFDKYVNGKMNFFDIARYLNSLGLKTSHGKAFERRSIEYIIQNPSYCGMIRWNRMENATNRIKDQDEWIIADGMQEAIISKELFDAAQERLKKIYKPVGKRPSSTYKHWLSGLLKCPVCGRTLTATTMKRANEEKYAYFSCYGYSKGKCDKPHGVSSLVIEKEVLKALEEALGSNSIVYEMREIRPQELSNECTLISERLASLKGKEDRIRASYREGIDTLEEYKENKALIAKERDALEQQLAELEENAPDKTPEDPTPKMLDRVSSVHDILVSDSYSLVQKNEALKQIIDKIVYDRESDTLKIHFFLYHS

SEQ ID NO: 6141 - protein, 495 aa, Unknown
  Description of Unknown: Integrase B6142 sequence
  PTHR30461:SF3,IPR036162,PS51737,IPR011109,PTHR30461, PS00397,PF00239,G3DSA:1.10.10.2600,IPR006119,SSF53041, cd00338,SM00857,IPR025827,IPR038109,PS51736, IPR006118,PF13408,G3DSA:3.40.50.1390,PF07508,Coil
MMSELRYAYGYIRVSTHDQEEISPDSQENLLREYAARNNIVILKIFSDLGISGRKAQKRPGFQEMVGLAKGSDHPVDLILVWKFSRFARNQEESIVYKSLLKKQHNVEVVSISEPLSDNPFGSLIERIIEWMDEYYSIRLSGEVFRGMKENATRGAYQARPPLGYKVVEHGKPPVIVPEEAEIVRMIFNWYVNEGLGFFDVARRLNNLGLKTSQGKPFERRSIEYIIQNPSYCGMIRWNRTENSTNRIKDKDEWIVTEGQQPAIITKELFDAAQKRFETTYRPSGKRPSSTYKHWLSGLLKCPACGRTLTAATMKRANGEKYSYFSCYGYHKGKCEKPHGISSLVLEKEVLACVKESLSSGNISYTLKERQPIEVSNEKNILTSRLESLSGKEERIKASYREGIDTLEEYKANKALLQKERIHLEEQLKELEDHAPKDTPDPAANMMLRVQGVYDILVSDSFTAAQKNEALKQIVDKIVYNREQDSLKIYYFLYQ

SEQ ID NO: 6142 - protein, 495 aa, Unknown
  Description of Unknown: Integrase B6143 sequence
  PTHR30461:SF3,IPR036162,PS51737,IPR011109,PTHR30461, PS00397,PF00239,G3DSA:1.10.10.2600,IPR006119,SSF53041, cd00338,SM00857,IPR025827,IPR038109,PS51736, IPR006118,PF13408,G3DSA:3.40.50.1390,PF07508,Coil
MSLKYAYGYIRVSTHDQEEISPDSQEHLLRDYAAKNNIVILKIFTDLGISGRKADKRPGFQEMIGLAKGPDHPVDCILVWKFSRFARNQEESIVYKSLLKKQHNVDVISISEPLADGPFGSLIERIIEWMDEYYSIRLSGEVFRGMKENATRGAYQARPPLGYKVIERGKPPVIVPEEAAIVRMIFDKYVNGKMNFFDIARYLNSLGLKTSHGKAFERRSIEYIIQNPSYCGMIRWNRMENATNRIKDQDEWIIAAGMQEAIISKELFDAAQERLKKIYKPVGKRPSSTYKHWLSGLLKCPVCGRTLTATTMKRANGEKYAYFSCYGYSKGKCDKPHGVSSLVIEKEVLKALEEALGSNSIVYEMREIRPQELSNERTLISERLASLKGKEDRIRASYREGIDTLEEYKENKALIAKERDSLERQLAELEENTPDKIPDDPTPKMLDRVSSVHDILFSDSYSLVQKNEALKQIIDKIVYDRESDTLKIHFFLYHS

SEQ ID NO: 6143 - protein, 495 aa, Unknown
  Description of Unknown: Integrase B6144 sequence
  PTHR30461:SF3,IPR036162,PS51737,IPR011109,PTHR30461, PS00397,PF00239,G3DSA:1.10.10.2600,IPR006119,SSF53041, cd00338,SM00857,IPR025827,IPR038109,PS51736, IPR006118,PF13408,G3DSA:3.40.50.1390,PF07508,Coil
MMSELRYAYGYIRVSTHDQEEISPDSQENLLREYAARNNIVILKIFSDLGISGRKAEKRPGFQEMVGLAKGSDHPVDLILVWKFSRFARNQEESIVYKSLLKKQHNVEVVSISEPLSDNPFGSLIERIIEWMDEYYSIRLSGEVFRGMKENATRGAYQARPPLGYKVVEHGKPPVIIPEEAEIVRMIFNWYANEGIGFFDIARRLNNLGLKTSQGKPFERRSIEYIIQNPSYCGMIRWNRTENSTNRIKDKDEWIVTEGQQPSIITKELFDAAQKRFETTYRPSGKRPSSTYKHWLSGLLKCPACGRTLTAATMKRANGEKYSYFSCYGYHKGKCEKPHGISSLVLEKEVLACVKESLSSGNISYTLKERQPIEASNEKNILTSRLESLSGKEERIKASYREGIDTLEEYKANKALLQKERIHLEEQLKELEDNAPKDTPDPAANMLLRVQGVYDILVSDSFTAAQKNEALKQIVDKIIYDREQDSLKIYYFLYQ

SEQ ID NO: 6144 - protein, 495 aa, Unknown
  Description of Unknown: Integrase B6145 sequence
  PTHR30461:SF3,IPR036162,PS51737,IPR011109,PTHR30461, PS00397,PF00239,G3DSA:1.10.10.2600,IPR006119,SSF53041, cd00338,SM00857,IPR025827,IPR038109,PS51736, IPR006118,PF13408,G3DSA:3.40.50.1390,PF07508,Coil
MMSELRYAYGYIRVSTHDQEEISPDSQENLLREYATRNNIVILKIFSDLGISGRKAEKRPGFQEMVGLAKGSDHPVDLILVWKFSRFARNQEESIVYKSLLKKQHNVEVVSISEPLSDNPFGSLIERIIEWMDEYYSIRLSGEVFRGMKENATRGAYQARPPLGYKVVEHGKPPVIIPEEAEIVRMIFNWYANEGIGFFDIARRLNNLGLKTSQGKPFERRSIEYIIQNPSYCGMIRWNRTENSTNRIKDKDEWIVTEGQQPAIITKELFDAAQKRFETTYSPSGKRPSSTYKHWLSGLLKCPACGRTLTAATMKRANGEKYSYFSCYGYHKGKCEKPHGISSLVLEKEVLACVKESLSSGNISYTLKERQPIEVSNEKNILTSRLESLSGKEERIKASYREGIDTLEEYKANKALLQKERIHLEEQLKELEDNAPKDTPDPAANMLLRVQGVYDILVSDSFTAAQKNEALKQIVDKIVYEREQDSLKIYYFLYQ

SEQ ID NO: 6145 - protein, 495 aa, Unknown
  Description of Unknown: Integrase B6146 sequence
  PTHR30461:SF3,IPR036162,PS51737,IPR011109,PTHR30461, PS00397,PF00239,G3DSA:1.10.10.2600,IPR006119,SSF53041, cd00338,SM00857,IPR025827,IPR038109,PS51736, IPR006118,PF13408,G3DSA:3.40.50.1390,PF07508,Coil
MSLKYAYGYIRVSTHDQEEISPDSQEHLLRDYATKNNIVILKIFTDLGISGRKADKRPGFQEMIGLAKGPDHPVDCILVWKFSRFARNQEESIVYKSLLKKQHNVDVISISEPLADGPFGSLIERIIEWMDEYYSIRLSGEVFRGMKENATRGAYQARPPLGYKVIERGKPPVIVPEEAAIVRMIFDKYVNGKMNFFDIARYLNSLGLKTSHGKAFERRSIEYIIQNPSYCGMIRWNRMENATNRIKDQDEWIIADGMQEAIISKELFDAAQERLKKIYKPVGKRPSSTYKHWLSGLLKCPVCGRTLTATTMKRANGEKYAYFSCYGYSKGKCDKPHGVSSLMIEKEVLKALEEALGSNSIVYEMREIRPQELSNERTLISERLASLKGKEDRIRASYREGIDTLEEYKENKTLIAKERDSLERQLAELEENAPDKIPDDPTPKMLDRVSSVHDILVSDSYSLVQKNEALKQIIDKIVYDRESDTLKIHFFLYHS

SEQ ID NO: 6146 - protein, 494 aa, Unknown
  Description of Unknown: Integrase B6147 sequence
  PTHR30461:SF3,SM00857,G3DSA:1.10.10.2600,IPR036162,PF13408, IPR025827,G3DSA:3.40.50.1390,PS51737,IPR006119,IPR038109, PF07508,SSF53041,IPR011109,PF00239,PTHR30461, PS51736,Coil,cd00338
MNRYGKRCVLYPRVSTEMQVDGYSLEGQKNMLTRFADREEMIIVDTYEDAGKSGKSIEGRPAFQKMLRDIEDGLDIDYILVYKLSRFGRNAADILNSLELVQSYGVNLICIEEGIDSSQTSGKLLISVLSAVAEIERENIIEQTMNGRREKARQGGWNGGFAPYGYTLEDNKLMIEETEAVAIRKIFELYTSSEIGLGGIANQLNLQGIRKIPRQNGTLEDWTGHFIKLILDNPVYCGKIAYGRRTKEKVKGTKNDYQIKRNDDYILTEGQHKGIVSEEVWEKAHAKRLRTGVKQPSKIGRDRVHLLSGLLKCPVCGSPMYTNKHAWTNKDGTYKEIYYYVCSRNRMVRGKHCEYKAMLKKTDIEPMVIEAIREIVRNEEYAQAIKKRIGVQIDTKAVDKELEGYQAKLKEVDLNKTRLEREIDSLPADAKYRERKLHDMTLRLDSLYDVIVELEEKIEDARLRRDAIKQQAITLENIYKIMVNFDCVYMIETC

SEQ ID NO: 6147 - protein, 494 aa, Unknown
  Description of Unknown: Integrase B6148 sequence
  PTHR30461:SF3,IPR036162,PS51737,IPR011109,PTHR30461, PS00397,PF00239,G3DSA:1.10.10.2600,IPR006119,SSF53041, cd00338,SM00857,IPR025827,IPR038109,PS51736, IPR006118,PF13408,G3DSA:3.40.50.1390,PF07508,Coil
MSELRYAYGYIRVSTHDQEEISPDSQENLLREYATRNNIVILKIFSDLGISGRKAEKRPGFQEMVGLAKGSDHPVDLILVWKFSRFARNQEESIVYKSLLKKQHNVEVVSISEPLSDNPFGSLIERIIEWMDEYYSIRLSGEVFRGMKENATRGAYQARPPLGYKVVEHGKPPMIVPEEAEIIRMIFNWYANEGIGFFDIARRLNNLGLKTSQGKPFERRSIEYIIQNPSYCGMIRWNRTENSTNRIKDKDEWIVTEGQQPAIITKELFDAAQKRFETTYRPSGKRPSSTYKHWLSGLLKCPACGRTLTAATMKRANGEKYSYFSCYGYHKGKCKKPHGISSLVLEKEVLACVKESLSSGNISYTLKERQPIEVSNEKNILTSRLESLSGKEERIKASYREGIDTLEEYKANKALLQKERIHLEEQLKELEDNAPKDTPDPAANMLLRVQGVYDILVSDSFTAAQKNEALKQIVDKIVYDREQDSLKIYYFLYQ

SEQ ID NO: 6148 - protein, 494 aa, Unknown
  Description of Unknown: Integrase B6149 sequence
  IPR036162,PS51737,IPR011109,PTHR30461,PS00397, PF00239,G3DSA:1.10.10.2600,IPR006119,SSF53041,cd00338, SM00857,IPR025827,IPR038109,PS51736,IPR006118, PF13408,G3DSA:3.40.50.1390,PF07508,Coil
MKQLKEVCAYIRVSTGKQEELSPDSQLRLIKEYAQAHDMLLTHVYMEEHGISGKSSEKRPAFQEMIAACKDKSHPYDAVLLWKFSRFARNQDEATYYKSILRKKCNVDVISISEPIIEGMYGRLIEMVIEWSDEFYLVNLSGEVMRGMTQNALNGGYNSNPPIGYTKKRGEIPQVDPERAELVRRIFRMFTQQHMSRNDIASTLNRQGITTNRGGRWETRTVTYILENPFYIGKIRWNFYDRSQNRRKDTGDVILSDGQHEPIISADTFAAAGRLLAKARTTSSFGRKRSVVATKHWLSSMVLCSSCGASLGYNKGGQKKHAAPFFQCWKHIKGMCDHNSYISAAALEQMVMDAIIHFGQSFDLMYHFSDAPQADDTIYLTGELSKLSEKERRIKDAYISGIDSLEEYRENKALLQKKRDELEQQLADTHKVTPIKERYQQIDMNHLLTVLQDPDQDYIVKGNSLRKVFDHFVYDKEAGTLDCFLNTSIEKISK

SEQ ID NO: 6149 - protein, 494 aa, Unknown
  Description of Unknown: Integrase B6150 sequence
  PTHR30461:SF3,IPR036162,PS51737,IPR011109,PTHR30461, PS00397,PF00239,G3DSA:1.10.10.2600,IPR006119,SSF53041, cd00338,SM00857,IPR025827,IPR038109,PS51736, IPR006118,PF13408,G3DSA:3.40.50.1390,PF07508,Coil
MKIGALYVRVSTHNQDELSPDAQIRLGKDFAKRNDIVIPKEYIFMESVSGRKAEKRHDFQRMVGLAKSKPRPFDVIIVWKYSRFARNQEESIVYKSLLRKQCGIDVLSVSEPRVEGPFGSLIERIIEWMDEYYSIRLSGEVTRGMTEKALRGGFQARPPLGYKITERGKPPVIVPEEAKIIRLIFQKYVEEQCGFFDIAKFLNRLGYKTSRNEPFERRSIEYIIQNPTYCGMIRWNRTTNETNEIKDESEWIIADGQHEAIISKELFDRAQERFKTTYKPKGARPSSTYHHWLSGLLKCPVCGRTMVAKTMYRKSNGEAYSYFVCYGVSKGKCAAKNSVSSLVLEPAIIRALQDVFQTREIEYTEIKPAAVHETIDERELLMDQLKQLDQKEKRIKEAYRDGIDTLEEYKDNKEYIRIERERLEIQLNDCQPAPADDTARKEQLLNKIHTVCDVISSEKFTDQQKNEALKSIIQKIIYDKPADSLKIYYYLTEP

SEQ ID NO: 6150 - protein, 494 aa, Unknown
  Description of Unknown: Integrase B6151 sequence
  PTHR30461:SF3,SM00857,G3DSA:1.10.10.2600,IPR036162,PF13408, PS51737,G3DSA:3.40.50.1390,IPR025827,IPR006119,IPR038109, PF07508,IPR011109,SSF53041,PTHR30461,Coil, PS51736,cd00338,PF00239
MPEALNAVIYARYSSDRQTEQSIEGQLRECYAFAKANDIAVIDTYIDRAISGKTDNRPAFQKMIEDSAKRQFQAVIVYRLDRFTRNRYDSAIYKARLKKNGVKVLSAMENLNGSPESIIMESLLEGMAEYYSVELSQKITRGMRENALKGKALGGQRVLGYKVNSDCYFEIDETTAPVVVDIFKLYSSGKTVKEICDILNARGVKTARGGAFNKNSLHTILTNKKYIGIYKTKYGEIVGGIPAIIDKELFEMVALRMEQNKKAPARVKAEINYLLSTKLFCGKCRSAMVGESGTSKTGKKYYYYACVKKKREKACDKSNVKKDWIEDLVIQRTVTDILKDDVIENIADRLVELQKAEAAESGTMLYLENSLAEIQVSIKNIMTAIEKGIITESTKTRLTELEDEKRNVEIEIAKESIARRIISREQIIYWISSFKDGDITSEKYRQQLIDTFVHAVFVYDDKIVITYNYSGENNTATISDLDLSSPPFGPYSNT

SEQ ID NO: 6151 - protein, 494 aa, Unknown
  Description of Unknown: Integrase B6152 sequence
  PTHR30461:SF3,cd00338,SM00857,G3DSA:1.10.10.2600,IPR036162, PF13408,PS51737,G3DSA:3.40.50.1390,IPR025827,IPR006119, IPR038109,PF07508,IPR011109,SSF53041,PTHR30461, PS51736,Coil,PF00239
MQDIIYGALYIRVSTHGKQEELSPDAQKRLLLKYAKENGIIVLEQHIYEEKGISGRKADRRPQFQEMISAAKSNPSPFQVILVWKYSRFARNQEESIVYKSLLRKKCSVDVISVSEPLVDGPFGSLIERIIEWMDEYYSIRLSGEVFRGMSEKAMKGGYQSRPPLGYRIEHKGCPPVIVPEEAEIVKYIFDKYVNEHAGIFDIARNVNALGAKTSHGKSFERRSIEYILKNPTYCGMIRWNMTDNTTKEIKNKSEWIIAEGTHPAIISKEVFQAAQKRFEKEYIPSGRRPSSTCKHWLSGVMKCPACGRTMVVSVTKTRTGHSYPYFVCYGYSKGKCAAKTAVSAKKIEPYVLDGIKTATQGELSFAIKETNPVESSPELQILEEQIGKIDIKERRIKEAYMNGIDTMEEYKENKAILAQERKILESKLSFLQKKPVTKEEVMPKLQQRIRNVYDIITNDDFSISQKNDAVKSIIEKIVFNKETDTAEIYYYYL

SEQ ID NO: 6152 - protein, 494 aa, Unknown
  Description of Unknown: Integrase B6153 sequence
  PTHR30461:SF3,IPR036162,PS51737,IPR011109,PTHR30461, PS00397,PF00239,G3DSA:1.10.10.2600,IPR006119,SSF53041, SM00857,IPR025827,IPR038109,PS51736,cd03768, IPR006118,PF13408,G3DSA:3.40.50.1390,PF07508,Coil
MRVVGYARVSTREQADHGYSIGEQNSRLRAYCQAKDWTLLRVIEDPGFSGAKMQRPGLQQVLEMVRRRECDAVLVWKLDRLSRSQKDTLYLLEDVFLANGCGFVSMLENFDTSTAFGRAMVGILSVFAQLEREQFKERSAIGRVGRAKAGLFHGGGYAPIGYDYYTKEDGGQGLVVNEYEAMQVREVYRLYLAGWAVHKIQVYMHERYTTKNGCWASDTTVRSVLSSPIYLGRITWAGKTYEGQHEALISQNDFDQVAARRESLKWQPAEPRAACDLIKNSPFRSTHILGGITWCARCGARYFASGNYSGRGENRKYWPYYTCYSVAKSSKKMIKDPNCKNKRWAVGKLDAIILAEISRLEFDPAALAKAAGPVDVSGVEEKRRVLEARVAEVRPQMERLLDLCQTGGLPVASVSGRLAALQKELDALNGELSGLAVPETVDRLAVAQEMLAGASAVIKNGTPEQKRALVHSLIGRIDIDGEDITIHWLFAPEN

SEQ ID NO: 6153 - protein, 494 aa, Unknown
  Description of Unknown: Integrase B6154 sequence
  PTHR30461:SF3,IPR036162,PS51737,IPR011109,PTHR30461, PS00397,PF00239,G3DSA:1.10.10.2600,IPR006119,SSF53041, SM00857,IPR025827,IPR038109,PS51736,cd03768, IPR006118,PF13408,G3DSA:3.40.50.1390,PF07508,Coil
MRVVGYARVSTREQADHGYSIGEQNSRLRAYCQAKDWTLLRVIEDPGFSGAKMQRPGLQQVLEMVRRRECDAVLVWKLDRLSRSQKDTLYLLEDVFLANGCGFVSMLENFDTSTAFGRAMVGILSVFAQLEREQFKERSAIGRVGRAKAGLFHGGGYAPIGYDYYTKEDGGQGLVVNEYEAMQVREVYRLYLAGWAVHKIQVYMHERYTTKNGCWASDTTVRSVLSSPIYLGRITWAGKTYEGQHEALVSQNDFDQVAARRESLKWQPAEPRAACDLIKNSPFRSTHILGGITWCARCGARYFASGNYSGRGENRKYWPYYTCYSVAKSSKKMIKDPNCKNKRWAVGKLDAIILAEISRLEFDPAALAKAAGPVDVSGVEEKRRVLEARVAEVRPQMERLLDLCQTGGLPVASVSGRLAALQKELDALKGELSGLAVPETVDRLAVAQEMLAGASAVIENGTPEQKRALVHSLIGRIDIDGEDITIHWLFAPGN

SEQ ID NO: 6154 - protein, 494 aa, Unknown
  Description of Unknown: Integrase B6155 sequence
  cd03768,PTHR30461:SF3,SM00857,G3DSA:1.10.10.2600,IPR036162, PF13408,IPR025827,G3DSA:3.40.50.1390,PS51737,IPR006119, IPR038109,PF07508,IPR011109,SSF53041,PTHR30461, PS51736,Coil,PF00239
MLRIAIYTRKSVFKENSESIDTQIELSKKYFQGSHHFEVFIDEGFSGGNTNRPAFKKMMNMIKLRKFDIVATYKIDRISRNIVDFVGIYEDLKNNNVKLVSITEGFDTTTVMGEMMMFILSAFANMERENIKERVKDNMIALAKKGCFTGGFVPFGCEIEKKEGKSYLTITDEKTIQLIFNKYLELKSLYALKKYLLDNKINSLSTRSSLGRLLRNPIYCKSNSKVSNYFESKGYEVVGSPNKKGYMTYGKTSNYPTLIVGKHKACIEADIFLKVNILLDENKEVATKKESKTYWLTEVLYCPYCNSKYVLVNSGRNAYYVCQNRLNRGSNELGIDKEKEKCINSRYLNANLIEEKISYLIRELEDDNYYNYFKKDNVDTNKEEIEVLENVLSKNKAAIGNLVEKLMILSNEASIPVTRKIEELTTKNLELENKIYELKTIELAEIKSKEENEIKSAIKRFKDLKSNKEKRENVRIIFKKLKYDPYKDSINIEF

SEQ ID NO: 6155 - protein, 494 aa, Unknown
  Description of Unknown: Integrase B6156 sequence
  IPR036162,PS51737,IPR011109,PTHR30461,PS00397, PF00239,G3DSA:1.10.10.2600,IPR006119,SSF53041,cd00338, SM00857,IPR025827,IPR038109,PS51736,IPR006118, PF13408,G3DSA:3.40.50.1390,PF07508,Coil
MKQLKEVCAYIRVSTGKQEELSPDSQLRLIKEYAQAHDMLLTHVYMEEHGISGKSSEKRPAFQEMIAACKDKSHPYDAVLLWKFSRFARNQDEATYYKSILRKKCNVDVISISEPIIEGMYGRLIEMVIEWSDEFYLVNLSGEVMRGMTQNALNGGYNSNPPIGYTKKRGEIPQIDPERAELVRRIFRMFTQQHMSRNDIASTLNRQGITTNRGGRWETRTVTYILENPFYIGKIRWNFYDRNQNRRKDTGDVILSDGQHEPIISADTFAAAGRLLAKARTTSSFGRKRSVVATKHWLSSMVLCSSCGASLGYNKGGQKKHAAPFFQCWKHIKGMCDHNSYISAAALEQMVMDAIIHFGQSFDLMYHFSDAPQADDAVYLTGELSKLSEKERRIKDAYISGIDSLEEYRENKALLQKKRDELEQQLADTHKVTPIKERYQQIDMNHLLTVLQDPDQDYIVKGNSLRKVFDHFVYDKEAGTLDCFLNTSIEKISK

SEQ ID NO: 6156 - protein, 494 aa, Unknown
  Description of Unknown: Integrase B6157 sequence
  PTHR30461:SF3,IPR036162,PS51737,IPR011109,PTHR30461, PS00397,PF00239,G3DSA:1.10.10.2600,IPR006119,SSF53041, SM00857,IPR025827,IPR038109,PS51736,cd03768, IPR006118,PF13408,G3DSA:3.40.50.1390,PF07508,Coil
MRVVGYARVSTREQADHGYSIGEQNSRLRAYCQAKDWTLLRVIEDPGFSGAKMQRPGLQQVLEMVRRRECDAVLVWKLDRLSRSQKDTLYLLEDVFLANGCGFVSMLENFDTSTAFGRAMVGILSVFAQLEREQFKERSAIGRVGRAKAGLFHGGGYAPIGYDYYTKEDGGQGLVVNEYEAMQVREVYRLYLAGWAVHKIQVYMHERYTTKNGCWASDTTVRSVLSSPIYLGRITWAGKTYEGQHEALVSQNDFDQVAARRESLKWQPAEPRAACDLIKNSPFRSTHILGGITWCARCGARYFASGNYSGRGENRKYWPYYTCYSVAKSSKKMIKDPNCKNKRWAVGKLDAIILAEISRLEFDPAALAKAAGPVDVSGVEEKRRVLEARVAEVRPQMERLLDLCQTGGLPVASVSGRLAALQKELDALNGELSGLAVPETVDRLAVAQEMLAGASAVIENGTPEQKRALVHSLIGRIDIDGEDITIHWLFAPGN

SEQ ID NO: 6157 - protein, 494 aa, Unknown
  Description of Unknown: Integrase B6158 sequence
  cd03768,PTHR30461:SF3,SM00857,G3DSA:1.10.10.2600,IPR036162, PF13408,IPR025827,PS51737,G3DSA:3.40.50.1390,IPR006119, IPR038109,PF07508,IPR011109,SSF53041,PTHR30461, PS51736,Coil,PF00239
MVAIYARQSIDKKDSISIESQIAFAKREIFSEECKIYADSGYSGKNTNRPAFTEMMHDIQTGQIEKVVVYRLDRISRSIVDFADFIDVLENNGISFVSATEKFDTSTPMGRAMLYIIVVFAQLERETIAERVRDNYYARVKKGAWGGGPAAYGFDLVRTTLDGKKATIYESNADLEIVSQIFDTYAQPYTSLADVQKVLIRSGALSAGGVNFDSVKLSGILKNPAYVQADIAIYNYYKSKGAIMANEPEDFDGTHGCILVGKRDASERKYKDVSNHLLAIGHHNGIVDSSTFLYCQEKLSKNRQIKNTGKGKHSWLTGLVKCGHCGYAFSVRFGQTKEGPIPYFVCSGKYLHKCCDVKQTHRVREIEAQVQARLIQEAEAYHLAREKRENNVIKQHQQKIADIDSKIENLISTLENVSQISAEYINRRIETLHRKKQLLIHQYSEALTEFNAVEIIPFTAEDWENMSFEDRRDIAKSMIDRVVLSEDGVDVRFK

SEQ ID NO: 6158 - protein, 494 aa, Unknown
  Description of Unknown: Integrase B6159 sequence
  cd03768,PTHR30461:SF3,SM00857,G3DSA:1.10.10.2600,IPR036162, PF13408,IPR025827,G3DSA:3.40.50.1390,PS51737,IPR006119, IPR038109,PF07508,IPR011109,SSF53041,PTHR30461, PS51736,Coil,PF00239
MLRIAIYTRKSVFKENSESIDTQIELSKKYFQGSHHFEVFIDEGFSGGNTNRPAFKKMMNMIKLRKFDIVATYKIDRISRNIVDFVGIYEDLKNNNVKLVSITEGFDTTTVMGEMMMFILSAFANMERENIKERVKDNMIALAKKGCFTGGFVPFGCEIEKKEGKSYLTITDEKTIQLIFNKYLELKSLYALKKYLLDNKINSLSTRSSLGRLLRNPIYCKSNSKVSNYFESKGYEVVGSPNKKGYMTYGKTSNYPTLIVGKHKACIEADIFLKVNILLDENKEVATKKESKTYWLTEVLYCPYCNSKYVLVNSGRNAYYVCQNRLNRGSNELGIDKEKEKCINSRYLNANLIEEKISYLIRELEDDNYYNYFKKDNVDTNKEEIEVLENVLSKNKAAIGNLVEKLMILSNEASIPVTRKIEELTTKNLELENKIYEFKTIELAEIKSKEENEIKSAIKRFKDLKSNKEKRENVRIIFKKLKYDPYKDSINIEF

SEQ ID NO: 6159 - protein, 494 aa, Unknown
  Description of Unknown: Integrase B6160 sequence
  cd00338,SM00857,G3DSA:1.10.10.2600,IPR036162,PF13408, PS51737,G3DSA:3.40.50.1390,IPR025827,IPR006119,IPR038109, PF07508,IPR011109,SSF53041,PTHR30461,PS51736, Coil,PF00239
MAKGNRAAIYARFSSHNQRDESIEIQVDKSREFCDESSLAVVRVYSDYAKTGKNTNRAEFQAMLKDAQKGLFDYVVIYKVTRIMRNRDEMALARIMLRKAGVEILYAGESLGEGSTKVLHLGMLEVLAEYESAVDSERIRDGIQKNAQRGMASGQRLYGWDVVNDRFVVNEREAAVMHKMKNMLFSGSTIADIQRAIRTERTRRGKAFSQSTIKRLLSREQNCGVYKYAGVRTTNGMPALWSRQEQDEIASILNGRGHKHRVVDGEQPYALSGKMYCRECGRWFVGTSGTGKSGKTYYYYRCPKCRRTFRRDIIEDAVSDTILESIHDPKVRERIIATLEMMIAETAEDDAPKESERITAEIKRIDAAFERIWHAIEDGIAPPGGKDRVEELKARQAALKEELEKALEAESAEDLSLDDYLAWLDTLGAESDPFEIIDTFIQFIQIDGDEVQLFFSFDNWDDDFMPTKKDEPLMNKGSSNFHVVETRGIEPLTS

SEQ ID NO: 6160 - protein, 494 aa, Unknown
  Description of Unknown: Integrase B6161 sequence
  PTHR30461:SF3,IPR036162,PS51737,IPR011109,PTHR30461, PS00397,PF00239,G3DSA:1.10.10.2600,IPR006119,SSF53041, SM00857,IPR025827,IPR038109,PS51736,cd03768, IPR006118,PF13408,G3DSA:3.40.50.1390,PF07508,Coil
MRVVGYARVSTREQADHGYSIGEQNSRLRAYCQAKDWTLLRVIEDPGFSGAKMQRPGLQQVLEMVRRHECDAVLVWKLDRLSRSQKDTLYLLEDVFLANGCGFVSMLENFDTSTAFGRAMVGILSVFAQLEREQFKERSAIGRVGRAKAGLFHGGGYAPIGYDYYTKEDGGQGLVVNEYEAMQVREVYRLYLAGWAVHKIQVYMHERYTTKNGCWASDTTVRSVLSSPIYLGRITWAGKTYEGQHEALISQNDFDQVAARRESLKWQPAEPRAACDLIKNSPFRSTHILGGITWCARCGARYFASGNYSGRGENRKYWPYYTCYSVAKSSKKMIKDPNCKNKRWAVGKLDAIILAEISRLEFDPAALAKAAGPVDVSDVEEKRRVLEARVAEVRPQMERLLDLCQTGGLPVASVSGRLAALQKELDALNGELSGLAVPETVDRLAVAQEMLAGASAVIENGTPEQKRALVHSLIGRIDIDGEDITIHWLFAPEN

SEQ ID NO: 6161 - protein, 494 aa, Unknown
  Description of Unknown: Integrase B6162 sequence
  PTHR30461:SF3,IPR036162,PS51737,IPR011109,PTHR30461, PS00397,PF00239,G3DSA:1.10.10.2600,IPR006119,SSF53041, SM00857,IPR025827,IPR038109,PS51736,cd03768, IPR006118,PF13408,G3DSA:3.40.50.1390,PF07508,Coil
MRVVGYARVSTREQADHGYSIGEQSSRLRAYCQAKDWTLLRVIEDPGFSGAKMQRPGLQQVLEMVRRRECDAVLVWKLDRLSRSQKDTLYLLEDVFLANGCGFVSMLENFDTSTAFGRAMVGILSVFAQLEREQFKERSAIGRVGRAKAGLFHGGGYAPIGYDYYTKEDGGQGLVVNEYEAMQVREVYRLYLAGWAVHKIQVYMHERYTTKNGCWASDTTVRSVLSSPIYLGRITWAGKTYEGQHEALISQNDFDQVAARRESLKWQPAEPRAACDLIKNSPFRSTHILGGITWCARCGARYFASGNYSGRGENRKYWPYYTCYSVAKSSKKMIKDPNCKNKRWAVGKLDAIILAEISRLEFDPAALAKAAGPVDVSDVEEKRRVLEARVAEVRPQMERLLDLCQTGGLPVASVSGRLAALQKELDALNGELSGLAVPETVDRLAVAQEMLAGASAVIKNGTPEQKRALVHSLIGRIDIDGEDITIHWLFAPEN

SEQ ID NO: 6162 - protein, 494 aa, Unknown
  Description of Unknown: Integrase B6163 sequence
  PTHR30461:SF3,IPR036162,PS51737,IPR011109,PTHR30461, PS00397,PF00239,G3DSA:1.10.10.2600,IPR006119,SSF53041, cd00338,SM00857,IPR025827,IPR038109,PS51736, IPR006118,PF13408,G3DSA:3.40.50.1390,PF07508,Coil
METKYGYGYVRVSTDKQEELSPDSQAKLLKDFAHKNGIIISKIFYELGVSGRKAEKRPEFQKMIAMAKSSDHPVDAILVWKFSRFARNQEESIVYKSLLKKKHNVDVISVSEPLVDGPFGSLIERIIEWMDEYYSVRLSGEVTRGMTEKAKRGGYQARPPLGYRITERGKPPVIIEDEAEIVRIIFRKYAEEGMGIFDIARYLNLCGFKTSHGKNFERRSVEYILENPTYCGMIRWNRTVNETNEIRPKDEWIIVDGQQPSIISKELFDKASARRNMEYKPRGSRPSSTYKHWLSGLVKCPACGRTMIAKKTVSGKRTYCYFTCYGYSKGKCLAKNSISSLKLAPAVLQSLKDVLDSQQLSFRYIKPQDETTVDLSAVLLEQLKQIDGKLERIKEAYRNGVDTLEEYKENKLMVQKEQQLLEKQLAELPEEKSDQDLAESHMLERVRNVYEIVSSESVDDVTKNEILKSIIEKIVYNKEEDTLEVYYYYKPQTQ

SEQ ID NO: 6163 - protein, 494 aa, Unknown
  Description of Unknown: Integrase B6164 sequence
  PTHR30461:SF3,IPR036162,PS51737,IPR011109,PTHR30461, PS00397,PF00239,G3DSA:1.10.10.2600,IPR006119,SSF53041, cd00338,SM00857,IPR025827,IPR038109,PS51736, IPR006118,PF13408,G3DSA:3.40.50.1390,PF07508,Coil
MNEVRYAFAYIRVSTHDQEEISPDSQENLLREYATRNNIVILKIFSDLGISGRKAQKRPGFQEMVGLAKGSDHPVDLILVWKFSRFARNQEESIVYKSLLKKQHNVEVVSISEPLSDNPFGSLIERIIEWMDEYYSIRLSGEVFRGMKENATRGAYQARPPLGYKVVEHGKPPMIVPEEAEIIRMIFNWYANEGIGFFDIARRLNNLGLKTSQGKPFERRSIEYIIQNPSYCGMIRWNRTENSTNRIKDKDEWIVTEGQQPAIITKELFDAAQKRFETTYRPSGKRPSSTYKHWLSGLLKCPACGRTLTAATMKRANGEKYSYFSCYGYHKGKCEKPHGISSLVLEKEVLACVKESLSSGNISYTLKERQPIEVSNEKNILTSRLESLSGKEERIKASYREGIDTLEEYKANKALLQKERIHLEEQLKELEDNAPKDTPDPAANMLLRVQGVYDILVSDSFTTAQKNEALKQIVDKIVYDREQDSLKIYYFLYQ

SEQ ID NO: 6164 - protein, 494 aa, Unknown
  Description of Unknown: Integrase B6165 sequence
  IPR036162,PS51737,IPR011109,PTHR30461,PS00397, PF00239,G3DSA:1.10.10.2600,IPR006119,SSF53041,cd00338, SM00857,IPR025827,IPR038109,PS51736,IPR006118, PF13408,G3DSA:3.40.50.1390,PF07508,Coil
MKQLKEVCAYIRVSTGKQEELSPDSQLRLIKEYAQAHDMLLTHVYMEEHGISGKSSEKRPAFQEMIAACKDKSHPYDAVLLWKFSRFARNQDEATYYKSILRKKCNVDVISISEPIIEGMYGRLIEMVIEWSDEFYLVNLSGEVMRGMTQNALNGGYNSNPPIGYTKKRGEIPQVDPERAELVRRIFRMFTEQHMSRNDIASTLNRQGITTNRGGRWETRTVTYILENPFYIGKIRWNFYDRSQNRRKDTGDVILSDGQHEPIISADTFAAAGRLLAKARITSSFGRKRSVVATKHWLSSMVLCSSCGASLGYNKGSQKKHAAPFFQCWKHIKGMCDHNSYISAAALEQMVMDAIIHFGQSFDLMYHFSDAPQADDTVYLTRELSKLSEKERRIKDAYISGIDSLEEYRENKSLLQKKRDELEQQLADTHKVTPIKERYQQIDMNHLLTVLQDPDLDYIVKGNSLRKVFDHFVYDKEAGTLDCFLNTSIEKISK

SEQ ID NO: 6165 - protein, 494 aa, Unknown
  Description of Unknown: Integrase B6166 sequence
  IPR036162,PS51737,IPR011109,PTHR30461,PS00397, PF00239,G3DSA:1.10.10.2600,IPR006119,SSF53041,cd00338, SM00857,IPR025827,IPR038109,PS51736,IPR006118, PF13408,G3DSA:3.40.50.1390,PF07508,Coil
MKQLKEVCAYIRVSTGKQEELSPDSQLRLIKEYAQAHDMLLTHVYMEEHGISGKSSEKRPAFQEMIAACKDKSHPYDAVLLWKFSRFARNQDEATYYKSILRKKCNVDVISISEPIIEGMYGRLIEMVIEWSDEFYLVNLSGEVMRGMTQNALNGGYNSNPPIGYTKKRGEIPQVDPERAELVRRIFRMFTQQHMSRNDIASTLNRQGITTNRGGRWETRTVTYILENPFYIGKIRWNFYDRNQNRRKDTGDVILSDGQHEPIISADTFAAAGRLLAKARTTSSFGQKRSVVATKHWLSSMVLCSSCGASLGYNKGGQKKHAAPFFQCWKHIKGMCDHNSYISAAALEQMVMDAIIHFGQSFDLMYHFSDAPQADDAVYLTGELSKLSEKERRIKDAYISGIDSLEEYRENKALLQKKRDELEQQLADTHKVTPIKERYQQIDMNHLLTVLQDPDQDYIVKGNSLRKVFDHFVYDKEAGTLDCFLNTSIEKISK

SEQ ID NO: 6166 - protein, 494 aa, Unknown
  Description of Unknown: Integrase B6167 sequence
  PTHR30461:SF3,IPR036162,PS51737,IPR011109,PTHR30461, PS00397,PF00239,G3DSA:1.10.10.2600,IPR006119,SSF53041, SM00857,IPR025827,IPR038109,PS51736,cd03768, IPR006118,PF13408,G3DSA:3.40.50.1390,PF07508,Coil
MRVVGYARVSTREQADHGYSIGEQNSRLRAYCQAKDWTLLRVIEDPGFSGAKMQRPGLQQVLEMVRRRECDAVLVWKLDRLSRSQKDTLYLLEDVFLANGCGFVSMLENFDTSTAFGRAMVGILSVFAQLEREQFKERSAIGRVGRAKAGLFHGGGYAPIGYDYYTKEDGGQGLVVNEYEAMQVREVYRLYLAGWAVHKIQVYMHERYTTKNGCWASDTTVRSVLSSPIYLGRITWAGKTYEGQHKALVSQNDFDQVAARRESLKWQPAEPRAACDLIKNSPFRSTHILGGITWCARCGARYFASGNYSGRGENRKYWPYYTCYSVAKSSKKMIKDPNCKNKRWAVGKLDAIILAEISRLEFDPAALAKAAGPVDVSGVEEKRRVLEARVAEVRPQMERLLDLCQTGGLPVASVSGRLAALQKELDALNGELSGLAVPETVDRLAVAQEMLAGASAVIENGTPEQKRALVHSLIGRIDIDGEDITIHWLFAPEN

SEQ ID NO: 6167 - protein, 494 aa, Unknown
  Description of Unknown: Integrase B6168 sequence
  PTHR30461:SF3,IPR036162,PS51737,IPR011109,PTHR30461, PS00397,PF00239,G3DSA:1.10.10.2600,IPR006119,SSF53041, SM00857,IPR025827,IPR038109,PS51736,cd03768, IPR006118,PF13408,G3DSA:3.40.50.1390,PF07508,Coil
MRVVGYARVSTREQADHGYSIGEQNSRLRAYCQAKDWTLLRVIEDPGFSGAKMQRPGLQQVLEMVRRRECDAVLVWKLDRLSRSQKDTLYLLEDVFLANGCGFVSMLENFDTSTAFGRAMVGILSVFAQLEREQFKERSAIGRVGRAKAGLFHGGGYAPIGYDYYTKEDGGQGLVVNEYEAMQVREVYRLYLAGWAVHKIQVYMHERYTTKNGCWASDTTVRSVLSSPIYLGRITWAGKTYEGQHEALVSQNDFDQVAARRESLKWQPAEPRAACDLIKNSPFRSTHILGGITWCARCGARYFASGNYSGRGENRKYWPYYTCYSVAKSSKKMIKDPNCKNKRWAVGKLDAIILAEISRLEFDPAALAKAAGPVDVSGVEEKRRVLEARVAEVRPQMERLLDLCQTGGLPVASVSGRLAALQKELDALNGELSGLAVPETVDRLAVAQEMLAGASAVIENGTPEQKRALVHSLIGRIDIDGEDITIHWLFAPEN

SEQ ID NO: 6168 - protein, 494 aa, Unknown
  Description of Unknown: Integrase B6169 sequence
  PTHR30461:SF3,cd00338,SM00857,G3DSA:1.10.10.2600,IPR036162, PF13408,PS51737,G3DSA:3.40.50.1390,IPR025827,IPR006119, IPR038109,PF07508,SSF53041,IPR011109,PTHR30461, PS51736,Coil,PF00239
MKAVIYARYSSNNQTEQSIEGQLRVCNNYAQSHGITVVGTYIDRALSGRTDRRPEFQRMIVDAERASWDIVLVYKFDRFARSMYDDSRYKKHLQDYGKQVVSASEHIPTGAEGKLAEGMLVVFNQYYSEELAIKTRRGMKESAYKCQVTGNPPFGYYNGKDKKYHINDLEAAAVREIYTRYAAGDKVQDIINWLTDHGYKTRLGKQFNKNTISNMIRNPRYKGTYIYDDIIIEGGMPAIIEVKTWETAQRRLEMAKSGTSRRKDVYMLTGKAYCGECHEAMNGESGVGRNGTLYRYYKCSGRKKGTGCTAETVQKDVLEQTVINHTRSLFGNDKTAHKIAAEVARQLQDLRDNNTAAKAAAKALEDTNKGINNILAAIEQGIFTAATKDRLEELESKKVQLEETLEIESAKAPDLSAEDIQQIINNIVKKSKNDQALIDTFIYRVFVYDAHCVIVYLMPDFPPELVSYDDIQSILAGSGSPAGKDGEPITETDR

SEQ ID NO: 6169 - protein, 494 aa, Unknown
  Description of Unknown: Integrase B6170 sequence
  cd03768,PTHR30461:SF3,SM00857,G3DSA:1.10.10.2600,IPR036162, PF13408,PS51737,IPR025827,G3DSA:3.40.50.1390,IPR006119, IPR038109,PF07508,IPR011109,SSF53041,PTHR30461, PS51736,Coil,PF00239
MVAIYARQSIDKKDSISIESQIAFAKREIFSEECKIYEDSGYSGKNTNRPAFTEMMHDIQTGQIEKVVVYRLDRISRSIVDFADFIDILENNGISFVSATEKFDTSTPMGRAMLYIIVVFAQLERETIAERVRDNYYARVKKGAWGGGPAAYGYNLVRTTLDGKKATIYEPNADLEIVSQIFDTYAQPYTSLADVQKVLIRSGALSAGGVNFDSVKLSGILKNPAYVQADIAIYNYYKSKGAIMANEPEDFDGTHGCILVGKRDASERKYKDVSNHLLAIGHHNGIVDSNTFLYCQEKLSKNRQIKNTGKGKHSWLTGLVKCGHCGYAFSVRFGQTKEGPIPYFVCSGKYLHKCCDVKQTHRVREIEAQVQARLIQEAEAYHLAREKRENNVIKQHQQKIADIDSKIENLISTLENVSQISAEYINRRIETLHREKQLLIHQYSEALTEFNAVEIIPFTAEDWENMSFEDRRDIAKSMIDRVVLSEDGVDVRFK

SEQ ID NO: 6170 - protein, 494 aa, Unknown
  Description of Unknown: Integrase B6171 sequence
  PTHR30461:SF3,IPR036162,PS51737,IPR011109,PTHR30461, PS00397,PF00239,G3DSA:1.10.10.2600,IPR006119,SSF53041, SM00857,IPR025827,IPR038109,PS51736,cd03768, IPR006118,PF13408,G3DSA:3.40.50.1390,PF07508,Coil
MRVVGYARVSTREQADHGYSIGEQNSRLRAYCQAKDWTLLRVIEDPGFSGAKMQRPGLQQVLEMVRRRECDAVLVWKLDRLSRSQKDTLYLLEDVFLANGCGFVSMLENFDTSTAFGRAMVGILSVFAQLEREQFKERSAIGRVGRAKAGLFHGGGYAPIGYDYYTKEDGGQGLVVNEYEAMQVREVYRLYLAGWAVHKIQVYMHERYTTKNGCWASDTTVRSVLSSPIYLGRITWAGKTYEGQHEALVSQNDFDQVAARRESLKWQPAEPRAACDLIKNSPFRSTHILGGITWCARCGARYFASGNYSGRGENRKYWPYYTCYSVAKSSKKMIKDPNCKNKRWAVGKLDAIILAEISRLEFDPPALAKAAGPVDVSDVEEKRRVLEARVAEVRPQMERLLDLCQTGGLPVASVSGRLAALQKELDALNGELSCLAVPETVDRLAVAQEMLAGASAVIENGTPEQKRALVHSLIGRIDIDGEDITIHWLFAPEN

SEQ ID NO: 6171 - protein, 494 aa, Unknown
  Description of Unknown: Integrase B6172 sequence
  cd03768,PTHR30461:SF3,SM00857,G3DSA:1.10.10.2600,IPR036162, PF13408,IPR025827,G3DSA:3.40.50.1390,PS51737,IPR006119, IPR038109,PF07508,SSF53041,IPR011109,PTHR30461, PS51736,Coil,PF00239
MVAIYARQSIDKKDSISIESQIAFAKREIFSEECKIYEDSGYSGKNTNRPAFTEMMHDIQTGQIEKVVVYRLDRISRSIVDFADFIDVLENNGISFVSATEKFDTSTPMGRAMLYIIVVFAQLERETIAERVRDNYYARVKKGAWGGGPAAYGYNLVRTTLDGKKATIYEPNADLEIVSQIFDTYAQPYTSLADVQKVLIRSGALSAGGVNFDSVKLSGILKNPTYVQADIAIYNYYKSKGAIMANEPEDFDGTHGCILVGKRDASERKYKDVSNHLLAIGHHNGIVDSSTFLYCQEKLSKNRQIKNTGKGKHSWLTGLVKCGHCGYAFSVRFASTKDGRIPYFVCSGKYLHKCCDAKQTHRVREIEAQVQAWLIQEAEAYHLAREKRENNVIKQHQQKIADIDSKIENLISTLENVSQISAEYINRRIETLHREKQLLIHQYSESLTEFNAVEIIPFTAEDWENMSFEDRRDIVKSMIDRVVLSEDGVDVRFK

SEQ ID NO: 6172 - protein, 494 aa, Unknown
  Description of Unknown: Integrase B6173 sequence
  SM00857,G3DSA:1.10.10.2600,IPR036162,PF13408,IPR025827, PS51737,G3DSA:3.40.50.1390,IPR006119,IPR038109,PF07508, SSF53041,IPR011109,PF00239,PTHR30461,PS51736, Coil,cd00338
MTAVIYARYSSDNQREESIEGQIRECTAYAEKNGITVVKHYIDRALSAKTDNRPDFQQMIKDSEKRLFDIVLVWKLDRFARNRYDSAHYEYQLERNHVKLVSATEPISDSPAGIMVKSMLTGMAEYYSAELSEKVVRGMTENVLKGKYNGGTIPIGFKVDEEKFFQVDPLKAPFVVEAFQRYNDGATMKELMNWLNDSGVTTNRNQKLTYNSIQTLLTNHRYIGENRFKDIVMPDSIPAIVDKDLFEEVQQKIKKNSRAPARHKAEDDYLLTTKLFCGMCGAMMFGECGTGRNKVVHHYYKCATAKRFKTCKKKTVRKEWLEDLVVAETMKLIQDDAVIDAIVAEVMELQDQENTTLPLLEKQMREVENGIENMLNAIQAGVLTNSTKSRLEKLEAQQKELEVRITEEKIARPRLSENQVRFWLTRFRKLDPNVKSHRETLINTFVNVVYLYDEKVLITFNYKDGTKTITFDEIAAKDASEGNGSDFGCFAPPR

SEQ ID NO: 6173 - protein, 494 aa, Unknown
  Description of Unknown: Integrase B6174 sequence
  PTHR30461:SF3,IPR036162,PS51737,IPR011109,PTHR30461, PS00397,PF00239,G3DSA:1.10.10.2600,IPR006119,SSF53041, SM00857,IPR025827,IPR038109,PS51736,cd03768, IPR006118,PF13408,G3DSA:3.40.50.1390,PF07508,Coil
MRVVGYARVSTREQADHGYSIGEQNSRLRAYCQAKDWTLLRVIEDPGFSGAKMQRPGLQQVLEMVRRRECDAVLVWKLDRLSRSQKDTLYLLEDVFLANGCGFVSMLENFDTSTAFGRAMVGILSVFAQLEREQFKERSAIGRVGRAKAGLFHGGGYAPIGYDYYTKEDGGQGLVVNEYEAMQVREVYRLYLAGWAVHKIQVYMHERYTTKNGCWASDTTVRSVLSSPIYLGRITWAGKTYEGQHEALISQNDFDQVAARRESLKWQPAEPRAACDLIKNSPFRSTHILGGITWCARCGARYFASGNYSGRGENRKYWPYYTCYSVAKSSKKMIKDPNCKNKRWAVGKLDAIILAEISRLEFDPAALAKAAGPVDVSGVEEKRRVLEARVAEVRPQMERLLDLCQTGGLPVASVSGRLAALQKELDALNGELSGLAVPETVDRLAVAQEMLAGASAVIENGTPEQKRALVHSLIGRIDIDGEDITIHWLFAPEN

SEQ ID NO: 6174 - protein, 494 aa, Unknown
  Description of Unknown: Integrase B6175 sequence
  PTHR30461:SF3,SM00857,G3DSA:1.10.10.2600,IPR036162,PF13408, PS51737,G3DSA:3.40.50.1390,IPR025827,IPR006119,IPR038109, PF07508,IPR011109,SSF53041,PTHR30461,Coil, PS51736,cd00338,PF00239
MKELIPAVIYARFSSSGQREESITGQLRDCKRYAENHGFEIINEYIDEAKTGTSDNRPSFQKMIKDSESKRFNAIIVWKLDRFARNRYDSAIYRARLKKNGVKIYSAMENISDSAEGIIMEGLMESMAEYYSANLSENVKRGNRESALQLKTLGRKIFGYGRSEDDHYIINETEAPVVRRIFNEYTSGKSIQDIIKGLNNDGIMNSRNNPWNKSSLKNIIGNDKYIGTYRFMDYVVPDGMPAIISKDMFSIAQEIKDRHKKSPARSREARYLLTGKLFCGHCGSPMTGEYGVSKTGKKYHYYRCIKANKHKCDKKRAKKDWIENVVVAELLNQLNDLTYIDQLADRFMEYQKKQQSDDSELKVLQDRLHGVNKSLGNMVKAIEMGIITPTTQARMEELEEQKQQLHTAIEQLKFSKPPMIERDEFLFWIDTLKQDTGNYDFKEKLIDIFLNAVYLYDDGYIDIGTNLIKGTKRVDSSTLEQLCLLNHPFQYELE

SEQ ID NO: 6175 - protein, 494 aa, Unknown
  Description of Unknown: Integrase B6176 sequence
  SM00857,G3DSA:1.10.10.2600,IPR036162,PF13408,PS51737, IPR025827,G3DSA:3.40.50.1390,IPR006119,IPR038109,PF07508, IPR011109,SSF53041,PF00239,PTHR30461,PS51736, Coil,cd00338
MTAVIYARYSSDNQREESIEGQIRECTAYAEKNGITVVKHYIDRALSAKTDNRPDFQQMIKDSEKRLFDIVLVWKLDRFARNRYDSAHYEYQLERNHVKLVSATEPISDSPAGIMVKSMLTGMAEYYSAELSEKVVRGMTENVLKGKYNGGTIPIGFKVDEEKFFQIDPLKAPFVVEAFQRYNEGATMKELMNWLNDSGVTTNRNQKFTYNSVQKLLTNKRYIGENHFKDIVMPDSIPAIVDKDLFEEVQQKIKKNSRAPARHKAEDDYLLTTKLFCGMCGAMMFGECGTGRNKVVHHYYKCATAKRFKTCKKKTVRKEWLEDLVIAETMKLIQDDAVIDAIVAEVIELQDQENTTIPLLERQMREVENGIENMLNAIQAGVLTNSTKSRLEKLEAQQKELEIRIAEEKIARPRLSENQVRFWLTRFRKLDPNVKSHRETLINTFVNAVYLYDEKVLITFNYKDGTKTITFDEIAAKGAPEGNGSDLGCFAPPR

SEQ ID NO: 6176 - protein, 494 aa, Unknown
  Description of Unknown: Integrase B6177 sequence
  IPR036162,PS51737,IPR011109,PTHR30461,PS00397, PF00239,G3DSA:1.10.10.2600,IPR006119,SSF53041,cd00338, SM00857,IPR025827,IPR038109,PS51736,IPR006118, PF13408,G3DSA:3.40.50.1390,PF07508,Coil
METKYGYGYVRVSTDKQEELSPDSQAKLLKDFAHKNGIIISKIFYELGVSGRKAEKRPEFQKMIAMAKSSDHPVDAILVWKFSRFARNQEESIVYKSLLKKKHNVDVISVSEPLVDGPFGSLIERIIEWMDEYYSVRLSGEVTRGMTEKAKRGGYQARPPLGYRIAERGKPPVIVEEEAEIIRIIFQKYALEGMGMFDIARYLNLCGFKTSHGKEFERRSVEYILENPTYCGMIRWNRTVNETNEIRPKDEWIIADGQQPAIISKELFDRAAARRNMEYKPRGSRPSSTYRHWLSGLVKCPVCGRTMIAKKIVNGKRTYCYFVCYGYSKGKCLAKNSISSLKLAPAILQSLKDVLNNQQLSFRYIQPEPETAPDLSDILLDQLKRIDEKLDRIKEAYRNGVDTLEEYKENKALVQNEKQLLEKQLAELPAQDSESDQAESALLDRVKNVYEIVNSESVDDVTKNEILKSIIEKIVYNKEKDTLEVYYYYKPQTQ

SEQ ID NO: 6177 - protein, 494 aa, Unknown
  Description of Unknown: Integrase B6178 sequence
  PTHR30461:SF3,IPR036162,PS51737,IPR011109,PTHR30461, PS00397,PF00239,G3DSA:1.10.10.2600,IPR006119,SSF53041, cd00338,SM00857,IPR025827,IPR038109,PS51736, IPR006118,PF13408,G3DSA:3.40.50.1390,PF07508,Coil
MNEVRYAFAYIRVSTHDQEEISPDSQENLLREYATRNNIVILKIFSDLGISGRKAEKRPGFQEMVGLAKGSDHPVDLILVWKFSRFARNQEESIVYKSLLKKQHNVEVVSISEPLSDNPFGSLIERIIEWMDEYYSIRLSGEVFRGMKENATRGAYQARPPLGYKVVEHGKPPVIVPEEAEIVRMIFNWYANEGIGFFDIARRLNNLGLKTSQGKPFERRSIEYIIQNPSYCGMIRWNRTENSTNRIKDKDEWIVTKGQQPAIITKELFEAAQKRFEATYRPSGKRPSSTYKHWLSGLLKCPACGRTLTAATMKRANGEKYSYFSCYGYHKGKCEKPHGISSLVLEKEVLACVKESLSSGNISYTLKERQPIEVSNEKNILTSRLESLAGKEERIKASYREGIDTLEEYKANKALLQKERIHLEEQLKELEDHAPKDTPDPAANMLLRVQGVYDILVSDSFTAAQKNEALKQIVDKIVYDREQDSLKIYYFLYQ

SEQ ID NO: 6178 - protein, 494 aa, Unknown
  Description of Unknown: Integrase B6179 sequence
  SM00857,G3DSA:1.10.10.2600,IPR036162,PS51737,G3DSA:3.40.50.1390, IPR006119,IPR038109,PF07508,SSF53041,IPR011109, PTHR30461,Coil,PS51736,cd00338,PF00239
MPEDIKTAVIYARFSCSKQREASIDDQLRVCRDWCAREGYAIVGEYSDYAMSGRSDDRPQFQKMIANAGESDIVLVYMMDRFSRDEYDAPAYKHELRRKGVEVVSAMEAMPDGPERILIEKIYEGLAAVESVKTSMRTRRGMEGNALKCKTNGVRVYGYGRNDDDEYVVNEDEAAIVREAFRRSCDHEPVDSIASDFARRGVTTRTGRPCGYSMVYQMLHNRKYTGFYSWGGIEVDGGMPQIIDKATFAMAQEVKPKKRRASEDWGAFALSGRAICSECGHNMAGTSGRGKKNVKYEYYGCRCGAKPVRRDWLEHELAEAIRGMLRDRETALRISHMLWDEPEPEIADARRRAMASRRKAENGLQNIMSAIEQGIVMPEFTDRIAQLQAQKARAERDLASYDEARIDPEEFADFLQCGGGMDDAAVLDSFVYQVMVTPEECVATLYCDDERNEPARLSIARVRTFSGWCPVSKDSRTQVLALGRSVFIRFSRAA

SEQ ID NO: 6179 - protein, 494 aa, Unknown
  Description of Unknown: Integrase B6180 sequence
  PTHR30461:SF3,SM00857,G3DSA:1.10.10.2600,IPR036162,PF13408, PS51737,IPR025827,G3DSA:3.40.50.1390,IPR006119,IPR038109, PF07508,IPR011109,SSF53041,PF00239, PTHR30461,PS51736,Coil,cd00338
MKAVIYARFSSHNQREESIEGQVRACQRFAKEHDMTVIEIYADRGLSGLHADNRPEFQRMIADSDRHKFQALIMWNLDRFSRDKYDTAVYKSRLKKNGVTLYYSDQNIPDTPEGIILESLLEGFAQYYSANLSRNAKRGLQENARKCLWNGGGLPLGYAIDETKHFVIDPAGAACVRLIFQMYADNHSIKEIVSTLNEKGYRTVKGNKFRLGSIQGVLRNRKYIGEYHASGITVPNGVPAIVDVELFNAVQEKIGVVSAAKARNKAEIPYLLTTKVFCGHCGSPMIGESGTGKGGSTYRYYKCSCRKNRKGQCDKRTEQKEWLEETVVVQTVEKFLHPDVIEDVSNACAAVLEQDSQSNALLKALNAQLADVEKSSRNLIKAIEAGVFTASMRERMAELEQQKEDITVQIAREQLRKPQLSAEQIAFFLRSFLDGDAHDPKFQERIIESLVRRVDVYDEGPGNRKLTVFYNLKKNNHSSVSVKCSDSESVGLPE

SEQ ID NO: 6180 - protein, 494 aa, Unknown
  Description of Unknown: Integrase B6181 sequence
  SM00857,G3DSA:1.10.10.2600,IPR036162,PS51737,G3DSA:3.40.50.1390, IPR006119,IPR038109,PF07508,IPR011109,SSF53041, PF00239,PTHR30461,PS51736,Coil,cd00338
MPEDIKTAVIYARFSCSKQREASIDDQLRVCRDWCAREGYAIVGEYSDYAMSGRSDDRPQFQKMIANAGESDIVLVYMMDRFSRDEYDAPAYKHELRKKGVEVVSAMEAMPNGPERILIEKIYEGLAAVESVKTSMRTRRGMEGNALKCKTNGVRVYGYGRNEDDEYVVNEDEAAIVREAFRRSCDHEPVDSIASDFARRGVTTRTGRPCGYSMVYQMLHNRKYTGFYSWGGIEVDGGMPQIIDKATFAMAQEVKPKKRRASEDWGTFALSGRAICSECGHNMAGTSGRGKKNVKYEYYGCRCGAKPVRRDWLEHELAEAIRGMLRDRETALRISHMLWDEPEPEIADARRRAMASKRKAENGLQNIMAAIEQGIVMPEFTDRIAQLQAQKARAERDLASYDEARIDPEEFADFLQCGGGMDDAAVLDSFVYQVMVTPEECVATLYCDDERNEPARLSIARVRTFSGWCPVSKDSRTQVLALGRSVFIRFSRAA

SEQ ID NO: 6181 - protein, 494 aa, Unknown
  Description of Unknown: Integrase B6182 sequence
  PTHR30461:SF3,IPR036162,PS51737,IPR011109,PTHR30461, PS00397,PF00239,G3DSA:1.10.10.2600,IPR006119,SSF53041, SM00857,IPR025827,IPR038109,PS51736, cd03768,IPR006118,PF13408,G3DSA:3.40.50.1390,PF07508,Coil
MRVVGYARVSTREQADHGYSIGEQNSRLRAYCQAKDWTLLRVIEDPGFSGAKMQRPGLQQVLEMVRRRECDAVLVWKLDRLSRSQKDTLYLLEDVFLANGCGFVSMLENFDTSTAFGRAMVGILSVFAQLEREQFKERSAIGRVGRAKAGLFHGGGYAPIGYDYYTKEDGGQGLVVNEYEAMQVREVYRLYLAGWAVHKIQVYMHERYTTKNGCWASDTTVRSVLSSQIYLGRITWAGKTYEGQHEALISQNDFDQVAARRESLKWQPAEPRAACDLIKNSPFRSTHILGGITWCARCGARYFASGNYSGRGENRKYWPYYTCYSVAKSSKKMIKDPNCKNKRWAVGKLDAIILAEISRLEFDPAALAKAAGPVDVSGVEEKRRVLEARVAEVRPQMERLLDLCQTGGLPVASVSGRLAALQKELDALNGELSGLAVPETVDRLAVAQEMLAGASAVIENGTPEQKRALVHSLIGRIDIDGEDITIHWLFAPEN

SEQ ID NO: 6182 - protein, 494 aa, Unknown
  Description of Unknown: Integrase B6183 sequence
  PTHR30461:SF3,IPR036162,PS51737,IPR011109,PTHR30461, PS00397,PF00239,G3DSA:1.10.10.2600,IPR006119,SSF53041, cd00338,SM00857,IPR025827,IPR038109,PS51736, IPR006118,PF13408,G3DSA:3.40.50.1390,PF07508,Coil
METKYGYGYVRVSTDKQEELSPDSQAKLLKDFAHKNGIIISKIFYELGVSGRKAEKRPEFQKMIAMAKSSDHPVDAILVWKFSRFARNQEESIVYKSLLKKKHNVDVISVSEPLVDGPFGSLIERIIEWMDEYYSVRLSGEVTRGMTEKAKRGGYQARPPLGYRIAERGKPPVIVEEEAEIIRIIFQKYALEGMGMFDIARYLNLYGFKTSHGKEFERRSVEYILENPTYCGMIRWNRTVNETNEIRPKDEWIIADGQQPAIISKELFDRAAARRNMEYKPRGSRPSSTYKHWLSGLVKCPVCGRTMIAKKIVNGKRTYCYFVCYGYSKGKCLAKNSISSLKLAPAVLQSLKDVLNNHHLSFRYIQPEPETAPDLSDILLDQLKRIDEKLDRIKEAYRNGVDSLEEYKENKVLVQNEKQLLEKQLAELPAQDSDSEQAESALLDRVKNVYEIVNSESVDDVTKNEILKSIIEKIVYNKEKDTLEVYYYYKPQTQ

SEQ ID NO: 6183 - protein, 494 aa, Unknown
  Description of Unknown: Integrase B6184 sequence
  PTHR30461:SF3,IPR036162,PS51737,IPR011109,PTHR30461, PS00397,PF00239,G3DSA:1.10.10.2600,IPR006119,SSF53041, SM00857,IPR025827,IPR038109,PS51736,cd03768, IPR006118,PF13408,G3DSA:3.40.50.1390,PF07508,Coil
MRVVGYARVSTREQADHGYSIGEQNSRLRAYCQAKDWTLLRVIEDPGFSGAKMQRPGLQQVLEMVRRRECDAVLVWKLDRLSRSQKDTLYLLEDVFLANGCGFVSMLENFDTSTAFGRAMVGILSVFAQLEREQFKERSAIGRVGRAKAGLFHGGGYAPIGYDYYTKEDGGQGLVVNEYEAMQVREVYRLYLAGWAVHKIQVYMHERYTTKNGCWASDTTVRSVLSSPIYLGRITWAGKTYEGQHEALVSQNDFDQVAARRESLKWQPAEPRAACDLIKNSPFRSTHILGGITWCARCGARYFASGNYSGRGENRKYWPYYTCYSVAKSSKKMIKDPNCKNKRWAVGKLDAIILAEISRLEFDPAALAKAAGPVDVSDVEEKRRVLEARVAEVRPQMERLLDLCQTGGLPVASVSGRLAALQKELDALNGELSGLAVPETVDRLAVAQEMLAGASAVIENGIPEQKRALVHSLIGRIDIDGEDITIHWLFAPEN

SEQ ID NO: 6184 - protein, 494 aa, Unknown
  Description of Unknown: Integrase B6185 sequence
  PTHR30461:SF3,IPR036162,PS51737,IPR011109,PTHR30461, PS00397,PF00239,G3DSA:1.10.10.2600,IPR006119,SSF53041, cd00338,SM00857,IPR025827,IPR038109,PS51736, IPR006118,PF13408,G3DSA:3.40.50.1390,PF07508,Coil
METKYGYGYVRVSTDKQEELSPDSQAKLLKDFAHKNGIIISKIFYELGVSGRKAEKRPEFQKMIAMAKSSDHPVDAILVWKFSRFARNQEESIVYKSLLKKKHNVDVISVSEPLVDGPFGSLIERIIEWMDEYYSVRLSGEVTRGMTEKAKRGGYQARPPLGYRITERGKPPVIIEDEAEIVRIIFRKYAEEGMGIFDIARYLNLCGFKTSHGKNFERRSVEYILENPTYCGMIRWNRTVNETNEIRPKDEWIIVDGQQPSIISKELFDKASARRNMEYKPRGSRPSSTYKHWLSGLVKCPACGRTMIAKKTVSGKRIYCYFTCYGYSKGKCLAKNSISSLKLAPAVLQSLKDVLDSQQLSFRYIKPQEETTVDLSAVLLEQLKQIDEKLERIKEAYRNGVDTLEEYKENKLMVQKEQKLLEKQLAELPEEKSDQDLAESHMLERVRNVYEIVSSESVDDVTKNEILKSIIEKIVYNKEEDTLEVYYYYKPQTQ

SEQ ID NO: 6185 - protein, 494 aa, Unknown
  Description of Unknown: Integrase B6186 sequence
  PTHR30461:SF3,IPR036162,PS51737,IPR011109,PTHR30461, PS00397,PF00239,G3DSA:1.10.10.2600,IPR006119,SSF53041, SM00857,IPR025827,IPR038109,PS51736,cd03768, IPR006118,PF13408,G3DSA:3.40.50.1390,PF07508,Coil
MRVVGYARVSTREQADHGYSIGEQNSRLRAYCQAKDWTLLRVIEDPGFSGAKMQRPGLQQVLEMVRRRECDAVLVWKLDRLSRSQKDTLYLLEDVFLANGCGFVSMLENFDTSTAFGRAMVGILSVFAQLEREQFKERSAIGRVGRAKAGLFHGGGYAPIGYDYYTKEDGGQGLVVNEYEAMQVREVYRLYLAGWAVHKIQVYMHERYTTKNGCWASDTTVRSVLSSPIYLGRITWAGKTYEGQHEALVSQNDFDQVAARRESLKWQPAEPRAACDLIKNSPFRSTHILGGITWCARCGARYFASGNYSGRGENRKYWPYYTCYSVAKSSKKMIKDPNCKNKRWAVGKLDAIILAEISRLEFDPAALAKAAGPVDVSDVEEKRRVLEARVAEVRPQMERLLDLCQTGGLPVASVSGRLATLQKELDALNGELSGLAVPETVDRLAVAQEMLAGASAVIENGTPEQKRALVHSLIGRIDIDGEDITIHWLFAPEN

SEQ ID NO: 6186 - protein, 494 aa, Unknown
  Description of Unknown: Integrase B6187 sequence
  SM00857,G3DSA:1.10.10.2600,IPR036162,PF13408,IPR025827, G3DSA:3.40.50.1390,PS51737,IPR006119,IPR038109,PF07508, IPR011109,SSF53041,PF00239,PTHR30461,PS51736, Coil,cd00338
MTAVIYARYSSDNQREESIEGQIRECTAYAEKNGITVVKHYIDRALSAKTDNRPDFQQMIKDSEKRLFDIVLVWKLDRFARNRYDSAHYEYQLERNHVKLVSATEPISDSPAGIMVKSMLTGMAEYYSAELSEKVVRGMTENVLKGKYNGGTIPIGFKVDEEKFFQVDPLKAPFVVEAFQRYNDGATMKELMNWLNDSGVTTNRNQKFTYNSVQTLLTNKRYIGENHFKDIVMPDSIPAIVDKDLFEEVQQKIKKNSRAPARHKAEDDYLLTTKLFCGMCGAMMFGECGTGRNKVVHHYYKCSTAKRFKTCKKKTVRKEWLEDLVVAETMKLIQDDAVIDAIVAEVMELQDQENTTLPLLEKQMREVENGIENMLNAIQAGVLTNSTKLRLEKLEAQQKELEVRIAEEKIARPRLSENQVRFWLTRFRKLDPNVKSHRETLINTFVNAVYLYDEKVLITFNYKDGTKTITFDEIAAKDAPEGNGSDLDCFAPPR

SEQ ID NO: 6187 - protein, 494 aa, Unknown
  Description of Unknown: Integrase B6188 sequence
  IPR036162,PS51737,IPR011109,PTHR30461,PS00397, PF00239,G3DSA:1.10.10.2600,IPR006119,SSF53041,cd00338, SM00857,IPR025827,IPR038109,PS51736,IPR006118, PF13408,G3DSA:3.40.50.1390,PF07508,Coil
METKYGYGYVRVSTDKQEELSPDSQAKLLKDFAHKNGIIISKIFYELGVSGRKAEKRPEFQKMIAMAKSSDHPVDAILVWKFSRFARNQEESIVYKSLLKKKHNVDVISVSEPLVDGPFGSLIERIIEWMDEYYSVRLSGEVTRGMTEKAKRGGYQARPPLGYRIAERGKPPVIVEEEAEIIRIIFQKYALEGMGMFDIARYLNLCGFKTSRGKEFERRSVEYILENPTYCGMIRWNRTVNETNEIRPKDEWIIAEGQQPSIISKELFDKAAARHNMEYKPKGSRPSSTYRHWLSGLVKCPVCGRTMIAKKIVNGKRTYCYFVCYGYSKGKCLAKNSISSLKLAPAILQSLKDVLNNQQLSFRYIQPEPETAPDLSDILLDQLKRIDEKLNRIKEAYRNGVDTLEEYKENKALVRNEKQLLEKQLAELPAQDSESDQAESALLDRVKNIYEIVNSESVDDVTKNEILKSIIEKIVYNKEKDTLEVYYYYKPQTQ

SEQ ID NO: 6188 - protein, 494 aa, Unknown
  Description of Unknown: Integrase B6189 sequence
  SM00857,G3DSA:1.10.10.2600,PS51736,IPR036162,PS51737, G3DSA:3.40.50.1390,IPR006119,IPR038109,PF07508,IPR011109, SSF53041,PF00239,PTHR30461,mobidb-lite,Coil, cd00338
MTKGSRAAIYARFSSHNQRDESIEIQVDKSREFCTESGLTVVRIYSDYAKTGRNSDRTEFQQMLKDAQKGLFDYVVIYKVTRIMRNRDEMALARIMLHKAGVEILYAGETLGEGSTRVLHLGMLEVLAEYESAVDSERIRDGIQKNAQRGMASGQRLYGWNVIDDHFVINEREAAVMHKMKNMLLSGSTVADIQRAVKTERSRRGKPFSHGSIKKLLMREQNCGTYNYAGVRIPNGMPAIWSRSEQEEINNVLNGRGHKHRVEDGERVYALSGKMFCCECGRWYVGTSGTGKSGKVYHYYRCPKCRRTFRRDVIEDAVTDTILESIKDPKVRERIITTLEMMIAETAENDEPKDSERIKAEIKRIDASFERIWQAIEDGFAPPGGKERVDELKARQGELKDELATALEAESAEALTIDDYIDWLDTLDANSDPYDIIDTFIRFIQIDGDEVQIYFSFDNWDDDFMPTKKDEPQINKGSSNSTRVETRGIEPLTS

SEQ ID NO: 6189 - protein, 494 aa, Unknown
  Description of Unknown: Integrase B6190 sequence
  PTHR30461:SF3,IPR036162,PS51737,IPR011109,PTHR30461, PS00397,PF00239,G3DSA:1.10.10.2600,IPR006119,SSF53041, SM00857,IPR025827,IPR038109,PS51736,cd03768, IPR006118,PF13408,G3DSA:3.40.50.1390,PF07508,Coil
MRVVGYARVSTREQADHGYSIGEQNSRLRAYCQAKDWTLLRVIEDPGFSGAKMQRPGLQQVLEMVRRRECDAVLVWKLDRLSRSQKDTLYLLEDVFLANGCGFVSMLENFDTSTAFGRAMVGILSVFAQLEREQFKERSAIGRVGRAKAGLFHGGGYAPIGYDYYTKEDGGQGLVVNEYEAMQVREVYRLYLAGWAVHKIQVYMHERYTTKNGCWASDTTVRSVLSSQIYLGRITWAGKTYEGQHEALVSQNDFDQVAARRESLKWQPAEPRAACDLIKNSPFRSTHILGGITWCARCGARYFASGNYSGRGENRKYWPYYTCYSVAKSSKKMIKDPNCKNKRWAVGKLDAIILAEISRLEFDPAALAKAAGPVDVSGVEEKRRVLEARVAEVRPQMERLLDLCQTGGLPVASVSGRLAALQKELDALNGELSGLAVPETVDRLAVAQEMLAGASAVIENGTPEQKRALVHSLIGRIDIDGEDITIHWLFAPEN

SEQ ID NO: 6190 - protein, 494 aa, Unknown
  Description of Unknown: Integrase B6191 sequence
  SM00857,G3DSA:1.10.10.2600,IPR036162,PS51737,G3DSA:3.40.50.1390, IPR006119,IPR038109,PF07508,IPR011109,SSF53041, PTHR30461,Coil,PS51736,cd00338,PF00239
MDAAQYLRKSRMEEGLDTEEVLAKHRKALAEYAKANDIHIIETYYEVVSGESLYARPEMLRLLEDVEEGRYDAVLVMDLDRLSRGRMKDQGIILDAFRDSDTLIITPEHTYNLSDDLDDEMAEFKTFMSRREYKIINKRLRRGLKQTIQDGCYVANAPYGYRKVTVDRKPTLEIYEPEAKFVRMMYDLYLQGYGCVSIARHINSLGAKPHRASEFTRNSVAHILRNPTFAGKIVWDQKTHIRKGSKGNPKHITIYNPRESWTIVDGLHPAIIDQETYDKVQAVMAGRYIPSRRDGTVHSPLAGLVRCTNCGGHMQRMTMKGGAYLLCPRPGCCASAKFELVEHRVLSYLRDTLARLEMERQASAARDTSVLDSTLAAIKKELATASGQKTRLYELLEIGEYDIPTFRERMAAVKEKISHLERRQQEAERAIQEAATADPSALAAKIRAVLDAYDASDAAGRNALLKSVIETAWYTKAKKTKPADFQLRFDLRFL

SEQ ID NO: 6191 - protein, 494 aa, Unknown
  Description of Unknown: Integrase B6192 sequence
  PTHR30461:SF3,SM00857,G3DSA:1.10.10.2600,IPR036162,PF13408, IPR025827,G3DSA:3.40.50.1390,PS51737,IPR006119,IPR038109, PF07508,IPR011109,SSF53041,PTHR30461, Coil,PS51736,cd00338,PF00239
MQVTKITKTICEKPRVCAYARVSTNHDAQEDSLAVQIAYWDKKFKDNPDVEFVGLFTDDGISGKEMRKRKGLMAVLQLVREGKVDKVYTKSISRFARNYIEITEIIREFREIGVPIIFEKENINTLDPASSMILSVMSSLAEEELKSISKNQTWAIRKRFAKGDIELVRITGYNYNGKQLTVNEEEKKVIRRIFDLYLSGCGMVKICNILDAEGYKPMYADHWVKSSIRRILLNEKYTGNCLLQKTVGDLHRRWRNTGEAPQYYVEGTHEAIVTMEEWEEVQRQFRERTEHFRPGAGSTNIYPLSGKIFCGHCGTKYVRKTCAKGTTYECIKWKCRKKDQEGIGVCQSTDIKNDVLEKLLVEAYNECLDARLVHMGLSEEESKLNTLLATEKELRELHIKGYLPDRKYREETEKLLQQIMEEEQIIQQLKTKNTDTTKYKKSDVFTKDMADFLISAVVDEWKITFEFGNGYKVTKTYTNGRAGNVNGKLRKQKT

SEQ ID NO: 6192 - protein, 494 aa, Unknown
  Description of Unknown: Integrase B6193 sequence
  PTHR30461:SF3,IPR036162,PS51737,IPR011109,PTHR30461, PS00397,PF00239,G3DSA:1.10.10.2600,IPR006119,SSF53041, SM00857,IPR025827,IPR038109,PS51736,cd03768, IPR006118,PF13408,G3DSA:3.40.50.1390,PF07508,Coil
MRVVGYARVSTREQADHGYSIGEQNSRLRAYCQAKDWTLLRVIEDPGFSGAKMQRPGLQQVLEMVRRRECDAVLVWKLDRLSRSQKDTLYLLEDVFLANGCGFVSMLENFDTSTAFGRAMVGILSVFAQLEREQFKERSAIGRVGRAKAGLFHGGGYAPIGYDYYTKEDGGQGLVVNEYEAMQVREVYRLYLAGWAVHKIQVYMHERYTTKNGCWASDTTVRSVLSSQIYLGRITWAGKTYEGQHEALISQNDFDQVAARRESLKWQPAEPRAACDLIKNSPFRSTHILGGITWCARCGARYFASGNYSGRGENRKYWPYYTCYSVAKSSKKMIKDPNCKNKRWAVGKLDAIILSEISRLEFDPAALAKAAGPVDVSGVEEKRRVLEARVAEVRPQMERLLDLCQTGGLPVASVSGRLAALQKELDALNGELSGLAVPETVDRLAVAQEMLAGASAVIENGTPEQKRALVHSLIGRIDIDGEDITIHWLFAPEN

SEQ ID NO: 6193 - protein, 494 aa, Unknown
  Description of Unknown: Integrase B6194 sequence
  PTHR30461:SF3,cd00338,SM00857,G3DSA:1.10.10.2600,IPR036162, PF13408,IPR025827,G3DSA:3.40.50.1390,PS51737,IPR006119, IPR038109,PF07508,IPR011109,SSF53041,PTHR30461, PS51736,Coil,PF00239
MKAVIYARYSSNNQTEQSIEGQLRVCNNYAQSHGITVVGTYIDRALSGRTDRRPEFQRMIVDAERASWDIVLVYKFDRFARSMYDDSRYKKHLQDYGKQVVSASEHIPTGAEGKLAEGMLVVFNQYYSEELAIKTRRGMKESAYKCQVTGNPPFGYYNGKDKKYHINDLEAAAVREIYTRYAAGDKVQDIINWLTDHGYKTRLGKQFNKNTISNMIRNPRYKGTYIYDDIIIEGGMPAIIEEKTWETAQRRLEMAKSGTSRRKDVYMLTGKAYCGECHEAMNGESGVGRNGTLYRYYKCSGRKKGTGCTAETVQKDVLEQTVINHTRSLLGSDEATRKIATEVARQLQDLRDNNTAAKAAAKALEDTNKGINNILAAIEQGIFSASTKDRLDELENKKVQLEKTLEKESAKAPDLAAEDIQRIISNIVKASKSDQALIDTFVYRVFVYDDHCVIVYLMPDFPPELVGYNDIQSILAGSGSPAGKDGEPITETDR

SEQ ID NO: 6194 - protein, 494 aa, Unknown
  Description of Unknown: Integrase B6195 sequence
  PTHR30461:SF3,cd00338,SM00857,G3DSA:1.10.10.2600,IPR036162, PF13408,PS51737,IPR025827,G3DSA:3.40.50.1390,IPR006119, IPR038109,PF07508,IPR011109,SSF53041,PTHR30461, PS51736,Coil,PF00239
MQDMIYGALYIRVSTHGKQEELSPDAQKRLLLKYAKENGIIVLEQHIYEEKGISGRKADRRPKFQEMISAAKSNPSPFQVILVWKYSRFARNQEESIVYKSLLRKKCNVDVISVSEPLVDGPFGSLIERIIEWMDEYYSIRLSGEVFRGMSEKAMKGGYQARPPLGYRIEHKGCPPVIVPEEAEVVKYIFNKYVNEHAGLFDIARSVNALGAKTSRGKSFERRSIAYILKNPTYCGMIRWNMTDNTTKEIKNKSEWIIAEGTHPAIISKELFQAAQERFEKEYIPTGRRPSSTCKHWLSGLIKCPACGRTMVLSVTKTRTGHSYPYFVCYGYSKGKCTAKAAVSARKLEPYVLDGIKTATQGELSFTIKEPDPIESSPELQILEEQLGKIDIKEKRIRDAYMNGIDTMEEYKENKGILSQEREMLESKLLFFRKNPVTKEEVMPKLQQRIRNVYDIITNEDFSITQKNDAVKSIVEKIVFNKETDTAEIYYYYL

SEQ ID NO: 6195 - protein, 494 aa, Unknown
  Description of Unknown: Integrase B6196 sequence
  PTHR30461:SF3,IPR036162,PS51737,IPR011109,PTHR30461, PS00397,PF00239,G3DSA:1.10.10.2600,IPR006119,SSF53041, cd00338,SM00857,IPR025827,IPR038109,PS51736, IPR006118,PF13408,G3DSA:3.40.50.1390,PF07508,Coil
MKTKYGYGYVRVSTDKQEELSPDSQSKLLKDFAHKNGIILLNIFFEIGVSGRKAEKRPEFQKMIALAKSKDHPVDSILVWKFSRFARNQEESIVYKSLLKKKHNVDVISVSEPLVDGPFGSLIERIIEWMDEYYSVRLSGEVTRGMKEKAQRGGYQARPPLGYRIVDRGEPPVIVPKEAEIIKIIFDKYANEHCGIFDIARYLNLCGFKTSHGKPFERRSVEYILQNPTYCGMIRWNRTVNETNEIRPKDEWIITKGLHPAIISEELFNKAMSRYEKEYISKGSRPSSTYKHWLSGLVKCPSCGRTMIAKTIKGSARTYVYFTCYGYSKGKCLLNNSVSSLKLEPAVLQSVKDVLDSHRIVYRYVKPKAEESTDLSAILKEQLKKSDEKLDRIKEAYRNGVDTLAEYKASKLIIAAEIEQIKKQLEEVEKTIDVPSNDDSIMLDRVRNVYEIISSDVINNTTKNEILKSVIEKIVYDRDSDELKVYYYYTPEPL

SEQ ID NO: 6196 - protein, 494 aa, Unknown
  Description of Unknown: Integrase B6197 sequence
  IPR036162,PS51737,IPR011109,PTHR30461,PS00397, PF00239,G3DSA:1.10.10.2600,IPR006119,SSF53041,cd00338, SM00857,IPR025827,IPR038109,PS51736,IPR006118, PF13408,G3DSA:3.40.50.1390,PF07508,Coil
MKQLKEVCAYIRVSTGKQEELSPDSQLRLIKEYAQAHDMLLTHVYMEEHGISGKSSEKRPAFQEMIAACKDKSHPYDAVLLWKFSRFARNQDEATYYKSILRKKCNVDVISISEPIIEGMYGRLIEMVIEWSDEFYLVNLSGEVMRGMTQNALNGGYNSNPPIGYTKKRGEIPQVDPERAELVRRIFRMFTQQHMSRNDIASTLNRQGITTNRGGRWETRTVTYILENPFYIGKIRWNFYDRNQNRRKDTGDVILSDGQHEPIISADTFAAAGRLLAKARTTSSFGRKRSVVATKHWLSSMVLCSSCGASLGYNKGGQKKHAAPFFQCWKHIKGMCDHNSYISAAALEQMVMEAIIHFGQSFDLMYHFSDTPQADDTIYLTGELSKLSEKERRIKDAYISGIDSLEEYRENKALLQKKRDELEQQLADTHKVTPIKERYQQIDMNHLLTVLQDPDQDYIVKGNSLRKVFDHFVYDKEAGTLDCFLNTSIEKISK

SEQ ID NO: 6197 - protein, 494 aa, Unknown
  Description of Unknown: Integrase B6198 sequence
  IPR036162,PS51737,IPR011109,PTHR30461,PS00397, PF00239,G3DSA:1.10.10.2600,IPR006119,SSF53041,cd00338, SM00857,IPR025827,IPR038109,PS51736,IPR006118, PF13408,G3DSA:3.40.50.1390,PF07508,Coil
MKQLKEVCAYIRVSTGKQEELSPDSQLRLIKEYAQAHDMLLTHVYMEEHGISGKSSEKRPAFQEMIAACKDKSHPYDAVLLWKFSRFARNQDEATYYKSILRKKCNVDVISISEPIIEGMYGRLIEMVIEWSDEFYLVNLSGEVMRGMTQNALNGGYNSNPPIGYTKKRGEIPQVDPERAELVRRIFRMFTEQHMSRNDIASTLNRQGITTNRGGRWETRTVTYILENPFYIGKIRWNFYDRSQNRRKDTGDVILSDGQHEPIISADTFAAAGRLLAKARTTSCFGRKRSVVATKHWLSSMVLCSSCGASLGYNKGGQKKHAAPFFQCWKHIKGMCDHNSYISAAALEQMVMDAIIHFGQSFDLMYHFSDAPQADDTVYLTRELSKLSEKERRIKDAYISGIDSLEEYRENKSLLQKKRDELEQQLADNHKVTPIKERYQQIDMNHLLTVLQDPDQDYIVKGNSLRKVFDHFVYNKEAGTLDCFLNTSIEKISK

SEQ ID NO: 6198 - protein, 494 aa, Unknown
  Description of Unknown: Integrase B6199 sequence
  SM00857,G3DSA:1.10.10.2600,IPR036162,PF13408,PS51737, G3DSA:3.40.50.1390,IPR025827,IPR006119,IPR038109,PF07508, SSF53041,IPR011109,PF00239,PTHR30461,PS51736, Coil,cd00338
MTAVIYARYSSDNQREESIEGQIRECTAYAEKNGITVVKHYIDRALSAKTDNRPDFQQMIKDSEKRLFDIVLVWKLDRFARNRYDSAHYEYQLERNHVKLVSATEPISDSPAGIMVKSMLTGMAEYYSAELSEKVVRGMTENVLKGKYNGGTIPIGFKVDEEKFFQVDPLKAPFVVEAFQRYNDGATMKELMNWLNDSGVTTNRNQKFTYNSVQTLLTNKRYIGENHFKDIVMPDSIPAIVDKDLFEEVQQKIKKNSRAPARHKAEDDYLLTTKLFCGMCGAMMFGECGTGRNKVVHHYYKCATAKRFKTCKKKTVRKEWLEDLVIAETMKLIQDDAVIDAIVAEVMELQEQENTTLPLLEKQMREVENGIENMLNAIQAGVLTNSTKSRLEKLEAQQKELEVRIAEEKIARPRLSENQVRFWLTRFRKLDPNVKSHRETLINTFVNAVYLYDEKVLIAFNYKDGTKTISFNEIAAKDASEGNGSDLGCFAPPR

SEQ ID NO: 6199 - protein, 494 aa, Unknown
  Description of Unknown: Integrase B6200 sequence
  PTHR30461:SF3,IPR036162,PS51737,IPR011109,PTHR30461, PS00397,PF00239,G3DSA:1.10.10.2600,IPR006119,SSF53041, cd00338,SM00857,IPR025827,IPR038109,PS51736, IPR006118,PF13408,G3DSA:3.40.50.1390,PF07508,Coil
MNEVRYAFAYIRVSTHDQEEISPDSQENLLREYATRNNIVILKIFSDLGISGRKAEKRPGFQEMVGLAKGSDHPVDLILVWKFSRFARNQEESIVYKSLLKKQHNVEVVSISEPLSDNPFGSLIERIIEWMDEYYSIRLSGEVFRGMKENATRGAYQARPPLGYKVVEHGKPPMIVPEEAEIIRMIFSWYANEGIGFFDIARRLNNLGLKTSQGKTFERRSIEYIIQNPSYCGMIRWNRTENSTNRIKDKDEWIVTEGQQPAIITKELFDAAQKRFETTYRPSGKRPSSTYKHWLSGLLKCPACGRTLTAATMKRANGEKYSYFSCYGYHKGKCEKPHGISSLVLEKEVLACVKESLSSGNISYTLKERQPIEVSNEKNILTSRLESLAGKEERIKASYREGIDTLEEYKANKALLQKERIHLEEQLKELEDHAPKDTPDPAANMLLRVQGVYDILVSDSFTAAQKNEALKQIVDKIVYNREQDSLKIYYFLYR

SEQ ID NO: 6200 - protein, 494 aa, Unknown
  Description of Unknown: Integrase B6201 sequence
  IPR036162,PS51737,IPR011109,PTHR30461,PS00397, PF00239,G3DSA:1.10.10.2600,IPR006119,SSF53041,cd00338, SM00857,IPR025827,IPR038109,PS51736,IPR006118, PF13408,G3DSA:3.40.50.1390,PF07508,Coil
METKYGYGYVRVSTDKQEELSPDSQAKLLKDFAHKNGIIISKIFYELGVSGRKAEKRPEFQKMIAMAKSSDHPVDAILVWKFSRFARNQEESIVYKSLLKKKHNVDVISVSEPLVDGPFGSLIERIIEWMDEYYSVRLSGEVTRGMTEKAKRGGYQARPPLGYRIAERGKPPVIVEEEAEIIRIIFQKYALEGMGMFDIARYLNLCGFKTSHGKEFERRSVEYILENPTYCGMIRWNRTVNETNEIRPKDEWIIADGQQPAIISKELFDRAAARRNMEYKPRGSRPSSTYRHWLSGLVKCPVCGRTMIAKKIVNGKRTYCYFVCYGYSKGKCLAKNSISSLKLAPAILQSLKDVLNNQQLSFRYIQPEPETAPDLSDILLDQLKRIDEKLDRIKEAYRNGVDTLEEYKENKALVQNEKQLLEKQLAELPAQDSESAQAESALLDRVKNVYEIVNSESVDDVTKNEILKSIIEKIVYNKEKDTLEVYYYYKPQTQ

SEQ ID NO: 6201 - protein, 494 aa, Unknown
  Description of Unknown: Integrase B6202 sequence
  cd00338,SM00857,G3DSA:1.10.10.2600,IPR036162,PS51737, G3DSA:3.40.50.1390,IPR006119,IPR038109,PF07508,IPR011109, SSF53041,PTHR30461,PS51736,Coil,PF00239
MPEDIKTAVIYARFSCSKQREASIDDQLRVCRDWCAREGYAIVGEYSDYAMSGRSDDRPEFQKMIANAGESDIVLVYMMDRFSRDEYDAPAYKHELRKKGVEVVSAMEAMPDGPERILIEKIYEGLAAVESVKTSMRTRRGMEGNAIKCKTNGVRVYGYGRNDDDEYVVNEDEAAIVREAFRRSCDHEPVDSIASDFARRGVTTRTGRPCGYSMVYQMLHNRKYTGFYSWGGIEMDGGMPQIIDKATFAMAQEVKPKKRRASEDWGTFALSGRAICSECGHNMAGTSGRGKKNVKYEYYGCRCGAKPVRRDWLEHELAEAIRGMLRDRETALRISHMLWDEPEPEIADARRRAMASKRKAENGLQNIMAAIEQGIVMPEFTDRIAQLQAQKARAERDLASYDEARIDPEEFADFLQCGGGMDDAAVLDSFVYQVMVTPEECVATLYCDDERNEPARLSIARVRTFSGWCPVSKDSRTQVLALGRSVFIRFSRAA

SEQ ID NO: 6202 - protein, 494 aa, Unknown
  Description of Unknown: Integrase B6203 sequence
  PTHR30461:SF3,IPR036162,PS51737,IPR011109,PTHR30461, PS00397,PF00239,G3DSA:1.10.10.2600,IPR006119,SSF53041, SM00857,IPR025827,IPR038109,PS51736, cd03768,IPR006118,PF13408,G3DSA:3.40.50.1390,PF07508,Coil
MRVVGYARVSTREQADHGYSIGEQNSRLRAYCQAKDWTLLRVIEDPGFSGAKMQRPGLQQVLEMVRRRECDAVLVWKLDRLSRSQKDTLYLLEDVFLANGCGFVSMLENFDTSTAFGRAMVGILSVFAQLEREQFKERSAIGRVGRAKAGLFHGGGYAPIGYDYYTKEDGGQGLVVNEYEAMQVREVYRLYLAGWAVHKIQVYMHERYTTKNGCWASDTTVRSVLSSPIYLGRITWAGKTYEGQHEALISQNDFDQVAARRESLKWQPAEPRAACDLIKNSPFRSTHILGGITWCARCGARYFASGNYSGRGENRKYWPYYTCYSVAKSSKKMIKDPNCKNKRWAVGKLDAIILAEISRLEFDPAALAKAAGPVDVSGVEEKRRVLEARVAEVRPQMERLLDLCQTGGLPVASVSGRLATLQKELDALNGELSGLAVPETVDRLAVAQEMLAGASAVIENGTPEQKRALVHSLIGRIDIDGEDITIHWLFAPEN

SEQ ID NO: 6203 - protein, 494 aa, Unknown
  Description of Unknown: Integrase B6204 sequence
  IPR036162,PS51737,IPR011109,PTHR30461,PS00397, PF00239,G3DSA:1.10.10.2600,IPR006119,SSF53041,cd00338, SM00857,IPR025827,IPR038109,PS51736,IPR006118, PF13408,G3DSA:3.40.50.1390,PF07508,Coil
MKTKYGYGYVRVSTDKQEELSPDSQAKLLKDFAHKNGIIISKIFYELGVSGRKAEKRPEFQKMIAMAKSSDHPVDAILVWKFSRFARNQEESIVYKSLLKKKHNVDVISVSEPLVDGPFGSLIERIIEWMDEYYSVRLSGEVTRGMTEKAKRGGYQARPPLGYRIAERGKPPAIVEEEAEIIRIIFQKYALEGMGMFDIARYLNLCGFKTSHGKEFERRSVEYILENPTYCGMIRWNRTVNETNEIRPKDEWIIAEGQQPAIISKELFDRAAARRNMEYKPKGSRPSSTYRHWLSGLVKCPVCGRTMIAKKIVNGKRTYCYFVCYGYSKGKCLAKNSISSLKLAPAVLQSLKDVLNNQQLSFRYIQPEPETAPDLSDILLDQLKRIDEKLDRIKEAYRNGVDTLEEYKENKALVQNEKQLLEKQLAALPAQDNESDQAESALLDRVRNVYEIVNSESVDDVTKNEILKSIIEKIVYNKEKDTLEVYYYYKPQTQ

SEQ ID NO: 6204 - protein, 493 aa, Unknown
  Description of Unknown: Integrase B6205 sequence
  PTHR30461:SF3,IPR036162,PS51737,IPR011109,PTHR30461, PS00397,PF00239,G3DSA:1.10.10.2600,IPR006119,SSF53041, cd00338,SM00857,IPR025827,IPR038109,PS51736, IPR006118,PF13408,G3DSA:3.40.50.1390,PF07508,Coil
MKEKVSERKTGAIYIRVSTDKQEELSPDAQLRLLMDYAKKNSIDVPEEYIYQDNGISGRKANKRPAFQNMIALAKSKEHPIDTIIVWKFSRFARNQEESIVYKSLLSKNSVDVVSVSEPLIDGPFGSLIERIIEWMDEYYSIRLSGEVIRGMTQNAMRGHYQSDAPIGYISPGDKKPPVINPDTVQIPLMIKDMFLSGSTQLQIARKLNDMGYRTKRGNLWDARGVRYVLENPFYIGKSRWNYTERGRKLKPSDEVIYADGNWEALWDEDTFKEIQKRLALNMRKAKSRDVSSAKHWLSGLLICSSCGGTLAYGGANSARGFQCWKYSKGFCSESHYISTGSIEKMVMEYLEYVLHSPTLSYTIISAASSNAESKLSDCERQLQKIDAKEKRIKAAYLNEIDTLEEYKANKTALEEERRTIEKEIEELTLSNVKYTKEDMDKKMKQNIQNLLLVLKDESADYVQKGNMMRNVVDHIVFDRKNTSLDVFLKLVI

SEQ ID NO: 6205 - protein, 493 aa, Unknown
  Description of Unknown: Integrase B6206 sequence
  PTHR30461:SF3,IPR036162,PS51737,IPR011109,PTHR30461, PS00397,PF00239,G3DSA:1.10.10.2600,IPR006119,SSF53041, cd00338,SM00857,IPR025827,IPR038109,PS51736, IPR006118,PF13408,G3DSA:3.40.50.1390,PF07508,Coil
MSVKYAYGYIRVSTHDQEEISPDSQEHLLRDYAAKNNIVILKIFTDLGISGRKANKRPGFQEMIGLAKGDDHPVDQILVWKFSRFARNQEESIVYKSLLKKQHNVDVVSVSEPLSDDPFGSLIERIIEWMDEYYSIRLSGEVLRGMKENAARGAFQGAAPFGYKTVDKTLVIDPEKADIVRHVFNMYVNEKLSVFDIARYLNNLGFRTIRGNLFERRTVEYMLKNPTYCGMIHWNKTENATHSIKNKDEWIVSQGQHPAIISQELFDATQERLKATRRPSRRRERPSSTYKHWLSGLMKCPACGKTLSACTQKRVNGEKYAYFSCYGYAHGQCDKAHGVSSLVLEPEVLAGIKEVLDTGNISYELHDYQPTEAVDERSIIRERLSNLTSKEERIKASYREGIDTLEEYKSNKAILQKERDNLEEQLKELEGQNPEPDQDPAGDMLLKVRSVYDILISDSYTYVQKNEALKQIVDKIIYDKESDSLKIYFFLCR

SEQ ID NO: 6206 - protein, 493 aa, Unknown
  Description of Unknown: Integrase B6207 sequence
  PTHR30461:SF3,IPR036162,PS51737,IPR011109,PTHR30461, PS00397,PF00239,G3DSA:1.10.10.2600,IPR006119,SSF53041, cd00338,SM00857,IPR025827,IPR038109,PS51736, IPR006118,PF13408,G3DSA:3.40.50.1390,PF07508,Coil
MSVKYAYGYIRVSTHDQEEISPDSQEHLLRDYAAKNNIVILKIFTDLGISGRKANKRPGFQEMIGLAKGDDHPVDQILVWKFSRFARNQEESIVYKSLLKKQHNVDVVSVSEPLSDNPFGSLIERIIEWMDEYYSIRLSGEVYRGMKENALRGAYQARPPLGYKVVEHGKPPVIVPEEAKIVRTIFEKYTNEGMSFFDIARYLNSLRLKTSHGKPFERRSVEYIIQNPSYCGMIRWNRTENSTNRIKDKDEWIVTEGQQPAIISKELFELAQERFKATYKPVGKRPSSTYKHWLSGLLKCPDCGRTLTSTTMKRVNGEKYSYFSCYGYSKGKCKKPNGISSLVLEKEVLTSIKEILDTKDIVYELREYQPTEQFDERKAITEQLESLTGKEERIKASYREGIDTLEEYKANKAIIQKERESLEQQLKDLKKAARKSDQDPADAMLQKVRSVYDILISNNYTYIQKNEALKQIIDKIIYDRKNDSLKIYFFLYR

SEQ ID NO: 6207 - protein, 493 aa, Unknown
  Description of Unknown: Integrase B6208 sequence
  PTHR30461:SF3,IPR036162,PS51737,IPR011109,PTHR30461, PS00397,PF00239,G3DSA:1.10.10.2600,IPR006119,SSF53041, cd00338,SM00857,IPR025827,IPR038109,PS51736, IPR006118,PF13408,G3DSA:3.40.50.1390,PF07508,Coil
MSVKYAYGYIRVSTHDQEEISPDSQEHLLRDYAAKNNIVILKIFTDLGISGRKANKRPGFQEMIGLAKGDDHPVDLILVWKFSRFARNQEESIVYKSLLKKQHNVDVLSVSEPLSDNPFGSLIERIIEWMDEYYSIRLSGEVHRGMKENALRGAYQARPPLGYKVVEHGKPPVIVPEEAKIVRTIFEKYTNEGMSFFDIARYLNSLGLKTSHGKPFERRSVEYIIQNPSYCGMIRWNRTENSTNRIKDKDEWIVTEGQQPAIISKELFESAQERFKATYKPVGKRPSSTYKHWLSGLLKCPDCGRTLTSTTMKRVNEEKYSYFSCYGYSKGKCKKPNGISSLVLEKEVLASIKEVLDTKDIVYELREYQPTEQFDERKAITEQLESLTGKEERIKASYREGIDTLEEYKANKAIIQKERESLEQQLKDLKKAAHKSDQDPADAMLQKVRSVYDILISNNYTYVQKNEALKQIIDKIIYDRKNDSLKIYFFLYR

SEQ ID NO: 6208 - protein, 493 aa, Unknown
  Description of Unknown: Integrase B6209 sequence
  PTHR30461:SF3,IPR036162,PS51737,IPR011109,PTHR30461, PS00397,PF00239,G3DSA:1.10.10.2600,IPR006119,SSF53041, cd00338,SM00857,IPR025827,IPR038109,PS51736, IPR006118,PF13408,G3DSA:3.40.50.1390,PF07508,Coil
MKTKYCYGYVRVSTSGQEELSPDSQAKLLKDFAKKNDMIVLQIFYELGISGRKADKRPEFQKMIALAKSDKHPVDCIIVWKFSRFARNQEESIVYKSLLKKKHNVEVLSVSEPLVDGPFGSLIERIIEWMDEYYSVRLSGEVTRGMTEKAKRGGYQARPPLGYKIQERGKPPVIVPEEAEIIKIIFDKYVNEHTGIFDIARYLNLCGFKTSHNKPFERRSIEYILQNPTYCGMIRWNRTVSETNEIRPESEWIVSDGQQPAIISKELFDKAQIRYKSEYKPSGTRPSSTYKHWLSGLMKCPVCGRTMIAKTVNNQKSYCYFTCYGYSKGKCLAKTSVSSLKLEPAVLASIKEVLDTGNIIYRHVEPVQETSVDLNVIITEQLRKNVEKFDRIREAYRNGVDTLDEYKENKRMVQEEKETLEKQLADIKPAEPTIDTSKIAMLEKVRNVYEIIESDSVDSVTKNEILKSVIEKIIYDRSKDELKVYYYYAPESQ

SEQ ID NO: 6209 - protein, 493 aa, Unknown
  Description of Unknown: Integrase B6210 sequence
  PTHR30461:SF3,SM00857,G3DSA:1.10.10.2600,IPR036162,PS51737, G3DSA:3.40.50.1390,IPR006119,IPR038109,PF07508,SSF53041, IPR011109,PTHR30461,Coil,PS51736,cd00338, PF00239
MKTCIYLRKSRADIEAEKEGEYETLHRHKTTLLKVAKERKLNIVDIKEELVSGEYVEHRPRMMELLEEVKNKKYDAVLVMDLDRLGRGNMQDQGLILDTFKTSKTKIITPRKIYNLDDEFDEEYSEFEAFMARKELKLINRRLQRGRAKSIEEGKYISPDAPYGYEFKYDDRGKKYLAINEEQAAAVKLVFSMYLENKGATKIANKLNALGYETNNHIEFKAKAVRDILSNITYCGYVKWKTIDRKNHSRLRPDGEQIIAKGHHEPIIDEFTFNKVQEIRKGKYISPSKNKVSNPLAGIVICKKCGHNIIQKISRGKTYLWCRHCDNKSSSLDYVEDAIINSLQGWLENYKIKIDLKDDTEEIDQIKFELKKLQRELKEAEKQKGKLYDFLERGIYDDKTFLERSNVLESRIDDLKNQISECNLSIISYKDNLQAKKQIIPSLEKVLYNYSRSNDAKEQNLLLKSVLDKVLYEKAKDASKDEFILEVHPKLPK

SEQ ID NO: 6210 - protein, 493 aa, Unknown
  Description of Unknown: Integrase B6211 sequence
  PTHR30461:SF3,IPR036162,PS51737,IPR011109,PTHR30461, PS00397,PF00239,G3DSA:1.10.10.2600,IPR006119,SSF53041, cd00338,SM00857,IPR025827,IPR038109,PS51736, IPR006118,PF13408,G3DSA:3.40.50.1390,PF07508,Coil
MKTKYCYGYVRVSTSGQEELSPDSQAKLLKDFAKKNDMIILQIFYELGISGRKADKRPEFQKMIALAKSDKHPVDCIIVWKFSRFARNQEESIVYKSLLKKKHNVDVLSVSEPLVDGPFGSLIERIIEWMDEYYSVRLSGEVTRGMTEKAKRGGYQARPPLGYKIQERGKPPVIVPEEAEIIKIIFDKYVNEHTGIFDIARYLNLCGFKTSHNKPFERRSIEYILQNPTYCGMIRWNRTVSETNEIRPESEWIVSDGQQPAIISKELFDKAQIRYKSEYKPSGARPSSTYKHWLSGLMKCPVCGRTMIAKTVNNQKSYCYFTCYGYSKGKCLAKTSVSSLRLEPAVLASIKEVLDTGNIIYRHVEPVQETSVDLNVIITEQLRKNAEKFDRIREAYRNGVDTLDEYKENKRMVQEEKEMLEKQLADIKPAEPTIDTSKIAMLEKVRNVYEIIESDSVDPVTKNEILKSVIEKIIYDRSKDELKVYYYYAPESQ

SEQ ID NO: 6211 - protein, 493 aa, Unknown
  Description of Unknown: Integrase B6212 sequence
  PTHR30461:SF3,IPR036162,PS51737,IPR011109,PTHR30461, PS00397,PF00239,G3DSA:1.10.10.2600,IPR006119,SSF53041, cd00338,SM00857,IPR025827,IPR038109,PS51736, IPR006118,PF13408,G3DSA:3.40.50.1390,PF07508,Coil
MSVKYAYGYIRVSTHDQEEISPDSQEHLLRDYAAKNNIVILKIFTDLGISGRKANKRPGFQEMIGLAKGDDHPVDQILVWKFSRFARNQEESIVYKSLLKKQHNVDVVSVSEPLSDNPFGSLIERIIEWMDEYYSIRLSGEVYRGMKENALRGAYQARPPLGYKVVEHGKPPVIVPEEAKIVRTIFEKYTNEGMSFFDITRYLNSLGLKTSHGKPFERRSVEYIVQNPSYCGMIRWNRTENSTNRIKDKDEWIVTEGQQPAIISKELFESAQKRFKATYKPVGKRPSSTYKHWLSGLLKCPDCGRTLTSTTMKRVNGEKYSYFSCYGYSKGKCKKPNGISSLVLEKEVLASIKEVLDTKDIVYELREYQPTEQFDERKAITEQLKSLTGKEERIKASYREGIDTLEEYKANKAIIQKERESLEQQLKELKTAAHKSDQDPADAMLQKVRSVYDILISNNYTYIQKNEALKQIIDKIIYDRKNDSLKIYFFLYR

SEQ ID NO: 6212 - protein, 493 aa, Unknown
  Description of Unknown: Integrase B6213 sequence
  PTHR30461:SF3,IPR036162,PS51737,IPR011109,PTHR30461, PS00397,PF00239,G3DSA:1.10.10.2600,IPR006119,SSF53041, cd00338,SM00857,IPR025827,IPR038109,PS51736, IPR006118,PF13408,G3DSA:3.40.50.1390,PF07508,Coil
MKETLSERKTGAIYIRVSTDKQEELSPDAQLRLLMDYAKTNHTDIPMEYIFQDNGISGRKADKRPAFQQMIALAKSKEHPIDTIIVWKFSRFARNQEESIVYKSLLKKNNVDVVSVSEPLIDGPFGSLIERIIEWMDEYYSIRLSGEVMRGMTQNALRGHYQGDAPIGYQSPGNKKPPEKDPKTIQIPIMMKDLLLSGSSLLQIARKLNEHGYRTKHGNLWDARGVRYVLENPFYAGISRWNYTDRGRQLKPADEVIYTKGNWEPLWDKATLKEIQKHLAMNMRKAKSRDVSTAKHWLSGLLICSSCGGTLAYSGTKNSRGFQCWKYTKGFCNESHYIGIHPIEKMVIEYLESILHSPAIVYTVISSASADADSKLADLEKQLQKVENKEKRIKAAYLNEIDSLEEYKANKAALLKERAAIEKNIKLLTISNTDISKEEMDKKMKQNISALLTVLQDDSADYVQKGNMMRNVVDHIVFDRGNTSLDMFLKLVI

SEQ ID NO: 6213 - protein, 493 aa, Unknown
  Description of Unknown: Integrase B6214 sequence
  PTHR30461:SF3,IPR036162,PS51737,IPR011109,PTHR30461, PS00397,PF00239,G3DSA:1.10.10.2600,IPR006119,SSF53041, cd00338,SM00857,IPR025827,IPR038109,PS51736, IPR006118,PF13408,G3DSA:3.40.50.1390,PF07508,Coil
MSVKYAYGYIRVSTHDQEEISPDSQEHLLRDYAAKNNIVILKIFTDLGISGRKANKRPGFQEMIGLAKGDDHPVDQILVWKFSRFARNQEESIVYKSLLKKQHNVDVVSVSEPLSDDPFGSLIERIIEWMDEYYSIRLSGEVHRGMKENALRGAYQARPPLGYKVVEHGKPPVIVPEEAKIVRTIFEKYTNEGMSFFDIARYLNSLGLKTSHGKPFERRSVEYIIQNPSYCGMIRWNRTENSTNRIKDKDEWIVTEGQQPAIISKELFESAQERFKATYKPVGKRPSSTYKHWLSGLLKCPDCGRTLTSTTMKRVNGEKYSYFSCYGYSKGKCKKPNGISSLVLEKEVLASIKEILDTKDIVYELREYQPTEQFDERKAITEQLESLTGKEERIKASYREGIDTLEEYKANKAIIQKERESLEQQLKELKKAARKSDQDPADAMLQKVRSVYDILISNNYTYVQKNEALKQIIDKIIYDRKNDSLKIYFFLYK

SEQ ID NO: 6214 - protein, 493 aa, Unknown
  Description of Unknown: Integrase B6215 sequence
  PTHR30461:SF3,IPR036162,PS51737,IPR011109,PTHR30461, PS00397,PF00239,G3DSA:1.10.10.2600,IPR006119,SSF53041, cd00338,SM00857,IPR025827,IPR038109,PS51736, IPR006118,PF13408,G3DSA:3.40.50.1390,PF07508,Coil
MSVKYAYGYIRVSTHDQEEISPDSQEHLLRDYAAKNNIVILKIFTDLGISGRKANKRPGFQEMIGLAKGDDHPVDQILVWKFSRFARNQEESIVYKSLLKKQHNVDVVSVSEPLSDNPFGSLIERIIEWMDEYYSIRLSGEVYRGMKENALRGAYQARPPLGYKVVEHGKPPVIVPEEAKIVRTIFEKYTNEGMSFFDIARYLNSLGLKTSHGKPFERRSVEYIIQNPSYCGMIRWNRTENSTNRIKDKDEWIVTEGQQPAIISKELFESAQERFKAAYKPVGKRPSSTYKHWLSGLLKCPDCGRTLTSTTMKRVNGEKYSYFSCYGYSKGKCKKPNGISSLVLEKEVLASIKEVLDTKDIVYELREYQPTEQFDERKAITEQLESLTGKEERIKASYREGIDTLEEYKANKAIIQKERESLEQQLKELKKATHKSDQDPADAMLQKVRSVYDILISNNYTYVQKNEALKQIIDKIIYDRKNDSLKIYFFLYR

SEQ ID NO: 6215 - protein, 493 aa, Unknown
  Description of Unknown: Integrase B6216 sequence
  PTHR30461:SF3,IPR036162,PS51737,IPR011109,PTHR30461, PS00397,PF00239,G3DSA:1.10.10.2600,IPR006119,SSF53041, cd00338,SM00857,IPR025827,IPR038109,PS51736, IPR006118,PF13408,G3DSA:3.40.50.1390,PF07508,Coil
MSVKYAYGYIRVSTHDQEEISPDSQEHLLRDYAAKNNIVILKIFTDLGISGRKANKRPGFQEMIGLAKGDGHPVDLILVWKFSRFARNQEESIVYKSLLKKQHNVDVVSVSEPLSDDPFGSLIERIIEWMDEYYSIRLSGEVYRGMKENALRGAYQARPPLGYKVVEHGKPPVIVPEEAKIVRTIFEKYTNEGMSFFDIARYLNSLGLKTSHGKPFERRSVEYIIQNPSYCGMIRWNRTENSTNRIKDKDEWIVTEGQQPAIISKELFESAQERFKATYKPVGKRPSSTYKHWLSGLLKCPDCGRTLTSTTMKRVNGEKYSYFSCYGYSKGKCKKPNGISSLVLEKEVLASIKEVLDTKDIVYELREYQPTEQFDERKAITEQLESLTGKEERIKASYREGIDTLEEYKANKAIIQKERESLEQQLKELKKAAHKSDQDPADSMLQKVRSVYDILISNNYTYVQKNEALKQIIDKIIYDRKNNSLKIYFFLYR

SEQ ID NO: 6216 - protein, 493 aa, Unknown
  Description of Unknown: Integrase B6217 sequence
  PTHR30461:SF3,IPR036162,PS51737,IPR011109,PTHR30461, PS00397,PF00239,G3DSA:1.10.10.2600,IPR006119,SSF53041, cd00338,SM00857,IPR025827,IPR038109,PS51736, IPR006118,PF13408,G3DSA:3.40.50.1390,PF07508,Coil
MSVKYAYGYIRVSTHDQEEISPDSQEHLLRDYAAKNNIVILKIFTDLGISGRKANKRPGFQEMIGLAKGDDHPVDQILVWKFSRFARNQEESIVYKSLLKKQHNVDVVSVSEPLSDDPFGSLIERIIEWMDEYYSIRLSGEVHRGMKENALRGAYQARPPLGYKVVEHGKPPVIVPEEAKIVRTIFEKYTNEGMSFFDIARYLNSLGLKTSHGKPFERRSVEYIIQNPSYCGMIRWNRTENSTNRIKDKDEWIVTEGQQPAIISKELFESAQERFKATYKPVGKRPSSTYKHWISGLLKCPDCGRTLTSTTMKRVNGEKYSYFSCYGYSKGKCKKPNGISSLVLEKEVLASIKEILDTKDIVYELREYQPTEQFDERKAITEQLESLTGKEERIKASYREGIDTLEEYKANKAIIQKERESLEQQLKELKKAAHKSDQDPADAMLQKVRSVYDILISNNYTYVQKNEALKQIIDKIIYDRKNDSLKIYFFLYR

SEQ ID NO: 6217 - protein, 493 aa, Unknown
  Description of Unknown: Integrase B6218 sequence
  PTHR30461:SF3,IPR036162,PS51737,IPR011109,PTHR30461, PS00397,PF00239,G3DSA:1.10.10.2600,IPR006119,SSF53041, cd00338,SM00857,IPR025827,IPR038109,PS51736, IPR006118,PF13408,G3DSA:3.40.50.1390,PF07508,Coil
MKTKYCYGYVRVSTSGQEELSPDSQAKLLKDFAKKNDMIVLQIFYELGISGRKADKRPEFQKMIALAKSDKHPVDCIIVWKFSRFARNQEESIVYKSLLKKKHNVEVLSVSEPLVDGPFGSLIERIIEWMDEYYSVRLSGEVTRGMTEKAKRGGYQARPPLGYKIQERGKPPVIVPEEAEIIKIIFDKYVNEHTGIFDIARYLNLCGFKTSHNKPFERRSIEYILQNPTYCGMIRWNRTVSETNEIRPESEWIVSDGQQPAIISKELFDKAQIRYKSEYKPSGTRPSSTYKHWLSGLMKCPVCGRTMIAKTVNNQKSYCYFTCYGYSKGKCLAKTSVSSLRLEPAVLASIKEVLDTGNIIYRHVEPVQETSVDLNVIITEQLRKNAEKFDRIREAYRNGVDTLDEYKENKRMVQEEKEMLEKQLADIKPAEPTIDTSKIAMLEKVRNVYEIIESDSVDPVTKNEILKSVIEKIIYDRSKDELKVYYYYAPESQ

SEQ ID NO: 6218 - protein, 493 aa, Unknown
  Description of Unknown: Integrase B6219 sequence
  PTHR30461:SF3,IPR036162,PS51737,IPR011109,PTHR30461, PS00397,PF00239,G3DSA:1.10.10.2600,IPR006119,SSF53041, cd00338,SM00857,IPR025827,IPR038109,PS51736, IPR006118,PF13408,G3DSA:3.40.50.1390,PF07508,Coil
MRVKYAYGYIRVSTHDQEEISPDSQEHLLRDYAAKNNIVILKIFTDLGISGRKANKRPGFQEMIGLAKGDDHPVDLILVWKFSRFARNQEESIVYKSLLKKQHNVDVVSVSEPLSDDPFGSLIERIIEWMDEYYSIRLSGEVYRGMKENALRGAYQARPPLGYKVVEHGKPPVIVPEEAKIVRTIFEKYTNEGMSFFDIARYLNSLGLKTSHGKPFERRSVEYIVQNPSYCGMIRWNRTENSTNRIKDKDEWIVTEGQQPAIISKELFESAQERFKATYKPVGKRPSSTYKHWLSGLLKCPDCGRTLTSTTMKRVNGEKYSYFSCYGYSKGKCKKPNGISSLVLEKEVLASIKEILDTKDIVYELREYQPTEQFDERKAITEQLESLNGKEERIKASYREGIDTLEEYKANKAIIQKERESLEQQLKELKKAAHKSDQDPADAMLQKVRSVYDILISNNYTYVQKNEALKQIIDKIIYDRKNDSLKIYFFLYR

SEQ ID NO: 6219 - protein, 493 aa, Unknown
  Description of Unknown: Integrase B6220 sequence
  PTHR30461:SF3,IPR036162,PS51737,IPR011109,PTHR30461, PS00397,PF00239,G3DSA:1.10.10.2600,IPR006119,SSF53041, cd00338,SM00857,IPR025827,IPR038109,PS51736, IPR006118,PF13408,G3DSA:3.40.50.1390,PF07508,Coil
MSVKYAYGYIRVSTHDQEEISPDSQEHLLRDYAAKNNIVILKIFTDLGISGRKANKRPGFQEMIGLAKGDDHPVDQILVWKFSRFARNQEESIVYKSLLKKQHNVDVVSVSEPLSDDPFGSLIERIIEWMDEYYSIRLSGEVLRGMKENALRGAYQARPPLGYKVVEHGKPPVIVPEEAKIVRTIFEKYTNEGMSFFDIARYLNSLGLKTSHGKPFERRSVEYIIQNPSYCGMIRWNRIENSTNRIKDKDEWIVTEGQQPAIISKELFESAQKRFKATYKPVGKRPSSTYKHWLSGLLKCPDCGRTLTSTTMKRVNGEKYSYFSCYGYSKGKCKKPNGISSLVLEKEVLASIKEILDTKDIVYELREYQPTEQFDERKAITEQLESLTGKEERIKASYREGIDTLEEYKANKAIIQKERESLEQQLKELKKAARKSDQDPADAMLQKVRSVYDILISNNYTYIQKNEALKQIIDKIIYDRKNDSLKIYFFLYR

SEQ ID NO: 6220 - protein, 493 aa, Unknown
  Description of Unknown: Integrase B6221 sequence
  PTHR30461:SF3,IPR036162,PS51737,IPR011109,PTHR30461, PS00397,PF00239,G3DSA:1.10.10.2600,IPR006119,SSF53041, cd00338,SM00857,IPR025827,IPR038109,PS51736, IPR006118,PF13408,G3DSA:3.40.50.1390,PF07508,Coil
MSVKYAYGYIRVSTHDQEEISPDSQEHLLRDYASKNNIVILKIFTDLGISGRKANKRPGFQEMIGLAKGDDHPVDQILVWKFSRFARNQEESIVYKSLLKKQHNVDVVSVSEPLSDDPFGSLIERIIEWMDEYYSIRLSGEVLRGMKENAARGAFQGAAPFGYKTIDKTLVIDPEKADIVRHVFNMYVNEKLSVFDIARYLNNLGFRTIRGNLFERRTVEYMLKNPTYCGMIHWNKTENATHSIKNKDEWIVSQGQHPAIISQELFDATQERLKATRRPSRRRERPSSTYKHWLSGLMKCPACGKTLSACTQKRVNGEKYAYFSCYGYAHGQCDKAHGVSSLVLEPEVLASIKEVLDTGNISYELHDYQPTEVVDERSIIRDRLNSLASKEERIKASYREGIDTLEEYKSNKAILQKERDNLEEQLKELEGQNPEPDQDPTGDMLLKVRSVYDILISDSYTYIQKNEALKQIVDKIIYDKESDSLKIYFFLCR

SEQ ID NO: 6221 - protein, 493 aa, Unknown
  Description of Unknown: Integrase B6222 sequence
  PTHR30461:SF3,IPR036162,PS51737,IPR011109,PTHR30461, PS00397,PF00239,G3DSA:1.10.10.2600,IPR006119,SSF53041, cd00338,SM00857,IPR025827,IPR038109,PS51736, IPR006118,PF13408,G3DSA:3.40.50.1390,PF07508,Coil
MKTKYCYGYVRVSTSGQEELSPDSQAKLLKDFAKKNDMIVLQIFYELGISGRKADKRPEFQKMIALAKSDKHPVDCIIVWKFSRFARNQEESIVYKSLLKKKHNVEVLSVSEPLVDGPFGSLIERIIEWMDEYYSVRLSGEVTRGMTEKAKRGGYQARPPLGYKIQERGKPPVIVPEEAEIIKIIFDKYVNEHTGIFDIARYLNLCGFKTSHNKPFERRSIEYILQNPTYCGMIRWNRTVSETNEIRPESEWIVSDGQQPAIISKELFDKAQIRYKSEYKPSGTRPSSTYKHWLSGLMKCPVCGRTMIAKTVNNQKSYCYFTCYGYSKGKCLAKTSVSSLKLEPAVLASIKEVLDTGNIIYRHVEPVQETSVDLNVIITEQLRKNVEKFDRIREAYRNGVDTLDEYKENKRMVQEEKEMLEKQLADIKPAEPTIDTSKIAMLEKVRNVYEIIESDSVDSVTKNEILKSVIEKIIYDRSKDELKVYYYYAPESQ

SEQ ID NO: 6222 - protein, 493 aa, Unknown
  Description of Unknown: Integrase B6223 sequence
  PTHR30461:SF3,IPR036162,PS51737,IPR011109,PTHR30461, PS00397,PF00239,G3DSA:1.10.10.2600,IPR006119,SSF53041, cd00338,SM00857,IPR025827,IPR038109,PS51736, IPR006118,PF13408,G3DSA:3.40.50.1390,PF07508,Coil
MSVKYAYGYIRVSTHDQEEISPDSQEHLLRDYATKNNIVILKIFTDLGISGRKANKRPGFQEMIGLAKGDDHPVDQILVWKFSRFARNQEESIVYKSLLKKQHNVDVVSVSEPLSDDPFGSLIERIIEWMDEYYSIRLSGEVHRGMKENALRGAYQARPPLGYKVVEHGKPPVIVPEEAKIVRTIFEKYTNEGMSFFDIARYLNSLGLKTSHGKPFERRSVEYIIQNPSYCGMIRWNRTENSTNRIKDKDEWIVTEGQQPAIISKELFESAQERFKATYKPVGKRPSSTYKHWLSGLLKCPDCGRTLTSTTMKRVNGEKYSYFSCYGYSKGKCKKPNGISSLVLEKEVLASIKEILDTKDIVYELREYQPTEQFDERKAITEQLESLTGKEERIKASYREGIDTLEEYKANKAIIQKERESLEQQLKELKKAAHKPDQDPVDAMLQKVRSVYDILISNNYTYVQKNEALKQIIDKIIYDRKNDSLKIYFFLYR

SEQ ID NO: 6223 - protein, 493 aa, Unknown
  Description of Unknown: Integrase B6224 sequence
  PTHR30461:SF3,IPR036162,PS51737,IPR011109,PTHR30461, PS00397,PF00239,G3DSA:1.10.10.2600,IPR006119,SSF53041, cd00338,SM00857,IPR025827,IPR038109,PS51736, IPR006118,PF13408,G3DSA:3.40.50.1390,PF07508,Coil
MKTKYCYGYVRVSTSGQEELSPDSQAKLLKDFAKKDDMIVLQIFYELGISGRKADKRPEFQKMIALAKSDKHPVDCIIVWKFSRFARNQEESIVYKSLLKKKHNVEVLSVSEPLVDGPFGSLIERIIEWMDEYYSVRLSGEVTRGMTEKAKRGGYQARPPLGYKIQERGKPPVIVPEEAEIIKIIFDKYVNEHTGIFDIARYLNLCGFKTSHNKPFERRSIEYILQNPTYCGMIRWNRTVSETNEIRPESEWIVSDGQQPAIISKELFDKAQIRYKSEYKPSGTRPSSTYKHWLSGLMKCPVCGRTMIAKTVNNQKSYCYFTCYGYSKGKCLAKTSVSSLKLEPAVLASIKEVLDTGNIIYRHVEPVQETSVDLNVIITEQLRKNVEKFDRIREAYRNGVDTLDEYKENKRMVQEEKEMLEKQLADIKPAEPTIDTSKIAMLEKVRNVYEIIESDSVDSVTKNEILKSVIEKIIYDRSKDELKVYYYYAPESQ

SEQ ID NO: 6224 - protein, 493 aa, Unknown
  Description of Unknown: Integrase B6225 sequence
  SM00857,G3DSA:1.10.10.2600,IPR036162,PF13408,PS51737, G3DSA:3.40.50.1390,IPR025827,IPR006119,IPR038109,PF07508, IPR011109,SSF53041,PF00239,PTHR30461,PS51736, Coil,cd00338
MVLLDTYCIYLRKSRADAEAEARGEGETLARHEHALLDLAKRGNLTISHIYREIVSGDSIAARPQMQQMLQDVTDKAYTGVLVMEIERLARGDTIDQGVVAQAFRESGTKIVTPLKTYDPSNEFDEEYFEFSLFMSRREYKTIKRRMQAGRIASIKEGNYLGTNPPYGYKKVQPEPKVKTLEIVSEEAEAVKMMFNMYLSGDGARAIAARLNQLQIPPRKASMWEPVSVRKILRNPVYAGKIEWHTKKDGTILSDGVHPAIISWEQFQQSVERRKRTAPQVPTGYTTQNYYHGLLFCGNCGHQMKRRPVPNGTPHMLCRRYECRGKVVSSTTEKIDEAVLEAIKYRISELTLFKDQSGEEKRAKEKQKEFQRDQLKKALEKLKSQKEKLHTLLETDVYTVEVFLERSKALEAKKEELEKALHSITDSLQEKEHLAPEQAVIWLRYVLDHFSTADACQKSKMLQRIIKRIEYKKTEKMCYRKQSSDMSLHIDFL

SEQ ID NO: 6225 - protein, 493 aa, Unknown
  Description of Unknown: Integrase B6226 sequence
  cd03768,PTHR30461:SF3,SM00857,IPR036162,PF13408, IPR025827,G3DSA:3.40.50.1390,PS51737,IPR006119,PF07508, IPR011109,SSF53041,PTHR30461,PS51736,Coil, PF00239
MIAIYARQSIDKKDSISIESQIEYGKHEAFDEPYEVYQDKGYSGKNTNRPAFERMLKDINDGKINKVVVYRLDRISRSIVDFADFINNLEEKHVSFVSATEKFDTSAPMGRAMLYIIIVFAQLERETIAERVKDNYYSRIKKGAVGGGPAPYGFDLTKALVNGHKIATYAPNSNINNAVAIFNEYAKPNTSLADVQRFLAANNILTTKNKPWDNAKLSSILKSPTYVKADATIYNFYKSKGAIVANDIEDFNGENGCILVGKRDANSRKYADVSNHILAVSNHKGVIDSETFLYVQQKLSKNKQIKNLHKGTHSWLTGFVQCVNCGYSFSVRKSKCKNGFVDYFACSGKYLYKTCDLKQTHKVKDVEDHVQGEILKHIQEIRERQARSKQTNIVDLTLKKIADIDAKIEALISNLEESTAITAKYINQRIATLDDEKQQLIEQHSKDIAAKREQIVIPDYDYNNLSFDEKRELAKLLVKHVWLGSGKVEIEWK

SEQ ID NO: 6226 - protein, 493 aa, Unknown
  Description of Unknown: Integrase B6227 sequence
  PTHR30461:SF3,IPR036162,PS51737,IPR011109,PTHR30461, PS00397,PF00239,G3DSA:1.10.10.2600,IPR006119,SSF53041, cd00338,SM00857,IPR025827,IPR038109,PS51736, IPR006118,PF13408,G3DSA:3.40.50.1390,PF07508,Coil
MSVKYAYGYIRVSTHDQEEISPDSQEHLLRDYAAKNNIVIIKIFTDLGISGRKANKRPGFQEMIGLAKGDDHPVDLILVWKFSRFARNQEESIVYKSLLKKQHNVDVVSVSEPLSDDPFGSLIERIIEWMDEYYSIRLSGEVLRGMKENAARGAFQGAAPFGYKTIDKTLVIDPEKADIVRHVFNMYVNEKLSVFDIARYLNNLGFRTIRGNLFERRTVEYMLKNPTYCGMIHWNKTENATHSIKNKDEWIVSQGQHPAIISQELFDATQERLKATRRPSRRRERPSSTYKHWLSGLMKCPACGKTLSACTQKRVNGEKYAYFSCYGYAHGQCDKAHGVSSLVLEPEVLASIKEVLDTGNISYELHDYQPTEVVDERSIIRDRLNSLASKEERIKASYREGIDTLEEYKSNKAILQKERDNLEEQLKELEGQNPEPDQDPTGDMLLKVRSVYDILISDSYTYIQKNEALKQIVDKIIYDKESDSLKIYFFLCR

SEQ ID NO: 6227 - protein, 493 aa, Unknown
  Description of Unknown: Integrase B6228 sequence
  PTHR30461:SF3,IPR036162,PS51737,IPR011109,PTHR30461, PS00397,PF00239,G3DSA:1.10.10.2600,IPR006119,SSF53041, cd00338,SM00857,IPR025827,IPR038109,PS51736, IPR006118,PF13408,G3DSA:3.40.50.1390,PF07508,Coil
MSVKYAYGYIRVSTHDQEEISPDSQEHLLRDYAAKNNIVILKIFTDLGISGRKANKRPGFQEMIGLAKGDDHPIDQILVWKFSRFARNQEESIVYKSLLKKQHNVDVVSVSEPLSDDPFGSLIERIIEWMDEYYSIRLSGEVYRGMKENAIRGAYQARPPLGYKVVEHGKPPVIVPKEAKIVQTIFEKYVNESMGFFDIARYLNDLGLKTSHGKPFERRSIEYIIQNPSYCGMIRWNRTENSTNRIKDKDEWIVTEGQQPAIISKELFESAQERFKATYKPVGKRPSSTYKHWLSGLLKCPDCGRTLTSTTMKRVNGEKYSYFSCYGYSKGKCKKPNGISSLVLEKEVLASIKEILDTKDIVYELREYQPTEQFDERKAITEQLESLTGKEERIKASYREGIDTLEEYKANKAIIQKERESLEQQLKELKKAAHKSDQDPADSMLQKVRSVYDILISNNYTYVQKNEALKQIIDKIIYDRKNDSLKIYFFLYR

SEQ ID NO: 6228 - protein, 493 aa, Unknown
  Description of Unknown: Integrase B6229 sequence
  PTHR30461:SF3,IPR036162,PS51737,IPR011109,PTHR30461, PS00397,PF00239,G3DSA:1.10.10.2600,IPR006119,SSF53041, cd00338,SM00857,IPR025827,IPR038109,PS51736, IPR006118,PF13408,G3DSA:3.40.50.1390,PF07508,Coil
MKEKVSERKTGAIYIRVSTDKQEELSPDAQLRLLMDYAKKNSIDVPEEYIYQDNGISGRKANKRPAFQNMIALAKSKEHPIDTIIVWKFSRFARNQEESIVYKSLLSKNSVDVVSVSEPLIDGPFGSLIERIIEWMDEYYSIRLSGEVMRGMTQNAMRGHYQSDAPIGYTSPGDKKPPVINPDTVQIPLMIKDMFLSGSTQLQIARKLNDMGYRTKRGNLWDARGVRYVLENPFYIGKSRWNYTERGRKLKPSDEVIYADGNWEALWDEDTFKEIQKRLALNMRKAKSRDVSSAKHWLSGLLICSSCGGTLAYGGANSARGFQCWKYSKGFCSESHYISTRSIEKMVMEYLEYVLHSPTLSYTIISAASSDAESKLSDCERQLQKIDAKEKRIKAAYLNEIDTLEEYKANKTALEEERRTIEKEIEELTLSNVKYTKEDMDKKMKQNIQNLLLVLKDESADYVQKGNMMRNVVDHIVFDRKNTSLDVFLKLVI

SEQ ID NO: 6229 - protein, 493 aa, Unknown
  Description of Unknown: Integrase B6230 sequence
  PTHR30461:SF3,IPR036162,PS51737,IPR011109,PTHR30461, PS00397,PF00239,G3DSA:1.10.10.2600,IPR006119,SSF53041, cd00338,SM00857,IPR025827,IPR038109,PS51736, IPR006118,PF13408,G3DSA:3.40.50.1390,PF07508,Coil
MSVKYAYGYIRVSTHDQEEISPDSQEHLLRDYAAKNNIVIIKIFTDLGISGRKANKRPGFQEMIGLAKGDDHPVDLILVWKFSRFARNQEESIVYKSLLKKQHNVDVVSVSEPLSDDPFGSLIERIIEWMDEYYSIRLSGEVYRGMKENALRGAYQARPPLGYKVVEHGKPPVIVPEEAKIVRTIFEKYTNEGMSFFDIARYLNSLGLKTSHGKPFERRSVEYIIQNPSYCGMIRWNRTENSTNRIKDKDEWIVTEGQQPAIISKELFESAQERFKATYKPVGKRPSSTYKHWLSGLLKCPDCGRTLTSITMKRVNGEKYSYFSCYGYSKGKCKKPNGISSLVLEKEVLASIKEVLATKDIVYELREYQPTEQFDERKAITEQLESLNGKEERIKASYREGIDTLEEYKANKAIIQKERESLEQQLKELKKATHKSDQDPADAMLQKVRSVYDILISNNYTYVQKNEALKQIIDKIIYDRKNDSLKIYFFLYR

SEQ ID NO: 6230 - protein, 493 aa, Unknown
  Description of Unknown: Integrase B6231 sequence
  PTHR30461:SF3,IPR036162,PS51737,IPR011109,PTHR30461, PS00397,PF00239,G3DSA:1.10.10.2600,IPR006119,SSF53041, cd00338,SM00857,IPR025827,IPR038109,PS51736, IPR006118,PF13408,G3DSA:3.40.50.1390,PF07508,Coil
MSVKYAYGYIRVSTHDQEEISPDSQEHLLRDYAAKNNIVILKIFTDLGISGRKANKRPGFQEMIGLAKGDDHPVDQILVWKFSRFARNQEESIVYKSLLKKQHNVDVVSVSEPLSDDPFGSLIERIIEWMDEYYSIRLSGEVYRGMKENALRGAYQARPPLGYKVVEHGKPPVIVPEEAKIVRTIFEKYTNEGMSFFDIARYLNSLGLKTSHGKPFERRSVEYIIQNPSYCGMIRWNRTENSTNRIKDKDEWIVTEGQQPAIISKELFESAQKRFKATYKPVGKRPSSTYKHWLSGLLKCPDCGRTLTSTTMKRVNGEKYSYFSCYGYSKGKCKKPNGISSLVLEKEVLASIKEILDTKDIVYELREYQPTEQFDERKAITEHLESLTGKEERIKASYREGIDTLEEYKANKAIIQKERESLEQQLKELKKAARKSDQDPADAMLQKVRSVYDILISNNYTYIQKNEALKQIIDKIIYDRKNDSLKIYFFLYR

SEQ ID NO: 6231 - protein, 493 aa, Unknown
  Description of Unknown: Integrase B6232 sequence
  PTHR30461:SF3,IPR036162,PS51737,IPR011109,PTHR30461, PS00397,PF00239,G3DSA:1.10.10.2600,IPR006119,SSF53041, cd00338,SM00857,IPR025827,IPR038109,PS51736, IPR006118,PF13408,G3DSA:3.40.50.1390,PF07508,Coil
MSVKYAYGYIRVSTHDQEEISPDSQEHLLRDYAAKNNIVILKIFTDLGISGRKANKRPGFQEMIALAKGDDRPVDLILVWKFSRFARNQEESIVYKSLLKKQHNVDVVSVSEPLSDNPFGSLIERIIEWMDEYYSIRLSGEVYRGMKENALRGAYQARPPLGYKVVEHGKPPVIVPEEAKIVRTIFEKYTNEGMSFFDIARYLNSLGLKTSHGKPFERRSVEYIIQNPSYCGMIRWNRTENSTNRIKDKDEWIVTEGQQPAIISKELFESAQKRFKATYKPVGKRPSSTYKHWLSGLLKCPDCGRTLTSTTMKRVNGEKYSYFSCYGYSKGKCKKPNGISSLVLEKEVLASIKEILDTKDIVYELREYQPTEQFDERKAITEHLESLTGKEERIKASYREGIDTLEEYKANKAIIQKERESLEQQLKELKKAARKSDQDPADAMLQKVRSVYDILISNNYTYIQKNEALKQIIDKIIYDRKNDSLKIYFFLYR

SEQ ID NO: 6232 - protein, 493 aa, Unknown
  Description of Unknown: Integrase B6233 sequence
  PTHR30461:SF3,IPR036162,PS51737,IPR011109,PTHR30461, PS00397,PF00239,G3DSA:1.10.10.2600,IPR006119,SSF53041, cd00338,SM00857,IPR025827,IPR038109,PS51736, IPR006118,PF13408,G3DSA:3.40.50.1390,PF07508,Coil
MKEKVSERKTGAIYIRVSTDKQEELSPDAQLRLLMDYAKTNHTDIPMEYIFQDNGISGRKANKRPAFQQMIALAKSKEHPIDTIIVWKFSRFARNQEESIVYKSLLKKNNVDVVSVSEPLIDGPFGSLIERIIEWMDEYYSIRLSGEVMRGMTQNALRGHYQGDAPIGYQSPGNKKPPEKDPKTIQIPIMMKDLLLSGSSLLQIARKLNEQGYRTKHGNLWDARGVRYVLENPFYAGISRWNYTDRGRQLKPADEVIYTKGNWEPLWDKATLEEIQKHLAMNMRKAKSRDVSTAKHWLSGLLICSSCGGTLAYSGAKNSRGFQCWKYTKGFCNESHYIGIRPIEKMVIEYLESILHSPAIVYTVISSASADADSKLADLEKQLQKVENKEKRIKAAYLNEIDSLEEYKANKAALLKERAAIEKNIKLLTISNTDMSKEEMDKKMKQNISALLTVLQDDSADYVQKGNMMRNVVDHIVFDRGNTSLDMFLKLVI

SEQ ID NO: 6233 - protein, 493 aa, Unknown
  Description of Unknown: Integrase B6234 sequence
  PTHR30461:SF3,IPR036162,PS51737,IPR011109,PTHR30461, PS00397,PF00239,G3DSA:1.10.10.2600,IPR006119,SSF53041, cd00338,SM00857,IPR025827,IPR038109,PS51736, IPR006118,PF13408,G3DSA:3.40.50.1390,PF07508,Coil
MSVKYAYGYIRVSTHDQEEISPDSQEHLLRDYAAKNNIVILKIFTDLGISGRKANKRPGFQEMIGLAKGDDHPVDQILVWKFSRFARNQEESIVYKSLLKKQHNVDVVSVSEPLSDNPFGSLIERIIEWMDEYYSIRLSGEVLRGMKENAARGAFQGAAPFGYKTIDKTLVIDLEKADIVRHVFNMYVNEKLSVFDIARYLNNLGCRTIRGNLFERRTVEYMLKNPTYCGMIHWNKTENATHSIKNKDEWIVSQGQHPAIISQELFDATQERLKATRRPSRRRERPSSTYKHWLSGLMKCPACGKTLSACTQKRVNGEKYAYFSCYGYAHGQCDKAHGVSSLVLEPEVLASIKEILDTGNISYELHDYQPTEAVDERSIIKDRLNSLASKEERIKASYREGIDTLEEYKSNKAILQKERDNLEEQLKELEGQNPEPNQDPTGDMLLQVRSVYDILVSDSYTYVQKNEALKQIVDKIIYDKESDSLKIYFFLCR

SEQ ID NO: 6234 - protein, 493 aa, Unknown
  Description of Unknown: Integrase B6235 sequence
  PTHR30461:SF3,IPR036162,PS51737,IPR011109,PTHR30461, PS00397,PF00239,G3DSA:1.10.10.2600,IPR006119,SSF53041, cd00338,SM00857,IPR025827,IPR038109,PS51736, IPR006118,PF13408,G3DSA:3.40.50.1390,PF07508,Coil
MRVKYAYGYIRVSTHDQEEISPDSQEHLLRDYAAKNNIVILKIFTDLGISGRKANKRPGFQEMIGLAKGDDHPVDLILVWKFSRFARNQEESIVYKSLLKKQHNVDVVSVSEPLSDDPFGSLIERIIEWMDEYYSIRLSGEVYRGMKENALRGAYQARPPLGYKVVEHGKPPVIVPEEAKIVRTIFEKYTNEGMSFFDIARYLNSLGLKTSHGKPFERRSVEYIIQNPSYCGMIRWNRTENSTNRIKDKDEWIVTEGQQPAIISKELFESAQKRFKATYKPVGKRPSSTYKHWLSGLLKCPDCGRTLTSTTMKRVNGEKYSYFSCYGYSKGKCKKPNGISSLVLEKEVLASIKEVLDTKDIVYELREYQPTEQFDERKAITEQLESLTGKEERIKASYREGIDTLEEYKANKAIIQKERESLEQQLKELKKAAHKSDQDPADAMLQKVRSVYDILISNNYTYIQKNEALKQIIDKIIYDRKNDSLKIYFFLYR

SEQ ID NO: 6235 - protein, 493 aa, Unknown
  Description of Unknown: Integrase B6236 sequence
  PTHR30461:SF3,IPR036162,PS51737,IPR011109,PTHR30461, PS00397,PF00239,G3DSA:1.10.10.2600,IPR006119,SSF53041, cd00338,SM00857,IPR025827,IPR038109,PS51736, IPR006118,PF13408,G3DSA:3.40.50.1390,PF07508,Coil
MSVKYAYGYIRVSTHDQEEISPDSQEHLLRDYAARNNIVILKIFTDLGISGRKANKRPGFQEMIGLAKGDDHPVDQILVWKFSRFARNQEESIVYKSLLKKQHNVDVVSVSEPLSDDPFGSLIERIIEWMDEYYSIRLSGEVYRGMKENALRGAYQARPPLGYKVVEHGKPPVIVPEEAKIVRTIFEKYTNESMSFFDIARYLNSLGLKTSHGKSFERRSVEYIIQNPSYCGMIRWNRTENSTNRIKDKDEWIVTEGQQPAIISKELFESAQKRFKATYKPVGKRPSSTYKHWLSGLLKCPDCGRTLTSTTMKRVNGEKYSYFSCYGYSKGKCKKPNGISSLVLEKEVLACIKEILDTKDIVYELREYQPTDQFDERKAITEQLESLTGKEERIKASYREGIDTLEEYKTNKAIIQKERESLEQQLKDLKKAAHKSDQDPADAMLQKVRSVYDILISNNYTYVQKNEALKQIIDKIIYDRKNDSLKIYFFLYR

SEQ ID NO: 6236 - protein, 493 aa, Unknown
  Description of Unknown: Integrase B6237 sequence
  PTHR30461:SF3,IPR036162,PS51737,IPR011109,PTHR30461, PS00397,PF00239,G3DSA:1.10.10.2600,IPR006119,SSF53041, cd00338,SM00857,IPR025827,IPR038109,PS51736, IPR006118,PF13408,G3DSA:3.40.50.1390,PF07508,Coil
MKEKVSERKTGAIYIRVSTDKQEELSPDAQLRLLMDYAKKNSIDVPEEYIYQDNGISGRKANKRPAFQNMIALAKSKEHPIDTIIVWKFSRFARNQEESIVYKSLLSKNSVDVVSVSEPLIDGPFGSLIERIIEWMDEYYSIRLSGEVMRGMTQNAMRGHYQSDAPIGYKSPGDKKPPVINPDTVQIPLMIKDMFLSGSTQLQIARKLNDMGYRTKRGNLWDARGVRYVLENPFYIGKSRWNYTERGRKLKPSDEVIYADGNWEALWDEDTFKEIQKRLALNMRKAKSRDVSSAKHWLSGLLICSSCGGTLAYGGANSARGFQCWKYSKGFCSESHYISTGSIEKMVMEYLEYVLHSPTLSYTIISAASSDAESKLSDCERQLQKIDAKEKRIKAAYLNEIDTLEEYKANKTALEEERRTIEKEIEELTLSNVKYTKEDMDKKMKQNIQNLLLVLKDESADYVQKGNMMRNVVDHIVFDRKNTSLDVFLKLVI

SEQ ID NO: 6237 - protein, 493 aa, Unknown
  Description of Unknown: Integrase B6238 sequence
  PTHR30461:SF3,IPR036162,PS51737,IPR011109,PTHR30461, PS00397,PF00239,G3DSA:1.10.10.2600,IPR006119,SSF53041, cd00338,SM00857,IPR025827,IPR038109,PS51736, IPR006118,PF13408,G3DSA:3.40.50.1390,PF07508,Coil
MSVKYAYGYIRVSTHDQEEISPDSQEHLLRDYAAKNNIVILKIFTDLGISGRKANKRPGFQEMIGLAKGDDHPVDQILVWKFSRFARNQEESIVYKSLLKKQHNVDVVSVSEPLSDNPFGSLIERIIEWMDEYYSIRLSGEVLRGMKENAARGAFQGAAPFGYKTVDKTLVIDPEKADIVRHVFNMYANEKLSVFDIARYLNNLGCRTIRGNLFERRTVEYMLKNPTYCGMIHWNKTENATHSIKNKDEWIVSQGQHPAIISQELFDATQERLKATRRPSRRRERPSSTYKHWLSGLMKCPACGKTLSACTQKRVNGEKYAYFSCYGYAHGQCDKAHGVSSLVLEPEVLAGIKEVLDTGNISYELHDYQPTEAVDERSIIRDRLNNLTSKEERIKASYREGIDTLEEYKSNKAILQKERDNLEEQLKELEGQNPEPDQDPSGDMLLKVRSVYDILISDSYTYVQKNEALKQIVDKIIYDKESDSLKIYFFLCR

SEQ ID NO: 6238 - protein, 493 aa, Unknown
  Description of Unknown: Integrase B6239 sequence
  PTHR30461:SF3,IPR036162,PS51737,IPR011109,PTHR30461, PF00239,G3DSA:1.10.10.2600,IPR006119,SSF53041,cd00338, SM00857,IPR025827,IPR038109,mobidb-lite,PS51736, PF13408,G3DSA:3.40.50.1390,PF07508,Coil
MNSCVIYARFSSDKQREESIEGQVRECRAFADANNLEVIHIYVDRAKSARTDQRPDFLKMIKQSAKGLFQYVIVYTLDRFSRSRYDSVTYKAKLKKNGVKVLSAKENIRDDPSGIILESVLEGYAEYYSAELAQKVKRGMTDSILEHKWPGTEVPFGYHKKEDGTLDVDPIAAPVVKKIFEAVLQGHTRAEITRRVAMKHYKTESGRSISYAMINRLIKNELYTGRYHWGQLDVAGFCPVLVKKETFEAVQRAIAPHPKTRRNAAAYVLTGKIYCGKCKEAMAGVCGTSKSGEKYRYYRCASKSNSIRRNRIPCSGHNVPVAWLDDIVFKTTLDILNTPEARTEIARQAIEAQRRDKSTDSEEKHLKKQKADVEKRLQNSVKAIEAGVVSDTIAANIKKYEKEIKDIQAAIDELKLKTAVPEITETAIEFFFEQLAKKAKTEGATLGLFFDFIQRVEVFDDKVVIYYSYLPTKKTPNPVEVRCSSNYQMVTPE

SEQ ID NO: 6239 - protein, 493 aa, Unknown
  Description of Unknown: Integrase B6240 sequence
  PTHR30461:SF3,IPR036162,PS51737,IPR011109,PTHR30461, PS00397,PF00239,G3DSA:1.10.10.2600,IPR006119,SSF53041, cd00338,SM00857,IPR025827,IPR038109,PS51736, IPR006118,PF13408,G3DSA:3.40.50.1390,PF07508,Coil
MKETLSERKTGAIYIRVSTDKQEELSPDAQLRLLMDYAKNNHTDIPMEYIFQDNGISGRKANKRPAFQQMIALAKSKEHPIDTIIVWKFSRFARNQEESIVYKSLLKKNNVDVVSVSEPLIDGPFGSLIERIIEWMDEYYSIRLSGEVMRGMTQNALRGHYQGDAPIGYRSPGNKKPPEKDPKTIQIPIAMKDLLLSGSSLLQIARKLNEQGYRTKHGNLWDARGVRYVLENPFYTGISRWNYTDRGRQLKPADEVIYTKGNWEPLWDKATLEEIKKHLAMNMRKTKSRDVSAAKHWLSGLLICSSCGGTLAYSGTKNSRGFQCWKYTKGFCNKSHYIGIHPIEKMVIEYLESVLHSPAIVYTVISSASADADSKLADLEKQLQKVENKEKRIKAAYLNEIDTLEEYKANKAALLEERATIEKNIKLLTVSNADMSKEEMDKKMKQNISALLAVLQDDSADYVQKGNMMRNVVDHIVFDRGNTSLDMFLKLVI

SEQ ID NO: 6240 - protein, 493 aa, Unknown
  Description of Unknown: Integrase B6241 sequence
  PTHR30461:SF3,IPR036162,PS51737,IPR011109,PTHR30461, PS00397,PF00239,G3DSA:1.10.10.2600,IPR006119,SSF53041, cd00338,SM00857,IPR025827,IPR038109,PS51736, IPR006118,PF13408,G3DSA:3.40.50.1390,PF07508,Coil
MSVKYAYGYIRVSTHDQEEISPDSQEHLLRDYAAKNNIVILKIFTDLGISGRKANKRPGFQEMIGLAKGDDHPVDQILVWKFSRFARNQEESIVYKSLLKKQHNVDVVSVSEPLSDDPFGSLIERIIEWMDEYYSIRLSGEVYRGMKENALRGAYQARPPLGYKVVEHSKPPVIIPEEAKIVRTIFEKYTNEGMSFFDIARYLNSLGLKTSHGKPFERRSVEYIIQNPSYCGMIRWNRTENSTNRIKDKDEWIVTEGQQPAIISKELFESAQERFKATYKPVGKRPSSTYKHWLSGLLKCPDCGRTLTSTTMKRVNGEKYSYFSCYGYSKGKCKKPNGISSLVLEKEVLDSIKEVLDTKDIVYELREYQPTEQFDERKAITEQLESLTGKEERIKASYREGIDTLEEYKANKAIIQKERESLEQQLKELKKAARKSDQDPADAMLQKVRSVYDILISNNYTYVQKNEALKQIIDKIIYDRKNDSLKIYFFLYR

SEQ ID NO: 6241 - protein, 493 aa, Unknown
  Description of Unknown: Integrase B6242 sequence
  PTHR30461:SF3,cd00338,SM00857,G3DSA:1.10.10.2600,IPR036162, PF13408,IPR025827,G3DSA:3.40.50.1390,PS51737,IPR006119, IPR038109,PF07508,IPR011109,SSF53041,PTHR30461, PS51736,Coil,PF00239
MKTAVIYARYSSDKQTEQSIEGQLYDCYNYAKQHGITVVQEYIDRAMTGKNDDRPAFQQMLHESAMHKWDSVIVWKLDRFARNTIDSAVNRQILAKNGVKLLSVMESFGDDASGQMMTHIIEAINEYYSADLREKTIRGMRQSAMKAQTTGHIPLGYKVVDKKLVIDDETRIIPETVFRMYAEGERLTEIAEHLNAQGYRNRRGRPFTTNSFYNMLANEKYIGIYKYDDIVIEGGIPQMIPNEVFEAVREKLITNRKRAAKNTAKADYYLSGKLYCGHCGEPMSGLSGTGRNGVKHYYYRCNGVQKKSGCHKKLENKYLIEDEVCRAARSAFEQMDKAETAETIYQMYLQTVRNEYAPAELEKELTECTKQAENVVNAIAQTGGNQLLYDKVRELEERKEQLSSALRLSQAMTDNVPSVEQITVFIDDILATDINTTEGKKSIADIMISKVYVYDDKLTVIFKDKDGKSVDIPLSAVSDSSSADCAPSALGSQ

SEQ ID NO: 6242 - protein, 493 aa, Unknown
  Description of Unknown: Integrase B6243 sequence
  PTHR30461:SF3,IPR036162,PS51737,IPR011109,PTHR30461, PS00397,PF00239,G3DSA:1.10.10.2600,IPR006119,SSF53041, cd00338,SM00857,IPR025827,IPR038109,PS51736, IPR006118,PF13408,G3DSA:3.40.50.1390,PF07508,Coil
MKETLSERKTGAIYIRVSTDKQEELSPDAQLRLLMDYAKTNHTDIPMEYIFQDNGISGRKADKRPAFQQMIALAKSKEHPIDTIIVWKFSRFARNQEESIVYKSLLKKNNVDVVSVSEPLIDGPFGSLIERIIEWMDEYYSIRLSGEVMRGMTQNALRGHYQGDAPIGYQSPGNKKPPEKDPKTIQIPIMMKDLLLSGSSLLQIARKLNEHGYRTKHGNLWDARGVRYVLENPFYAGISRWNYTDRGRQLKPADEVIYTKGNWEPLWDKATLKEIQKHLAMNMRKAKSRDVSTAKHWLSGLLICSSCGGTLAYSGTKNSRGFQCWKYTKGFCNESHYIGIHPIEKMVIEYLESILHSPAIVYTVISSASADADSKLADLEKQLQKVENKEKRIKAAYLNEIDSLEEYKANKAALLKERAAIEKNIKLLTISNTDMSKEEMDKKMKQNISALLTVLQDVSADYVQKGNMMRNVVDHIVFDRGNTSLDMFLKLVI

SEQ ID NO: 6243 - protein, 493 aa, Unknown
  Description of Unknown: Integrase B6244 sequence
  PTHR30461:SF3,IPR036162,PS51737,IPR011109,PTHR30461, PS00397,PF00239,G3DSA:1.10.10.2600,IPR006119,SSF53041, cd00338,SM00857,IPR025827,IPR038109,PS51736, IPR006118,PF13408,G3DSA:3.40.50.1390,PF07508,Coil
MSVKYAYGYIRVSTHDQEEISPDSQEHLLRDYAAKNNIVILKIFTDLGISGRKANKRPGFQEMIGLAKGDDHPVDQILVWKFSRFARNQEESIVYKSLLKKQHNVDVVSVSEPLSDDPFGSLIERIIEWMDEYYSIRLSGEVYRGMKENALRGAYQARPPLGYKVVEHGKPPVIVPEEAKIVRTIFEKYTNEGMSFFDIARYLNSLGLKTSHGKPFERRSVEYIIQNPSYCGMIRWNRTENSTNRIKDKDEWIVTEGQQPAIISKELFESAQERFKATYKPVGKRPSSTYKHWLSGLLKCPDCGRTLTSTTMKRVNGEKYSYFSCYGYSKGKCKKPNGISSLVLEKEVLASIKEILDTKDIVYELREYQPTEQFDERKAITEQLESLTGKEERIKASYREGIDTLEEYKANKAIIQKERESLEQQLKELKKTARKSDQDPADAMLQKVRSVYDILISNNYTYVQKNEALKQIIDKIIYDRKNDSLKIYFFLYR

SEQ ID NO: 6244 - protein, 493 aa, Unknown
  Description of Unknown: Integrase B6245 sequence
  PTHR30461:SF3,IPR036162,PS51737,IPR011109,PTHR30461, PS00397,PF00239,G3DSA:1.10.10.2600,IPR006119,SSF53041, cd00338,SM00857,IPR025827,IPR038109,PS51736, IPR006118,PF13408,G3DSA:3.40.50.1390,PF07508,Coil
MSVKYAYGYIRVSTHDQEEISPDSQEHLLRDYAAKNNIVILKIFTDLGISGRKANKRPGFQEMIGLAKGDDHPVDQILVWKFSRFARNQEESIVYKSLLKKQHNVDVVSVSEPLSDDPFGSLIERIIEWMDEYYSIRLSGEVYRGMKENALRGAYQARPPLGYKVVEHGKPPVIVPEEAKIVRTIFEKYTNEGMSFFDIAKYLNSLGLKTSHGKSFERRSVEYIVQNPSYCGMIRWNRTENSTNRIKDKDEWIVAEGQQPAIISKELFESAQERFKATYKPVGKRPSSTYKHWLSGLLKCPDCGRTLTSTTMKRVNGEKYSYFSCYGYSKGKCKKPNGISSLVLEKEVLASIKEVLDTKDIVYELREYQPTEQFDERKAITEQLESLTGKEERIKTSYREGIDTLEEYKANKAIIQKERESLEQQLKELKKAAHKSDQDPADAMLQKVRSVYDILISNNYTYVQKNEALKQIIDKIVYDRKNDSLKIYFFLYR

SEQ ID NO: 6245 - protein, 493 aa, Unknown
  Description of Unknown: Integrase B6246 sequence
  PTHR30461:SF3,IPR036162,PS51737,IPR011109,PTHR30461, PS00397,PF00239,G3DSA:1.10.10.2600,IPR006119,SSF53041, cd00338,SM00857,IPR025827,IPR038109,PS51736, IPR006118,PF13408,G3DSA:3.40.50.1390,PF07508,Coil
MSVKYAYGYIRVSTHDQEEISPDSQEHLLRDYAAKNNIVILKIFTDLGISGRKANKRPGFQEMIGLAKGDDHPVDQILVWKFSRFARNQEESIVYKSLLKKQHNVDVVSVSEPLSDNPFGSLIERIIEWMDEYYSIRLSGEVLRGMKENAARGAFQGDAPFGYKTVDKTLVIDPEKADIVRHVFNMYVNEKLSVFDIARYLNNLGFRTIRGNLFERRTVEYMLKNPTYCGMIHWNKTENATHSIKNKDEWIVSQGQHPSIISQELFDATQERLKATRRPSRRRERPSSTYKHWLSGLMKCPACGKTLSACTQKRVNGEKYAYFSCYGYAHGQCDKAHGVSSLVLEPEVLASIKEVLDTGNISYELHDYQPTEVVDERSIIRDRLNSLASKEERIKASYREGIDTLEEYKSNKAILQKERDNLEEQLKELEGQNPEPDQDPTGDMLLKVRSVYDILISDSYTYIQKNEALKQIVDKIIYDKESDSLKIYFFLCR

SEQ ID NO: 6246 - protein, 493 aa, Unknown
  Description of Unknown: Integrase B6247 sequence
  PTHR30461:SF3,IPR036162,PS51737,IPR011109,PTHR30461, PS00397,PF00239,G3DSA:1.10.10.2600,IPR006119,SSF53041, cd00338,SM00857,IPR025827,IPR038109,PS51736, IPR006118,PF13408,G3DSA:3.40.50.1390,PF07508,Coil
MSVKYAYGYIRVSTHDQEEISPDSQEHLLRDYAAKNNIVILKIFTDLGISGRKANKRPGFQEMIGLAKGDDHPVDQILVWKFSRFARNQEESIVYKSLLKKQHNVDVVSVSEPLSDDPFGSLIERIIEWMDEYYSIRLSGEVYRGMKENALRGAYQARPPLGYKVVEHGKPPVIVPEEAKIVRTIFEKYTNEGMSFFDIARYLNSLGLKTSHGKPFERRSVEYIVQNPSYCGMIRWNRTENSTNRIKDKDEWIVTEGQQPAIISKELFESAQKRFKATYKPVGKRPSSTYKHWLSGLLKCPDCGRTLTSTTMKRVNGEKYSYFSCYGYSKGKCKKPNGISSLVLEKEILASIKEVLDTKDIVYELREYQPTEQFDERKAITEQLESLTGKEERIKASYREGIDTLEEYKANKAIIQKERESLEQQLKELKKAAHKSDQDPADAMLQKVRSVYDILISNNYTYVQKNEALKQIIDKIIYDRKNDSLKIYFFLYR

SEQ ID NO: 6247 - protein, 493 aa, Unknown
  Description of Unknown: Integrase B6248 sequence
  PTHR30461:SF3,IPR036162,PS51737,IPR011109,PTHR30461, PS00397,PF00239,G3DSA:1.10.10.2600,IPR006119,SSF53041, SM00857,IPR025827,IPR038109,PS51736,cd03768, IPR006118,PF13408,G3DSA:3.40.50.1390,PF07508,Coil
MRVICYVRVSTREQAEKGYSVGEQQERLRAYCMAKDWIVEDVITDPGFSGAKLERPGIQRVIQLVQEKKCEAVLVWKLDRLSRSQKDTLYLIEDVFLKNGCAFVSMNENFDTSTAFGRAMIGILSVFAQLEREQIRERMAVGRVGRAKAGLFHGGGFAPIGYDYKTIAEGGEGLVVNEYEAMQVREVFSLYLQGWPVNRIRKYMTARYTTKSGDWGNDTTIRDVLKNPLYIGKINWAKKIYDGKHEPIIDEETFNAAAARLASSQWKRDCSDGLERNSPFHSTHLLGGILWCGRCGARYFASGNYSGKGENRKYWPYYVCYSRAKSAKRMIRDPNCKNDRWPVAKLDKIILDQVRQLIFDPEALERAAGGNQEAPPSERRALLNARRAEAKGQIDRLLDLCQMGTLPAAAVADRLKSLQDEVEGIDTALRELAEDDPAERLEAARGTLVGAAEILDNGSLDEKRELVHSLIHRIDLDGENIDIHWSFAPGKSE

SEQ ID NO: 6248 - protein, 493 aa, Unknown
  Description of Unknown: Integrase B6249 sequence
  PTHR30461:SF3,IPR036162,PS51737,IPR011109,PTHR30461, PS00397,PF00239,G3DSA:1.10.10.2600,IPR006119,SSF53041, cd00338,SM00857,IPR025827,IPR038109,PS51736, IPR006118,PF13408,G3DSA:3.40.50.1390,PF07508,Coil
MSVKYAYGYIRVSTHDQEEISPDSQEHLLRDYAAKNNIVILKIFTDLGISGRKANKRPGFQEMIGLAKGDDHPVDLILVWKFSRFARNQEESIVYKSLLKKQHNVDVVSVSEPLSDDPFGSLIERIIEWMDEYYSIRLSGEVHRGMKENALRGAYQARPPLGYKVVEHGKPPVIVPEEAKIVRTIFEKYTNEGMSFFDIARYLNSLGLKTSHEKPFERRSVEYIIQNPSYCGMIRWNRTENSTNRIKDKDEWIVTEGQQPAIISKELFESAQKRFKATYKPVGKRPSSTYKHWLSGLLKCPDCGRTLTSTTMKRVNGEKYSYFSCYGYSKGKCKKPNGISSLVLEKEVLASIKEILDTKDIVYELREYQPTEQFDERKAITEQLESLTGKEERIKASYREGIDTLEEYKANKAIIQKERESLEQQLKDLKKAAHKSDQDPADAMLQKVRSVYDILISNNYTYVQKNEALKQIIDKIIYDRKNDSLKIYFFLYR

SEQ ID NO: 6249 - protein, 493 aa, Unknown
  Description of Unknown: Integrase B6250 sequence
  PTHR30461:SF3,IPR036162,PS51737,IPR011109,PTHR30461, PS00397,PF00239,G3DSA:1.10.10.2600,IPR006119,SSF53041, cd00338,SM00857,IPR025827,IPR038109,PS51736, IPR006118,PF13408,G3DSA:3.40.50.1390,PF07508,Coil
MSVKYAYGYIRVSTHDQEEISPDSQEHLLRDYAAKNNIVILKIFTDLGISGRKANKRPGFQEMIGLAKGDGHPVDLILVWKFSRFARNQEESIVYKSLLKKQHNVDVVSVSEPLSDDPFGSLIERIIEWMDEYYSIRLSGEVYRGMKENALRGAYQARPPLGYKVVEHGKPPMIVPEEAKIVRTIFEKYTNEGMSFFDIARYLNSLGLKTSHGKPFERRSVEYIIQNPSYCGMIRWNRTENGTNRIKDKDEWIVTEGQQPAIISKELFESAQKRFKATYKPVGKRPSSTYKHWLSGLLKCPDCGRTLTSTTMKRVNGEKYSYFSCYGYSKGKCKKPNGISSLVLEKEVLASIKEILDTKDIVYELREYQPTEQFDERKAITEQLESLTGKEERIKASYREGIDTLEEYKANKAIIQKERKSLEQQLKELKKAARKSDQDPADAMLQKVRSVYDILISNNYTYIQKNEALKQIIDKIIYDRKNDSLKIYFFLYR

SEQ ID NO: 6250 - protein, 493 aa, Unknown
  Description of Unknown: Integrase B6251 sequence
  PTHR30461:SF3,cd00338,SM00857,G3DSA:1.10.10.2600,IPR036162, PF13408,IPR025827,G3DSA:3.40.50.1390,PS51737,IPR006119, IPR038109,PF07508,SSF53041,IPR011109,PTHR30461, PS51736,Coil,PF00239
MQTAVIYARYSSDKQTEQSIEGQLYDCYNYAKQHGITVVQEYIDRAMTGKNDDRPAFQQMLHESAMHKWDSVIVWKLDRFARNTIDSAVNRQILAKNGVKLLSVMESFGDDASGQMMTHIIEAINEYYSADLREKTIRGMRQSAMKAQTTGHIPLGYKVVDKKLVIDDETRIIPETVFRMYAEGERLTDIAEHLNAQGYRNRRGRPFTTNSFYNMLSNEKYIGIYKYDDIVIEGGIPQMIPNDVFEAVREKLITNRKRAAKNTAKADYYLSGKLYCGHCGEPMSGLSGTGRNGVKHYYYRCNGVQKKSGCHKKLENKYLIEDEVCRAARSAFEQMDKAETAETIYQMYLQTVRNEYAPAELEKELTECTKQAENVVNAIAQTGGNQLLYDKVRELEERKEQLSSALRLSQAMTDNVPSVEQITVFIDDILATDINTTEGKKSIADIMISKVYVYDDKLTVIFKDKDGKSVDIPLSAVSDTSSADCAPSALGSQ

SEQ ID NO: 6251 - protein, 493 aa, Unknown
  Description of Unknown: Integrase B6252 sequence
  PTHR30461:SF3,IPR036162,PS51737,IPR011109,PTHR30461, PS00397,PF00239,G3DSA:1.10.10.2600,IPR006119,SSF53041, cd00338,SM00857,IPR025827,IPR038109,PS51736, IPR006118,PF13408,G3DSA:3.40.50.1390,PF07508,Coil
MSVKYAYGYIRVSTHDQEEISPDSQEHLLRDYAAKNNIVILKIFTDLGISGRKANKRPGFQEMIGLAKGDDHPADLILVWKFSRFARNQEESIVYKSLLKKQHNVDVVSVSEPLSDNPFGSLIERIIEWMDEYYSIRLSGEVLRGMKENAARGAFQGAAPFGYKTIDKTLVIDPKKADIVRHVFNMYVNEKLSVFDIARYLNNLGFRTIRGNLFERRTVEYMLKNPTYCGMIHWNKTENATHSIKNKDEWIVSQGQHPAIISQELFDATQERLKATRRPSRRRERPSSTYKHWLSGLMKCPACGKTLSACTQKRVNGEKYAYFSCYGYAHGQCDKAHGVSSLVLEPEVLASIKEILDTGNISYELHDYQPTEAVDERSIIRDRLNSLTSKEERIKASYREGIDTLEEYKSNKAILQKERDNLEEQLKELEGQNPEPDQDPTGDMLLKVRSVYDILVSDSYTYVQKNEALKQIVDKIIYDKESDSLKIYFFLCR

SEQ ID NO: 6252 - protein, 493 aa, Unknown
  Description of Unknown: Integrase B6253 sequence
  PTHR30461:SF3,IPR036162,PS51737,IPR011109,PTHR30461, PS00397,PF00239,G3DSA:1.10.10.2600,IPR006119,SSF53041, cd00338,SM00857,IPR025827,IPR038109,PS51736, IPR006118,PF13408,G3DSA:3.40.50.1390,PF07508,Coil
MSVKYAYGYIRVSTHDQEEISPDSQEHLLRDYATKNDIVILKIFTDLGISGRKANKRPGFQEMIGLAKGDDHPVDLILVWKFSRFARNQEESIVYKSLLKKQHNVDVVSVSEPLSDDPFGSLIERIIEWMDEYYSIRLSGEVYRGMKENALRGAYQARPPLGYKVVEHGKPPVIVPEEAKIVRTIFEKYTNEGMSFFDIARYLNSLGFKTSHGKPFERRSIEYIIQNPSYCGMIRWNRTENSTNRIKDKDEWIVTEGQQPAIISKELFESAQERFKATYKPVGKRPSSTYKHWLSGLLKCPDCGRTLTSTTMKRVNGEKYSYFSCYGYSKGKCKKPNGISSLVLEKEVLASIKEILDTKDIFYELREYQPTEQFDERKAITEQLESLTGKEERIKASYREGIDTLEEYKANKAIIQKERESLEQQLKELKKAARKSDQDPADAMLQKVRSVYDILISNNYTYIQKNEALKQIIDKIIYDRKNDSLKIYFFLYR

SEQ ID NO: 6253 - protein, 493 aa, Unknown
  Description of Unknown: Integrase B6254 sequence
  PTHR30461:SF3,IPR036162,PS51737,IPR011109,PTHR30461, PS00397,PF00239,G3DSA:1.10.10.2600,IPR006119,SSF53041, cd00338,SM00857,IPR025827,IPR038109,PS51736, IPR006118,PF13408,G3DSA:3.40.50.1390,PF07508,Coil
MSVKYAYGYIRVSTHDQEEISPDSQEHLLRDYATKNNIVILKIFTDLGISGRKANKRPSFQEMIGLAKGDDHPVDQILVWKFSRFARNQEESIVYKSLLKKQHNVDVVSVSEPLSDNPFGSLIERIIEWMDEYYSIRLSGEVLRGMKENAARGAFQGAAPFGYKTVDKTLVIDPEKADIVRHVFNMYANEKLSVFDIARYLNNLGLRTIRGNLFERRTVEYMLKNPTYCGMIHWNKTENATHSIKNKDEWIVSQGQHPAIISQELFDTTQERLKATRRPSRRRERPSSTYKHWLSGLMKCPACGKTLSACTQKRVNGEKYAYFSCYGYAHGQCDKAHGVSSLVLEPEVLASIKEILDTGNISYELHDYQPTEAVDERSIIRDRLNSLTSKEERIKASYREGIDTLEEYKSNKAILQKERDNLEEQLKELEGQNPEPDQDPTGDMLLKVRSVYDILISDSYTYVQKNEALKQIVDKIIYDKESDSLKIYFFLCR

SEQ ID NO: 6254 - protein, 493 aa, Unknown
  Description of Unknown: Integrase B6255 sequence
  PTHR30461:SF3,IPR036162,PS51737,IPR011109,PTHR30461, PS00397,PF00239,G3DSA:1.10.10.2600,IPR006119,SSF53041, cd00338,SM00857,IPR025827,IPR038109,PS51736, mobidb-lite,IPR006118,PF13408,G3DSA:3.40.50.1390,PF07508,Coil
MKEKVSERKTGAIYIRVSTDKQEELSPDAQLRLLMDYAKTNHTDIPMEYIFQDNGISGRKANKRPAFQQMIALAKSKEHPIDTIIVWKFSRFARNQEESIVYKSLLKKNNVDVVSVSEPLIDGPFGSLIERIIEWMDEYYSIRLSGEVMRGMTQNALRGHYQGDAPIGYQSPGNKKPPEKDPKTVQIPIMMKDLLLSGSSLLQIARKLNEQGYRTKHGNLWDARGVRYVLENPFYAGISRWNYTDRGRQLKPADEVIYTKGNWEPLWDKATLEEIKKHLAMNMRKAKSRDVSTAKHWLSGLLICSSCGGTLAYSGTKNSRGFQCWKYTKGFCNESHYIGIRPIEKMVIEYLESILHSPAIVYTVISSASADADSKLTDLEKQLQKVENKEKRIKAAYLNEIDSLEEYKANKAALLKERAAIEKNIKLLTISNTDMSKEEMDKKMKQNISALLTVLQDDSADYVQKGNMMRNVVDHIVFDRGNTSLDMFLKLVI

SEQ ID NO: 6255 - protein, 493 aa, Unknown
  Description of Unknown: Integrase B6256 sequence
  PTHR30461:SF3,IPR036162,PS51737,IPR011109,PTHR30461, PS00397,PF00239,G3DSA:1.10.10.2600,IPR006119,SSF53041, cd00338,SM00857,IPR025827,IPR038109,PS51736, mobidb-lite,IPR006118,PF13408,G3DSA:3.40.50.1390,PF07508,Coil
MKETLSERKTGAIYIRVSTDKQEELSPDAQLRLLMDYAKTNHTDIPMEYIFQDNGISGRKANKRPAFQQMIALAKSKEHPIDTIIVWKFSRFARNQEESIVYKSLLKKNNVDVVSVSEPLIDGPFGSLIERIIEWMDEYYSIRLSGEVMRGMTQNALRGHYQGDAPIGYQSPGNKKPPEKDPKTVQIPIMMKDLLLSGSSLLQIARKLNEQGYRTKHGNLWDARGVRYVLENPFYAGISRWNYTDRGRQLKPADEVIYTKGNWEPLWDKATLEEIKKHLAMNMRKTKSRDVSAAKHWLSGLLICSSCGGTLAYSGTKNSRGFQCWKYTKGFCNESHYIGIRPIEKMVIEYLESILHSPAIVYTVISSASADADSKLADLEKQLQKVENKEKRIKAAYLNEIDSLEEYKANKAALLKERVAIEKNIKLLTISNIDMSKEEMDKKMKQNISALLTVLRDDSADYVQKGNMMRNVVDHIVFDRGNTSLDMFLKLVI

SEQ ID NO: 6256 - protein, 493 aa, Unknown
  Description of Unknown: Integrase B6257 sequence
  PTHR30461:SF3,IPR036162,PS51737,IPR011109,PTHR30461, PS00397,PF00239,G3DSA:1.10.10.2600,IPR006119,SSF53041, cd00338,SM00857,IPR025827,IPR038109,PS51736, IPR006118,PF13408,G3DSA:3.40.50.1390,PF07508,Coil
MSVKYAYGYIRVSTHDQEEISPDSQEHLLRDYAAKNNIVILKIFTDLGISGRKANKRPGFQEMIGLAKGDDHPVDLILVWKFSRFARNQEESIVYKSLLKKQHNVDVVSVSEPLSDDPFGSLIERIIEWMDEYYSIRLSGEVYRGMKENALRGAYQARPPLGYKVVEHGKPPVIVPEEAKIVRTIFEKYTNEGMSFFDIARYLNSLGFKTSHGKPFERRSIEYIIQNPSYCGMIRWNRTENSTNRIKDKDEWIVTEGQQPAIISKELFESAQERFKATYKPVGKRPSSTYKHWLSGLLKCPDCGRTLTSTTMKRVNGEKYSYFSCYGYSKGKCKKPNGISSLVLEKEVLASIKEVLDTKDIVYELREYQPTEQFDERKAITEQLESLTGKEERIKASYREGIDTLEEYKTNKAIIQKERESLEQQLKELKKAAHKSDRDPADAMLQKVRSVYDILISNNYTYVQKNEALKQIIDKIIYDRKNDSLKIYFFLYR

SEQ ID NO: 6257 - protein, 493 aa, Unknown
  Description of Unknown: Integrase B6258 sequence
  PTHR30461:SF3,IPR036162,PS51737,IPR011109,PTHR30461, PS00397,PF00239,G3DSA:1.10.10.2600,IPR006119,SSF53041, cd00338,SM00857,IPR025827,IPR038109,PS51736, IPR006118,PF13408,G3DSA:3.40.50.1390,PF07508,Coil
MSVKYAYGYIRVSTHDQEEISPDSQEHLLRDYAAKNNIVILKIFTDLGISGRKANKRPGFQEMIGLAKGDDHPIDQILVWKFSRFARNQEESIVYKSLLKKQHNVDVVSVSEPLSDDPFGSLIERIIEWMDEYYSIRLSGEVYRGMKENAIRGAYQARPPLGYKVVEHGKPPVIVPKEAKIVQTIFEKYVNESMGFFDIARYLNDLGLKTSHGKPFERRSIEYIIQNPSYCGMIRWNRTENSTNRIKDKDEWIVTEGQQPAIISKELFESAQERFKATYKPVGKRPSSTYKHWLSGLLKCPDCGRTLTSTTMKRVNGEKYSYFSCYGYSKGKCKKPNGISSLVLEKEVLASIKEILDTKDIVYELREYQPTEQFDERKAITEQLESLTGKEERIKASYREGIDTLEEYKANKAIIQKERESLEQQLKELKKAARKSDQDPADATLQKVRSVYDILISNNYTYIQKNEALKQIIDKIIYDRKNDSLKIYFFLYR

SEQ ID NO: 6258 - protein, 493 aa, Unknown
  Description of Unknown: Integrase B6259 sequence
  IPR036162,PS51737,IPR011109,PTHR30461,PS00397, PF00239,G3DSA:1.10.10.2600,IPR006119,SSF53041,cd00338, SM00857,IPR025827,IPR038109,PS51736,IPR006118, PF13408,G3DSA:3.40.50.1390,PF07508,Coil
MKEKVSERKTGAIYIRVSTDKQEELSPDAQLRLLMDYAKKNSIDVPEEYIYQDNGISGRKANKRPAFQNMIALAKSKEHPIDTIIVWKFSRFARNQEESIVYKSLLSKNSVDVVSVSEPLIDGPFGSLIERIIEWMDEYYSIRLSGEVMRGMTQNAMRGHYQSDAPIGYISPGDKKPPVINPDTVQIPLMIKDMFLSGSTQLQIARKLNDMGYRTKRGNLWDARGVRYVLENPFYIGKSRWNYTERGRKLKPSDEVIYADGNWEALWDEDTFKEIQKRLALNMRKAKSRDVSSAKHWLSGLLICSSCGGTLAYGGANSARGFQCWKYSKGFCSESHYISTGSIEKMVMEYLEYVLHSPTLSYTIISAASSDAESKLSDCERQLQKIDAKEKRIKAAYLNEIDTLEEYKANKTALEEERRTIEKEIEELTLSNVKYTKEDMDKKMKQNIQNLLLVLKDESADYVQKGNMMRNVVDHIVFDRKNTSLDVFLKLVI

SEQ ID NO: 6259 - protein, 493 aa, Unknown
  Description of Unknown: Integrase B6260 sequence
  PTHR30461:SF3,IPR036162,PS51737,IPR011109,PTHR30461, PS00397,PF00239,G3DSA:1.10.10.2600,IPR006119,SSF53041, cd00338,SM00857,IPR025827,IPR038109,PS51736, IPR006118,PF13408,G3DSA:3.40.50.1390,PF07508,Coil
MRVKYAYGYIRVSTHDQEEISPDSQEHLLRDYAAKNNIVILKIFTDLGISGRKANKRPGFQEMIGLAKGDDHPVDLILVWKFSRFARNQEESIVYKSLLKKQHNVDVVSVSEPLSDDPFGSLIERIIEWMDEYYSIRLSDEVYRGMKENALRGAYQARPPLGYKVVEHGKPPVIVPEEAKIVRTIFEKYTNEGMSFFDIARYLNSLGLKTSHGKPFERRSVEYIIQNPSYCGMIRWNRTENSTNRIKDKDEWIVTEGQQPAIISKELFESAQERFKATYKPVGKRPSSTYKHWLSGLLKCPDCGRTLTSTTMKRVNGEKYSYFSCYGYSKGKCKKPNGISSLVLEKEVLASIKEILDTKDIVYELREYQPTEQFDERKAITEQLESLNGKEERIKASYREGIDTLEEYKANKAIIQKERESLEQQLKELKKAAHKSDQDPADAMLQKVRSVYDILISNNYTYVQKNEALKQIIDKIIYDRKNDSLKIYFFLYR

SEQ ID NO: 6260 - protein, 493 aa, Unknown
  Description of Unknown: Integrase B6261 sequence
  PTHR30461:SF3,IPR036162,PS51737,IPR011109,PTHR30461, PS00397,PF00239,G3DSA:1.10.10.2600,IPR006119,SSF53041, cd00338,SM00857,IPR025827,IPR038109,PS51736, mobidb-lite,IPR006118,PF13408,G3DSA:3.40.50.1390,PF07508,Coil
MKEKVSERKTGAIYIRVSTDKQEELSPDAQLRLLMDYAKTNHTDIPMEYIFQDNGISGRKANKRPAFQQMIALAKSKEHPIDTIIVWKFSRFARNQEESIVYKSLLKKNNVDVVSVSEPLIDGPFGSLIERIIEWMDEYYSIRLSGEVMRGMTQNALRGHYQGDAPIGYQSPGNKKPPEKDPKTVQIPIMMKDLLLSGSSLLQIARKLNEQGYRTKHGNLWDARGVRYVLENPFYAGISRWNYTDRGRQLKPADEVIYTKGNWEPLWDKATLEEIKKHLAMNMRKTKSRDVSAAKHWLSGLLICSSCGGTLAYSGTKNSRGFQCWKYTKGFCNESHYIGIRPIEKMVIEYLENILHSPAIVYTVISSASADTDSKLADLEKQLQKVENKEKRIKAAYLNEIDSLEEYKANKAALLKERAAIEKNIKLLTISNTDMSKEEMDKKMKQNISALLTVLQNDSADYVQKGNMMRNVVDHIVFDRGNTSLDMFLKLVI

SEQ ID NO: 6261 - protein, 493 aa, Unknown
  Description of Unknown: Integrase B6262 sequence
  PTHR30461:SF3,IPR036162,PS51737,IPR011109,PTHR30461, PS00397,PF00239,G3DSA:1.10.10.2600,IPR006119,SSF53041, cd00338,SM00857,IPR025827,IPR038109,PS51736, IPR006118,PF13408,G3DSA:3.40.50.1390,PF07508,Coil
MSVKYAYGYIRVSTHDQEEISPDSQEHLLRDYAAKNNIVILKIFTDLGISGRKANKRPGFQEMIGLAKGDDHPVDQILVWKFSRFARNQEESIVYKSLLKKQHNVDVVSVSEPLSDNPFGSLIERIIEWMDEYYSIRLSGEVYRGMKENALRGAYQARPPLGYKVVEHGKPPVIVPEEAKIVRTIFEKYTNEGMSFFDIARYLNSLGLKTSHGKPFERRSVEYIIQNPSYCGMIRWNRTENSTNRIKDKDEWIVTEGQQPAIISKELFELAQERFKATYKPVGKRPSSTYKHWLSGLLKCPDCGRTLTSTTMKRVNGEKYSYFSCYGYSKGKCKKPNGISSLVLEKEVLASIKEILDTKDIVYELREYQPTEQFDERKAITEQLESLTGKEERIKASYREGIDTLEEYKANKAIIQKERESLEQQLQELKKAAHKSDRDPADAMLQKVRSVYDILISNNYTYIQKNEALKQIIDKIIYDRKNNSLKIYFFLYR

SEQ ID NO: 6262 - protein, 493 aa, Unknown
  Description of Unknown: Integrase B6263 sequence
  PTHR30461:SF3,cd00338,SM00857,IPR036162,PF13408, PS51737,G3DSA:3.40.50.1390,IPR025827,IPR006119,PF07508, IPR011109,SSF53041,PTHR30461,PS51736,Coil, PF00239
MDNRIDAIYGRQSIDKKDSISIESQFEFCRYELKGGEGREYKDKGYSGKNIERPDFQRLLQDIKLGLIKRVIVYKLDRISRSIVDFAKLMELFKQYNVEFVSCTEKFDTSTPMGRAMLNICIVFAQLERESIQMRVQDAFYSRCTKGYYMRGRTPYGFDTEPIVMDGIKTKKLVENAEMDFAELMYQMYAEPSSSYGDITRYFVKNSIDVYGKALQRAFISKLLRNPVYVQADMDIYEYFKAQGVKIESPPEMFTGDNSCYLYQGREGEEQILVIAPHQGRIPSSLWLTVQRKLSQNTSFQNGRKCHNTWLAGKIKCGRCGYALVGLRAQNGVTYLRCKQRADNGSCEGAGTLTAQSMESFVYGEMVEKMRKYHTLKGGKEPGYNPKLTAARVALAKTESEIEKLLDTLSGANPLLLQYANNRIEELDAERQKQLKLVADLTANSVSDTQIDCITNYLNDWESVSFDDKRKVVDILISHIDATSESVTIHWKI

SEQ ID NO: 6263 - protein, 493 aa, Unknown
  Description of Unknown: Integrase B6264 sequence
  PTHR30461:SF3,IPR036162,PS51737,IPR011109,PTHR30461, PS00397,PF00239,G3DSA:1.10.10.2600,IPR006119,SSF53041, cd00338,SM00857,IPR025827,IPR038109,PS51736, IPR006118,PF13408,G3DSA:3.40.50.1390,PF07508,Coil
MSVKYAYGYIRVSTHDQEEISPDSQEHLLRDYAAKNNIVILKIFTDLGISGRKANKRPGFQEMIGLAKGDDHPVDQILVWKFSRFARNQEESIVYKSLLKKQHNVDVVSVSEPLSDDPFGSLIERIIEWMDEYYSIRLSGEVYRGMKENALRGAYQARPPLGYKVVEHGKPPVIVPEEAKIVRTIFEKYTNESMSFFDIARYLNSLGLKTSHGKSFERRSVEYIIQNPSYCGMIRWNRTENSTNRIKDKDEWIVTEGQQPAIISKELFESAQKRFKATYKPVGKRPSSTYKHWLSGLLKCPDCGRTLTSTTMKRVNGEKYSYFSCYGYSKGKCKKPNGISSLVLEKEVLASIKEILDTKDIVYELREYQPTEQFDERKAITEQLESLTGKDERIKASYREGIDTLEEYKANKAIIQKERESLEQQLKELKKVARKSDQDPADAMLQKVRSVYDILISNNYTYVQKNEALKQIIDKIIYDRKNDSLKIYFFLYR

SEQ ID NO: 6264 - protein, 493 aa, Unknown
  Description of Unknown: Integrase B6265 sequence
  cd00338,SM00857,G3DSA:1.10.10.2600,IPR036162,PF13408, PS51737,IPR025827,G3DSA:3.40.50.1390,IPR006119,IPR038109, PF07508,IPR011109,SSF53041,PTHR30461,PS51736, Coil,PF00239
MTAVIYARYSSDNQREESIEGQIRECTDYAEKNGITVIKHYIDRAFSAKTDNRPEFQQMIKDSGKKLFDVVLVWKCDRFARNRFDSANYKMILKKNGVHLISVMEPIAEGSQGILVETLLEGMAEYYSAELSEKVIRGQTENALKGKCTGGTGTIGYKIDDDKFYHLDPLTAPLVLEAFQRYDNGDKMVEIVNFLNDKGVRNMLGGKMTHSSVNTMLKNRRYIGELSFRDIVVPEAIPVIVPKDLFDRVQKRLDKNKRAPACGKADEEYLLTTKLFCGKCGALMFGESGTSATGRTYYYYKCANVKRRKGCNKKTVQKDWLEDMVVRETMKLIQDDAVIDKIVQLVMDVQNQENTTIPLLEKQLREVNKKLDNLMKAIEDGLYTRTTKERLEALESQKDELTVKIADEKLKKPSFNEDFIRFWLMKFRKFDISQKKQRKALIEIFVNAIFLYDDRMLLTFNYKDGTQTVRLEDTLTADSAEEKSSDLSSSAGP

SEQ ID NO: 6265 - protein, 493 aa, Unknown
  Description of Unknown: Integrase B6266 sequence
  PTHR30461:SF3,IPR036162,PS51737,IPR011109,PTHR30461, PS00397,PF00239,G3DSA:1.10.10.2600,IPR006119,SSF53041, cd00338,SM00857,IPR025827,IPR038109,PS51736, IPR006118,PF13408,G3DSA:3.40.50.1390,PF07508,Coil
MSVKYAYGYIRVSTHDQEEISPDSQEHLLRDYAAKNNIVILKIFMDLGISGRKANKRPGFQEMIGLAKGDDHPVDQILVWKFSRFARNQEESIVYKSLLKKQHNVDVVSVSEPLSDDPFGSLIERIIEWMDEYYSIRLSGEVYRGMKENAIRGAYQARPPLGYKVVEHGKPPVIVPKEAKIVRTIFEKYTNEGMSFFDIARYLNSLGLKTSHGKPFERRSVEYIIQNPSYCGMIRWNRTENSTNRIKDKDEWIVTEGQQPAIISKELFESAQERFKATYKPVGKRPSSTYKHWLSGLLKCPDCGRTLTSTTMKRVNGEKYSYFSCYGYSKGKCKKPNGISSLVLEKEVLASIKEILDTKDIVYELREYQPTGQFDERKTITEQLESLTGKEERIKASYREGIDTLEEYKANKAIIQKERESLEQQLKELKKAARKSDQDPADAMLQKVRSVYDILISNNYTYIQKNEALKQIIDKIIYDRKNDSLKIYFFLYR

SEQ ID NO: 6266 - protein, 493 aa, Unknown
  Description of Unknown: Integrase B6267 sequence
  PTHR30461:SF3,IPR036162,PS51737,IPR011109,PTHR30461, PS00397,PF00239,G3DSA:1.10.10.2600,IPR006119,SSF53041, cd00338,SM00857,IPR025827,IPR038109,PS51736, IPR006118,PF13408,G3DSA:3.40.50.1390,PF07508,Coil
MSVKYAYGYIRVSTHDQEEISPDSQEHLLRDYAAKNNIVILKIFTDLGISGRKANKRPGFQEMIGLAKGDDHPVDQILVWKFSRFARNQEESIVYKSLLKKQHNVDVVSVSEPLSDNPFGSLIERIIEWMDEYYSIRLSGEVHRGMKENALRGAYQARPPLGYKVVEHGKPPVIVPEEAKIVRTIFEKYTNEGMSFFDIARYLNSLGLKTSHGKPFERRSVEYIIQNPSYCGMIRWNRTENSTNRIKDKDEWIVTEGQQPAIISKELFESAQERFKATYKQVGKRPSSTYKHWLSGLLKCPDCGRTLTSATMKRVNGEKYSYFSCYGYSKGKCKKPNGISSLVLEKEVLTSIKEILDTKDIVYELREYQPTEQFDERKAITEQLESLTGKEERIKASYREGIDTLEEYKANKAIIQKERESLEQQLKELKKAAHKSDQDPADAMLQKVRSVYDILISNNYTYIQKNEALKQIIDKIIYDRKNDSLKIYFFLYR

SEQ ID NO: 6267 - protein, 493 aa, Unknown
  Description of Unknown: Integrase B6268 sequence
  PTHR30461:SF3,IPR036162,PS51737,IPR011109,PTHR30461, PS00397,PF00239,G3DSA:1.10.10.2600,IPR006119,SSF53041, SM00857,IPR025827,IPR038109,PS51736,cd03768, IPR006118,PF13408,G3DSA:3.40.50.1390,PF07508,Coil
MRVICYVRVSTREQAEKGYSVGEQQERLRAYCIAKDWIVEDVITDPGFSGAKLERPGIQRVIQLVQEKKCEAVLVWKLDRLSRSQKDTLYLIEDVFLKNGCAFVSMNENFDTSTAFGRAMIGILSVFAQLEREQIRERMAVGRVGRAKAGLFHGGGFAPIGYDYKTIAEGGEGLVVNEYEAMQVREVFSLYLQGWPVNRIRKYMTARYTTKSGDWGNDTTIRDVLKNPLYIGKINWAKKIYDGKHEPIIDEETFNAAAARLASSQWKRDCSDGLERNSPFHSTHLLGGILWCGRCGARYFASGNYSGKGENRKYWPYYVCYSRAKSAKRMIRDPNCKNDRWPVAKLDKIILDQVRQLIFDPEALERAAGGNQEAPPSERRALLNARRAEAKGQIDRLLDLCQMGTLPAAAVADRLKSLQDEVEGIDTALRELAEDDPAERLEAARGTLVGAAEILDNGSLDEKRELVHSLIHRIDLDGENIDIHWSFAPGESE

SEQ ID NO: 6268 - protein, 493 aa, Unknown
  Description of Unknown: Integrase B6269 sequence
  PTHR30461:SF3,IPR036162,PS51737,IPR011109,PTHR30461, PS00397,PF00239,G3DSA:1.10.10.2600,IPR006119,SSF53041, cd00338,SM00857,IPR025827,IPR038109,PS51736, IPR006118,PF13408,G3DSA:3.40.50.1390,PF07508,Coil
MSVKYAYGYIRVSTHDQEEISPDSQEHLLRDYAAKNNIVILKIFTDLGISGRKANKRPGFQEMIGLAKGDDHPVDQILVWKFSRFARNQEESIVYKSLLKKQHNVDVVSVSEPLSDNPFGSLIERIIEWMDEYYSIRLSGEVYRGMKENALRGAYQARPPLGYKVVEHGKPPVIVPEEAKIVRTIFEKYTNEGMSFFDIARYLNSLGLKTSHGKPFERRSVEYIIQNPSYCGMIRWNRTENSTNRIKDKDEWIVTEGQQPAIISKELFESSQERFKATYKPVGKRPSSTYKHWLSGLLKCPDCGRTLTSTTMKRVNGEKYSYFSCYGYSKGKCKKPNGISSLVLEKEVLASIKEVLDTKDIVYELREYQPTEQFDECKAITEQLESLTGKEERIKASYREGIDTLEEYKANKAIIQKERESLEQQLKELKKTARKSDQDPADAMLQKVRSVYDILISNNYTYIQKNEALKQIIDKIIYDRKNDSLKIYFFLYR

SEQ ID NO: 6269 - protein, 493 aa, Unknown
  Description of Unknown: Integrase B6270 sequence
  PTHR30461:SF3,IPR036162,PS51737,IPR011109,PTHR30461, PS00397,PF00239,G3DSA:1.10.10.2600,IPR006119,SSF53041, cd00338,SM00857,IPR025827,IPR038109,PS51736, mobidb-lite,IPR006118,PF13408,G3DSA:3.40.50.1390,PF07508,Coil
MKEKVSERKTGAIYIRVSTDKQEELSPDAQLRLLMDYAKTNHTDIPMEYIFQDNGISGRKANKRPAFQQMIALAKSKEHPIDTIIVWKFSRFARNQEESIVYKSLLKKNNVDVVSVSEPLIDGPFGSLIERIIEWMDEYYSIRLSGEVMRGMTQNAIRGHYQSDAPIGYRSPGNKKPPEKDPKTVQIPIMMKDLLLSGSSLLQIARKLNEQGYRTKHGNLWDARGVRYVLENPFYAGISRWNYTDRGRQLKPADEVIYTKGNWEPLWDKATLEEIKKHLTMNMRKAKSRDVSTAKHWLSGLLICSSCGGTLAYSGTKNSRGFQCWKYTKGFCNESHYIGIRPIEKMVIEYLESILHSPAIVYTVISSASADADSKLADLEKQLQKVENKEKRIKAAYLNEIDSLEEYKANKAALLKERAAIEKNIKLLTISNTDMSKEEMDKKMKQNISALLTVLQDDSADYVQKGNMMRNVVDHIVFDRGNTSLDMFLKLVI

SEQ ID NO: 6270 - protein, 493 aa, Unknown
  Description of Unknown: Integrase B6271 sequence
  IPR036162,PS51737,IPR011109,PTHR30461,PS00397, PF00239,G3DSA:1.10.10.2600,IPR006119,SSF53041,cd00338, SM00857,IPR025827,IPR038109,PS51736,IPR006118, PF13408,G3DSA:3.40.50.1390,PF07508,Coil
MKEKVSERKTGAIYIRVSTDKQEELSPDAQLRLLLDYAKKDSIDVPKEYIFQDNGISGRKANKRPAFQNMIALAKSKEHPIDTIIVWKFSRFARNQEESIVYKSLLKKNNVDVVSVSEPLIDGPFGSLIERIIEWMDEYYSIRLSGEVMRGMTQNAMRGHYQSDAPIGYTSPGDKKPPVINPDTVQIPLMIKDMFLSGSTQLQIARKLNDSGYRTKRGNLWDARGVRYVLENPFYIGKSRWNYTERGRRLKPVDEVIYADGNWEALWDEDTFKEIQKRLSLNMRKSKSRDISAAKHWLSGLLICSSCGGTLAFGGTHNMRGFQCWKYSKGFCSESHYISTGPIEKMVLEYLEAVMHSPALSYTVISSSSVDASSKLSDLERQLQKIDAKEKRIKAAYLNEIDTLEEYKANKTALEEERRTVEKEIEELTLSDVKYSKEDLDKKMKQNISDLLRVLRDESANYIQKGNMMRNVVDHIVFDRKNTSLDVFLKLVV

SEQ ID NO: 6271 - protein, 493 aa, Unknown
  Description of Unknown: Integrase B6272 sequence
  PTHR30461:SF3,IPR036162,PS51737,IPR011109,PTHR30461, PS00397,PF00239,G3DSA:1.10.10.2600,IPR006119,SSF53041, cd00338,SM00857,IPR025827,IPR038109,PS51736, IPR006118,PF13408,G3DSA:3.40.50.1390,PF07508,Coil
MKTKYCYGYVRVSTSGQEELSPDSQAKLLKDFAKKNDMIVLQIFYELGISGRKADKRPEFQKMIALAKSDKHPVDCIIVWKFSRFARNQEESIVYKSLLKKKHNVEVLSVSEPLVDGPFGSLIERIIEWMDEYYSVRLSGEVTRGMTEKAKRGGYQARPPLGYKIQERGKPPAIVPEEAEIIKIIFDKYVNEHTGIFDIARYLNLCGFKTSHNKPFERRSIEYILQNPTYCGMIRWNRTVSETNEIRPESEWIVSDGQQPAIISKELFDKAQIRYKSEYKPSGTRPSSTYKHWLSGLMKCPVCGRTMIAKTVNNQKSYCYFTCYGYSKGKCLAKTSVSSLKLEPAVLASIKEVLDTGNIIYRHVEPVQETSVDLNVIITEQLRKNVEKFDRIREAYRNGVDTLDEYKENKRMVQEEKEMLEKQLADIKPAEPTIDTSKIAMLEKVRNVYEIIESDSVDSVTKNEILKSVIEKIIYDRSKDELKVYYYYAPESQ

SEQ ID NO: 6272 - protein, 493 aa, Unknown
  Description of Unknown: Integrase B6273 sequence
  PTHR30461:SF3,IPR036162,PS51737,IPR011109,PTHR30461, PS00397,PF00239,G3DSA:1.10.10.2600,IPR006119,SSF53041, cd00338,SM00857,IPR025827,IPR038109,PS51736, IPR006118,PF13408,G3DSA:3.40.50.1390,PF07508,Coil
MSVKYAYGYIRVSTHDQEEISPDSQEHLLRDYAARNNIVILKIFTDLGISGRKANKRPGFQEMIGLAKGDDHPVDQILVWKFSRFARNQEESIVYKSLLKKQHNVDVVSVSEPLSDDPFGSLIERIIEWMDEYYSIRLSGEVYRGMKENALRGAYQARPPLGYKVVEHGKPPVIVPEEAKIVRTIFEKYTNESMSFFDIARYLNSLGLKTSHGKSFERRSVEYIIQNPSYCGMIRWNRTENSTNRIKDKDEWIVTEGQQPAIISKELFESAQKRFKATYKPVGKRPSSTYKHWLSGLLKCPDCGRTLTSTTMKRVNGEKYSYFSCYGYSKGKCKKPNGISSLVLEKEVLACIKEILDTKDIVYELREYQPTEQFDERKAITEQLESLTGKDERIKASYREGIDTLEEYKANKAIIQKERESLEQQLKELKKVARKSDQDPADAMLQKVRSVYDILISNNYTYVQKNEALKQIIDKIIYDRKNDSLKIYFFLYR

SEQ ID NO: 6273 - protein, 493 aa, Unknown
  Description of Unknown: Integrase B6274 sequence
  PTHR30461:SF3,IPR036162,PS51737,IPR011109,PTHR30461, PS00397,PF00239,G3DSA:1.10.10.2600,IPR006119,SSF53041, cd00338,SM00857,IPR025827,IPR038109,PS51736, IPR006118,PF13408,G3DSA:3.40.50.1390,PF07508,Coil
MSVKYAYGYIRVSTHDQEEISPDSQEHLLRDYAAKNNIVILKIFTDLGISGRKANKRPGFQEMIGLAKADDHPVDQILVWKFSRFARNQEESIVYKSLLKKQHNVDVVSVSEPLSDNPFGSLIERIIEWMDEYYSIRLSGEVYRGMKENALRGAYQARPPLGYKVVEHGKPPVIVPEEAKIVRTIFEKYTNEGMSFFDIARYLNSLGLKTSHGKPFERRSVEYIIQNPSYCGMIRWNRTENSTNRIKDKDEWIVTEGQQPAIISKELFESAQERFKATYKPVGKRPSSTYKHWLSGLLKCPDCGRTLTSTTMKRVNGEKYSYFSCYGYSKGKCKKPNGISSLVLEKEVLASIKEILDTKDIVYELREYQPTEQFDERKAITEQLESLTGKEERIKASYREGIDTLEEYKANKAIIQKERESLEQQLKDLKKAAHKSDQDPADAMLQKVRSVYDILISNNYTYVQKNEALKQIIDKIIYDRKNDSLKIYFFLYR

SEQ ID NO: 6274 - protein, 493 aa, Unknown
  Description of Unknown: Integrase B6275 sequence
  PTHR30461:SF3,IPR036162,PS51737,IPR011109,PTHR30461, PS00397,PF00239,G3DSA:1.10.10.2600,IPR006119,SSF53041, cd00338,SM00857,IPR025827,IPR038109,PS51736, IPR006118,PF13408,G3DSA:3.40.50.1390,PF07508,Coil
MKTKYCYGYVRVSTSGQEELSPDSQAKLLKDFAKKNDMIVLQIFYELGISGRKADKRPEFQKMIALAKSDKHPVDCIIVWKFSRFARNQEESIVYKSLLKKKHNVDVLSVSEPLVDGPFGSLIERIIEWMDEYYSVRLSGEVTRGMTEKAKRGGYQARPPLGYKIQERGKPPVIVPEEAEIIKIIFDKYVNEHTGIFDIARYLNSCGFKTSHNKPFERRSIEYILQNPTYCGMIRWNRTVSETNEIRPESEWIVSDGQQPAIISKELFDKAQIRYKSEYKPSGARPSSTYKHWLSGLMKCPVCGRTMIAKTVSNQKSYCYFTCYGYSKGKCLAKTSVSSLRLEPAVLASIKEVLDSGNIIYRHVEPVQETSVDLNVIITEQLRKNAEKFDRIREAYRNGVDTLDEYKENKRMVQEEKEMLEKQLADIKPAEPTIDTSKIAMLEKVRNVYEIIESDSVDPVTKNEILKSVIEKIIYDRSKDELKVYYYYAPESQ

SEQ ID NO: 6275 - protein, 493 aa, Unknown
  Description of Unknown: Integrase B6276 sequence
  PTHR30461:SF3,IPR036162,PS51737,IPR011109,PTHR30461, PS00397,PF00239,G3DSA:1.10.10.2600,IPR006119,SSF53041, cd00338,SM00857,IPR025827,IPR038109,PS51736, IPR006118,PF13408,G3DSA:3.40.50.1390,PF07508,Coil
MSVKYAYGYIRVSTHDQEEISPDSQEHLLRDYAAKNNIVILKIFTDLGISGRKANKRPGFQEMIGLAKGDDHPVDQILVWKFSRFARNQEESIVYKSLLKKQHNVDVVSVSEPLSDNPFGSLIERIIEWMDEYYSIRLSGEVYRGMKENALRGAYQARPPLGYKVVEHGKPPVIVPEEAKIVRTIFEKYTNEGMSFFDIARYLNSLGLKTSHGKPFERRSVEYIIQNPSYCGMIRWNRTENSTNRIKDKDEWIVTEGQQPAIISKELFESAQERFKATYKPVGKRPSSTYKHWLSGLLKCPDCGRTLTSTTMKRVNGEKYSYFSCYGYSKGKCKKPNGISSLVLEKEILASIKEVLDTKDIVYELREYQPTEQFDERKAITEQLESLTGKEERIKASYREGIDTLEEYKANKAIIQKERESFEQQLKELKKAPHKSDQDPADSLLQKVRSVYDILISNNYTYVQKNEALKQIIDKIIYDRKNDSLKIYFFLYR

SEQ ID NO: 6276 - protein, 493 aa, Unknown
  Description of Unknown: Integrase B6277 sequence
  PTHR30461:SF3,IPR036162,PS51737,IPR011109,PTHR30461, PS00397,PF00239,G3DSA:1.10.10.2600,IPR006119,SSF53041, cd00338,SM00857,IPR025827,IPR038109,PS51736, mobidb-lite,IPR006118,PF13408,G3DSA:3.40.50.1390,PF07508,Coil
MKETLSERKTGAIYIRVSTDKQEELSPDAQLRLLMNYAKTNHTDIPMEYIFQDNGISGRKADKRPAFQQMIALAKSKEHPIDTIIVWKFSRFARNQEESIVYKSLLKKNNVDVVSVSEPLIDGPFGSLIERIIEWMDEYYSIRLSGEVMRGMTQNALRGHYQGDAPIGYQSPGNKKPPEKDPKTVQIPIMMKDLLLSGSSLLQIARKLNEQGYRTKHGNLWDARGVRYVLENPFYAGISRWNYTDRGRQLKPADEVIYTKGNWEPLWDKATLEEIKKHLAMNMRKAKSRDVSTAKHWLSGLLICSSCGGTLAYSGTKNSRGFQCWKYTKGFCNESHYIGIRPIEKMVIEYLESILHSPAIVYTVISSASADADSKLADLEKQLQKVENKEKRIKAAYLNEIDSLEEYKANKAALLKERAAIEKNIKLLTISNTDMSKEEMDKKMKQNISALLTVLQDDSADYVQKGNMMRNVVDHIVFDRGNTSLDMFLKLVI

SEQ ID NO: 6277 - protein, 493 aa, Unknown
  Description of Unknown: Integrase B6278 sequence
  PTHR30461:SF3,IPR036162,PS51737,IPR011109,PTHR30461, PS00397,PF00239,G3DSA:1.10.10.2600,IPR006119,SSF53041, cd00338,SM00857,IPR025827,IPR038109,PS51736, IPR006118,PF13408,G3DSA:3.40.50.1390,PF07508,Coil
MSVKYAYGYIRVSTHDQEEISPDSQEHLLRDYAAKNNIVIIKIFTDLGISGRKANKRPGFQEMIGLAKGDDHPVDQILVWKFSRFARNQEESIVYKSLLKKQHNVDVVSVSEPLSDNPFGSLIERIIEWMDEYYSIRLSGEVLRGMKENAARGAFQGAAPFGYKTIDKTLVIDPEKADIVRHVFNMYVNEKLSVFDIARYLNNLGFRTIRGNLFERRTVEYMLKNPTYCGMIHWNKTENATHSIKNKDEWIVSQGQHPAIISQELFDATQERLKATRRPSRRRERPSSTYKHWLSGLMKCPACGKTLSACTQKRVNGEKYAYFSCYGYAHGQCDKAHGVSSLVLEPEVLASIKEILDTGNISYELHDYQPTEAVDERSIIRDRLNSLSSKEERIKASYREGIDTLEEYKSNKAILQKERDNLEEQLKELEGQNPEPDQDPTGDMLLKVRSVYDILISDSYTYVQKNEALKQIVDKIIYDKESDSLKIYFFLCR

SEQ ID NO: 6278 - protein, 493 aa, Unknown
  Description of Unknown: Integrase B6279 sequence
  PTHR30461:SF3,IPR036162,PS51737,IPR011109,PTHR30461, PS00397,PF00239,G3DSA:1.10.10.2600,IPR006119,SSF53041, cd00338,SM00857,IPR025827,IPR038109,PS51736, IPR006118,PF13408,G3DSA:3.40.50.1390,PF07508,Coil
MKEKVSERKTGAIYIRVSTDKQEELSPDAQLRLLMDYAKTNHTDIPMEYIFQDNGISGRKANKRPAFQQMIALAKSKEHPIDTIIVWKFSRFARNQEESIVYKSLLKKNNVDVVSVSEPLIDGPFGSLIERIIEWMDEYYSIRLSGEVMRGMTQNALRGHYQGDAPIGYQSPGNKKPPEKDPKTIQIPIMMKDLLLSGSSLLQIARKLNEQGYRTKHGNLWDARGVRYVLENPFYAGISRWNYTDRGRQLKPADEVIYTKGNWEPLWDKATLEEIKKHLTMNMRKAKSRDVSTAKHWLSGLLICSSCGGTLAYSGTKNSRGFQCWKYTKGFCNESHYIGIRPIEKMVIEYLESILHSPAIVYTVISSASADADSKLADLEKQLQKVENKEKRIKAAYLNEIDSLEEYKANKAALLKERAAIEKNIKLLTISNTDMSKEEMDKKMKQNISALLTVLQDDSADYVQKGNMMRNVVDHIVFDRGNTSLDMFLKLVI

SEQ ID NO: 6279 - protein, 493 aa, Unknown
  Description of Unknown: Integrase B6280 sequence
  PTHR30461:SF3,IPR036162,PS51737,IPR011109,PTHR30461, PS00397,PF00239,G3DSA:1.10.10.2600,IPR006119,SSF53041, cd00338,SM00857,IPR025827,IPR038109,PS51736, IPR006118,PF13408,G3DSA:3.40.50.1390,PF07508,Coil
MSVKYAYGYIRVSTHDQEEISPDSQEHLLRDYAAKNNIVILKIFTDLGISGRKANKRPGFQEMIGLAKGDDHPVDQILVWKFSRFARNQEESIVYKSLLKKQHNVDVVSVSEPLSDDPFGSLIERIIEWMDEYYSIRLSGEVYRGMKENALRGAYQARPPLGYKVVEHGKPPVIVPEEAKIVRTIFEKYTNEGMSFFDIARYLNSLGLKTSHGKPFERRSVEYIIQNPSYCGMIRWNRTENSTNRIKDKDEWIVTEGQQPAIISKELFESAQKRFKATYKPVGKRPSSTYKHWLSGLLKCPDCGRTLTSTTMKRVNGEKYSYFSCYGYSKGKCKKPNGISSLVLEKEVLASIKEILDTKDIVYELREYQPTEQFDERKAITEQLESLTGKEERIKASYREGIDTLEEYKANKAIIQKERKSLEQQLKELKKAAHKSDQDPADAMLQKVRSVYDILISNNYTYVQKNEALKQIIDKIIYDRKNDSLKIYFFLYR

SEQ ID NO: 6280 - protein, 493 aa, Unknown
  Description of Unknown: Integrase B6281 sequence
  PTHR30461:SF3,IPR036162,PS51737,IPR011109,PTHR30461, PS00397,PF00239,G3DSA:1.10.10.2600,IPR006119,SSF53041, cd00338,SM00857,IPR025827,IPR038109,PS51736, mobidb-lite,IPR006118,PF13408,G3DSA:3.40.50.1390,PF07508,Coil
MKETLSERKTGAIYIRVSTDKQEELSPDAQLRLLMDYAKTNHTDIPMEYIFQDNGISGRKADKRPAFQQMIALAKSKEHPIDTIIVWKFSRFARNQEESIVYKSLLKKNNVDVVSVSAPLIDGPFGSLIERIIEWMDEYYSIRLSGEVLRGMTQNALRGHYQGDAPIGYQSPGNKKPPEKDPKNIQIPIMMKDLLLSGSSLLQIARKLNEQGYRTKHGNLWDARGVRYVLENPFYAGISRWNYTDRGRQLKPADEVIYTKGNWEPLWDKATLEEIKKHLTMNMRKAKSRDVSTAKHWLSGLLICSSCGGTLAYSGTKNSRGFQCWKYTKGFCNESHYIGIRPIEKMVIEYLESILHSPAIVYTVISSASADADSKLADLEKQLQKVENKEKRIKAAYLNEIDSLEEYKANKAALLKERAAIEKNIKLLTISNTDMSKEEMDKKMKQNISALLTVLQDDSADYVQKGNMMRNVVDHIVFDRGNTSLDMFLKLVI

SEQ ID NO: 6281 - protein, 493 aa, Unknown
  Description of Unknown: Integrase B6282 sequence
  cd00338,SM00857,G3DSA:1.10.10.2600,IPR036162,PF13408, PS51737,IPR025827,G3DSA:3.40.50.1390,IPR006119,IPR038109, PF07508,SSF53041,IPR011109,PTHR30461,PS51736, Coil,PF00239
MSEKAVIYARYSSSNQREESIIGQIRDCRAYAEKLGLEVIKEYTDEARTGTTDRRPGFQQMIKDAESKKFTAVIVWKVDRFARNRYDSAIYKSKLKKNGVRVYSAMEAISEGPEGIIMEGLMESMAEYYSANLSENVKRGNLDSALEHKTLGKRIYGYRTATDGTYELDPDEAAVVKRIFDERVEGKTGADIARDLVHDGYLFLGKKFTKQAIYRILKSIKYTGTYIYKDYICEGGMPMIVDKSTYMRVQNMKKSLKPKAKETVIYNLTGKLFCGQCGGYMTGEYGTSKTNRKYYYYACRDCKKRVSKDVVENIIYDELAKRLSDDKLIELLAVRFEEHQKKKLNDNSVLDNLKTRLKETERGISNLVSAIEQGIITSSTKDRLVALEAEKDELIQSIKDEEVNSKIVITKEDFVYWSKQVRSNAEDKDKLFECFLNSAYLYDDHIVINSNLLGPSATIRAEQLNNSEFEYDASSPAYKYSFELMILSSEINL

SEQ ID NO: 6282 - protein, 493 aa, Unknown
  Description of Unknown: Integrase B6283 sequence
  PTHR30461:SF3,IPR036162,PS51737,IPR011109,PTHR30461, PS50254,PS00397,PF00239,G3DSA:1.10.10.2600,IPR006119, IPR011539,SSF53041,cd00338,SM00857,IPR025827,IPR038109 ,PS51736,IPR006118,PF13408,G3DSA:3.40.50.1390,PF07508,Coil
MSVKYAYGYIRVSTHDQEEISPDSQEHLLRDYATKNNIVIIKIFTDLGISGRKANKRPGFQEMIGLAKSDDHPVDQILVWKFSRFARNQEESIVYKSLLKKQHNVDVVSVSEPLSDDPFGSLIERIIEWMDEYYSIRLSGEVHRGMKENALRGAYQARPPLGYKVVEHGKPPVIVPEEAKIVRTIFEKYTNEGMSFFDIARYLNSLGLKTSHGKPFERRSVEYIIQNPSYCGMIRWNRTENSTNRIKDKDEWIVTEGQQPAIISKELFESAQERFKATYKPVGKRPSSTYKHWLSGLLKCPDCGRTLTSTTMKRVNGEKYSYFSCYGYSKGKCKKPNGISSLVLEKEVLASIKEILDTKDIVYELREYQPTEQFDERKAITEQLESLTGKEERIKASYREGIDTLEEYKVNKAIIQKERESLEQQLKELKTAARKSDQDPADAMLQKVRSVYDILISNNYTYVQKNEALKQIIDKIIYDRKNDSLKIYFFLYK

SEQ ID NO: 6283 - protein, 493 aa, Unknown
  Description of Unknown: Integrase B6284 sequence
  PTHR30461:SF3,IPR036162,PS51737,IPR011109,PTHR30461, PS00397,PF00239,G3DSA:1.10.10.2600,IPR006119,SSF53041, cd00338,SM00857,IPR025827,IPR038109,PS51736, IPR006118,PF13408,G3DSA:3.40.50.1390,PF07508,Coil
MSVKYAYGYIRVSTHDQEEISPDSQEHLLRDYAAKNNIVILKIFTDLGISGRKANKRPGFQEMIGLVKGDDHPVDQILVWKFSRFARNQEESIVYKSLLKKQHNVDVISISEPLSDNPFGSLIERIIEWMDEYYSIRLSGEVYRGMKENALRGAYQARPPLGYKVVEHGKPPVIVPEEAKIVRTIFEKYTNEGIGFFDIARYLNSLGLKTSHGKPFERRSIEYIIHNPSYCGMIRWNRTENSTNRIKDKDEWIVTEGQQPAIISKELFESAQERFKASYKPVGKRPSSTYKHWLSGLLKCPDCGRTLTSTTMKRVNGEKYSYFSCYGYSKGKCKKPNGISSLVLEKEVLAGIKEVLDTKDIVYELREYQPTEQFDERKAITEQLESLTGKEERIKASYREGIDTLEEYKANKAIIQKERESLEQQLKELKKAAHKSDQDPADAMLQKVRSVYDILISNNYTYVQKNEALKQIIDKIIYDRKNDSLKIYFFLYR

SEQ ID NO: 6284 - protein, 493 aa, Unknown
  Description of Unknown: Integrase B6285 sequence
  PTHR30461:SF3,IPR036162,PS51737,IPR011109,PTHR30461, PS00397,PF00239,G3DSA:1.10.10.2600,IPR006119,SSF53041, SM00857,IPR025827,IPR038109,PS51736,cd03768, IPR006118,PF13408,G3DSA:3.40.50.1390,PF07508,Coil
MRVICYVRVSTREQAEKGYSVGEQQERLRAYCIAKDWIVEDVITDPGFSGAKLERPGIQRVIRLVQEKKCEAVLVWKLDRLSRSQKDTLYLIEDVFLKNGCAFVSMNENFDTSTAFGRAMIGILSVFAQLEREQIRERMAVGRVGRAKAGLFHGGGFAPIGYDYKTIAEGGEGLVVNEYEAMQVREVFSLYLQGWPVNRIRKYMTARYTTKSGDWGNDTTIRDVLKNPLYIGKINWAKKIYDGKHEPIIDEETFNAAAARLASSQWKRDCSDGLERNSPFHSTHLLGGILWCGRCGARYFASGNYSGKGENRKYWPYYVCYSRAKSAKRMIRDPNCKNDRWPVAKLDKIILDQVRQLIFDPEALERAAGGNQEAPPSERRALLNARRAEAKGQIDRLLDLCQMGTLPAAAVADRLKSLQDEVEGIDTALRELAEDDPAERLEAARETLVGAAEILDNGSLDEKRELVHSLIHRIDLDGENIDIHWSFAPGESE

SEQ ID NO: 6285 - protein, 493 aa, Unknown
  Description of Unknown: Integrase B6286 sequence
  PTHR30461:SF3,IPR036162,PS51737,IPR011109,PTHR30461, PS00397,PF00239,G3DSA:1.10.10.2600,IPR006119,SSF53041, cd00338,SM00857,IPR025827,IPR038109,PS51736, IPR006118,PF13408,G3DSA:3.40.50.1390,PF07508,Coil
MSVKYAYGYIRVSTHDQEEISPDSQEHLLRDYAAKNNIVILKIFTDLGISGRKANKRPGFQEMIGLAKGDDHPVDLILVWKFSRFARNQEESIVYKSLLKKQHNVDVVSVSEPLSDDPFGSLIERIIEWMDEYYSIRLSGEVYRGMKENALRGAYQARPPLGYKIVEHGKPPVIVPEEAKIVRTIFEKYANEGMSFFDIARYLNSLGLKTSHGKPFERRSVEYIIQNPSYCGMIRWNRTENSTNRIKDKDEWIVTEGQQPAIISKELFESAQERFKATYKPVGKRPSSTYKHWLSGLLKCPDCGRTLTSTTMKRVNGEKYSYFSCYGYSKGKCKKPNGISSLVLEKEVLASIKEVLDTKDIVYELREYQPTEQFDERKAITEQLESLTGKEDRIKASYREGIDTLEEYKANKAIIQKERESLEQQLKDLKKAAHKSDQDPADAMLQKVRSVYDILISNNYTYVQKNEALKQIIDKIIYDRKNDSLKIYFFLYR

SEQ ID NO: 6286 - protein, 493 aa, Unknown
  Description of Unknown: Integrase B6287 sequence
  PTHR30461:SF3,IPR036162,PS51737,IPR011109,PTHR30461, PS00397,PF00239,G3DSA:1.10.10.2600,IPR006119,SSF53041, cd00338,SM00857,IPR025827,IPR038109,PS51736, IPR006118,PF13408,G3DSA:3.40.50.1390,PF07508,Coil
MKTKYCYGYVRVSTSGQEELSPDSQAKLLKDFAKKNDMIVLQIFYELGISGRKADKRPEFQKMIALAKSDKHPVDCIIVWKFSRFARNQEESIVYKSLLKKKHNVEVLSVSEPLVDGPFGSLIERIIEWMDEYYSVRLSGEVTRGMTEKAKRGGYQARPPLGYKIQERGKPPVIVPEEAEIIKIIFDKYVNEHTGIFDIARYLNLCGFKTSHNKPFERRSIEYILQNPTYCGMIRWNRTVSETNEIRPESEWIVSDGQQPAIISKELFDKAQIRYKSEYKPSGTRPSSTYKHWLSGLMKCPVCGRTMIAKTVNNQKSYCYFTCYGYSKGKCLAKTSVSSLKLEPAVLASIKEVLDSGNIIYRHVEPVQETSVDLNVIITEQLRKNVEKFDRIREAYRNGVDTLDEYKENKRMVQEEKEMLEKQLADIKPAEPTIDTSKIAMLEKVRNVYEIIESDSVDSVTKNEILKSVIEKIIYDRSKDELKVYYYYAPESQ

SEQ ID NO: 6287 - protein, 493 aa, Unknown
  Description of Unknown: Integrase B6288 sequence
  PTHR30461:SF3,IPR036162,PS51737,IPR011109,PTHR30461, PS00397,PF00239,G3DSA:1.10.10.2600,IPR006119,SSF53041, cd00338,SM00857,IPR025827,IPR038109,PS51736, IPR006118,PF13408,G3DSA:3.40.50.1390,PF07508,Coil
MSVKYAYGYIRVSTHDQEEISPDSQEHLLRDYAAKNNIVILKIFTDLGISGRKANKRPGFQEMIGLAKGDDHPVDQILVWKFSRFARNQEESIVYKSLLKKQHNVDVVSVSEPLSDDPFGSLIERIIEWMDEYYSIRLSGEVYRGMKENALRGAYQARPPLGYKIVEHGKPPVIVPEEAKTVRTIFEKYANEGMSFFDIARYLNSLGLKTSHGKSFERRSVEYIIQNPSYCGMIRWNRTENSTNRIKDKDEWIVTEGQQPAIISKELFESAQKRFKATYKPVGKRPSSTYKHWLSGLLKCPDCGRTLTSTTMKRVNGEKYSYFSCYGYSKGKCKKPNGISSLVLEKEVLACIKEILDTKDIVYELREYQPTDQFDERKAITEQLESLTGKEERIKASYREGIDTLEEYKTNKAIIQKERESLEQQLKDLKKAAHKSDQDPADAMLQKVRSVYDILISNNYTYVQKNEALKQIIDKIIYDRKNDSLKIYFFLYR

SEQ ID NO: 6288 - protein, 493 aa, Unknown
  Description of Unknown: Integrase B6289 sequence
  PTHR30461:SF3,SM00857,G3DSA:1.10.10.2600,IPR036162,PF13408, IPR025827,G3DSA:3.40.50.1390,PS51737,IPR006119,IPR038109, PF07508,SSF53041,IPR011109,PF00239,PTHR30461, PS51736,Coil,cd00338
MTAVIYARYSSDNQREESIEGQIRECTAYAEKNGITVIKHYIDRALSAKTDNRPEFQQMIKDSEKRLFDIVLVWKLDRFARNRYDSAHYEYQLERNHVKLVSATEPISEGPAGIMVKSMLTGMAEYYSAELSEKVVRGMTENVLKGKYNGGTIPIGYTVDEEKFFQIDPLKAPFVVEAFQRYNDGATMKELMNWLNDSGVTTNRNQKFTYNSIQTLLTNRRYIGENRFKDIVMPDSIPVIIEKELFDSVQDKIAKNRRAPARHKAEDDYLLTTKLFCGMCGAMMFGECGTSRNKNVHHYYKCANAKRTKTCKKKTVRKEWLEDLVVNETMKMIHDDDCIQSIVDAVMILQEQENTVLPLLEKQMKDIENGIENLLNAIQAGVLTSSTKGRLEKLEAQQKELEIRIAEEKLAKPKVSAEFVKFWLTNFRKLDPNVKSHRETLINTFVNAVYLYDEKVLIAFNYKDGTKTITFDEIAAKDAPEGNGSDLGCFAPP

SEQ ID NO: 6289 - protein, 493 aa, Unknown
  Description of Unknown: Integrase B6290 sequence
  SM00857,G3DSA:1.10.10.2600,IPR036162,PS51737,G3DSA:3.40.50.1390, IPR006119,IPR038109,PF07508,SSF53041,IPR011109, PTHR30461,Coil,PS51736,cd00338,PF00239
MPKTAVIYARFSCNKQREASIDDQLRVCRDWCKREGYAIAAEYCDYAISGRTDDRPEFQRMIANAGESDIVLVYMMDRFSRGEYDAPIYKRELAKKGVKLVSALEAIPDSPEGIIYEKLLEGLAACESKKTAIRTKRGMEGNALRCKTNGVRVFGYRKSEDDEYEIDEHDAAFVREAFRRRINRETVNSIARDFAQRGVKTSNGNPCGYSMVYQMLHNRRYTGRYEWGGIVKEGGMPAIIDEVTFMDAQQVQGTKKRSSEDWGDFALAGKAICAGCGRNLQGVSGRGRHNVKYEYYSCVDGCMRNVRREELEGAIVGALRELLSDREEALRIARMVADRADGAEIATRRKQAAESLSAAERGLKNILNAIEQGIIAPGVKERIAELEQQKARANYDLQAIQEQKIDPERFADFLQCGAKLDDATLLKAFVWQVSVSDEDVLVTLNYDTESNEPARLDIQRVRGKLEWCTVCASPRTEVCAVGTVIFVRIPRAA

SEQ ID NO: 6290 - protein, 493 aa, Unknown
  Description of Unknown: Integrase B6291 sequence
  PTHR30461:SF3,SM00857,G3DSA:1.10.10.2600,IPR036162,PF13408, PS51737,G3DSA:3.40.50.1390,IPR025827,IPR006119,IPR038109, PF07508,IPR011109,SSF53041,PF00239, PTHR30461,PS51736,Coil,cd00338
MINDDFFRKGAISVRVSTEMQTKYSPDSQIKMCLEYAKSHNIYVNDENIYRDDGISGKCAEKRTEFQRMISDAQKQPKPFDCILVYDFSRFARNKEESVMYKAMLRKKYNIEVISITQPLADGKERVILESMYEAMDEYYILNLSENVKRGKLEKASRGEYQGRTPFGYFYDKNQQNLVINPETSKIVKYIFDEWLKDDTTLNGLTKNINNMGIKTVQGNRWCEGSLKYLLNNPLYAGYVRYTDGGMKKYFNNVNTKVIKGNHEPIITEGTWEKVKEKNQMHEKNWFKYKKPSVKHEYWLRGLIKCSSCGKNLIMIQRKSGKKTKPFFQCNGYNKKMCPDSHSILQEKLENALLTEIEKIFTKKINITIADNQNNTTKTNLFESAIKKQKDRLDRIEIAYMDGIDTLAEYKEKKVFINQEISRLTNELERINSLKFQNDKSEKVYNLCEYAHRILASPDIDFKIKDKIAHELFKEIIYNKKENSLIITFNELS

SEQ ID NO: 6291 - protein, 493 aa, Unknown
  Description of Unknown: Integrase B6292 sequence
  PTHR30461:SF3,IPR036162,PS51737,IPR011109,PTHR30461, PS00397,PF00239,G3DSA:1.10.10.2600,IPR006119,SSF53041, cd00338,SM00857,IPR025827,IPR038109,mobidb-lite, PS51736,IPR006118,PF13408,G3DSA:3.40.50.1390,PF07508,Coil
MKETLSERKTGAIYIRVSTDKQEELSPDAQLRLLMDYAKNNHTDIPMEYIFQDNGISGRKANKRPAFQQMIALAKSKEHPIDTIIVWKFSRFARNQEESIVYKSLLKKNNVDVVSVSEPLIDGPFGSLIERIIEWMDEYYSIRLSGEVMRGMTQNALRGHYQGDAPIGYQSPGNKKPPEKDPKTVQIPIMMKDLLLSGSSLLQIARKLNEHGYRTKHGNLWDARGVRYVLENPFYAGISRWNYTDRGRQLKPADEVIYTKGNWEPLWDKATLKEIQKHLAMNMRKTKSRDVSTAKHWLSGLLICSSCGGTLAYSGTKNSRGFQCWKYTKGFCNESHYIGIRPIEKMVIEYLESILHSPAIVYTVISSASADADSKLADLEKQLQKVENKEKRIKAAYLNEIDSLEEYKANKAALLKERAAIEKNIKLLTISNTDMSKEEMDKKMKQNISALLTVLQDDSADYVQKGNMMRNVVDHIVFDRGNTSLDMFLKLVI

SEQ ID NO: 6292 - protein, 493 aa, Unknown
  Description of Unknown: Integrase B6293 sequence
  SM00857,G3DSA:1.10.10.2600,IPR036162,PS51737,G3DSA:3.40.50.1390, IPR006119,IPR038109,PF07508,SSF53041,IPR011109, PTHR30461,Coil,PS51736,cd00338,PF00239
MPKTAVIYARFSCNKQREASIDDQLRVCRDWCKREGYAIAAEYCDYAISGRTDDRPEFQRMIANAGESDIVLVYMMDRFSRGEYDAPIYKRELAKNGVKLVSALEAIPDSPEGIIYEKLLEGLAACESKKTAIRTKRGMEGNALRCKTNGVRVFGYRKSEDDEYEIDEHDAAFVREAFKRRINRETVNSIARDFAQRGVKTSNGNPCGYSMVYQMLHNRRYTGRYEWGGIVKEGGMPEIVDEVTFMDAQQVQGTKKRSSEDWGDFALAGKAICAGCGRNLQGVSGRGRHNVKYEYYSCVDGCMKNVRREELEGAIVDALRELLSDREEALRIARMVADRADGAEIATRRKQAAESLSAAERGLKNILNAIEQGIIAPGVKERIAELEEQKARANYDLQAIQDQKIDPERFADFLQCGAKLDDATLLKAFVWQVSVSDDEVFVTLNYDTESNEPARLDIQRVRGKLEWCPICKDSRTQVLALGRSVFIRFSRAA

SEQ ID NO: 6293 - protein, 493 aa, Unknown
  Description of Unknown: Integrase B6294 sequence
  PTHR30461:SF3,IPR036162,PS51737,IPR011109,PTHR30461, PS00397,PF00239,G3DSA:1.10.10.2600,IPR006119,SSF53041, cd00338,SM00857,IPR025827,IPR038109, PS51736,IPR006118,PF13408,G3DSA:3.40.50.1390,PF07508,Coil
MKETLSERKTGAIYIRVSTDKQEELSPDAQLRLLMDYAKTNHTDIPMEYIFQDNGISGRKADKRPAFQQMIALAKSKEHPIDTIIVWKFSRFARNQEESIVYKSLLKKNNVDVVSVSEPLIDGPFGSLIERIIEWMDEYYSIRLSGEVMRGMTQNALRGHYQGDAPIGYQSPGNKKPPEKDPKTIQIPIMMKDLLLSGSSLLQIARKLNEHGYRTKHGNLWDARGVRYVLENPFYAGISRWNYTDRGRQLKPADEVIYTKGNWEPLWDKATLEEIKKHLAMNMRKTKSRDVSAAKHWLSGLLICSSCGGTLAYSGTKNSRGFQCWKYTKGFCNESHYIGIRPIEKMVIEYLESILHSPAIVYTVISSASADADSKLADLEKQLQKVENKEKRIKAAYLNEIDSLEEYTANKAALLKERAAIEKNIKLLTISNTDMSKEEMDKKMKQNISALLTVLQDDSADYVQKGNMMRNVVDHIVFDRGNTSLDMFLKLVI

SEQ ID NO: 6294 - protein, 493 aa, Unknown
  Description of Unknown: Integrase B6295 sequence
  PTHR30461:SF3,IPR036162,PS51737,IPR011109,PTHR30461, PS00397,PF00239,G3DSA:1.10.10.2600,IPR006119,SSF53041, cd00338,SM00857,IPR025827,IPR038109,PS51736, IPR006118,PF13408,G3DSA:3.40.50.1390,PF07508,Coil
MSVKYAYGYIRVSTHDQEEISPDSQEHLLWDYAAKNNIVILKIFTDLGISGRKANKRPGFQEMIGLAKGDDHPVDQILVWKFSRFARNQEESIVYKSLLKKQHNVDVVSVSEPLSDNPFGSLIERIIEWMDEYYSIRLSGEVYRGMKENALRGAYQARPPLGYKVVEHGKPPVIVPEEAKIVRTIFEKYTNEGMSFFDIARYLNSLGLKTSHGKPFERRSVEYIIQNPSYCGMIRWNRTENSTNRIKDKDEWIVTEGQQPAIISKELFESAQERFKATYKPVGKRPSSTYKHWLSGLLKCPDCGRTLTSTTMKRVNGEKYSYFSCYGYSKGKCKKPNGISSLVLEKEVLASIKEILDTKDIVYELREYQPTEQFDERKAITEQLESLTGKEERIKASYREGIDTLEEYKANKAIIQKERESLEQQLKDLKKAAHKSDQDPADAMLQKVRSVYDILISNNYTYVQKNEALKQIIDKIIYDRKNDSLKIFFFLYR

SEQ ID NO: 6295 - protein, 493 aa, Unknown
  Description of Unknown: Integrase B6296 sequence
  PTHR30461:SF3,IPR036162,PS51737,IPR011109,PTHR30461, PS00397,PF00239,G3DSA:1.10.10.2600,IPR006119,SSF53041, cd00338,SM00857,IPR025827,IPR038109,PS51736, IPR006118,PF13408,G3DSA:3.40.50.1390,PF07508,Coil
MSVKYAYGYIRVSTHDQEEISPDSQEHLLRDYAAKNNIVILKIFTDLGISGRKANKRPGFQEMIGLAKGDDHPVDQILVWKFSRFARNQEESIVYKSLLKKQHNVDVVSVSEPLSDDPFGSLIERIIEWMDEYYSIRLSGEVYRGMKENALRGAYQARPPLGYKVVEHGKPPVIVPEEAKIVRTIFEKYTNEGMSFFDIARYLNSLGLKTSHGKPFERRSVEYIIQNPSYCGMIRWNRTENSTNRIKDKDEWIVTEGQQPAIISKELFESAQERFKATYKPVGKRPSSTYKHWLSGLLKCPDCGRTLTSTTMKRVNGEKYSYFSCYGYSKGKCKKPNGISSLVLEKEVLAGIKEVLDTGNISYELHDYQPAEAVDERSIIRDRLNSLSSKEERIKASYREGIDTLEEYKANKAIIQKERESLEQQLKELKKATHKSDQDPADAMLQKVRSVYDILISNNYTYIQKNEALKQIIDKIIYDRKNDSLKIYFFLYR

SEQ ID NO: 6296 - protein, 493 aa, Unknown
  Description of Unknown: Integrase B6297 sequence
  PTHR30461:SF3,IPR036162,PS51737,IPR011109,PTHR30461, PS00397,PF00239,G3DSA:1.10.10.2600,IPR006119,SSF53041, cd00338,SM00857,IPR025827,IPR038109,PS51736, IPR006118,PF13408,G3DSA:3.40.50.1390,PF07508,Coil
MSVKYAYGYIRVSTHDQEEISPDSQEHLLRDYAAKNNIVILKIFTDLGISGRKANKRPGFQEMIGLAKADDHPVDQILVWKFSRFARNQEESIVYKSLLKKQHNVDVVSVSEPLSDNPFGSLIERIIEWMDEYYSIRLSGEVYRGMKENALRGAYQARPPLGYKVVEHGKPPVIVPEEAKIVRTIFEKYTNEGMSFFDIARYLNSLGLKTSHGKPFERRSVEYIIQNPSYCGMIRWNRTENSTNRIKDKDEWIVTEGQQPAIISKELFESAQERFKATYKPVGKRPSSTYKHWLSGLLKCPDCGRTLTSTTMKRVNEEKYSYFSCYGYSKGKCKKPNGISSLVLEKEVLASIKEVLDTKDIVYELREYQPTEQFDERKAITEQLESLTGKEERIKASYREGIDTLEEYKANKAIIQKERESLEQQLKDLKKAAHKSDQDPADAMLQKVRSVYDILISNNYTYVQKNEALKQIIDKIIYDRKNDSLKIYFFLYR

SEQ ID NO: 6297 - protein, 493 aa, Unknown
  Description of Unknown: Integrase B6298 sequence
  PTHR30461:SF3,IPR036162,PS51737,IPR011109,PTHR30461, PS00397,PF00239,G3DSA:1.10.10.2600,IPR006119,SSF53041, cd00338,SM00857,IPR025827,IPR038109,PS51736, IPR006118,PF13408,G3DSA:3.40.50.1390,PF07508,Coil
MSVKYAYGYIRVSTHDQEEISPDSQEHLLRDYATKNNVVILKIFTDLGISGRKANKRPGFQEMIGLAKGDDHPVDQILVWKFSRFARNQEESIVYKSLLKKQHNVDVVSVSEPLSDDPFGSLIERIIEWMDEYYSIRLSGEVLRGMKENAARGAFQGAAPFGYKTIDKTLVIDPEKADIVRHVFNMYVNEKLSVFDIARYLNNLGFRTIRGNLFERRTVEYMLKNPTYCGMIHWNKTENATHSIKNKDEWIVSQGQHPAIISQELFDATQERLKATRRPSRRRERPSSTYKHWLSGLMKCPACGKTLSACTQKRVNGEKYAYFSCYGYAHGQCDKAHGVSSLVLEPEVLASIKEVLDTGNISYELHDYQPTEVVDERSIIRDRLNSLASKEERIKASYREGIDTLEEYKSNKAILQKERDNLEEQLKELEGQNPEPDQDPTSDMLLKVRSVYDILISDSYTYVQKNEALKQIVDKIIYDKESDSLKIYFFLCR

SEQ ID NO: 6298 - protein, 493 aa, Unknown
  Description of Unknown: Integrase B6299 sequence
  PTHR30461:SF3,IPR036162,PS51737,IPR011109,PTHR30461, PS00397,PF00239,G3DSA:1.10.10.2600,IPR006119,SSF53041, cd00338,SM00857,IPR025827,IPR038109,PS51736, IPR006118,PF13408,G3DSA:3.40.50.1390,PF07508,Coil
MSVKYAYGYIRVSTHDQEEISPDSQEHLLRDYAAKNNIVILKIFTDLGISGRKANKRPGFQEMIGLAKGDDHPVDQILVWKFSRFARNQEESIVYKSLLKKQHNVDVVSVSEPLSDDPFGSLIERIIEWMDEYYSIRLSGEVYRGMKENALRGAYQARPPLGYKVVEHGKPPVIVPEEAKIVRTIFEKYTNEGMSFFDIARYLNSLGLKTSHGKPFERRSVEYIIQNPSYCGMIRWNRTENSTNRIKDKDEWIVTEGQQPAIISKELFESAQERFKATYKLVGKRPSSTYKHWLSGLLKCPDCGRTLTSTTMKRVNGEKYSYFSCYGYSKGKCKKPNGISSLVLEKEVLASIKEILDTKDIVYELREYQPTEQFDERKAITEQLESLTGKEERIKASYREGIDTLEEYKANKAIIQKERESLEQQLKDLKKAAHKSDQDPADAMLQKVRSVYDILISNNYTYIQKNEALKQIIDKIIYDRKNDSLKIYFFLYR

SEQ ID NO: 6299 - protein, 493 aa, Unknown
  Description of Unknown: Integrase B6300 sequence
  PTHR30461:SF3,IPR036162,PS51737,IPR011109,PTHR30461, PS00397,PF00239,G3DSA:1.10.10.2600,IPR006119,SSF53041, cd00338,SM00857,IPR025827,IPR038109,PS51736, IPR006118,PF13408,G3DSA:3.40.50.1390,PF07508,Coil
MKTKYCYGYVRVSTSGQEELSPDSQAKLLKDFAKKNDMIVLQIFYELGISGRKADKRPEFQKMIALAKSDKHPVDCIIVWKFSRFARNQEESIVYKSLLKKKHNVEVLSVSEPLVDGPFGSLIERIIEWMDEYYSVRLSGEVTRGMTEKAKRGGYQARPPLGYKIQERGKPPVIVPEEAEIIKIIFDKYVNEHTGIFDIARYLNLCGFKTSHNKPFERRSIEYILQNPTYCGMIRWNRTVSETNEIRPESEWIVSDGQQPAIISKELFDKAQIRYKSEYKPSGTRPSSTYKHWLSGLMKCPVCGRTMIAKTVNNQKSYCYFTCYGYSKGKCLAKTSVSSLRLEPAVLASIKEVLDTGNIIYRHVEPVQETSVDLNVIITEQLRKNAEKFDRIREAYRNGVDALDEYKENKRMVQEEKEMLEKQLADIKPAEPTIDTSKIAMLEKVRNVYEIIESDSVDPVTKNEILKSVIEKIIYDRSKDELKVYYYYAPESQ

SEQ ID NO: 6300 - protein, 493 aa, Unknown
  Description of Unknown: Integrase B6301 sequence
  PTHR30461:SF3,IPR036162,PS51737,IPR011109,PTHR30461, PS00397,PF00239,G3DSA:1.10.10.2600,IPR006119,SSF53041, cd00338,SM00857,IPR025827,IPR038109,PS51736, IPR006118,PF13408,G3DSA:3.40.50.1390,PF07508,Coil
MSIKYAYGYIRVSTHDQEEISPDSQEHLLRDYAAKNNIVILKIFTDLGISGRKANKRPGFQEMIGLAKADDHPADLILVWKFSRFARNQEESIVYKSLLKKQHNVDVVSVSEPLSDDPFGSLIERIIEWMDEYYSIRLSGEVLRGMKENAARGAFQGAAPFGYKTVDKTLVIDPEKADIVRHVFNMYANGKLSVFDIARYLNNLGLRTIRGNLFERRTVEYMLKNPTYCGMIHWNKTENATHSIKNKDEWIVSQGQHPAIISQELFDATQERLKTTRRPSRRRERPSSTYKHWLSGLMKCPACGKTLSACTQKRVNGEKYAYFSCYGYAHGQCDKAHGVSSLVLEPEVLASIKEILDTGNISYELHDYQPTEAVDERSIIRDRLNSLTSKEERIKASYREGIDTLEEYKSNKAILQKEQDNLEEQLKELEGQNPEPDQDPTGDMLLKVRSVYDILISDSYTYVQKNEALKQIVDKIIYDKESDSLKIYFFLCR

SEQ ID NO: 6301 - protein, 493 aa, Unknown
  Description of Unknown: Integrase B6302 sequence
  PTHR30461:SF3,IPR036162,PS51737,IPR011109,PTHR30461, PS00397,PF00239,G3DSA:1.10.10.2600,IPR006119,SSF53041, cd00338,SM00857,IPR025827,IPR038109,PS51736, IPR006118,PF13408,G3DSA:3.40.50.1390,PF07508,Coil
MSVKYAYGYIRVSTHDQEEISPDSQEHLLRDYAAKNNIVILKIFTDLGISGRKANKRPGFQEMIGLAKGDDHPVDQILVWKFSRFARNQEESIVYKSLLKKQHNVDVVSVSEPLSDDPFGSLIERIIEWMDEYYSIRLSGEVLRGMKENAARGAFQGAAPFGYKTIDKTLVIDPEKADIVRHVFNMYVNEKLSVFDIARYLNNLGFRTIRGNLFERRTVEYMLKNPTYCGMIHWNKTENATHSIKNKDEWIVSQGQHPAIISQELFDATQERLKATRRPSRRRERPSSTYKHWLSGLMKCPACGKTLSACTQKRVNGEKYAYFSCYGYAHGQCDKAHGVSSLVLEPEVLASIKEILDTGNISYELHDYQPTEAVDERSIIRDRLNSLSSKEERIKASYREGIDTLEEYKSNKAILQKERDNLEEQLKELEGQNPEPDQDPTGDMLLKVRSVYDILISDSYTYVQKNEALKQIVDKIIYDKESDSLKIYFFLCR

SEQ ID NO: 6302 - protein, 493 aa, Unknown
  Description of Unknown: Integrase B6303 sequence
  PTHR30461:SF3,IPR036162,PS51737,IPR011109,PTHR30461, PS00397,PF00239,G3DSA:1.10.10.2600,IPR006119,SSF53041, cd00338,SM00857,IPR025827,IPR038109,PS51736, IPR006118,PF13408,G3DSA:3.40.50.1390,PF07508,Coil
MSVKYAYGYIRVSTHDQEEISPDSQEHLLRDYAAKNNIVILKIFTDLGISGRKANKRPGFQEMIGLAKGDDHPVDQILVWKFSRFARNQEESIVYKSLLKKQHNVDVVSVSEPLSDDPFGSLIERIIEWMDEYYSIRLSGEVHRGMKENALRGAYQARPPLGYKVVEHGKPPVIVPEEAKIVRTIFEKYTNEGMSFFDIARYLNSLGLKTSHGKPFERRSVEYIIQNPSYCGMIRWNRTENSTNRIKDKDEWIVTEGQQPAIISKELFESAQERFKATYKPVGKRPSSTYKHWLSGLLKCPDCGRTLTSTTMKRVNGEKYSYFSCYGYSKGKCKKPNGISSLVLEKEVLASIKEILDTKDIVYELREYQPTEQFDERKAITEQLESLTGKEERIKASYREGIDTLEEYKANKAIIQKERESLEQQLKELKTAARKSDQDPADAMLQKVRSVYDILISNNYTYVQKNEALKQIIDKIIYDRKNDSLKIYFFLYR

SEQ ID NO: 6303 - protein, 493 aa, Unknown
  Description of Unknown: Integrase B6304 sequence
  PTHR30461:SF3,IPR036162,PS51737,IPR011109,PTHR30461, PS00397,PF00239,G3DSA:1.10.10.2600,IPR006119,SSF53041, cd00338,SM00857,IPR025827,IPR038109,PS51736, IPR006118,PF13408,G3DSA:3.40.50.1390,PF07508,Coil
MSVKYAYGYIRVSTHDQEEISPDSQEHLLRDYAAKNNIVILKIFTDLGISGRKANKRPGFQEMIGLAKGDDHPVDQILVWKFSRFARNQEESIVYKSLLKKQHNVDVVSVSEPLSDDPFGSLIERIIEWMDEYYSIRLSGEVYRGMKENALRGAYQARPPLGYKVVEHGKPPVIVPEEAKIVRTIFEKYTNEGMSFFDIARYLNSLGLKTSHGKPFERRSVEYIIQNPSYCGMIRWNRTENSTNRIKDKDEWIVTEGQQPAIISKELFESAQKRFKATYKPVGKRPSSTYKHWLSGLLKCPDCGRTLTSTTMKRVNGEKYSYFSCYGYSKGKCKKPNGISSLVLEKEVLAGIKEVLDTGNISYELHDYQPAEAVDERSIIRDRLNSLSSKEERIKASYREGIDTLEEYKANKAIIQKERESLEQQLKELKKATHKSDQDPADAMLQKVRSVYDILISNNYTYIQKNEALKQIIDKIIYDRKNDSLKIYFFLYR

SEQ ID NO: 6304 - protein, 493 aa, Unknown
  Description of Unknown: Integrase B6305 sequence
  cd03768,PTHR30461:SF3,SM00857,IPR036162,PF13408, PS51737,IPR025827,G3DSA:3.40.50.1390,IPR006119,PF07508, SSF53041,IPR011109,PTHR30461,PS51736,PF00239
MKTAIYARQSVNKKDSISIETQIDICKREIKDNGPIEIYQDKGYSGKNTSRPAFQSLLNDVKQNKINNIIVYRLDRISRSVLDFANIIDILKEHNVGFVSANEKFDTTTPVGKAMLYIVMVFAQLERETIAERVKDNYYARGTEGVWLGGPAPYGFNNTKISIGNKNVATIVPNEKIELIKWIFEQYQQDDTSLGIIARQLVAQHPGEMWNNIKLSRILHNPAYVRADVDVYNYFKSKGCIIKSDISQFDGIHGLNIYGKRDRTLNKYNNIENHHVTVSLHEGIISSRDWLQCQYKLENNIQIKNTGTGKHTWLTGLLKCGYCGRAVTPKKTTKTTMKLYCSGKPLGLCDEVTNSHYLTDVENLVSEKIKKYIDKMQECEINTIENANETEINILKIELVKVETEIDCIVNNLTLANEVMMKYANEKIIELDKKRNEILGKLSKLSVAKPHKLDVPDICDWDSGSKEFKKEVANILIDRVLIYNDQITVKWKY

SEQ ID NO: 6305 - protein, 493 aa, Unknown
  Description of Unknown: Integrase B6306 sequence
  PTHR30461:SF3,IPR036162,PS51737,IPR011109,PTHR30461, PS00397,PF00239,G3DSA:1.10.10.2600,IPR006119,SSF53041, cd00338,SM00857,IPR025827,IPR038109, PS51736,IPR006118,PF13408,G3DSA:3.40.50.1390,PF07508,Coil
MSVKYAYGYIRVSTHDQEEISPDSQEHLLRDYAAKNNIVILKIFTDLGISGRKANKRPGFQEMIGLAKGDDHPVDQILVWKFSRFARNQEESIVYKSLLKKQHNVDVVSVSEPLSDDPFGSLIERIIEWMDEYYSIRLSGEVYRGMKENALRGAYQARPPLGYKVVEHGKPPVIVSEEAKIVRTIFEKYTNEGMSFFDIARYLNSLGLKTSHGKPFERRSVEYIIQNPSYCGMIRWNRTENSTNRIKDKDEWIVTEGQQPAIISKELFESAQKRFKATYKPVGKRPSSTYKHWLSGLLKCPDCGRTLTSTTMKRVNEEKYSYFSCYGYSKGKCKKPNGISSLVLEKEVLASIKEILDTKDIVYELREYQPTEQFDERKAITEQLESLTGKEERIKASYREGIDTLEEYKANKAIIQKERESLEQQLKELKTAARKSDQDPADAMLQKVRSVYDILISNNYTYIQKNEALKQIIDKIIYDRKNDSLKIYFFLYR

SEQ ID NO: 6306 - protein, 493 aa, Unknown
  Description of Unknown: Integrase B6307 sequence
  PTHR30461:SF3,IPR036162,PS51737,IPR011109,PTHR30461, PS00397,PF00239,G3DSA:1.10.10.2600,IPR006119,SSF53041, SM00857,IPR025827,IPR038109,PS51736,cd03768, IPR006118,PF13408,G3DSA:3.40.50.1390,PF07508,Coil
MRVICYVRVSTREQAEKGYSVGEQQERLRAYCIAKDWIVEDVITDPGFSGAKLERPGIQRVIRLVQEKKCEAVLVWKLDRLSRSQKDTLYLIEDVFLKNGCAFVSMNENFDTSTAFGRAMIGILSVFAQLEREQIRERMAVGRVGRAKAGLFHGGGFAPIGYDYKTIAEGGEGLVVNEYEAMQVREVFSLYLQGWPVNRIRKYMTARYTTKSGDWGNDTTIRDVLKNPLYIGKINWAKKIYDGKHEPIIDEETFNAAAARLASSQWKRDCSDGLERNSPFHSTHLLGGILWCGRCGARYFASGNYSGKGENRKYWPYYVCYSRAKSAKRMIRDPNCKNDRWPVAKLDKIILDQVRQLIFDPETLERAAGGNQEAPPSERRALLNARRAEAKGQIDRLLDLCQMGTLPAAAVADRLKSLQDEVEGIDTALRELAEDDPAERLEAARETLVGAAEILDNGSLDEKRELVHSLIHRIDLDGENIDIHWSFAPGESE

SEQ ID NO: 6307 - protein, 493 aa, Unknown
  Description of Unknown: Integrase B6308 sequence
  PTHR30461:SF3,SM00857,IPR006118,G3DSA:1.10.10.2600,IPR036162, PS51737,G3DSA:3.40.50.1390,IPR006119,IPR038109,PF07508, SSF53041,IPR011109,PF00239,PTHR30461,PS00397, PS51736,Coil,cd00338
MKEKVSERKTGAIYIRVSTDKQEELSPDAQLRLLLDYAKKDSIDVPKEYIFQDNGISGRKANKRPAFQNMIALAKSKEHPIDTIIVWKFSRFARNQEESIVYKSLLKKNNVDVVSVSEPLIDGPFGSLIERIIEWMDEYYSIRLSGEVMRGMTQNAMRGHYQSDAPIGYTSPGDKKPPVINPDTVQIPLMIKDMFLSGSTQLQIARKLNDSGYRTKRGNLWDARGVRYVLENPFYIGKSRWNYTERGRRLKPADEVIYADGNWEALWDEDTFKEIQKRLALNMRKSKSRDISAAKHWLSGLLICSSCGGTLAFGGAHNMRGFQCWKYSKGFCSESHYISTGPIEKMVLEYLEAVMHSPALSYTVISSSSVDASSKLSDLERQLQKIDAKEKRIKAAYLNEIDTLEEYKANKTALEEERRTVEKEIEELTLSDVKYSKEDLDKKMKQNISDLLRVLRDESADYIQKGNMMRNVVDHIVFNRKNTSLDVFLKLVV

SEQ ID NO: 6308 - protein, 493 aa, Unknown
  Description of Unknown: Integrase B6309 sequence
  PTHR30461:SF3,IPR036162,PS51737,IPR011109,PTHR30461, PS00397,PF00239,G3DSA:1.10.10.2600,IPR006119,SSF53041, cd00338,SM00857,IPR025827,IPR038109,PS51736, IPR006118,PF13408,G3DSA:3.40.50.1390,PF07508,Coil
MSVKYAYGYIRVSTHDQEEISPDSQEHLLRDYAAKNNIVILKIFTDLGISGRKANKRPGFQEMIGLAKGDDHPVDLILVWKFSRFARNQEESIVYKSLLKKQHNVDVMSVSEPLSDDPFGSLIERIIEWMDEYYSIRLSGEVLRGMKENAARGAFQGAAPFGYKTVDKTLVIDPEKADIVRHVFNMYVNEKLSVFDIARYLNNLGFRTIRGNLFERRTVEYMLKNPTYCGMIHWNKTENATHSIKNKDEWIVSQGQHPAIISQELFDATQERLKATRRPSRRRERPSSTYKHWLSGLMKCPACGKTLSACTQKRVNGEKYAYFSCYGYAHGQCDKAHGVSSLVLEPEVLAGIKEVLDTGNISYELHDYQPTEAIDERSIIRDRLNSLSSKEERIKASYREGIDTLEEYKSNKAILRKERDNLEEQLKELEGQNSEPDQDPTGDMLLKVRSVYDILISDSYTYVQKNEALKQIVDKIIYDKESDSLKIYFFLCR

SEQ ID NO: 6309 - protein, 493 aa, Unknown
  Description of Unknown: Integrase B6310 sequence
  PTHR30461:SF3,IPR036162,PS51737,IPR011109,PTHR30461, PS00397,PF00239,G3DSA:1.10.10.2600,IPR006119,SSF53041, cd00338,SM00857,IPR025827,IPR038109,PS51736, IPR006118,PF13408,G3DSA:3.40.50.1390,PF07508,Coil
MRVKYAYGYIRVSTHDQEEISPDSQEHLLRDYAAKNNIVILKIFTDLGISGRKANKRPGFQEMIGLAKGDDHPVDQILVWKFSRFARNQEESIVYKSLLKKQHNVDVVSVSEPLSDDPFGSLIERIIEWMDEYYSIRLSGEVYRGMKENALRGAYQARPPLGYKVVEHGKPPVIVPEEAKIVRTIFEKYTNEGMSFFDIARYLNSLGLKTSHGKPFERRSVEYIIQNPSYCGMIRWNRTENSTNRIKDKDEWIVTEGQQPAIISKELFESAQERFKATYKPVGKRPSSTYKHWLSGLLKCPDCGRTLTSTTMKRVNGEKYSYFSCYGYSKGKCKKPNGISSLVLEKEVLASIKEILDTKDIVYELREYQPTEQFDERKAITEQLESLTGKEERIKASYREGIDTLEEYKANKAIIQKERESLEQQLKELKKTARKSDQDPADAMLQKVRSVYDILISNNYTYVQKNEALKQIIDKIIYDRKNDSLKIYFFLYR

SEQ ID NO: 6310 - protein, 493 aa, Unknown
  Description of Unknown: Integrase B6311 sequence
  PTHR30461:SF3,IPR036162,PS51737,IPR011109,PTHR30461, PS00397,PF00239,G3DSA:1.10.10.2600,IPR006119,SSF53041, cd00338,SM00857,IPR025827,IPR038109,PS51736, IPR006118,PF13408,G3DSA:3.40.50.1390,PF07508,Coil
MSVKYAYGYIRVSTHDQEEISPDSQEHLLRDYAAKNNIVIIKIFTDLGISGRKANKRPGFQEMIGLAKGDDHPVDLILVWKFSRFARNQEESIVYKSLLKKQHNVDVVSVSEPLSDNPFGSLIERIIEWMDEYYSIRLSGEVLRGMKENALRGAYQARPPLGYKIVEHGKPPVIVPEEAKIVRTIFEKYTNEGMSFFDIARYLNSLGLKTSHGKPFERRSVEYIIQNPSYCGMIRWNRTENSTNRIKDKDEWIVTEGQQPAIISEELFESAQERFKATYKPVGKRPSSTYKHWLSGLLKCPDCGRTLTATTMKRVNGEKYSYFSCYGYSKGKCKKPNGISSLVLEKEVLASIKEILDTKDIVYELREYQPTEQFDERKAITEQLESLTGKEERIKASYREGIDTLEEYKANKAIIQKERESLEQQLKELKTAARKSDQDPADAMLQKVRSVYDILISNNYTYVQKNEALKQIIDKIIYDRKNDSLKIYFFLYR

SEQ ID NO: 6311 - protein, 493 aa, Unknown
  Description of Unknown: Integrase B6312 sequence
  cd00338,SM00857,IPR006118,G3DSA:1.10.10.2600,IPR036162, PS51737,G3DSA:3.40.50.1390,IPR006119,IPR038109,PF07508, SSF53041,IPR011109,PTHR30461,PS00397,PS51736, Coil,PF00239
MKEKVSERKTGAIYIRVSTDKQEELSPDAQLRLLLDYAKKDSIDVPKEYIFQDNGISGRKANKRPAFQNMIALAKSKEHPIDTIIVWKFSRFARNQEESIVYKSLLKKNNVDVVSVSEPLIDGPFGSLIERIIEWMDEYYSIRLSGEVMRGMTQNAMRGHYQSDAPIGYTSPGDKKPPVINPDTVQIPLMIKDMFLSGSTQLQIARKLNDSGYRTKRGNLWDARGVRYVLENPFYIGKSRWNYTERGRRLKPADEVIYANGNWEALWDEDTFKEIQKRLALNMRKSKSRDISAAKHWLSGLLICSSCGGTLAFGGAHNMRGFQCWKYSKGFCSESHYISTGPIEKMVLEYLEAVMHSPALSYTVISSSSVDASSKLSDLERQLQKIDAKEKRIKAAYLNEIDTLEEYKANKTALEEERRTVEKEIEELTLSDVKYSKEDLDKKMKQNISDLLRVLRDESADYIQKGNMMRNVVDHIVFDRKNTSLDVFLKLVV

SEQ ID NO: 6312 - protein, 493 aa, Unknown
  Description of Unknown: Integrase B6313 sequence
  PTHR30461:SF3,IPR036162,PS51737,IPR011109,PTHR30461, PS00397,PF00239,G3DSA:1.10.10.2600,IPR006119,SSF53041, cd00338,SM00857,IPR025827,IPR038109,PS51736, IPR006118,PF13408,G3DSA:3.40.50.1390,PF07508,Coil
MSVKYAYGYIRVSTHDQEEISPDSQEHLLRDYATKNNVVILKIFTDLGISGRKANKRPGFQEMIGLAKGDDHPVDQILVWKFSRFARNQEESIVYKSLLKKQHDVDVVSISEPLSDNPFGSLIERIIEWMDEYYSIRLSGEVLRGMKENAARGAFQGAAPFGYKTIDKTLVIDPEKADIVRHVFNMYVNEKLSVFDIARYLNNLGFRTIRGNLFERRTVEYMLKNPTYCGMIHWNKTENATHSVKNKDEWIVSQGQHPAIISQELFDATQEQLKATRRPSRRRERPSSTYKHWLSGLMKCPACGKTLSACTQKRVNGEKYAYFSCYGYAHGQCDKAHGVSSLVLEPEVLASIKEILDTGNISYELHDYQPTEAVDERSIIRDRLNSLTSKEERIKASYREGIDTLEEYKSNKAILQKERDNLEEQLKELEGQNPEPDQDPTGDMLLKVRSVYDILISDSYTYVQKNEALKQIVDKIIYDKESDSLKIYFFLCR

SEQ ID NO: 6313 - protein, 493 aa, Unknown
  Description of Unknown: Integrase B6314 sequence
  PTHR30461:SF3,IPR036162,PS51737,IPR011109,PTHR30461, PS00397,PF00239,G3DSA:1.10.10.2600,IPR006119,SSF53041, cd00338,SM00857,IPR025827,IPR038109,PS51736, IPR006118,PF13408,G3DSA:3.40.50.1390,PF07508,Coil
MKTKYCYGYVRVSTSGQEELSPDSQAKLLKDFAKKNDMIVLQIFYELGISGRKADKRPEFQKMIALAKSDKHPVDCIIVWKFSRFARNQEESIVYKSLLKKKHNVEVLSVSEPLVDGPFGSLIERIIEWMDEYYSVRLSGEVTRGMTEKAKRGGYQARPPLGYKIQERGKPPVIVPEEAEIIKIIFDKYVNEHTGIFDIARYLNLCGFKTSHNKPFERRSIEYILQNPTYCGMIRWNRTVSETNEIRPESEWIVSDGQQPAIISKELFDKAQIRYKSEYKPSGTRPSSTYKHWLSGLMKCPVCGRTMIAKTVNNQKSYCYFTCYGYSKGKCLAKTSVSSLKLEPAVLASIKEVLDTGNIIYRHVEPVQETSVDLNVIITEQLRKNVEKFDRIREAYRNGVDTLDEYKENKRMVQEEKEMLEKQLADIKPAEPTIDTSKIAMLEKVRNVYEIIESDSVDPVTKNEILKSVIEKIIYDRSKDELKVYYYYAPESQ

SEQ ID NO: 6314 - protein, 493 aa, Unknown
  Description of Unknown: Integrase B6315 sequence
  PTHR30461:SF3,IPR036162,PS51737,IPR011109,PTHR30461, PS00397,PF00239,G3DSA:1.10.10.2600,IPR006119,SSF53041, cd00338,SM00857,IPR025827,IPR038109,PS51736, IPR006118,PF13408,G3DSA:3.40.50.1390,PF07508,Coil
MSVKYAYGYIRVSTHDQEEISPDSQEHLLRDYAAKNNIVILKIFMDLGISGRKANKRPGFQEMIGLAKGDDHPVDLILVWKFSRFARNQEESIVYKSLLKKQHNVDVVSVSEPLSDDPFGSLIERIIEWMDEYYSIRLSGEVYRGMKENALRGAYQARPPLGYKVVEHGKPPVIVPEEAKIVRTIFEKYTNESMSFFDIARYLNSLGLKTSHGKSFERRSVEYIIQNPSYCGMIRWNRTENSTNRIKDKDEWIVTEGQQPAIISKELFESAQKRFKATYKPVGKRPSSTYKHWLSGLLKCPDCGRTLTSTTMKRVNGEKYSYFSCYGYSKGKCKKPNGISSLVLEKEVLASIKEILDTKDIVYELREYQPTEQFDERKAITEQLESLTGKDERIKASYREGIDTLEEYKANKAIIQKERESLEQQLKELKKVARKSDQDPADAMLQKVRSVYDILISNNYTYVQKNEALKQIIDKIIYDRKNDSLKIYFFLYR

SEQ ID NO: 6315 - protein, 493 aa, Unknown
  Description of Unknown: Integrase B6316 sequence
  PTHR30461:SF3,IPR036162,PS51737,IPR011109,PTHR30461, PS00397,PF00239,G3DSA:1.10.10.2600,IPR006119,SSF53041, cd00338,SM00857,IPR025827,IPR038109,PS51736, IPR006118,PF13408,G3DSA:3.40.50.1390,PF07508,Coil
MSVKYAYGYIRVSTHDQEEISPDSQEHLLLDYAAKNNIVILKIFTDLGISGRKANKRPGFQEMIGLAKADDHPVDQILVWKFSRFARNQEESIVYKSLLKKQHNVDVVSVSEPLSDNPFGSLIERIIEWMDEYYSIRLSGEVLRGMKENAARGAFQGAAPFGYKTIDKTLVIDPEKADIVRHVFNMYVNEKLSVFDIARYLNNLGFRTIRGNLFERRTVEYMLKNPTYCGMIHWNKTENATHSIKNKDEWIVSQGQHPAIISQELFDATQERLKATRRPSRRRERPSSTYKHWLSGLMKCPACGKTLSACTQKRVNGEKYAYFSCYGYAHGQCDKAHGVSSLVLEPEVLASIKEVLDTGNISYELHDYQPTEAVDERSIIRDRLNSLTSKEERIKASYREGIDTLEEYKSNKAILQKERDNLEEQLKELEGQNPEPNQDPTGDMLLQVRSVYDILVSDSYTYVQKNEALKQIVDKIIYDKESDSLKIYFFLCR

SEQ ID NO: 6316 - protein, 493 aa, Unknown
  Description of Unknown: Integrase B6317 sequence
  PTHR30461:SF3,IPR036162,PS51737,IPR011109,PTHR30461, PS00397,PF00239,G3DSA:1.10.10.2600,IPR006119,SSF53041, cd00338,SM00857,IPR025827,IPR038109,PS51736, IPR006118,PF13408,G3DSA:3.40.50.1390,PF07508,Coil
MSVKYAYGYIRVSTHDQEEISPDSQEHLLRDYATKNNVVILKIFTDLGISGRKANKRPGFQEMIGLAKGDDHPVDQILVWKFSRFARNQEESIVYKSLLKKQHNVDVVSVSEPLSDDPFGSLIERIIEWMDEYYSIRLSGEVLRGMKENAARGAFQGAAPFGYKTIDKTLVIDPEKADIVRHVFNMYVNEKLSVFDIARYLNSLGFRTIRGNLFERRTVEYMLKNPTYCGMIHWNKTENATHSVKNKDEWIVSQGQHPAIISQELFDATQERLKATRRPSRRRERPSSTYKHWLSGLMKCPACGKTLSACTQKRVNGEKYAYFSCYGYAHGQCDKAHGVSSLVLEPEVLASIKEILDTGNISYELHDYQPTEAVDERSIIRDRLNSLTSKEERIKASYREGIDTLEEYKSNKAILQKERDNLEEQLKELEGQNPEPDQDPTGDMLLKVRSVYDILISDSYTYVQKNEALKQIVDKIIYDKESDSLKIYFFLCR

SEQ ID NO: 6317 - protein, 493 aa, Unknown
  Description of Unknown: Integrase B6318 sequence
  PTHR30461:SF3,SM00857,G3DSA:1.10.10.2600,IPR036162,PF13408, IPR025827,G3DSA:3.40.50.1390,PS51737,IPR006119,IPR038109, PF07508,IPR011109,SSF53041,PTHR30461,Coil, PS51736,cd00338,PF00239
MPEALNAVIYARYSSDRQTEQSIEGQLRECYAFAKANDIAVIDTYIDRAISGKTDNRPAFQKMIEDSAKRQFQAVIVYRLDRFTRNRYDSAIYKARLKKNGVKVLSAMENLNGSPESIIMESLLEGMAEYYSVELSQKITRGMRENALKGKALGGQRVLGYKVNSDCYFEIDETTAPVVVDIFKLYSSGKTVKEICDILNARGVKTARGGAFNKNSLHTILTNKKYIGIYKTKYGEIIGGIPAIIDKELFEMVALRMEQNKKAPARAKAEINYLLSTKLFCGKCRSAMVGESGTSKTGKKYYYYACVKKKREKACDKSNVKKDWIEDLVIQRTVTDILKDDVIEKIADRLVELQKAEAAESGTMLYLENSLAEIQVSIKNIMTAIEKGIITESTKTRLTELEDEKRNVEIEIAKESIARRIISREQIIYWISSFKDGDITSEKYRQQLIDTFVHAVFVYDDKIVITYNYSGENNTATISDLDLSSPPYDTNPP

SEQ ID NO: 6318 - protein, 493 aa, Unknown
  Description of Unknown: Integrase B6319 sequence
  PTHR30461:SF3,IPR036162,PS51737,IPR011109,PTHR30461, PS00397,PF00239,G3DSA:1.10.10.2600,IPR006119,SSF53041, cd00338,SM00857,IPR025827,IPR038109,PS51736, IPR006118,PF13408,G3DSA:3.40.50.1390,PF07508,Coil
MSVKYAYGYIRVSTHDQEEISPDSQEHLLRDYATKNNVVILKIFTDLGISGRKANKRPGFQEMIGLAKGDDHPVDQILVWKFSRFARNQEESIVYKSLLKKQHNVDVVSVSEPLSDDPFGSLIERIIEWMDEYYSIRLSGEVYRGMKENALRGAYQARPPLGYKVVEHGKPPVIVPEEAKIVRTIFEKYTNEGMSFFDIARYLNSLGLKTSHGKSFERRSVEYIIQNPSYCGMIRWNRTENSTNRIKDKDEWIVTEGQQPAIISKELFESAQKRFKATYKPVGKRPSSTYKHWLSGLLKCPDCGRTLTSTTMKRVNGEKYSYFSCYGYSKGKCKKPNGISSLVLEKEVLACIKEILDTKDIVYELREYQPTDQFDERKAITEQLESLTGKEERIKASYREGIDTLEEYKTNKAIIQKERESLEQQLKDLKKAAHKSDQDPADAMLQKVRSVYDILISNNYTYVQKNEALKQIIDKIIYDRKNDSLKIYFFLYR

SEQ ID NO: 6319 - protein, 493 aa, Unknown
  Description of Unknown: Integrase B6320 sequence
  PTHR30461:SF3,IPR036162,PS51737,IPR011109,PTHR30461, PS00397,PF00239,G3DSA:1.10.10.2600,IPR006119,SSF53041, cd00338,SM00857,IPR025827,IPR038109,PS51736, IPR006118,PF13408,G3DSA:3.40.50.1390,PF07508,Coil
MSVKYAYGYIRVSTHDQEEISPDSQEHLLRDYAAKNNIVIIKIFTDLGISGRKANKRPGFQEMIGLAKGDDHPVDLILVWKFSRFARNQEESIVYKSLLKKQHNVDVVSVSEPLSDDPFGSLIERIIEWMDEYYSIRLSGEVLRGMKENAARGAFQGVAPFGYKTVNKTLAIDPEKADIVRHVFNMYVNEKLSVFDIARYLNNLGFRTIRGNLFERRTVEYMLKNPTYCGMIHWNKTENATHSIKNKDEWIVSQGQHPAIISQELFDATQERLKATRRPSRRRERPSSTYKHWLSGLMKCPACGKTLSACTQKRVNGEKYAYFSCYGYAHGQCDKAHGVSSLVLEPEVLAGIKEVLDTGNISYELHDYQPTEAVDERSIIRERLSNLTSKEERIKASYREGIDTLEEYKSNKAILQKERDNLEEQLKELEGQNPEPDQDPAGDMLLKVRSVYDILISDSYTYVQKNEALKQIVDKIIYDKESDSLKIYFFLCR

SEQ ID NO: 6320 - protein, 493 aa, Unknown
  Description of Unknown: Integrase B6321 sequence
  PTHR30461:SF3,IPR036162,PS51737,IPR011109,PTHR30461, PS00397,PF00239,G3DSA:1.10.10.2600,IPR006119,SSF53041, cd00338,SM00857,IPR025827,IPR038109,PS51736, IPR006118,PF13408,G3DSA:3.40.50.1390,PF07508,Coil
MSVKYAYGYIRVSTHDQEEISPDSQEHLLRDYAAKNNIVILKIFTDLGISGRKANKRPGFQEMIGLAKADDHPVDQILVWKFSRFARNQEESIVYKSLLKKQHNVDVVSVSEPLSDNPFGSLIERIIEWMDEYYSIRLSGEVYRGMKENALRGAYQARPPLGYKVVEHGKPPVIVPEEAKIVRTIFEKYTNEGMSFFDIARYLNSLGLKTSHGKPFERRSVEYIIQNPSYCGMIRWNRTENSTNRIKDKDEWIVTEGQQPAIISKELFESAQERFKATYKPVGKRPSSTYKHWLSGLLKCPDCGRTLTSTTMKRVNGEKYSYFSCYGYSKGKCKKPNGISSLVLEKEVLASIKEILDTKDIVYELREYQPTEQFDERKAITEQLESLNGKEERIKASYREGIDTLEEYKANKAIIQKERESLEQQLKDLKKAAHKSDQDPADAMLQKVRSVYDILISNNYTYIQKNEALKQIIDKIIYDRKNDSLKIYFFLYR

SEQ ID NO: 6321 - protein, 493 aa, Unknown
  Description of Unknown: Integrase B6322 sequence
  PTHR30461:SF3,IPR036162,PS51737,IPR011109,PTHR30461, PS00397,PF00239,G3DSA:1.10.10.2600,IPR006119,SSF53041, cd00338,SM00857,IPR025827,IPR038109,PS51736, IPR006118,PF13408,G3DSA:3.40.50.1390,PF07508,Coil
MSVKYAYGYIRVSTHDQEEISPDSQEHLLRDYAAKNNIVILKIFTDLGISGRKANKRPGFQEMIGLAKGDDHPVDQILVWKFSRFARNQEESIVYKSLLKKQHNVDVVSVSEPLSDDPFGSLIERIIEWMDEYYSIRLSGEVYRGMKENALRGAYQARPPLGYKVVEHGKPPVIVPEESKIVRTIFEKYTNEGMSFFDIARYLNSLGLKTSHGKPFERRSVEYIIQNPSYCGMIRWNRTENSTNRIKDKDEWIVTEGQQPAIISKELFESAQERFKATYKPVGKRPSSTYKHWLSGLLKCPDCGRTLTSTTMKRVNGEKYSYFSCYGYSKGKCKKPNGISSLVLEKEVLTSIKEVLDTKDIVYELREYQPTEQFDERKAITEQLESLTGKEERIKASYREGIDTLEEYKANKAIVQKERESLEQQLKELKKAAHKSDQDPADAMLQKVRSVYDILISNNYTYVQKNEALKQIIDKIIYDRKNDSLKIYFFLYR

SEQ ID NO: 6322 - protein, 493 aa, Unknown
  Description of Unknown: Integrase B6323 sequence
  PTHR30461:SF3,IPR036162,PS51737,IPR011109,PTHR30461, PS00397,PF00239,G3DSA:1.10.10.2600,IPR006119,SSF53041, SM00857,IPR025827,IPR038109,PS51736,cd03768, IPR006118,PF13408,G3DSA:3.40.50.1390,PF07508,Coil
MRVICYVRVSTREQAEKGYSVGEQQERLRAYCMAKDWIVEDVITDPGFSGAKLERPGIQRVIQLVQEKKCEAVLVWKLDRLSRSQKDTLYLIEDVFLKNGCAFVSMNENFDTSTAFGRAMIGILSVFAQLEREQIRERMAVGRVGRAKAGLFHGGGFAPIGYDYKTIAEGGEGLVVNEYEAMQVREVFSLYLQGWPVNRIRKYMTARYTTKSGDWGNDTTIRDVLKNPLYIGKINWAKKIYDGKHEPIIDEETFNAAAARLASSQWKRDCSDGLERNSPFHSTHLLGGILWCGRCGARYFASGNYSGKGENRKYWPYYVCYSRAKSAKRMIRDPNCKNDRWPVAKLDKIILDQVRQLIFDPEALERAAGGNQEAPPSERRALLNARRAEAKGQIDRLLDLCQMGTLPAAAVADRLKSLQDEVEGIDTALRELAEDDPAERLEAARGTLVGAAEILDNGSLDEKRELVHSLIHRIDLDGENIDIHWSFAPGESE

SEQ ID NO: 6323 - protein, 493 aa, Unknown
  Description of Unknown: Integrase B6324 sequence
  PTHR30461:SF3,IPR036162,PS51737,IPR011109,PTHR30461, PS00397,PF00239,G3DSA:1.10.10.2600,IPR006119,SSF53041, cd00338,SM00857,IPR025827,IPR038109,PS51736, mobidb-lite,IPR006118,PF13408,G3DSA:3.40.50.1390,PF07508,Coil
MKETLSERKTGAIYIRVSTDKQEELSPDAQLRLLMDYAKNNHTDIPMEYIFQDNGISGRKANKRPAFQQMIALAKSKEHPIDTIIVWKFSRFARNQEESIVYKSLLKKNNVDVVSVSEPLIDGPFGSLIERIIEWMDEYYSIRLSGEVMRGMTQNALRGHYQGDAPIGYQSPGNKKPPEKDPKTVQIPIMMKDLLLSGSSLLQIARKLNEQGYRTKHGNLWDARGVRYVLENPFYAGISRWNYTDRGRQLKPADEVIYTKGNWEPLWDKATLEEIKKHLAMNMRKTKSRDVSAAKHWLSGLLICSSCGGTLAYSGTKNSRGFQCWKYAKGFCNESHYIGIHPIEKMVIEYLESILHSPAIVYTVISSASADADSKLADLEKQLQKVENKEKRIKAAYLNEIDSLEEYKANKAALLKERAAIEKNIKLLTISNTDMSKEEMDKKMKQNISALLTVLQDDSADYVQKGNMMRNVVDHIVFDRGNTSLDMFLKLVI

SEQ ID NO: 6324 - protein, 493 aa, Unknown
  Description of Unknown: Integrase B6325 sequence
  PTHR30461:SF3,IPR036162,PS51737,IPR011109,PTHR30461, PS00397,PF00239,G3DSA:1.10.10.2600,IPR006119,SSF53041, cd00338,SM00857,IPR025827,IPR038109,PS51736, IPR006118,PF13408,G3DSA:3.40.50.1390,PF07508,Coil
MSVKYAYGYIRVSTHDQEEISPDSQEHLLRDYAAKNNIVILKIFTDLGISGRKANKRPGFQEMIGLAKGDNHPVDQILVWKFSRFARNQEESIVYKSLLKKQHNVDVVSVSEPLSDDPFGSLIERIIEWMDEYYSIRLSGEVYRGMKENALRGAYQARPPLGYKVVEHGKPPVIVPEEAKIVRTIFEKYTNEGMSFFDIARYLNSLGLKTSHGKPFERRSVEYIIQNPSYCGMIRWNRTENSTNRIKDKDEWIVTEGQQPAIISKELFESAQKRFKATYKPVGKRPSSTYKHWLSGLLKCPDCGRTLTSTTMKRVNGEKYSYFSCYGYSKGKCKKPNGISSLVLEKEVLASIKEVLDTKDIVYELREYQPTEQFDERKAITEQLESLTGKEERIKASYREGIDTLEEYKANKAIIQKERESLEQQLKELKKAAHKSDQDPADAMLQKVRSVYDILISNNYTYVQKNEALKQIIDKIIYDRKNDSLKIYFFLYK

SEQ ID NO: 6325 - protein, 493 aa, Unknown
  Description of Unknown: Integrase B6326 sequence
  PTHR30461:SF3,cd00338,SM00857,G3DSA:1.10.10.2600,IPR036162, PF13408,IPR025827,G3DSA:3.40.50.1390,PS51737,IPR006119, IPR038109,PF07508,IPR011109,SSF53041,PTHR30461, PS51736,Coil,PF00239
MGQKCVIYTRYSSDRQREESIEGQIRVCEDYAKRNGLEVLHIYADRAMTGRSDQRPEFLTMIRDAASMSFDTVLVYKLNRFARNRYDSAKYKHKLKKYGVKVVSAMENIADDPSGILLESVIEGMAEYYSVELAENVVRGMTENALEGKWPGGIVPLGYKLDADHHLVIDEPNALVVRRIYQMILDGRTPASICRILNAEGKRTATGRAFNHNSITRLLSNERYIGIFSWRDVRRTGVVPRILDDRTFYAVQELRKSRQRHKGVAKRSENYMLTGKIFCGRCGSPMVGKSGTSKGGCIYYYYNCQRHIDGSGCPARPVRTDKLEDRVVQVTTKILSQPDAIKAIARQAIAIQKERRESLEVQSLKAQVSDLSKKLDNCLKAVDNGAFSETLCNHMRGYENRLRDMKAALSRAQLMDRGGKLTEKQIEFFFFAISRQLKQEPRYKEILLSSLVRCVIVNDDSIEIQYNYKKELPTLANPVKVKSSHKVLMVTPE

SEQ ID NO: 6326 - protein, 493 aa, Unknown
  Description of Unknown: Integrase B6327 sequence
  PTHR30461:SF3,IPR036162,PS51737,IPR011109,PTHR30461, PS00397,PF00239,G3DSA:1.10.10.2600,IPR006119,SSF53041, cd00338,SM00857,IPR025827,IPR038109,PS51736, IPR006118,PF13408,G3DSA:3.40.50.1390,PF07508,Coil
MSVKYAYGYIRVSTHDQEEISPDSQEHLLRDYAAKNNIVILKIFTDLGISGRKANKRPGFQEMIGLAKGDDHPVDLILVWKFSRFARNQEESIVYKSLLKKQHNVDVVSVSEPLSDDPFGSLIERIIEWMDEYYSIRLSGEVHRGMKENALRGAYQARPPLGYKVVEHGKPPVIVPEEAKIVRTIFEKYTNEGMSFFDIARYLNSLGLKTSHAKPFERRSVEYIIQNPSYCGMIRWNRTENSTNRIKDKDEWIVTEGQQPAIISKELFESAQERFKATYKPVGKRPSSTYKHWLSGLLKCPDCGRTLTSTTMKRVNGEKYSYFSCYGYSKGKCKKPNGISSLVLEKEVLASIKEILDTKDIVYELREYQPTEQFDERKAITEQLESLTGKEERIKASYREGIDTLEEYKANKAIIQKERESLEQQLKELKKAAHKSDPDPADAMLQKVRSVYDILISNNYTYVQKNEALKQIIDKIIYDRKNDSLKIYFFLYR

SEQ ID NO: 6327 - protein, 493 aa, Unknown
  Description of Unknown: Integrase B6328 sequence
  PTHR30461:SF3,IPR036162,PS51737,IPR011109,PTHR30461, PS00397,PF00239,G3DSA:1.10.10.2600,IPR006119,SSF53041, cd00338,SM00857,IPR025827,IPR038109,PS51736, IPR006118,PF13408,G3DSA:3.40.50.1390,PF07508,Coil
MRVKYAYGYIRVSTHDQEEISPDSQEHLLRDYAAKNNIVILKIFTDLGISGRKANKRPGFQEMIGLAKGDDHPVDQILVWKFSRFARNQEESIVYKSLLKKQHNVDVVSVSEPLSDNPFGSLIERIIEWMDEYYSIRLSGEVYRGMKENALRGAYQARPPLGYKVVEHGKPPVIIPEEAKIVRTIFEKYTNEGMSFFDIARYLNSLGLKTSHGKPFERRSVEYIIQNPSYCGMIRWNRTENSTNRIKDKDEWIVTEGQQPAIISKELFESAQERFKATYRPVGKRPSSTYKHWLSGLLKCPDCGRTLTSTTMKRVNGEKYSYFSCYGYSKGKCKKPNGISSLVLEKEVLASIKEILDTKDIVYELREYQPTEQFDERKAITEQLESLTGKEERIKASYREGIDTLEEYKANKAIIQKERESLEQQLKDLKKAAHKSDQNPADAMLQKVRSVYDILISNNYTYVQKNEALKQIIDKIIYDRKNDSLKIYFFLYR

SEQ ID NO: 6328 - protein, 493 aa, Unknown
  Description of Unknown: Integrase B6329 sequence
  PTHR30461:SF3,IPR036162,PS51737,IPR011109,PTHR30461, PS00397,PF00239,G3DSA:1.10.10.2600,IPR006119,SSF53041, SM00857,IPR025827,IPR038109,PS51736,cd03768, IPR006118,PF13408,G3DSA:3.40.50.1390,PF07508,Coil
MRVICYVRVSTREQAEKGYSVGEQQERLRAYCMAKDWIVEDVITDPGFSGAKLERPGIRRVIQLVQEKKCEAVLVWKLDRLSRSQKDTLYLIEDVFLKNGCAFVSMNENFDTSTAFGRAMIGILSVFAQLEREQIRERMAVGRVGRAKAGLFHGGGFAPIGYDYKTIAEGGEGLVVNEYEAMQVREVFSLYLQGWPVNRIRKYMTARYTTKSGDWGNDTTIRDVLKNPLYIGKINWAKKIYDGKHEPIIDEETFNAAAARLASSQWKRDCSDGLERNSPFHSTHLLGGILWCGRCGARYFASGNYSGKGENRKYWPYYVCYSRAKSAKRMIRDPNCKNDRWPVAKLDKIILDQVRQLIFDPEALERAAGGNQEAPPSERRALLNARRAEAKGQIDRLLDLCQMGTLPAAAVADRLKSLQDEVEGIDTALRELAEDDPAERLEAARGTLVGAAEILDNGSLDEKRELVHSLIHRIDLDGENIDIHWSFAPGESE

SEQ ID NO: 6329 - protein, 493 aa, Unknown
  Description of Unknown: Integrase B6330 sequence
  PTHR30461:SF3,IPR036162,PS51737,IPR011109,PTHR30461, PS00397,PF00239,G3DSA:1.10.10.2600,IPR006119,SSF53041, cd00338,SM00857,IPR025827,IPR038109,PS51736, IPR006118,PF13408,G3DSA:3.40.50.1390,PF07508,Coil
MSVKYAYGYIRVSTHDQEEISPDSQEHLLRDYATKNNIVILKIFTDLGISGRKANKRPGFQEMIGLAKGDDHPVDQILVWKFSRFARNQEESIVYKSLLKKQHNVDVVSVSEPLSDDPFGSLIERIIEWMDEYYSIRLSGEVYRGMKENALRGAYQARPPLGYKVVEHGKPPVIVPEEAKIVRTIFEKYTNEGMSFFDIARYLNSLGLKTSHGKPFERRSVEYIIQNPSYCGMIRWNRTENSTNRIKDKDEWIVTEGQQPAIISKELFESAQERFKATYKPVGKRPSSTYKHWLSGLLKCPDCGRTLTSTTMKRVNGEKYSYFSCYGYSKGKCKKPNGISSLVLEKEVLASIKEILDTKDIVYELREYQPTEQFDERKAITEQLESLTGKEERIKASYREGIDTLEEYKANKAIIQKERETLEQQLKDLKKAAHKSDQDPADAMLQKVRSVYDILISSNYTYVQKNEALKQIIDKIIYDRKNDSLKIYFFLYR

SEQ ID NO: 6330 - protein, 493 aa, Unknown
  Description of Unknown: Integrase B6331 sequence
  PTHR30461:SF3,IPR036162,PS51737,IPR011109,PTHR30461, PS00397,PF00239,G3DSA:1.10.10.2600,IPR006119,SSF53041, cd00338,SM00857,IPR025827,IPR038109,PS51736, IPR006118,PF13408,G3DSA:3.40.50.1390,PF07508,Coil
MSVKYAYGYIRVSTHDQEEISPDSQEHLLRDYAAKNNIVILKIFTDLGISGRKANKRPGFQEMIGLAKGDDHPVDQILVWKFSRFARNQEESIVYKSLLKKQHNVDVVSVSEPLSDNPFGSLIERIIEWMDEYYSIRLSGEVYRGMKENALRGAYQARPPLGYKVVEHGKPPVIVPKEAKIVQTIFEKYVNESMGFFDIARYLNDLGLKTSHGKPFERRSIEYIIQNPSYCGMIRWNRTENSTNRIKDKDEWIVTEGQQPAIISKELFESAQERFKATYKPAGKRPSSTYKHWLSGLLKCPDCGRTLTSTTMKRVNGEKYSYFSCYGYSKGKCKKPNGISSLVLEKEVLASIKEILDTKDIVYELREYQPTEQFDERKAITEQLESLTGKEERIKASYREGIDTLEEYKANKAIIQKERESLEQQLKELKKAARKSDQDPADAMLQKVRSVYDILISNNYTYIQKNEALKQIIDKIIYDRKNDSLKIYFFLYR

SEQ ID NO: 6331 - protein, 493 aa, Unknown
  Description of Unknown: Integrase B6332 sequence
  PTHR30461:SF3,IPR036162,PS51737,IPR011109,PTHR30461, PS00397,PF00239,G3DSA:1.10.10.2600,IPR006119,SSF53041, cd00338,SM00857,IPR025827,IPR038109,PS51736, IPR006118,PF13408,G3DSA:3.40.50.1390,PF07508,Coil
MKEKVSERKTGAIYIRVSTDKQEELSPDAQLRLLMDYAKKNSIDVPEEYIYQDNGISGRKANKRPAFQNMIALAKSKEHPIDTIIVWKFSRFARNQEESIVYKSLLSKNSVDVVSVSEPLIDGPFGSLIERIIEWMDEYYSIRLSGEVMRGMTQNAMRGHYQSDAPIGYISPGDKKPPVINPDTVQIPLMIKDMFLSGSTQLQIARKLNDMGYRTKRGNLWDARGVRYVLENPFYIGKSRWNYTERGRKLKPSDEVIYADGNWEALWDEDTFKEIQKRLALNMRKAKSRDVSSAKHWLSGLLICSSCGGTLAYGGANSARGFQCWKYSKGFCSESHYISTGSIEKMVMEYLEYVLHSPTLSYTIISAASSNAESKLSDCERQLQKIDAKEKRIKAAYLNEIDTLEEYKANKTALEEERRTIEKEIEELTLSNVKYTKEDMDKKMKQNIQNLLLVLKDESADYVQKGNMMRNVVDHIVFDRKNTSLDVFLKLVI

SEQ ID NO: 6332 - protein, 493 aa, Unknown
  Description of Unknown: Integrase B6333 sequence
  PTHR30461:SF3,IPR036162,PS51737,IPR011109,PTHR30461, PS00397,PF00239,G3DSA:1.10.10.2600,IPR006119,SSF53041, cd00338,SM00857,IPR025827,IPR038109,PS51736, IPR006118,PF13408,G3DSA:3.40.50.1390,PF07508,Coil
MSVKYAYGYIRVSTHDQEEISPDSQEHLLRDYAAKNNIVILKIFTDLGISGRKANKRPGFQEMIGLAKGDDHPADQILVWKFSRFARNQEESIVYKSLLKKQHNVDVVSVSEPLSDNPFGSLIERIIEWMDEYYSIRLSGEVLRGMKENAARGAFQGAAPFGYKTVDKTLVIDPEKADIVRHVFNMYVNEKLSVFDIARYLNNLGFRTIRGNLFERRTVEYMLKNPTYCGMIHWNKTENATHSIKNKDEWIVSQGQHPAIISQELFDATQERLKATRRPSRRRERPSSTYKHWLSGLMKCPACGKTLSACTQKRVNGEKYAYFSCYGYAHGQCDKAHGVSSLVLEPEVLASIKEVLDTGNISYELHDYQPTEAVDERSIIRDRLNSLTSKEERIKASYREGIDTLEEYKSNKAILQKERDNLEEQLKELEGQNPEPDQDPTGDMLLQVRSVYDILVSDSYTYVQKNEALKQIVDKIIYDKESDSLKIYFFLCR

SEQ ID NO: 6333 - protein, 493 aa, Unknown
  Description of Unknown: Integrase B6334 sequence
  PTHR30461:SF3,IPR036162,PS51737,IPR011109,PTHR30461, PS00397,PF00239,G3DSA:1.10.10.2600,IPR006119,SSF53041, cd00338,SM00857,IPR025827,IPR038109,PS51736, IPR006118,PF13408,G3DSA:3.40.50.1390,PF07508,Coil
MKEKVSERKTGAIYIRVSTDKQEELSPDAQLRLLMDYAKNNHTDIPMEYIFQDNGISGRKANKRPAFQQMIALAKSKEHPIDTIIVWKFSRFARNQEESIVYKSLLKKNNVDVVSVSEPLIDGPFGSLIERIIEWMDEYYSIRLSGEVMRGMTQNALRGHYQGDAPIGYQSPGNKKPPEKDPKTIQIPIMMKDLLLSGSSLLQIARKLNEQGYRTKHGNLWDARGVRYVLENPFYAGISRWNYTDRGRQLKPADEVIYTKGNWEPLWDKATLEEIKKHLAMNMRKTKSRDVSAAKHWLSGLLICSSCGGTLAYSGTKNSRGFQCWKYTKGFCNESHYIGIHPIEKMVIEYLESVLHSPAIVYTVISSASADADSKLADFEKQLQKVENKEKRIKAAYLNEIDSLEEYKANKAALLKERAAIEKNIKLLTISNTDMSKEEMDKKMKQNISALLTVLQDDSADYVQKGNMMRNVVDHIVFDRRNTSLDMFLKLVI

SEQ ID NO: 6334 - protein, 493 aa, Unknown
  Description of Unknown: Integrase B6335 sequence
  PTHR30461:SF3,IPR036162,PS51737,IPR011109,PTHR30461, PS00397,PF00239,G3DSA:1.10.10.2600,IPR006119,SSF53041, cd00338,SM00857,IPR025827,IPR038109,PS51736, IPR006118,PF13408,G3DSA:3.40.50.1390,PF07508,Coil
MSVKYAYGYIRVSTHDQEEISPDSQEHLLRDYAAKNNIVILKIFTDLGISGRKANKRPGFQEMIGLAKGDDHPVDQILVWKFSRFARNQEESIVYKSLLKKQHNVDVVSVSEPLSDDPFGSLIERIIEWMDEYYSIRLSGEVYRGMKENALRGAYQARPPLGYKVVEHGKPPVIVPEEAKIVRTIFEKYTNEGMSFFDIAKYLNSLGLKTSHGKPFERRSVEYIIQNPSYCGMIRWNRTENSTNRIKDKDEWIVTEGQQPAIISKELFESAQKRFKATYKPVGKRPSSTYKHWLSGLLKCPDCGRTLTSTTMKRVNGEKYSYFSCYGYSKGKCKKPNGISSLVLEKEVLASIKEILDTKDIVYELREYQPTEQFDERKAITEQLESLNGKEERIKASYREGIDTLEEYKANKAIIQKERESLEQQLKDLKKAAHKSDQDPADAMLQKVRSVYDILISNNYTYVQKNEALKQIIDKIIYDRKNDSLKIYFFLYR

SEQ ID NO: 6335 - protein, 493 aa, Unknown
  Description of Unknown: Integrase B6336 sequence
  PTHR30461:SF3,IPR036162,PS51737,IPR011109,PTHR30461, PS00397,PF00239,G3DSA:1.10.10.2600,IPR006119,SSF53041, cd00338,SM00857,IPR025827,IPR038109,PS51736, IPR006118,PF13408,G3DSA:3.40.50.1390,PF07508,Coil
MSVKYAYGYIRVSTHDQEEISPDSQEHLLRDYAAKNNIVILKIFTDLGISGRKANKRPGFQEMIGLAKGDDHPIDLILVWKFSRFARNQEESIVYKSLLKKQHNVDVVSVSEPLSDNPFGSLIERIIEWMDEYYSIRLSGEVYRGMKENALRGAYQARPPLGYKVVEHGKPPVIVPEEAKIVRTIFEKYTNEGMSFFDIARYLNSLGLKTSHGKPFERRSVEYIIQNPSYCGMIRWNRTENSTNRIKDKDEWIVTEGQQPAIISKELFESAQKRFKATYKPVGKRPSSTYKHWLSGLLKCPDCGRTLTSTTMKRVNGEKYSYFSCYGYSKGKCKKPNGISSLVLEKEVLAGIKEILDTKDIVYELREYQPTEQFDERKAITEQLESLTGKEERIKASYREGIDTLEEYKANKAIIQKERESLEQQLQELKKAARKSDQDPADAMLQKVRSVYDILISNNYTYIQKNEALKQIIDKIIYDRKNDSLKIYFFLYR

SEQ ID NO: 6336 - protein, 493 aa, Unknown
  Description of Unknown: Integrase B6337 sequence
  PTHR30461:SF3,IPR036162,PS51737,IPR011109,PTHR30461, PS00397,PF00239,G3DSA:1.10.10.2600,IPR006119,SSF53041, cd00338,SM00857,IPR025827,IPR038109,PS51736, IPR006118,PF13408,G3DSA:3.40.50.1390,PF07508,Coil
MSVKYAYGYIRVSTHDQEEISPDSQEHLLRDYATKNDIVILKIFTDLGISGRKANKRPGFQEMIGLAKGDDHPVDLILVWKFSRFARNQEESIVYKSLLKKQHNVDVVSVSEPLSDDPFGSLIERIIEWMDEYYSIRLSGEVYRGMKENALRGAYQARPPLGYKVVEHGKPPVIVPEEAKIVRTIFEKYTNEGMSFFDIARYLNSLGFKTSHGKPFERRSIEYIIQNPSYCGMIRWNRTENSTNRIKDKDEWIVTEGQQPAIISKELFESAQERFKATYKPVGKRPSSTYKHWLSGLLKCPDCGRTLTSTTMKRVNGEKYSYFSCYGYSKGKCKKPNGISSLVLEKEVLASIKEILDTKDIFYELREYQPTEQFDERKAITEQLESLTGKEERIKASYREGIDTLEEYKANKAIIQKERESLEQQLKDLKKAAHKSDQDPADAMLQKVRSVYDILISNNYTYVQKNEALKQIIDKIIYDRKNDSLKIYFFLYR

SEQ ID NO: 6337 - protein, 493 aa, Unknown
  Description of Unknown: Integrase B6338 sequence
  PTHR30461:SF3,IPR036162,PS51737,IPR011109,PTHR30461, PS00397,PF00239,G3DSA:1.10.10.2600,IPR006119,SSF53041, cd00338,SM00857,IPR025827,IPR038109,PS51736, IPR006118,PF13408,G3DSA:3.40.50.1390,PF07508,Coil
MSVKYAYGYIRVSTHDQEEISPDSQEHLLRDYAAKNNIVILKIFTDLGISGRKANKRPGFQEMIGLAKGDDHPVDQILVWKFSRFARNQEESIVYKSLLKKQHNVDVVSVSEPLSDDPFGSLIERIIEWMDEYYSIRLSGEVHRGMKENALRGAYQARPPLGYKVVEHGKPPVIVPEEAKIVRTIFEKYTNEGMSFFDIARYLNSLGLKTSHGKPFERRSVEYIIQNPSYCGMIRWNRTENSTNRIKDKDEWIVTEGQQPAIISKELFESAQERFKATYKPVGKRPSSTYKHWLSGLLKCPDCGRTLTSTTMKRVNGEKYSYFSCYGYSKGKCKKPNGISSLVLEKEVLASIKEVLDTKDIVYELREYQPTEQFDERKAITEQLESLNGKEERIKASYREGIDTLEEYKANKAIIQKERESLEQQLKELKKAAHKSDQDPADAMLQKVRSVYDILISNNYTYIQKNEALKQIIDKIIYDRKNDSLKIYFFLYR

SEQ ID NO: 6338 - protein, 493 aa, Unknown
  Description of Unknown: Integrase B6339 sequence
  SM00857,G3DSA:1.10.10.2600,IPR036162,PF13408,IPR025827, G3DSA:3.40.50.1390,PS51737,IPR006119,IPR038109,PF07508, SSF53041,IPR011109,PF00239,PTHR30461,PS51736, Coil,cd00338
MVLLDTYCIYLRKSRADAEAEARGEGETLARHEHALLDLAKRGNLTISHIYREIVSGDSIAARPQMQQMLQDVTDKAYTGVLVMEIERLARGDTIDQGVVAQAFRESGTKIVTPLKTYDPSNEFDEEYFEFSLFMSRREYKTIKRRMQAGRIASIKEGNYLGTNPPYGYKKVQPEPKVKTLEIVPEEAEAVKMMFDMYLSGDGARAIAAHLNQLQIPPRKAAMWEPVSVRKILGNPVYAGKIEWHTKKDGTILSDGLHPAIISWEQFQQSVERRKRTAPQVPTGYTTQNYYHGILFCGNCGHQMKRRPVPNGTPHMLCRRNECRGKVVSSTTEKIDEAVLEAIKYRISELTLFKDQSGEEKRAKEKQKEIQQNQIKKALEKLKSQKEKLHTLLETDVYTVDVFLERSKALEAKKEELEKALHSITDSLQEKEHLAPEQAVIWLRYVLDHFSTADACQKSKMLQRIIKRIEYKKTEKMCYRKQSSDMSLHIDFL

SEQ ID NO: 6339 - protein, 493 aa, Unknown
  Description of Unknown: Integrase B6340 sequence
  PTHR30461:SF3,IPR036162,PS51737,IPR011109,PTHR30461, PS00397,PF00239,G3DSA:1.10.10.2600,IPR006119,SSF53041, cd00338,SM00857,IPR025827,IPR038109,PS51736, IPR006118,PF13408,G3DSA:3.40.50.1390,PF07508,Coil
MSVKYAYGYIRVSTHDQEEISPDSQEHLLRDYAAKNDIVILKIFTDLGISGRKANKRPGFQEMIGLAKGDDHPVDLILVWKFSRFARNQEESIVYKSLLKKQHNVDVVSVSEPLSDDPFGSLIERIIEWMDEYYSIRLSGEVYRGMKENALRGAYQARPPLGYKVVEHGKPPVIVPEEAKIVRTIFEKYTNEGMSFFDIARYLNSLGLKTSHGKPFERRSVEYIIQNPSYCGMIRWNRTENSTNRIKDKDEWIVTEGQQPAIISKELFESAQERFKATYKPVGKRPSSTYKHWLSGLLKCPDCGRTLTSTIMKRVNGEKYSYFSCYGYSKGKCKKPNGISSLVLEKEVLASIKEVLDTKDIVYELREYQPTEQFDERKAITEQLESLTGKEERIKASYREGIDTLEEYKANKAIIQKERESLEQQLKELKTAARKSDQDPADAMLQKVRSVYDILISNNYTYVQKNEALKQIIDKIIYDRKNDSLKIYFFLYR

SEQ ID NO: 6340 - protein, 493 aa, Unknown
  Description of Unknown: Integrase B6341 sequence
  PTHR30461:SF3,IPR036162,PS51737,IPR011109,PTHR30461, PS00397,PF00239,G3DSA:1.10.10.2600,IPR006119,SSF53041, cd00338,SM00857,IPR025827,IPR038109,PS51736, IPR006118,PF13408,G3DSA:3.40.50.1390,PF07508,Coil
MSVKYAYGYIRVSTHDQEEISPDSQEHLLRDYAAKNNIVILKIFTDLGISGRKANKRPGFQEMIGLAKGDDHPVDQILVWKFSRFARNQEESIVYKSLLKKQHNVDVVSVSEPLSDDPFGSLIERIIEWMDEYYSIRLSGEVYRGMKENALRGAYQARPPLGYKVVEHGKPPVIVPEEAKIVRTIFEKYANEGMSFFDIARYLNSLGLKTSHGKPFERRSVEYIIQNPSYCGMIRWNRTENNTNRIKDKDEWIVTEGQQPAIISKELFESAQERFKATYKPVGKRPSSTYKHWLSGLLKCPDCGRTLTSTTMKRVNGEKYSYFSCYGYSKGKCKKPNGISSLVLEKEVLASIKEVLDTKDIVYELREYQPTEQFDERKAITEQLESLTGKEERIKASYREGIDTLEEYKANKAIIQKERESLEQQLKELKKAARKSDQDPADAMLQKVRSVYDILISNNYTYVQKNEALKQIIDKIIYDRKNDSLKIYFFLYR

SEQ ID NO: 6341 - protein, 493 aa, Unknown
  Description of Unknown: Integrase B6342 sequence
  PTHR30461:SF3,IPR036162,PS51737,IPR011109,PTHR30461, PS00397,PF00239,G3DSA:1.10.10.2600,IPR006119,SSF53041, cd00338,SM00857,IPR025827,IPR038109,PS51736, IPR006118,PF13408,G3DSA:3.40.50.1390,PF07508,Coil
MSVKYAYGYIRVSTHDQEEISPDSQEHLLRDYAAKNNIVILKIFTDLGISGRKANKRPGFQEMIGLAKGDDHPVDQILVWKFSRFARNQEESIVYKSLLKKQHNVDVVSVSEPLSDNPFGSLIERIIEWMDEYYSIRLSGEVHRGMKENALRGAYQARPPLGYKVVEHGKPPVIVPEEAKIVRTIFEKYTNEGMSFFDIARYLNSLGLKTSHGKPFERRSVEYIIQNPSYCGMIRWNRTENSTNRIKDKDEWIVTEGQQPAIISKELFESAQERFKATYKQVGKRPSSTYKHWLSGLLKCPDCGRTLTSATMKRVNGEKYSYFSCYGYSKGKCKKPNGISSLVLEKEVLTSIKEILDTKDIVYELREYQPTEQFDERKAITEQLESLTGKEERIKASYREGIDTLEEYKANKAIIQKERESLEQQLKELKKAAHKSDQDPADAMLQKVRSVYDILISNNYTYVQKNEALKQIIDKIIYDRKNDSLKIYFFLYR

SEQ ID NO: 6342 - protein, 493 aa, Unknown
  Description of Unknown: Integrase B6343 sequence
  PTHR30461:SF3,IPR036162,PS51737,IPR011109,PTHR30461, PS00397,PF00239,G3DSA:1.10.10.2600,IPR006119,SSF53041, cd00338,SM00857,IPR025827,IPR038109,PS51736, IPR006118,PF13408,G3DSA:3.40.50.1390,PF07508,Coil
MSVKYAYGYIRVSTHDQEEISPDSQEHLLRDYAAKNNIVILKIFTDLGISGRKANKRPGFQKMIGLAKGDDHPVDQILVWKFSRFARNQEESIVYKSLLKKQHNVDVVSVSEPLSDDPFGSLIERIIEWMDEYYSIRLSGEVYRGMKENALRGAYQARPPLGYKVVEHGKPPVIVPEEAKIVRTIFEKYTNESMSFFDIARYLNSLGLKTSHGKPFERRSVEYIIQNPSYCGMIRWNRTENSTNRIKDKDEWIVTEGQQPAIISKELFESAQERFKATYKPVGKRPSSTYKHWLSGLLKCPDCGRTLTSTTMKRVNGEKYSYFSCYGYSKGKCKKPNGISSLVLEKEVLASIKEILDTKDIVYELREYQPTEQFDERKAITEQLESLTGKEERIKASYREGIDTLEEYKANKAIIQKERESLEQQLKELKKAAHKSDQDPADAMLQKVRSVYDILISNNYTYIQKNEALKQIIDKIIYDRKNDSLKIYFFLYR

SEQ ID NO: 6343 - protein, 493 aa, Unknown
  Description of Unknown: Integrase B6344 sequence
  PTHR30461:SF3,IPR036162,PS51737,IPR011109,PTHR30461, PS00397,PF00239,G3DSA:1.10.10.2600,IPR006119,SSF53041, cd00338,SM00857,IPR025827,IPR038109,PS51736, IPR006118,PF13408,G3DSA:3.40.50.1390,PF07508,Coil
MSVKYAYGYIRVSTHDQEEISPDSQEHLLRDYAAKNNIVILKIFTDLGISGRKANKRPGFQEMIGLAKGDDHPADLILVWKFSRFARNQEESIVYKSLLKKQHDVDVVSISEPLSDNPFGSLIERIIEWMDEYYSIRLSGEVLRGMKENAARGAFQGAAPFGYKTIDKTLVIDPEKADIVRHVFNMYVNEKLSVFDIARYLNNLGFRTIRGNLFERRTVEYMLKNPTYCGMIHWNKTENATHSVKNKDEWIVSQGQHPAIISQELFDATQERLKATRRPSRRRERPSSTYKHWLSGLMKCPACGKTLSACTQKRVNGEKYAYFSCYGYAHGQCDKAHGVSSLVLEPEVLASIKEILDTGNISYELHDYQPTEAVDERSIIRDRLNSLTSKEERIKASYREGIDTLEEYKSNKAILQKERDNLEEQLKELEGQNPEPDQDPTGDMLLKVRSVYDILISDSYTYVQKNEALKQIVDKIIYDKESDSLKIYFFLCR

SEQ ID NO: 6344 - protein, 493 aa, Unknown
  Description of Unknown: Integrase B6345 sequence
  PTHR30461:SF3,IPR036162,PS51737,IPR011109,PTHR30461, PS00397,PF00239,G3DSA:1.10.10.2600,IPR006119,SSF53041, cd00338,SM00857,IPR025827,IPR038109,mobidb-lite, PS51736,IPR006118,PF13408,G3DSA:3.40.50.1390,PF07508,Coil
MKETLSERKTGAIYIRVSTDKQEELSPDAQLRLLMDYAKTNHTDIPMEYIFQDNGISGRKANKRPAFQQMIALAKSKEHPIDTIIVWKFSRFARNQEESIVYKSLLKKNNVDVVSVSEPLIDGPFGSLIERIIEWMDEYYSIRLSGEVMRGMTQNALRGHYQGDAPIGYQSPGNKKPPEKDPKTVQIPIMMKDLLLSGSSLLQIARKLNEHGYRTKHGNLWDARGVRYVLENPFYAGISRWNYTDRGRQLKPADEVIYTKGNWEPLWDKATLEEIKKHLTMNMRKAKSRDVSTAKHWLSGLLICSSCGGTLAYSGTKNSRGFQCWKYTKGFCNESHYIGIHPIEKMVIEYLESILHSPAIVYTVISSASADADSKLADLEKQLQKVENKEKRIKAAYLNEIDSLEEYKANKAALLKERVAIEKNIKLLTISNTDMSKEEMDKKMKQNISALLTVLQDDSADYVQKGNMMRNVVDHIVFDRGNTSLDMFLKLVI

SEQ ID NO: 6345 - protein, 493 aa, Unknown
  Description of Unknown: Integrase B6346 sequence
  PTHR30461:SF3,IPR036162,PS51737,IPR011109,PTHR30461, PS00397,PF00239,G3DSA:1.10.10.2600,IPR006119,SSF53041, cd00338,SM00857,IPR025827,IPR038109,PS51736, IPR006118,PF13408,G3DSA:3.40.50.1390,PF07508,Coil
MSVKYAYGYIRVSTHDQEEISPDSQEHLLRDYAAKNNIVIIKIFTDLGISGRKANKRPGFQEMIGLAKGDDHPVDLILVWKFSRFARNQEESIVYKSLLKKQHNVDVVSVSEPLSDDPFGSLIERIIEWMDEYYSIRLSGEVYRGMKENALRGAYQARPPLGYKVVEHGKPPVIVPEEAKIVRTIFEKYTNEGMSFFDIARYLNSLGLKTSHGKPFERRSVEYIIQNPSYCGMIRWNRTENSTNRIKDKDEWIVTEGQQPAIISKELFESAQERFKATYKPVGKRPSSTYKHWLSGLLKCPDCGRTLTSITMKRVNGEKYSYFSCYGYSKGKCKKPNGISSLVLEKEVLASIKEVLATKDIVYELREYQPTEQFDERKAITEQLESLNGKEERIKASYREGIDTLEEYKANKAIIQKERESLEQQLKDLKKAAHKSDQDPADAMLQKVRSVYDILISNNYTYVQKNEALKQIIDKIIYDRKNDSLKIYFFLYR

SEQ ID NO: 6346 - protein, 493 aa, Unknown
  Description of Unknown: Integrase B6347 sequence
  PTHR30461:SF3,SM00857,IPR006118,G3DSA:1.10.10.2600,IPR036162, PS51737,G3DSA:3.40.50.1390,IPR006119,IPR038109,PF07508, IPR011109,SSF53041,PF00239,PTHR30461,PS00397, PS51736,Coil,cd00338
MKETLSERKTGAIYIRVSTDKQEELSPDAQLRLLMDYAKTNHTDIPMEYIFQDNGISGRKADKRPAFQQMIALAKSKEHPIDTIIVWKFSRFARNQEESIVYKSLLKKNNVDVVSVSEPLIDGPFGSLIERIIEWMDEYYSIRLSGEVMRGMTQNALRGHYQGDAPIGYQSPGNKKPPEKDPKTIQIPIMMKDLLLSGSSLLQIARKLNEQGYRTKHGNLWDARGVRYVLENPFYAGISRWNYTDRGRQLKPADEVIYTKGNWEPLWDKATLEEIKKHLAMNMRKAKSRDVSTAKHWLSGQLICSSCGGTLAYSGTKNSRGFQCWKYTKGFCNESHYIGIHPIEKMVIEYLESILHSPAIVYTVISSASADADSKLADLEKQLQKVENKEKRIKAAYLNEIDSLEEYKANKAALLKERAAIEKNIKLLTISNTDMSKEEMDKKMKQNISALLTVLQDDSADYVQKGNMMRNVVDHIVFDRENTSLDMFLKLVI

SEQ ID NO: 6347 - protein, 493 aa, Unknown
  Description of Unknown: Integrase B6348 sequence
  PTHR30461:SF3,cd00338,SM00857,G3DSA:1.10.10.2600,IPR036162, PF13408,IPR025827,PS51737,G3DSA:3.40.50.1390,IPR006119, IPR038109,PF07508,IPR011109,SSF53041,PTHR30461, PS51736,Coil,PF00239
MSAAIYTRQSIEKKDSESIDVQIEYAKKYLEPNEDFEIFSDPGYSGKNIMRPDFQRMLEGIKSGKFDKVIVYKLDRISRRVSDFSWLMELLKEYKCSFISAKENFSLDTPAGRAMLYMTSTFAQMERESTSERVRDNYYERIKLGAIGGGPAPLGYDNSTVIIGGKKHSIYVANGEIEIIKKMFEIYSRPITALADVKKELERLYGVNIQTSDISRRLHNPTYVKADASIYNYYYKTGAIVASPIESFDGIHGCLLVGRRKANERKYTDVREHTLTIGRHEGVIDSDTFLYIQNKLSKNKQIKNSHKGQYTWLSGLVKCTDCGYAMVIKRWKSKNGYVSNLYCSSQSNHGICKPHSHNVTDVEDYVYNSMVEKLKSLQEIKLNAQTNRNEKIMELHKAIEDINAKIENLVISLEQAGTSALKYINKRIEELDNEKTQLESEMNTCNYQIESIVLPNLTDWASKSLDDKKEIARSLIEKVSIDYKNNITIAWKV

SEQ ID NO: 6348 - protein, 493 aa, Unknown
  Description of Unknown: Integrase B6349 sequence
  PTHR30461:SF3,IPR036162,PS51737,IPR011109,PTHR30461, PS00397,PF00239,G3DSA:1.10.10.2600,IPR006119,SSF53041, cd00338,SM00857,IPR025827,IPR038109,PS51736, IPR006118,PF13408,G3DSA:3.40.50.1390,PF07508,Coil
MSVKYAYGYIRVSTHDQEEISPDSQEHLLRDYAAKNNIVILKIFTDLGISGRKSNKRPGFQEMIGLAKGDDHPVDQILVWKFSRFSRNQEESIVYKSLLKKQHNVDVVSVSEPLSDNPFGSLIERIIEWMDEYYSIRLSGEVLRGMKENAARGAFQGAAPFGYKTVDKTLVIDPEKADIVRHVFNMYVNEKLSVFDIARYLNNLGFRTIRGNLFERRTVEYMLKNPTYCGMIHWNKTENATHSIKNKDEWIVSQGQHPAIISQELFDATQERLKATRRPSRRRERPSSTYKHWLSGLMKCPACGKTLSACTQKRVNGEKYAYFSCYGYAHGQCDKAHGVSSLVLEPEVLASIKEVLDTGNISYELHDYQPTEAVDERSIIRDRLNSLTSKEERIKASYREGIDTLEEYKSNKAILQKERDNLEEQLKELEGQNPEPDQDPTGDMLLQVRSVYDILVSDSYTYVQKNEALKQIVDKIIYDKESDSLKIYFFLCR

SEQ ID NO: 6349 - protein, 493 aa, Unknown
  Description of Unknown: Integrase B6350 sequence
  PTHR30461:SF3,IPR036162,PS51737,IPR011109,PTHR30461, PS00397,PF00239,G3DSA:1.10.10.2600,IPR006119,SSF53041, cd00338,SM00857,IPR025827,IPR038109,PS51736, IPR006118,PF13408,G3DSA:3.40.50.1390,PF07508,Coil
MSVKYAYGYIRVSTHDQEEISPDSQEHLLRDYAAKNDIVILKIFTDLGISGRKANKRPGFQEMIGLAKGDDHPADLILVWKFSRFARNQEESIVYKSLLKKQHNVDVVSVSEPLSDNPFGSLIERIIEWMDEYYSIRLSGEVLRGMKENAARGAFQGAAPFGYKTIDKTLVIDLEKADIVRHVFNMYVNEKLSVFDIARYLNNLGFRTIRGNLFERRTVEYMLKNPTYCGMIHWNKTENATHSIKNKDEWIVSQGQHPAIISQELFDATQERLKATRRPSRRRERPSSTYKHWLSGLMKCPACGKTLSACTQKRVNGEKYAYFSCYGYAHGQCDKAHGVSSLVLEPEVLASIKEVLDTGNISYELHDYQPTEAVDERSIIRDRLNSLTSKEERIKASYREGIDTLEEYKSNKAILQKERDNLEEQLKELEGQNPEPNQDPTGDMLLKVRSVYDILISDSYTYIQKNEALKQIVDKIIYDKESDSLKIYFFLCR

SEQ ID NO: 6350 - protein, 493 aa, Unknown
  Description of Unknown: Integrase B6351 sequence
  PTHR30461:SF3,IPR036162,PS51737,IPR011109,PTHR30461, PS00397,PF00239,G3DSA:1.10.10.2600,IPR006119,SSF53041, cd00338,SM00857,IPR025827,IPR038109,PS51736, IPR006118,PF13408,G3DSA:3.40.50.1390,PF07508,Coil
MSVKYAYGYIRVSTHDQEEISPDSQEHLLRDYAAKNNIVILKIFTDLGISGRKANKRPGFQEMIGLAKGDDHPVDQILVWKFSRFARNQEESIVYKSLLKKQHNVDVVSVSEPLSDNPFGSLIERIIEWMDEYYSIRLSGEVLRGMKENAARGAFQGAAPFGYKTVDKTLVIDPEKADIVRHVFNMYVNEKLSVFDIARYLNNLGFRTIRGNLFERRTVEYMLKNPTYCGMIHWNKTENATHSIKNKDEWIVSQGQHPAIISQELFDATQERLKATRRPSRRRERPSSTYKHWLSGLMKCPACGKTLSACTQKRVNGEKYAYFSCYGYAHGQCDKAHGVSSLVLEPEVLASIKEVLDTGNISYELHDYQPTEAVEERSIIRDRLNSLASKEERIKASYREGIDTLEEYKSNKAILQKERDNLEEQLKELKGQNPEPDQDPTGDMLFKVRSVYDILISDSYTYIQKNEALKQIVDKIIYDKESDSLKIYFFLCR

SEQ ID NO: 6351 - protein, 493 aa, Unknown
  Description of Unknown: Integrase B6352 sequence
  PTHR30461:SF3,IPR036162,PS51737,IPR011109,PTHR30461, PS00397,PF00239,G3DSA:1.10.10.2600,IPR006119,SSF53041, cd00338,SM00857,IPR025827,IPR038109,PS51736, IPR006118,PF13408,G3DSA:3.40.50.1390,PF07508,Coil
MKTKYCYGYVRVSTSGQEELSPDSQAKLLKDFAKKNDMIVLQIFYELGISGRKADKRPEFQKMIALAKSDKHPVDCIIVWKFSRFARNQEESIVYKSLLKKKHNVEVLSVSEPLVDGPFGSLIERIIEWMDEYYSVRLSGEVTRGMTEKAKRGGYQARPPLGYKIQERGKPPVIVPEEAEIIKIIFDKYVNEHTGIFDIARYLNLCGFKTSHNKPFERRSIEYILQNPTYCGMIRWNRTVSETNEIRPESEWIVSDGQQPAIISKELFDKAQIRYKSEYKPSGTRPSSTYKHWLSGLMKCPVCGRTMIAKTVNNQKSYCYFTCYGYSKGKCLAKTSVSSLRLEPAVLESIKEVLATGNIIYRHVEPAQKTSVDLNVIITEQLRKNAEKFDRIREAYRNGVDTLDEYKENKRMVQEEKEMLEKQLADIKPAEPTIDTSKIAMLEKVRNVYEIIESDSVDPVTKNEILKSVIEKIIYDRSKDELKVYYYYAPESQ

SEQ ID NO: 6352 - protein, 493 aa, Unknown
  Description of Unknown: Integrase B6353 sequence
  PTHR30461:SF3,IPR036162,PS51737,IPR011109,PTHR30461, PS00397,PF00239,G3DSA:1.10.10.2600,IPR006119,SSF53041, cd00338,SM00857,IPR025827,IPR038109,PS51736, IPR006118,PF13408,G3DSA:3.40.50.1390,PF07508,Coil
MSVKYAYGYIRVSTHDQEEISPDSQEHLLRDYATKNNIVILKIFTDLGISGRKANKRPGFQEMIGLAKGDDHPIDQILVWKFSRFARNQEESIVYKSLLKKQHNVDVVSVSEPLSDDPFGSLIERIIEWMDEYYSIRLSGEVYRGMKENAIRGAYQARPPLGYKVVEHGKPPVIVPKEAKIVQTIFEKYVNESMGFFDIARYLNDLGLKTSHGKPFERRSIEYIIQNPSYCGMIRWNRTENSTNRIKDKDEWIVTEGQQPAIISKELFESAQERFKATYKPVGKRPSSTYKHWLSGLLKCPDCGRTLTSTTMKRVNGEKYSYFSCYGYSKGKCKKPNGISSLVLEKEVLASIKEILDTKDIVYELREYQPTEQFDERKAITEQLESLTGKEERIKASYREGIDTLEEYKANKAIIQKERESLEQQLKELKKAAHKSDQDPADSMLQKVRSVYDILISNNYTYVQKNEALKQIIDKIIYDRKNDSLKIYFFLYR

SEQ ID NO: 6353 - protein, 493 aa, Unknown
  Description of Unknown: Integrase B6354 sequence
  PTHR30461:SF3,IPR036162,PS51737,IPR011109,PTHR30461, PS00397,PF00239,G3DSA:1.10.10.2600,IPR006119,SSF53041, cd00338,SM00857,IPR025827,IPR038109,PS51736, IPR006118,PF13408,G3DSA:3.40.50.1390,PF07508,Coil
MKEKVSERKTGAIYIRVSTDKQEELSPDAQLRLLMDYAKTNHTDIPMEYIFQDNGISGRKANKRPAFQQMIALAKSKEHPIDTIIVWKFSRFARNQEESIVYKSLLKKNNVDVVSVSEPLIDGPFGSLIERIIEWMDEYYSIRLSGEVMRGMTQNALRGHYQGDAPIGYQSPGNKKPPEKDPKTIQIPIMMKDLLLSGSSLLQIARKLNEHGYRTKHGNLWDARGVRYVLENPFYAGISRWNYTDRGRQLKPADEVIYTKGNWEPLWDKATLEEIKKHLAMNMRKAKSRDVSAVKHWLSGLLICSSCGGTLAYSGTKNSRGFQCWKYTKGFCNESHYIGIHPIEKMVIEYLESILHSPAIVYTVISSASADADSKLADLEKQLQKVENKEKRIKAAYLNEIDSLEEYKANKAALLKERVAIEKNIKLLTISNTNMSKEEMDKKMKQNISALLTVLQDDSADYVQKGNMMRNVVDHIVFDRGNTSLDMFLKLVI

SEQ ID NO: 6354 - protein, 492 aa, Unknown
  Description of Unknown: Integrase B6355 sequence
  PTHR30461:SF3,SM00857,IPR006118,G3DSA:1.10.10.2600,IPR036162, PF13408,IPR025827,G3DSA:3.40.50.1390,IPR006119,IPR038109, PF07508,SSF53041,IPR011109,PF00239,PTHR30461, PS00397,Coil,cd00338
MSQLSTSNAQPLEIGAAYIRVSTDDQTELSPDAQLRMILDAAKADGFVIPKEYIFEEKKGISGRKADNRPEFQRMIAIAKSQKPAPFKRLYLWKFSRFARNQEESTFYKGILRKKCGIEIKSISEPIMEGMFGRLIETIIEWFDEYYSFNLSGEVKRGMTEKALREGYQTAPCLGYKAVGDGKPFLIDEDAYSIVEYIFQAYHSGRDMTGIARSVNTIGYRTQRGNLFDRRAIYRILTNHFYTGEVSWNGITFQGTHETRPAVTSVFDDVQKRITSEYHPKKRREASANAHWLSGMLFCGVCGSSLGFNRSNDQKKRPDFFQCWKYAKGFHPGSCCVSARIAERTVLRSLEKALRNNHLEYEHIPKTENDISEEEIAIKEALERITVKERRIREAYENEIDTLEEYKQNKLRLNAERKELENALDQLRQKAQQTEAAPPDQAEMMAKVSCVYQVLSDPTADNETKGNALRSLCEKIVFDRETRSFTFFYYTS

SEQ ID NO: 6355 - protein, 492 aa, Unknown
  Description of Unknown: Integrase B6356 sequence
  PTHR30461:SF3,SM00857,G3DSA:1.10.10.2600,IPR036162,PS51737, G3DSA:3.40.50.1390,IPR006119,IPR038109,PF07508,SSF53041, IPR011109,PTHR30461,Coil,PS51736,cd00338, PF00239
MAYAMYLRKSRIDEEAGLENTLSKHETMLRDMAANMGIHVDERHIYREIVSGESIDARPQMQRLLKAVEMGLYTGVLCVELERLSRGNGEDQARILRTFQFSGTKILTLNKVYDLAGDDEFDEEFFEFGLFMSRREYKTIKRRLLRGRLQAQRDGYFIGSVPPYGYGKRKDGKGWTLCPDPHESHIVRLIFDRYAQGAKINDILRELQASGVKQRTGNDFTRTRIGEILRNRTYLGELQTKRKIKNRRIIDGEIKETYIRNSGMEYVQGRHEPIVSTDTFDQCAARLRTMETRTRYAHTNRNPLASLVVCAQCGKTMQRTNGAQAEYLICKTFGCTTKSTKLDIVERLTVDAIQAELERLTYVWAGYETKANDNTNELQVLEAEIDRRQKMLDRACEAYETGVYDRSTYLQRVQKVNAEKAELTARLEALQAAEPERDIKRIPVLSKALDEYWTLDSEDRNRLLKDMAERIEYEKTERGTGLNPRLRVTLRV

SEQ ID NO: 6356 - protein, 492 aa, Unknown
  Description of Unknown: Integrase B6357 sequence
  PTHR30461:SF3,cd00338,SM00857,G3DSA:1.10.10.2600,IPR036162, PS51737,G3DSA:3.40.50.1390,IPR006119,IPR038109,PF07508, SSF53041,IPR011109,PTHR30461,PS51736,Coil, PF00239
MAYALYLRKSRADEELGHENTLARHEEMLRDLADRNNIYVDEAHIYREIVSGESIEARPQMQRLLKAVEAGMYTGVLCIELERLSRGNGADQARILKSFQFSDTKIITLTKTYDLAGDDSFDEEFFEFGLFMSRREYKMIKRRLHRGRMQAQQEGYFIGSTPPYGYGKRKDGKGWTLCPDPSEAQVVRLIFNRYAQGAKINDILRELQASGVRQRTGNDFTRTRIGEILRNRTYLGELQTKRKIKNRRIIDGEIKETYVRNSDMEYVQGRHEPIVSADIFEQCAARLRTMETRTRHEHTNRNPLASLVICSQCGKTLQRTNGAQAEYLICKTFGCTTKSTKLDIVERLTVNAIQAELERLTYVWSGYETEAKDNADEMRVLESEIDRRQKMLERACEAYETGIYDRSTYLQRVQKVNAEKAELTARLEALQAAEPERDIKRIPVLSKALDEYWTLDSEDRNRLLKGMAERIEYEKTERGTGLNPRLRVTLKI

SEQ ID NO: 6357 - protein, 492 aa, Unknown
  Description of Unknown: Integrase B6358 sequence
  SM00857,G3DSA:1.10.10.2600,IPR036162,PS51737,G3DSA:3.40.50.1390, IPR006119,IPR038109,PF07508,IPR011109,SSF53041, PTHR30461,Coil,PS51736,cd00338,PF00239
MAYAIYLRKSRIDEETGIENTLSKHETMLRDMAARMGIHIDETNIYREIVSGESIDARPQMQRLLKAVEMGLYTGVLCVELERLSRGNGEDQARILRTFQFSGTKILTLNKVYDLSSDDDFDEEFFEFGLFMSRREYKTIKRRLLRGRLQAQRDGYFIGSVPPYGYGKRKDGKGRTLCPDPHESHVVRLIFDRYAQGAKINDILRELQASGVKQRTGNDFTRTRIGEILRNRTYLGELQTKRKIKNRRIIDGEIKETYIRNSGMEYVQGRHEPIVSADTFDQCAARLRTMETRTRHAHTNRNPLASLVVCAECGKTMQRTNGAQAEYLICKTFGCTTKSTKLDIVERLTVDAIQAELERLTYVWAGYETKANDNTNELQVLEAEIGKRQKMLERACEAYETGVYDRSTYLQRVQKVNAEKAELIARLETLKDSEPEHDLKRIPVLSKALDEYWTLGSEDRNRLLKGMAEQIEYEKTERGTGLNPRLRVTLKI

SEQ ID NO: 6358 - protein, 492 aa, Unknown
  Description of Unknown: Integrase B6359 sequence
  cd00338,SM00857,G3DSA:1.10.10.2600,IPR036162, PS51737,G3DSA:3.40.50.1390,IPR006119,IPR038109, PF07508,SSF53041,IPR011109,PTHR30461, PS51736,Coil,PF00239
MAYAMYLRKSRIDEEAGIENTLSKHETMLRDMAANMGIHIDERHIYREIVSGESIDARPQMQRLLKAVEMGLYTGVLCVELERLSRGNGEDQARILRTFQFSGTKIITLNKVYDLAGDDEFDEEFFEFGLFMSRREYKMIKRRLLRGRLQAQRDGYFIGSVPPYGYGKRKDGKGWTLCPDPSEAQVVRLIFDRYAEGAKINDILRELQASGVRQRTGNEFTRTRIGEILRNRTYLGELQTKRKIKNRRIIDGEIKETYVRNGGMEYVQGRHEPIVSADAFDQCAARLKTMETRTRHAHTNRNPLASLVVCSQCGKTMQRTNGAQAEYLICKTFGCATKSTKLEIVERMVVDAIQAELERLTYVWSGYETEAKDNDNEMRVLESEIDRRQKMLDRACEAYETGVYDRSTYLQRVQKVNAEKAELTARLEALQAAEPERDIKRIPVLSKALDEYWTLGSEDRNRLLKGMAERIEYEKTERGTGLNPRLRVTLRI

SEQ ID NO: 6359 - protein, 492 aa, Unknown
  Description of Unknown: Integrase B6360 sequence
  PTHR30461:SF3,SM00857,G3DSA:1.10.10.2600,IPR036162,PS51737, G3DSA:3.40.50.1390,IPR006119,IPR038109,PF07508,IPR011109, SSF53041,PTHR30461,PS51736,cd00338,PF00239
MNVAMYLRKSRADENNPLETLERHKEILLSYAKDNNLTVIDIFEEVISGGMLYNRTEMLKLLDAIPSHIYDAVLCIDLDRLGRGSAADSEKIFDVLKENDVKIITLKKIYDLNNEYDEDYSEFEMFMARKELKFITRRMNRGRIKSINDGCFVSGAPFGYRNAVINKKHTLEVYEPEAKYVRMIFDMYVNQSMGITSISRQLANLGVLSKKNTPLHPTTIARMLRNHTYIGKIVWNKSKSVKGKNTQEKTSKDDWLYVPGLHEPIIDEDTFNKAQDIINLKYKPPMRTGTLQNPFAGLLKCANCGRAIVINTSNETVEKYRLCCRTLGCNKASALSIVEDKVFEVLTKEFKDIELSLKNIRQSHNKDKLSCLDTIATLETELKKLDKQQLRLYDLLEQEVYTKELFLERNNAISDRRKKINATIAQEREKFKLVDTSSIEERLPLLRELLTNYHSLSAAEKNSILKNFVKKIEYKREKSAPEGDIFLKIYYK

SEQ ID NO: 6360 - protein, 492 aa, Unknown
  Description of Unknown: Integrase B6361 sequence
  PTHR30461:SF3,IPR036162,PS51737,IPR011109,PTHR30461, PS00397,PF00239,G3DSA:1.10.10.2600,IPR006119,SSF53041, SM00857,IPR025827,IPR038109,PS51736, cd03768,IPR006118,PF13408,G3DSA:3.40.50.1390,PF07508,Coil
MAAIDFNNVVDLYIRVSTSEQAEEGYSVAEQEERLRSYCAAYNYTINAVHVDPGFSGASLDRPAIKKVMSDVEHGRCKKVIVWKLDRLSRSQKDTLILLEDVFLANDCNFISLMESFDTSTPFGRCIVGILAAFAQMERENIKIRTMMGRQARIREGHFHGSRCPLGYKFQYASDGTLLSNDLVVDPYTSKLVQEVYRLSLGGSSFSSIAAHMASTYGCSLYDWSRNTAIRRILSNPIYMGKVKVGNELYPGIHEPLVSETDWYMVAAMLKHNKEQQKRTYAYQISCGVYADNLLTGLLFCGDCGARMYARRVSQNKKKYICHSVAKTSPAMIKSDHCTNRLHPFTVHQLDEMVIDEILKLSLDRPGFDMLCDQPDDSSKSEDKEIYEERLAEVNRQLDRLVKLYQTGLIDLDNISARLGDLNQEKNFLEGNLATINEVTPAEIRETAWKSIQSLQSVLNNGDMDEVHRIIHTLIDKVVVLNTDVTIYWSFC

SEQ ID NO: 6361 - protein, 492 aa, Unknown
  Description of Unknown: Integrase B6362 sequence
  PTHR30461:SF3,SM00857,G3DSA:1.10.10.2600,IPR036162,PS51737, G3DSA:3.40.50.1390,IPR006119,IPR038109,PF07508,IPR011109, SSF53041,PTHR30461,PS51736,cd00338,PF00239
MNVAMYLRKSRADENNPLETLERHKEILLSYAKDNNLTVIDIFEEVISGGMLYNRTEMLKLLDAIPSHIYDAVLCIDLDRLGRGSAADSEKIFDVLKENDVKIITLKKIYDLNNEYDEDYSEFEMFMARKELKFITRRMNRGRIKSINDGCFVSGAPFGYRNAVINKKHTLEVYEPEAKYVRMIFDMYVNQSMGITSISRQLANLGVLSKKNTPLHPTTIARMLRNHTYIGKIVWNKSKSVKGKNTQEKTSKDDWLYVPGLHEPIIDEDTFNKAQDIINLKYKPPMRTGTLQNPFAGLLKCANCGRAIVINTSNETVEKYRLCCRTLDCNKASALSIVEDKVFEVLTKEFKDIELSLKNIRQSHNKDKLSCLDTIATLETELKKLDKQQLRLYDLLEQEVYTKELFLERNNAISDRRKKINATIAQEREKFKLVDTSSIEERLPLLRELLTNYHSLSAAEKNSILKNFVKKIEYKREKSAPEGDIFLKIYYK

SEQ ID NO: 6362 - protein, 492 aa, Unknown
  Description of Unknown: Integrase B6363 sequence
  PTHR30461:SF3,SM00857,IPR006118,G3DSA:1.10.10.2600,IPR036162, PF13408,IPR025827,G3DSA:3.40.50.1390,IPR006119,IPR038109, PF07508,SSF53041,IPR011109,PF00239, PTHR30461,PS00397,Coil,cd00338
MSQLSTSNTQPLEIGAAYIRVSTDDQTELSPDAQLRMILDAAKADGFVIPKEYIFEEKKGISGRKADNRPEFQRMIAIAKSQKPAPFKRLYLWKFSRFARNQEESTFYKGILRKKCGIEIKSISEPIMEGMFGRLIETIIEWFDEYYSFNLSGEVKRGMTEKALREGYQTAPCLGYKAVGDGKPFLIDEDAYSIVEYIFQAYHSGRDMTGIARSVNTIGYRTQRGNLFDRRAIYRILTNHFYTGEVSWNGITFQGTHETRPAVTSVFDDVQKRITSEYRPKKRREASANAHWLSGMLFCGVCGSSLGFNRSNDQKKRPDFFQCWKYAKGFHPGSCCVSARIAERTVLRSLEKALRNNHLEYEHIPKTENDISEEEIAIKEALERITVKERRIREAYENEIDTLEEYKQNKLRLNAERKELENALDQLRQKAQQTEAAPPDQAEMMAKVSCVYQVLSDPTADNETKGNALRSLCEKIVFDRETRSFTFFYYTS

SEQ ID NO: 6363 - protein, 492 aa, Unknown
  Description of Unknown: Integrase B6364 sequence
  PTHR30461:SF3,SM00857,G3DSA:1.10.10.2600,IPR036162,PS51737, G3DSA:3.40.50.1390,IPR006119,IPR038109,PF07508,IPR011109, SSF53041,PTHR30461,PS51736,cd00338,PF00239
MNVAMYLRKSRADENNPLETLERHKEILLSYAKDNNLTVIDIFEEVISGGMLYNRTEMLKLLDAIPSHIYDAVLCIDLDRLGRGSAADSEKIFDVLKENDVKIITLKKIYDLNNEYDEDYSEFEMFMARKELKFITRRMNRGRIKSINDGCFVSGAPFGYRNAVINKKHTLEVYEPEAKYVRMIFDMYVNQSMGITSISRQLANLGVLSKKNTPLHPTTIARMLRNHTYIGKIVWNKSKSVKGKNTQEKTSKDDWLYVPGLHEPIIDENTFNKAQDIINLKYKPPMRTGTLQNPFAGLLKCANCGRAIVINTSNETVEKYRLCCRTLGCNKASALSIVEDKVFEVLTKEFKDIELSLKNIRQSHNKDKLSCLDTIATLETELKKLDKQQLRLYDLLEQEVYTKELFLERNNAISDRRKKINATIAQEREKFKLVDTSSIEERLPLLRELLTNYNSLSATEKNSILKNFVKKIEYKREKSAPEGDIFLKIYYK

SEQ ID NO: 6364 - protein, 492 aa, Unknown
  Description of Unknown: Integrase B6365 sequence
  PTHR30461:SF3,SM00857,G3DSA:1.10.10.2600,IPR036162,PS51737, G3DSA:3.40.50.1390,IPR006119,IPR038109,PF07508,SSF53041, IPR011109,PTHR30461,PS51736,cd00338, PF00239
MNVAMYLRKSRADENNPLETLERHKEILLSYAKDNNLTVIDIFEEVISGGMLYNRTEMLKLLDAIPSHIYDAVLCIDLDRLGRGSAADSEKIFDVLKENDVKIITLKKIYDLNNEYDEDYSEFEMFMARKELKFITRRMNRGRIKSINDGCFVSGAPFGYRNAVINKKHTLEVYEPEAKYVRMIFDMYVNQSIGITSISRQLANLGVLSKKNTPLHPTTIARMLRNHTYIGKIVWNKSKSVKGKNTQEKTSKDDWLYVPGLHEPIIDEDTFNKAQDIINLKYKPPMRTGTLQNPFAGLLKCANCGRAIVINTSNETVEKYRLCCRTLGCNKASALSIVEDKVFEVLTKEFKDIELSLKNIRQSHNKDKLSCLDTIATLETELKKLDKQQLRLYDLLEQEVYTKELFLERNNAISDRRKKINATIAQEREKFKLVDTSSVEERLPLLRELLTNYHSLSAAEKNSILKNFVKKIEYKREKSAPKGDIFLKIYYK

SEQ ID NO: 6365 - protein, 492 aa, Unknown
  Description of Unknown: Integrase B6366 sequence
  PTHR30461:SF3,SM00857,G3DSA:1.10.10.2600,IPR036162,PS51737, G3DSA:3.40.50.1390,IPR006119,IPR038109,PF07508,IPR011109, SSF53041,PTHR30461,PS51736,cd00338,PF00239
MNVAIYLRKSRADENNPLETLERHKEILLSYAKDNNLTVIDIFEEVISGGMLYNRTEMLKLLDAIPSHIYDAVLCIDLDRLGRGSAADSEKIFDVLKENDVKIITLKKIYDLNNEYDEDYSEFEMFMARKELKFITRRMNRGRIKSINDGCFVSGAPFGYRNAVINKKHTLEVYEPEAKYVRMIFDMYVNQSMGITSISRQLANLGVLSKKNTPLHPTTIARMLRNHTYIGKIVWNKSKSVKGKNTQEKTSKDDWLYVPGLHEPIIDEDTFNKAQDIINLKYKPPMRTGTLQNPFAGLLKCANCGRAIVINTSNETVEKYRLCCRTLGCNKASALSIVEDKVFEVLTKEFKDIELSLKNIRQSHNKDKLSCLDTIATLETELKKLDKQQLRLYDLLEQEVYTKELFLERNNAISDRRKKINATIAQEREKFKLVDTSSIEERLPLLRELLTNYHSLSAAEKNSILKNFVKKIEYKREKSAPEGDIFLKIYYK

SEQ ID NO: 6366 - protein, 492 aa, Unknown
  Description of Unknown: Integrase B6367 sequence
  cd00338,SM00857,G3DSA:1.10.10.2600,IPR036162, PS51737,G3DSA:3.40.50.1390,IPR006119,IPR038109, PF07508,SSF53041,IPR011109,PTHR30461, PS51736,Coil,PF00239
MAYAMYLRKSRIDEEAGLENTLSKHETMLRDMAANMGIHVDERHIYREIVSGESIDARPQMQRLLKAVEMGLYTGVLCVELERLSRGNGEDQARILRTFQFSGTKIITLNKVYDLAGDDEFDEEFFEFGLFMSRREYKMIKRRLLRGRLQAQKGGYFIGSVPPYGYGKRKDGKGWTLYPDPSEAQVVRLIFDRYAEGAKINDILRELQASGVRQRTGNEFTRTRIGEILRNRTYLGELQTKRKIKNRRIIDGEIKETYVRNGGMEYVQGRHEPIVSADAFDQCAARLKTMETRTRHAHTNRNPLASLVVCSQCGKTMQRTNGAQAEYLICKTFGCATKSTKLEIVERMVVDAIQAELERLTYVWSGYETEAKDNDDEMRVLESEIDRRQKMLDRACEAYETGVYDRSTYLQRVQKVNAEKAELTARLEALQAAEPERDIKRIPVLSKALDEYWTLDSEDRNRLLKGMAERIEYEKTERGTGLNPRLRVTLRI

SEQ ID NO: 6367 - protein, 492 aa, Unknown
  Description of Unknown: Integrase B6368 sequence
  SM00857,G3DSA:1.10.10.2600,IPR036162,PF13408,PS51737, IPR025827,G3DSA:3.40.50.1390,IPR006119,IPR038109,PF07508, IPR011109,SSF53041,PF00239,PTHR30461,PS51736, Coil,cd00338
MAYAMYLRKSRIDEEAGLENTLSKHETMLRDMAARMGIHIDERHIYREIVSGESIDARPQMQRLLKAVEMGLYTGVLCVELERLSRGNGEDQARILRTFQFSGTKILTLNKVYDLAGDDEFDEEFFEFGLFMSRREYKTIKRRLLRGRLQAQRDGYFIGSVPPYGYSKRKDGKGWTLCPDPHESHIVRLIFDRYAEGAKINDILRELQASGVKQRTGNEFTRTRIGEILRNRTYLGELQTKRKIKNRQIIDGEIKETYVRNSGMEYVQGRHEPIVSADTFDQCAARLRTMETRTRYAHTNRNPLASLVVCSQCGKTMQRTNGAQAEYLICKTFGCTTKSTKLEIVERMVVDAIQAELERLTYVWSGYETEAKDNADEMRVLESEIDKRQKMLERACEAYETGIYDRTTYLQRVQKVNAEKAELLARLETLQDSEPEHDLKRIPVLSKALDEYWTLDSEDRNRLLKGMAERIEYEKTERGTGLNPRLRVTLRI

SEQ ID NO: 6368 - protein, 492 aa, Unknown
  Description of Unknown: Integrase B6369 sequence
  PTHR30461:SF3,SM00857,G3DSA:1.10.10.2600,IPR036162,PS51737, G3DSA:3.40.50.1390,IPR006119,IPR038109,PF07508,SSF53041, IPR011109,PTHR30461,PS51736,cd00338,PF00239
MNVAMYLRKSRADENNPLETLERHKEILLSYAKDNNLTVIDIFEEVISGGMLYNRTEMLKLLDAIPSHIYDAVLCIDLDRLGRGSAADSEKIFDVLKENDVKIITLKKIYDLNNEYDEDYSEFEMFMARKELKFITRRMNRGRIKSINDGCFVSGAPFGYRNAVINKKHTLEVYEPEAKYVRMIFDMYVNQSMGITSISRHLANLGVLSKKNTPLHPTTIARMLRNHTYIGKIVWNKSKSVKGKNTQEKTSKDDWLYVPGLHEPIIDEDTFNKAQDIINLKYKPPMRTGTLQNPFAGLLKCANCGRAIVINTSNETVEKYRLCCRTLGCNKASALSIVEDKVFEVLTKEFKDIELSLKNIRQSHNKDKLSCLDTIATLETELKKLDKQQLRLYDLLEQEVYTKELFIERNNAISDRRKKINATIAQEREKFKLVDTSSIEERLPLLRELLTNYNSLSAAEKNSILKNFVKKIEYKREKSAPEGDIFLKIYYK

SEQ ID NO: 6369 - protein, 492 aa, Unknown
  Description of Unknown: Integrase B6370 sequence
  PTHR30461:SF3,cd00338,SM00857,G3DSA:1.10.10.2600,IPR036162, PS51737,G3DSA:3.40.50.1390,IPR006119,IPR038109,PF07508, IPR011109,SSF53041,PTHR30461,PS51736, Coil,PF00239
MPKRAVIYARFSCNRQREASIEDQLRVCREWCAREGYEVAAEYCDRAVSGRTDDRPEFQRMIANAGESEIVLVYMMDRFSRGEYDAPIYKRELATHGVKLVSALEQIPDSPEGIIYEKLLEGLAACESRKTAIRTKRGMEGNALKCKTNGVRIFGYRRNGDDEYEVDEAQAAWVREAFALRLERMSMNAIAREFARRGLRTRKGNPCGQAMVQQMLRDRRYTGRYEWGGIVREGGMPAIVDEVTFMEVQGIKCRKQRSSENWGDFALAGAALCAECGRNLQGVSGRGRNNVKYEYYSCPGSCVRNIRREELEGSIASALRELLGDRGEALQIANMVAERADTAEVRARRRQAEDSLRAAERGLRNILNAIEQGVIAPGVNERIAELEEQQARARYDLEAITDERIDPERFADFLQCGTALDDATLLKAFVWQAVVSEDEILVTLNYDKKGEPARLDIQRVRAKLEWCPVCLDSRTEICAVGTVVLLRIPRAA

SEQ ID NO: 6370 - protein, 492 aa, Unknown
  Description of Unknown: Integrase B6371 sequence
  cd00338,SM00857,G3DSA:1.10.10.2600,IPR036162,PS51737, G3DSA:3.40.50.1390,IPR006119,IPR038109,PF07508,IPR011109, SSF53041,PTHR30461,PS51736,Coil,PF00239
MEQYLIYLRKSRSDLEAEAHGEGETLSRHEHTLLELAKRQHLNVTDIYREVVSGDTIAARPMMQRVLSEVEQGVWSGVLVMEVERLARGDTIDQGIIAQTFKFSGTKIITPIKTYDPDNEFDEEYFEFGLFMSRREYKIINRRLQRGRLASAKEGKWPSGLAPFGYRRVKLKNEKGCSLEPIEEQAAIVRMIFDLYTVGLQDEDGSARPLSLGSIATRLNDMHIPSPSGSQWARITIRGIIKNPTYIGMVRWGSRETKKKVVDGKVVSVRGPADPEKECIFKGIHPPLIPKETFELANDKLTRSENTSTHKEKVVRNPLAGLLVCSECGRQMMRMINPVHPDMPVVRCPRRGCPNCSSYLPIVEERVIQGLSEWMKGYELEWSSAAASSSVSSVGVREKALASAEAELRKLQQQLERTHDFLEQGIYDTDTFLSRSRMLSDKIAAAKDSVTRCSRELRRSSGRPAAVTSSLRLRICSTCTRCSKRPRRKTLS

SEQ ID NO: 6371 - protein, 492 aa, Unknown
  Description of Unknown: Integrase B6372 sequence
  PTHR30461:SF3,SM00857,G3DSA:1.10.10.2600,IPR036162,PS51737, G3DSA:3.40.50.1390,IPR006119,IPR038109,PF07508,IPR011109, SSF53041,PTHR30461,PS51736,cd00338, PF00239
MNVAMYLRKSRADENNPLETLERHKEILLSYAKDNNLTVIDIFEEVISGGMLYNRTEMLKLLDAIPSHIYDAVLCIDLDRLGRGSAADSEKIFDVLKENDVKIITLKKIYDLNNEYDEDYSEFEMFMARKELKFITRRMNRGRIKSINDGCFVSGAPFGYRNAVINKKHTLEVYEPEAKYVRMIFDMYVNQSMGITSISRQLANLGVLSKKNTPLHPTTIARMLRNHTYIGKIVWNKSKSVKGKNTQEKTSKDDWLYVPGLHEPIIDEDTFNKAQDIINLKYKPPMRTGTLQNPFAGLLKCANCGRAIVINTSNETVEKYRLCCRTLGCNKASALSIVEDKVFEVLTKEFKDIELSLKNIRQSHNKDKLSCLDTIATLETELKKLDKQQLRLYDLLEQEVYTKELFLERNNAISDRRKKINATIAQEREKFKLVDTSSVEERLPLLRELLTNYHSLSAAEKNSILKNFVKKIEYKREKSAPKGDIFLKIYYK

SEQ ID NO: 6372 - protein, 492 aa, Unknown
  Description of Unknown: Integrase B6373 sequence
  PTHR30461:SF3,SM00857,G3DSA:1.10.10.2600,IPR036162,PS51737, G3DSA:3.40.50.1390,IPR006119,IPR038109,PF07508,IPR011109, SSF53041,PF00239,PTHR30461,PS51736,Coil, cd00338
MAYAMYLRKSRIDEEAGLENTLSKHETMLRDMAANMGIHVDERHIYREIVSGESIDARPQMQRLLKAVEMGLYTGVLCVELERLSRGNGEDQARILRTFQFSGTKILTLNKVYDLAGDDEFDEEFFEFGLFMSRREYKTIKRRLLRGRLQAQRDGYFIGSVPPYGYGKRKDGKGWTLCPDPHESHIVRLIFDRYAQGAKINDILRELQASGVKQRTGNDFTRTRIGEILRNRTYLGELQTKRKIKNRRIIDGEIKETYIRNSGMEYVQGRHEPIVSTDTFDQCAARLRTMETRTRYAHTNRNPLASLVVCAQCGKTMQRTNGAQAEYLICKTFGCTTKSTKLDIVERLTVDAIQAELERLTYVWAEYETKANDNTNELQVLEAEIDKRQKMLERACEAYETGIYDRTTYLQRVQKVNAEKAELTARLEALQAAEPERDIKRIPVLSKALDEYWTLDSEDRNRLLKGMAERIEYEKTERGTGLNPRLRVTLRI

SEQ ID NO: 6373 - protein, 492 aa, Unknown
  Description of Unknown: Integrase B6374 sequence
  PTHR30461:SF3,IPR036162,PS51737,IPR011109,PTHR30461, PS00397,PF00239,G3DSA:1.10.10.2600,IPR006119,SSF53041, SM00857,IPR025827,IPR038109,PS51736,cd03768, IPR006118,PF13408,G3DSA:3.40.50.1390,PF07508,Coil
MAAIDFNNVVDLYIRVSTSEQAEEGYSVAEQEERLRSYCAAYNYTINAVHVDPGFSGASLDRPGIKKVMYDVEHGRCKKVIVWKLDRLSRSQKDTLILLEDVFLANDCNFISLMESFDTSTPFGRCIVGILAAFAQMERENIKIRTMMGRQARIRDGHFHGSRCPLGYKFQYAPDGTLLSNDLVVDPYTSKLVQEVFRLFLSGSSLSSISAHMASTYGCSMYDWSNSTAIRRILSNPIYMGKVRVGNELYPGIHEPLVSETDWYMVAAMLKHNKEQQKRTYAYQISGGAYADNLLTGLLFCGDCGARMYARRVSQNKKKYICHSVAKTSPAMIKSDHCTNRLHPFTVHQLDEMVINEILKLSLDRPGFDMLCDQPDESSKSEDKEIYEERLAEVNRQLDRLVKLYQTGLIDLDNISARLGDLNQEKNFLEGNIATINEITPADLRETAWKSIQSLQSVLDNGDMDEVHRIIHTLTDKVVVLNADVTIYWSFC

SEQ ID NO: 6374 - protein, 492 aa, Unknown
  Description of Unknown: Integrase B6375 sequence
  PTHR30461:SF3,SM00857,G3DSA:1.10.10.2600,IPR036162,PS51737, G3DSA:3.40.50.1390,IPR006119,IPR038109,PF07508,SSF53041, IPR011109,PTHR30461,PS51736,cd00338,PF00239
MNVAMYLRKSRADENNPLETLERHKEILLSYAKDNNLTVIDIFEEVISGGMLYNRTEMLKLLDAIPSHIYDAVLCIDLDRLGRGSAADSEKIFDVLKENDVKIITLKKIYDLNNEYDEDYSEFEMFMARKELKFITRRMNRGRIKSINDGCFVSGAPFGYRNAVINKKHTLEVYEPEAKYVRMIFDMYVNQSMGITSISRHLANLGVLSKKNTPLHPTTIARMLRNHTYIGKIVWNKSKSVKGKNTQEKTSKDDWLYVPGLHEPIIDEDTFNKAQDIINLKYKPPMRTGTLQNPFAGLLKCANCGRAIVINTSNETVEKYRLCCRTLGCNKASALSIVEDKVFEVLTKEFKDIELSLKNIRQSHNKDKLSCLDTIATLETELKKLDKQQLRLYDLLEQEVYTKELFIERNNAISDRRKKINATIAQEREKFKLVDTSSIEERLPLLRELLTNYNSLSATEKNSILKNFVKKIEYKREKSAPEGDIFLKIYYK

SEQ ID NO: 6375 - protein, 492 aa, Unknown
  Description of Unknown: Integrase B6376 sequence
  PTHR30461:SF3,IPR036162,PS51737,IPR011109,PTHR30461, PS00397,PF00239,G3DSA:1.10.10.2600,IPR006119,SSF53041, cd00338,SM00857,IPR025827,IPR038109, PS51736,IPR006118,PF13408,G3DSA:3.40.50.1390,PF07508,Coil
MTAALYIRVSTDEQLEFSPDAQKRALIEYAKKNNYQIDDHYIFIDEGITGTSAKKRPAFQNMIAMAKKKPKPFDAILVHKFDRFARSREDSVVYKSLLRKECGIKVISITEQLEDDKFSVILEAMLEAMAEYYSLNLSDEVIKGMTEKARRGGVQSKPILGYDIVDNKRVVNKEEAEIIKKIYDMCINGQSIGSIAKHLNMLGIKSKTGSPFEARRIKYIIQNPAYIGVTRWNYTHCQGSRIVVKPESEWITVENTHEPIVSQQTWDEAQKVLGTWHKDVKPRSTEYIHWLGGILRCSDCNGTLVYKTARFKRKDGSIRNADGYQCSRYKVGSCNTSNYIKIKDVEDHIIKTLTSTLDIVNETWSLKGLNIEYENKDDEIELYKTQLSKLNQKLERAKKAYLNDIDTLEEYKANKEMFQKEIIEITNLINTHRNNDTNPQKVAEFKDKLVTAIEAVKDDSISVMSKNIVLKTFIKSIIYNKREDTLTTIFYI

SEQ ID NO: 6376 - protein, 492 aa, Unknown
  Description of Unknown: Integrase B6377 sequence
  PTHR30461:SF3,SM00857,IPR006118,G3DSA:1.10.10.2600,IPR036162, PF13408,IPR025827,G3DSA:3.40.50.1390,IPR006119,IPR038109, PF07508,IPR011109,SSF53041,PF00239,PTHR30461, PS00397,Coil,cd00338
MSQLSTSNTQPLEIGAAYIRVSTDDQTELSPDAQLRMILDAAKADGFVIPKEYIFEEKKGISGRKADNRPEFQRMIAIAKSQKPAPFKRLYLWKFSRFARNQEESTFYKGILRKKCGIEIKSISEPIMEGMFGRLIETIIEWFDEYYSFNLSGEVKRGMTEKALREGYQTAPCLGYKAVGDGKPFLIDEDAYSIVEYIFQAYHGGRDMTGIARSVNTIGYRTQRGNLFDRRAIYRILTNHFYTGEVSWNGITFQGTHETRPAVTSVFDDVQKRITSEYRPKKRREASANAHWLSGMLFCGVCGSSLGFNRSNDQKKRPDFFQCWKYAKGFHPGSCCVSARIAERTVLRSLEKALRNNHLEYEHIPKTENDISEEEIAIKEALERITVKERRIREAYENEIDTLEEYKQNKLRLNAERKELENALDQLRQKAQQTEAAPPDQAEMMAKVSCVYQVLSDPTADNETKGNALRSLCEKIVFDRETRSFTFFYYTS

SEQ ID NO: 6377 - protein, 492 aa, Unknown
  Description of Unknown: Integrase B6378 sequence
  PTHR30461:SF3,SM00857,G3DSA:1.10.10.2600,IPR036162,PS51737, G3DSA:3.40.50.1390,IPR006119,IPR038109,PF07508,IPR011109, SSF53041,PTHR30461,PS51736,cd00338,PF00239
MNVAIYLRKSRADENNPLETLERHKEILLSYAKDNNLTVIDIFEEVISGGMLYNRTEMLKLLDAIPSHIYDAVLCIDLDRLGRGSAADSEKIFDVLKENDVKIITLKKIYDLNNEYDEDYSEFEMFMARKELKFITRRMNRGRIKSINDGCFVSGAPFGYRNAVINKKHTLEVYEPEAKYVRMIFDMYVNQSMGITSISRQLANLGVLSKKNTPLHPTTIARMLRNHTYIGKIVWNKSKSVKGKNTQEKTSKDDWLYVPGLHEPIIDEDTFNKAQDIINLKYKPPMRTGTLQNPFAGLLKCANCGRAIVINTSNETVEKYRLCCRTLGCNKASALSIVEDKVFEVLTKEFKDIELSLKNIRQSHNKDKLSCLDTIATLETELKKLDKQQLRLYDLLEQEVYTKELFLERNNAISDRRKKINATIAQEREKFKLVDTSSVEERLPLLRELLTNYHSLSAAEKNSILKNFVKKIEYKREKSAPKGDIFLKIYYK

SEQ ID NO: 6378 - protein, 492 aa, Unknown
  Description of Unknown: Integrase B6379 sequence
  PTHR30461:SF3,IPR036162,PS51737,IPR011109,PTHR30461, PS00397,PF00239,G3DSA:1.10.10.2600,IPR006119,SSF53041, SM00857,IPR025827,IPR038109,PS51736, cd03768,IPR006118,PF13408,G3DSA:3.40.50.1390,PF07508,Coil
MAAIDFNNVVDLYIRVSTSEQAEEGYSVAEQEERLRSYCAAFNYIINAIHIDPGFSGASLDRPGIKKVMYDVEHGRCKKVIVWKLDRLSRSQKDTLILLEDVFLANDCNFISLMESFDTSTPFGRCIVGILAAFAQMERENIKIRTMMGRQARIRDGHFHGSRCPLGYKFQYAPDGTLLSNDLVVDPYTSKLVQEVFRLFLSGSSLSSISAHMASTYGCSIYDWSNSTAIRRILSNPIYMGKVRVGNELYPGIHEPLVSETDWYMVAAMLKHNKEQQKRTYAYQISGGAYADNLLTGLLFCGDCGARMYARRVSQNKKKYICHSVAKTSPAMIKSDHCTNRLHPFTVHQLDEMVINEILKLSLDRPGFDMLCDQPDESSKSEDKEIYEERLAEVNRQLDRLVKLYQTGLIDLDNISARLGDLNQEKTFLEGNIATINEITPADLRETAWKSIQSLQSVLDNGDMDEVHRIIHTLIDKVVVLNADVTIYWSFC

SEQ ID NO: 6379 - protein, 492 aa, Unknown
  Description of Unknown: Integrase B6380 sequence
  PTHR30461:SF3,SM00857,G3DSA:1.10.10.2600,IPR036162,PS51737, G3DSA:3.40.50.1390,IPR006119,IPR038109,PF07508,SSF53041, IPR011109,PTHR30461,PS51736,cd00338,PF00239
MNVAMYLRKSRADEDNPLETLERHKEILLSYAKDNNLTVIDIFEEVISGGMLYNRTEMLKLLDAIPSHIYDAVLCIDLDRLGRGSAADSEKIFDVLKENDVKIITLKKIYDLNNEYDEDYSEFEMFMARKELKFITRRMNRGRIKSINDGCFVSGAPFGYRNAVINKKHTLKVYEPEAKYVRMIFDMYVNQSMGITSISRQLANLGVLSKKNTPLHPTTIARMLRNHTYIGKIVWNKSKSVKGKNTQEKTSKDDWLYVSGLHEPIIDEDTFNKAQDIINLKYKPPMRTGTLQNPFAGLLKCANCGRAIVINTSNETVEKYRLCCRTLGCNKASALSIVEDKVFEVLTKEFKDIELSLKNIRQSHNKDKLSCLDTIATLETELKKLDKQQLRLYDLLEQEVYTKELFLERNNAISDRRKKINATIAQEREKFKLVDTSSVEERLPLLRELLTNYHSLSAAEKNSILKNFVKKIEYKREKSAPEGDIFLKIYYK

SEQ ID NO: 6380 - protein, 492 aa, Unknown
  Description of Unknown: Integrase B6381 sequence
  PTHR30461:SF3,SM00857,G3DSA:1.10.10.2600,IPR036162,PS51737, G3DSA:3.40.50.1390,IPR006119,IPR038109,PF07508,IPR011109, SSF53041,PTHR30461,PS51736,cd00338, PF00239
MNVAMYLRKSRADENNPLETLERHKEILLSYAKDNNLTVIDIFEEVISGGMLYNRTEMLKLLDAIPSHIYDAVLCIDLDRLGRGSAADSEKIFDVLKENDVKIITLKKIYDLNNEYDEDYSEFEMFMARKELKFITRRMNRGRIKSINDGCFVSGAPFGYRNAIINKKHTLEVYEPEAKYVRMIFDMYVNQSMGITSISRQLANLGVLSKKNTPLHPTTIARMLRNHTYIGKIVWNKSKSVKGKNTQEKTSKDDWLYVPGLHEPIIDENTFNKAQDIINLKYKPPMRTGTLQNPFAGLLKCANCGRAIVINTSNETVEKYRLCCRTLGCNKASALSIVEDKVFEVLTKEFKDIELSLKNIRQSHNKDKLSCLDTIATLETELKKLDKQQLRLYDLLEQEVYTKELFLERNNAISDRRKKINATIAQEREKFKLVDTSSIEERLPLLRELLTNYHSLSAAEKNSILKNFVKKIEYKREKSAPEGDIFLKIYYK

SEQ ID NO: 6381 - protein, 492 aa, Unknown
  Description of Unknown: Integrase B6382 sequence
  cd00338,SM00857,G3DSA:1.10.10.2600,IPR036162,PS51737, G3DSA:3.40.50.1390,IPR006119,IPR038109,PF07508,IPR011109, SSF53041,PTHR30461,PS51736,Coil,PF00239
MAYAMYLRKSRIDEEAGLENTLSKHETMLRDMAARMGIHIDETNIYREIVSGESIDARPQMQRLLKAVEMGLYTGVLCVELERLSRGNGEDQARILRTFQFSGTKILTLNKVYDLAGDDEFDEEFFEFGLFMSRREYKTIKRRLLRGRLQAQRDGYFIGSVPPYGYSKRKDGKGWTLCPDPHESHIVRLIFDRYAQGAKINDILRELQASGVKQRTGNDFTRTRIGEILRNRTYLGELQTKRKIKNRRIIDGEIKETYIRNSGMEYVQGRHEPIVSADTFDQCAARLRTMETRTRYAHTNRNPLASLIVCTQCGKTMQRTNGAQAEYLICKTFGCTTKSTKLDIVERLTVDAIQAELERLTYVWAGYETKANDNTNELQVLEAEIDKRQKMLERACEAYETGIYDRTTYLQRVQKVNAEKAELLTRLETLKDSEPEHDLKRIPVLSKALDEYWTLDSENRNRLLKGMAERIEYEKTERGTGLNPRLRVTLRI

SEQ ID NO: 6382 - protein, 492 aa, Unknown
  Description of Unknown: Integrase B6383 sequence
  PTHR30461:SF3,IPR036162,PS51737,IPR011109,PTHR30461, PS00397,PF00239,G3DSA:1.10.10.2600,IPR006119,SSF53041, SM00857,IPR025827,IPR038109,PS51736, cd03768,IPR006118,PF13408,G3DSA:3.40.50.1390,PF07508,Coil
MAAIDFNNVVDLYIRVSTSEQAEEGYSVAEQEERLRSYCAAFNYIINAIHIDPGFSGASLDRPGIKKVMYDVEHGRCKKVIVWKLDRLSRSQKDTLILLEDVFLANDCNFISLMESFDTSTPFGRCIVGILAAFAQMERENIKIRTMMGRQARIRDGHFHGSRCPLGYKFQYAPDGTLLSNDLVVDPYTSKLVQEVFRLFLSGSSLSSISAHMASTYGCSMYDWSNSTAIRRILSNPIYMGKVRVGNELYPGIHEPLVSETDWYMVAAMLKHNKEQQKRTYAYQISGGAYADNLLTGLLFCGDCGARMYARRVSQNKKKYICHSVAKTSPAMIRSDHCTNRLHPFTVHQLDEMVINEILKLSLDRPGFDMLCDQPDESSKSEDKEIYEERLAEVNRQLDRLVKLYQTGLIDLDNISARLGDLNQEKIFLEGNIATINEITPADLRETAWKSIQSLQSVLDNGDMDEVHRIIHTLIDKVVVLNADVTIYWSFC

SEQ ID NO: 6383 - protein, 492 aa, Unknown
  Description of Unknown: Integrase B6384 sequence
  SM00857,G3DSA:1.10.10.2600,IPR036162,PF13408,IPR025827, G3DSA:3.40.50.1390,PS51737,IPR006119,IPR038109,PF07508, IPR011109,SSF53041,PTHR30461,Coil,PS51736, cd00338,PF00239
MNIQEIPTTRKEKPRVCAYVRVSTDSEAQEDSFAFQSNYWQKRFASDESVEYVGLFSDEGIGGAFMKKRDGLKRMFQKVRNGEIDRIYTKSVSRFARNKVELMEIVREFRDIGVEIIFESENIHTLDPKCGLILTVMASLAEEELISMSQNQKWAARKRFANGSVELARILGYDMVDGKLVINEKEAVIVRRIFELYLQGNSFRTICHILENEGYTPMHGGRWSKSTITGMLRNEKYCGDSIMQKSYSVMKVQKYNYGELPKYYIQGDHEPIVSREDYQKAQEIMMARGNKYRPRGSPTALYPLSGKLICGECGTSFKRKTSAHGTPYMCIKWTCRKKDVYGVKKCASHDIKDEVVTRLLIEAYNESLDANNDVNGITEQEEVLRKLIANEQELRQLRAKGYISESKCREETDKILIKIKEQETLIKNLRMRDMVKGKYKKSDELTEQMAEFLVKATVKDWTITFEFQNGYKTTKEYTNGRAGNVNGKLCKH

SEQ ID NO: 6384 - protein, 492 aa, Unknown
  Description of Unknown: Integrase B6385 sequence
  IPR036162,PS51737,IPR011109,PTHR30461,PS00397, PF00239,G3DSA:1.10.10.2600,IPR006119,SSF53041,SM00857, IPR025827,IPR038109,PS51736,cd03768,IPR006118, PF13408,G3DSA:3.40.50.1390,PF07508,Coil
MNVNVLDNVVDLYVRVSTTEQAEEGFSVGAQEEKLRAYCKAYNYQINAVHVDPGFSGATMDRPALKQVIRDVENNHCKKVIVWKLDRLSRSQKDTLILLEDVFAAHDCHFVSLMESFDTSTPIGRCMVGILAAFAQMERENIKARTMMGRQAKVKQGHYSGNKPPIGYAFNTASDGSVISNDLIVDPYNAKIVQDIFRWYLEGYSLNGIAKRLADAGTGSYAWQHSTSIRRILSNPVYIGKVKLNNELYEGMHEPLISESDFNEVSCMLARQKELHKRPAASYRTKNGCRSANLLSGLLYCGDCGARMYARKVCKDSPIRRYMCYSVAKTVKSMIRSDCCTNREHPYTVEQLDEIVLNEIKKLALDKAQFSRIASKSDTVHEDAKIYNERLEELNKQIKRLMNLYQTGIIDLADISDRLQALNDEKLSVQSRLDELKEADNSDTKLKAWEQLESFPAILDAGDVQQIHRIVNALIDKIVVLNRDVTIYWSFS

SEQ ID NO: 6385 - protein, 492 aa, Unknown
  Description of Unknown: Integrase B6386 sequence
  PTHR30461:SF3,SM00857,G3DSA:1.10.10.2600,IPR036162,PS51737, G3DSA:3.40.50.1390,IPR006119,IPR038109,PF07508,IPR011109, SSF53041,PTHR30461,PS51736,cd00338,PF00239
MNVAMYLRKSRADENNPLETLERHKEILLSYAKDNNLTVIDIFEEVISGGMLYNRTEMLKLLDAIPSHIYDAVLCIDLDRLGRGSAADSEKIFDVLKENDVKIITLKKIYDLNNEYDEDYSEFEMFMARKELKFITRRMNRGRIKSINDGCFVSGAPFGYRNAVINKKHTLEVYEPEAKYVRMIFDMYVNQSMGITSISRQLANLGVLSKKNTPLHPTTIARMLRNHTYIGKIVWNKSKSVKGKNTQEKTSKDDWLYVPGLHEPIIDEDTFNKAQDIINLKYKPPMRTGTLQNPFAGLLKCANCGRAIVINTSNETVEKYRLCCRTLGCNKASALSIVEDKVFEVLTKEFKDIELSLKNIRQSHNKDKLSCLDTIATLETELKKLDKQQLRLYDLLEQEVYTKELFLERNNAISDRRKKINATIAQEREKFKLVDTSSIEERLPLLHELLTNYHSLSAAEKNSILKNFVKKIEYKREKSAPEGDIFLKIYYK

SEQ ID NO: 6386 - protein, 492 aa, Unknown
  Description of Unknown: Integrase B6387 sequence
  PTHR30461:SF3,SM00857,G3DSA:1.10.10.2600,IPR036162,PS51737, G3DSA:3.40.50.1390,IPR006119,IPR038109,PF07508,SSF53041, IPR011109,PTHR30461,PS51736,cd00338, PF00239
MNVAIYLRKSRADENNPLETLERHKEILLSYAKDNNLTVIDIFEEVISGGMLYNRTEMLKLLDAIPSHIYDAVLCIDLDRLGRGSAADSEKIFDVLKENDVKIITLKKIYDLNNEYDEDYSEFEMFMARKELKFITRRMNRGRIKSINDGCFVSGAPFGYRNAVINKKHTLEVYEPEAKYVRMIFDMYVNQSIGITSISRQLANLGVLSKKNTPLHPTTIARMLRNHTYIGKIVWNKSKSVKGKNTQEKTSKDDWLYVPGLHEPIIDEDTFNKAQDIINLKYKPPMRTGTLQNPFAGLLKCANCGRAIVINTSNETVEKYRLCCRTLGCNKASALSIVEDKVFEVLTKEFKDIELSLKNIRQSHNKDKLSCLDTIATLETELKKLDKQQLRLYDLLEQEVYTKELFLERNNAISDRRKKINATIAQEREKFKLVDTSSIEERLPLLHELLTNYHSLSAAEKNSILKNFVKKIEYKREKSAPEGDIFLKIYYK

SEQ ID NO: 6387 - protein, 492 aa, Unknown
  Description of Unknown: Integrase B6388 sequence
  cd00338,SM00857,G3DSA:1.10.10.2600,IPR036162,PS51737, G3DSA:3.40.50.1390,IPR006119,IPR038109,PF07508,IPR011109, SSF53041,PTHR30461,PS51736,Coil,PF00239
MAYAMYLRKSRIDEEAGLENTLSKHETMLRDMAVNMGIHIDETHIYREIVSGESIEARPQMQKLLKAVEMGLYTGVLCVELERLSRGNGEDQARILRTFQFSGTKILTLNKVYDLAGDDEFDEEFFEFGLFMSRREYKMIKRRLLRGRLQAQKDGYFIGSVPPYGYGKRKDGKGWTLCPDPHESHVVRLIFDRYAQGAKINDILRELQASGVKQRTGNDFTRTRIGEILRNRTYLGELQTKRKIKNRRIIDGEIKETYIRNSGMEYVQGRHEPIVSADIFDQCAARLRTMETRTRHAHTNRNPLASLIVCTQCGKTMQRTNGAQAEYLICKTFGCTTKSTKLDIVERLTVDAIQAELERLTYVWAGYETKANDNTNELQVLEAEIDKRQKMLERACEAYETGVYDRSTYLQRVQKVNAEKAELLARLETLQDSEPEHDLKQIPVLSKALDEYWTLDSENRNRLLKGMAERIEYEKTERGTGLNPRLRVTLKI

SEQ ID NO: 6388 - protein, 492 aa, Unknown
  Description of Unknown: Integrase B6389 sequence
  cd00338,SM00857,G3DSA:1.10.10.2600,IPR036162, PS51737,G3DSA:3.40.50.1390,IPR006119,IPR038109, PF07508,SSF53041,IPR011109,PTHR30461, PS51736,Coil,PF00239
MAYAMYLRKSRIDEEAGLENTLSKHETMLRDMAARMGIHIDETNIYREIVSGESIDARPQMQRLLKAVEMGLYTGVLCVELERLSRGNGEDQARILRTFQFSGTKILTLNKVYDLAGDDEFDEEFFEFGLFMSRREYKTIKRRLLRGRLQAQRDGYFIGSVPPYGYGKRKDGKGWTLCPDPHESHIVRLIFDRYAQGAKINDILRELQASGVKQRTGNDFTRTRIGEILRNRTYLGELQTKRKIKNRRIIDGEIKETYIRNSGMEYVQGRHEPIVSADTFDQCAARLRTMETRTRYAHTNRNPLASLVVCSQCGKTMQRTNGAQAEYLICKTFGCTTKSTKLDIVERLTVDAIQAELERLTYVWAGYETKANDNTNELQVLEAEIDKRQKMLERACEAYETGIYDRTTYLQRVQKVNAEKAELLTRLETLQDSEPEHDLKRIPVLSKALDEYWTLDSENRNRLLKGMAERIEYEKTERGTGLNPRLRVTLRI

SEQ ID NO: 6389 - protein, 492 aa, Unknown
  Description of Unknown: Integrase B6390 sequence
  PTHR30461:SF3,SM00857,G3DSA:1.10.10.2600,IPR036162,PS51737, G3DSA:3.40.50.1390,IPR006119,IPR038109,PF07508,IPR011109, SSF53041,PTHR30461,PS51736,cd00338,PF00239
MNVAMYLRKSRADENNPLETLERHKEILLSYAKDNNLTVIDIFEEVISGGMLYNRTEMLKLLDAIPSHIYDAVLCIDLDRLGRGSAADSEKIFDVLKENDVKIITLKKIYDLNNEYDEDYSEFEMFMARKELKFITRRMNRGRIKSINDGCFVSGAPFGYRNAVINKKHTLEVYEPEAKYVRMIFDMYVNQSMGITSISRQLANLGVLSKKNTPLHPTTIARMLRNHTYIGKIVWNKSKSVKGKNTQEKTSKDDWLYVPGLHEPIIDEDTFNKAQDIINLKYKPPMRTGTLQNPFAGLLKCANCGRAIVINTSNETVEKYRLCCRTLGCNKASALSIVEDKVFEVLTKEFKDIELSLKNIRQSHNKDKLSCLDTIATLETELKKLDKQQLRLYDLLEQEVYTKELFLERNNAISDRRKKINATIAQEREKFKLVDTSSVEERLPLLRELLTNYHSLSAAEKNSILKNFVKKIEYKREKSAPEGDIFLKIYYK

SEQ ID NO: 6390 - protein, 492 aa, Unknown
  Description of Unknown: Integrase B6391 sequence
  PTHR30461:SF3,SM00857,G3DSA:1.10.10.2600,IPR036162,PS51737, G3DSA:3.40.50.1390,IPR006119,IPR038109,PF07508,SSF53041, IPR011109,PTHR30461,PS51736,cd00338, PF00239
MNVAMYLRKSRADENNPLETLERHKEILLSYAKDNNLTVIDIFEEVISGGMLYNRTEMLKLLDAIPSHIYDAVLCIDLDRLGRGSAADSEKIFDVLKENDVKIITLKKIYDLNNEYDEDYSEFEMFMARKELKFITRRMNRGRIKSINDGCFVSGAPFGYRNAVINKKHTLEVYEPEAKYVRMIFDMYVNQSMGITSISRQLANLGVLSKKNTPLHPTTIARMLRNHTYIGKIVWNKSKSVKGKNTQEKTSKDDWLYVPGLHEPIIDEDTFNKAQDIINLKYKPPMRTGTLQNPFAGLLKCANCGRAIVINTSNETVEKYRLCCRTLGCNKASALSIVEDKVFEVLTKEFKDIELSLKNIRQSHNKDKLSCLDTIATLETELKKLDKQQLRLYDLLEQEVYTKELFIERNNAISDRRKKINATIAQEREKFKLVDTSSIEERLPLLRELLTNYHSLSAAEKNSILKNFVKKIEYKREKSAPEGDIFLKIYYK

SEQ ID NO: 6391 - protein, 492 aa, Unknown
  Description of Unknown: Integrase B6392 sequence
  PTHR30461:SF3,SM00857,IPR006118,G3DSA:1.10.10.2600,IPR036162, PF13408,IPR025827,G3DSA:3.40.50.1390,Coil,IPR006119, IPR038109,PF07508,IPR011109,SSF53041,PTHR30461, PS00397,cd00338,PF00239
MPPLPTSNSQTLEIGAAYIRVSTDDQTELSPDAQLRVILDAAKADGFVIPKEYIFEEKKGISGRKADNRPEFQRMIAIAKSQKPAPFKRLYLWKFSRFARNQEESTFYKGILRKKCGIEIKSISEPIMDGMFGRLIETIIEWFDEYYSFNLSGEVMRGMTEKALREGYQTSPSLGYKAAGEGKPFLIDEMTYPIVEYIFRTYHDGRDMTATARAANAMGYRTRHGNLFDRRAVYRILTNRFYNGEVVWNGITFQGSHETRPAVTSIYENVQNRITSEYRPLKRREASANAHWLSGLLTCSVCGSSLGFNRSNNQKKRPDFFQCWKYAKGVHPGSCCVSARIAEQTVLSSLENAMGQNYLEYEYIPKTAVETNGEELALKEALDRIAIKEQRIREAYENEIDTLEEYKQNKIRLNAEREQLTAALEQLRQKIQQSTSAPPSQAEVMAKISCVYQVLSDQEVDNETKANALRAICKQIVFDRETRRFIFYYYTS

SEQ ID NO: 6392 - protein, 492 aa, Unknown
  Description of Unknown: Integrase B6393 sequence
  PTHR30461:SF3,IPR036162,PS51737,IPR011109,PTHR30461, PS00397,PF00239,G3DSA:1.10.10.2600,IPR006119,SSF53041, SM00857,IPR025827,IPR038109,PS51736,cd03768, IPR006118,PF13408,G3DSA:3.40.50.1390,PF07508,Coil
MAAIDFNNVVDLYIRVSTSEQAEEGYSVAEQEERLRSYCAAYNYTINAVHVDPGFSGASLDRPAIKKVMYDVEHGRCKKVIVWKLDRLSRSQKDTLILLEDVFLANDCNFISLMESFDTSTPFGRCIVGILAAFAQMERENIKIRTMMGRQARIREGHFHGSRCPLGYKFQYASDGTLLSNDLVVDPYTSKLVQEVYRLSLGGSSFSSIAAHMASIYGCSLYDWSRNTAIRRILSNPIYMGKVKVGNELYPGIHEPLVLETDWYMVAAMLKHNKEQQKRTYAYQISGGAYADNLLTGLLFCGDCGARMYARRVSQNKKKYICHSVAKTSPAMIRSDHCTNRLHPFTVHQLDEMVIDEILKLSLDRPGFDMLCDQPDASSKSEDKEIYEERLAEVNRQLDRLVKLYQTGLIDLDNISARLGDLNQEKNFLEGNLATINEVTPAEIRETAWKSIQSLQSVLNNGDMGEVHRIIHTLIDKVVVLNTDVTIYWSFC

SEQ ID NO: 6393 - protein, 492 aa, Unknown
  Description of Unknown: Integrase B6394 sequence
  PTHR30461:SF3,IPR036162,PS51737,IPR011109,PTHR30461, PS00397,PF00239,G3DSA:1.10.10.2600,IPR006119,SSF53041, SM00857,IPR025827,IPR038109,PS51736,cd03768, IPR006118,PF13408,G3DSA:3.40.50.1390,PF07508,Coil
MSSIDINNVVDLYIRVSTSEQAEEGYSVAEQEERLRSYCAAYNYTINAVHVDPGFSGASLDRPAIKKVMSDVEHGRCKKVIVWKLDRLSRSQKDTLILLEDVFLANDCNFISLMESFDTSTPFGRCIVGILAAFAQMERENIKIRTMMGRQARIREGHFHGSRCPLGYKFQYAPDGALLSNDLVVDPYTSKLVQEVYRLFLGGSSLSSISVHMTSTYGCCVYDWSNSTAIRRLLRNPIYMGKVKVGNELYPGIHEPLVSETDWYMVAAMLKHNKEQQKRTYAYQISGGAYADNLLTGLLFCGDCGARMYARRVSQNKKKYICHSVAKTSPAMIRSDHCTNRLHPFTVHQLDEMVIDEILKLSLDRPGFDMLCDQPDASSKSEDKEIYEERLAEVNRQLDRLVKLYQTGLIDLDNISARLGDLNQEKNFLEGNLATINEVTPAEIRETAWKSIQSLQSVLNNGDMGEVHRIIHTLIDKVVVLNTDVTIYWSFC

SEQ ID NO: 6394 - protein, 492 aa, Unknown
  Description of Unknown: Integrase B6395 sequence
  SM00857,G3DSA:1.10.10.2600,IPR036162,PF13408,IPR025827, G3DSA:3.40.50.1390,PS51737,IPR006119,IPR038109,PF07508, SSF53041,IPR011109,PTHR30461,Coil,PS51736, cd00338,PF00239
MNIQEIPTTRKEKPRVCAYVRVSTDSEAQEDSFAFQSNYWQRRFESDESVEYIGLFSDEGIGGAFMKKRDGLKRMFQKVRNGEIDRIYTKSVSRFARNKVELMEVVREFRDIGVEIIFESENIHTLDPKCGLILTVMASLAEEELLSMSQNQKWAARKRFANGSVELARILGYDMVDGKLVINEKEAVIVRRIFELYLQGNSFRTICHILENEGYTPMHGGRWSKSTITGMLRNEKYCGDSIMQKSYSTMKVQKYNYGELPKYYVQDNHEPIVSREDYQKAQEIMIARGNKYRPRGSPTALYPLSGKLICGECGTSFKRKTSAHGTPYMCIKWTCRKKDFYGVKECTSHDIKDEVVTRLLIEAYNESLDANNDVNGITEQEEVLRKLIANEQELRQLRAKGYISESKCREETDKILIKIKEQETLIKNLRTRDMVKGKYKKSDEMTEQMAEFLVKATVKDWKITFEFQNGYKTTKEYTNGRAGNVNGKLCKH

SEQ ID NO: 6395 - protein, 492 aa, Unknown
  Description of Unknown: Integrase B6396 sequence
  PTHR30461:SF3,SM00857,IPR006118,G3DSA:1.10.10.2600,IPR036162, PF13408,IPR025827,G3DSA:3.40.50.1390,Coil,IPR006119, IPR038109,PF07508,IPR011109,SSF53041,PTHR30461, PS00397,cd00338,PF00239
MSELSTNNSQPLEIGAAYIRVSTDDQTELSPDAQLRMILDAAKADGFVIPKEYIFEEKKGISGRKADNRPEFQRMIAIAKSQKPAPFKRLYLWKFSRFARNQEESTFYKGILRKKCGIEIKSISEPIMEGMFGRLIETIIEWFDEYYSFNLSGEVKRGMTEKALREGYQTSPCLGYKAVGDGKPFLINEDTYPIVEYIFQAYHSGRDMTGIARSVNTMGYRTQRGNPFERRSIYRILTNHFYIGEVSWNGITFQGSHETRPAVTSVFDDVQKRITSEYRPKKRREASANAHWLSGMLFCGVCGSSLGFNHSNSQKKRPDFFQCWKYAKGFHPGSCCVSARIAERTVLQSLEKALRNNHLEYEHIPKTESDISGEEIAIKEALERITVKERRIREAYENEIDTLEEYKQNKLRLNAERKELDTALDQLRQKAQQTEAAPPDQAEMMAKVSCVYQILSDPTANNETKGNALRSICKKIVFDRETRRFTFFFYTS

SEQ ID NO: 6396 - protein, 492 aa, Unknown
  Description of Unknown: Integrase B6397 sequence
  PTHR30461:SF3,IPR036162,PS51737,IPR011109,PTHR30461, PS00397,PF00239,G3DSA:1.10.10.2600,IPR006119,SSF53041, cd00338,SM00857,IPR025827,IPR038109,PS51736, IPR006118,PF13408,G3DSA:3.40.50.1390,PF07508,Coil
MKEKVSERKTGAIYIRVSTDKQEELSPDAQLRLLMDYARNNHTDIPQEYIFQDNGISGRKANKRPSFQQMIALAKSKEHPIDTIIVWKFSRFARNQEESIVYKSLLKKNNVDVVSVSEPLIDGPFGSLIERIIEWMDEYYSIRLSGEVMRGMTQNALRGHYQGDAPIGYRSPGNKKPPEKDQKTIQIPLLMKDLLLSGSSILQIARKLNEQGYRTKRGNLWDARGVRYVLENPFYAGISRWNYTDRGRQLKPAEEVIYTKGNWEPLWDKATLEEIQKRLSTNARKAKSRDVSTAKHWLSGLLVCSSCGGTLAYSGSKNSRGFQCWKYSKGFCNESHYIGIAPLEKLVMAYLKNILHSASIVYTVTSASSDSGSKLADLEKKLQKVDNKEKRIKAAYLNEIDTLEEYKANKAALLEERAAIEKNIKLLTISSTNMSKEEMDQKMKQNISALLTVLQDDSADYIKKGNMMRNVVDHITFDRKNTSLDMFLKLVI

SEQ ID NO: 6397 - protein, 492 aa, Unknown
  Description of Unknown: Integrase B6398 sequence
  PTHR30461:SF3,SM00857,G3DSA:1.10.10.2600,IPR036162,PS51737, G3DSA:3.40.50.1390,IPR006119,IPR038109,PF07508,IPR011109, SSF53041,PTHR30461,PS51736,cd00338,PF00239
MNVAMYLRKSRADENNPLETLERHKEILLSYAKDNNLTVIDIFEEVISGGMLYNRTEMLKLLDAIPSHIYDAVLCIDLDRLGRGSAADSEKIFDVLKENDVKIITLKKIYDLNNEYDEDYSEFEMFMARKELKFITRRMNRGRIKSINDGCFVSGAPFGYRNAVINKKHTLEVYEPEAKYVRMIFDMYVNQSMGITSISRQLANLGVLSKKNTPLHPTTIARMLRNHTYIGKIVWNKSKSVKGKNTQEKTSKDDWLYVPGLHEPIIDEDTFNKAQDIINLKYKPPMRTGTLQNPFAGLLKCANCGRAIVINTSNETVEKYRLCCRTLGCNKASALSIVEDKVFEVLTKEFKDIELSLKNIRQSHNKDKLSCLDTIATLETELKKLDKQQLRLYDLLEQEVYTKELFLERNNAISDRRKKINATIAQEREKFKLVDTSSIEERLPLFRELLTNYHSLSAAEKNSILKNFVKKIEYKREKSAPEGDIFLKIYYK

SEQ ID NO: 6398 - protein, 492 aa, Unknown
  Description of Unknown: Integrase B6399 sequence
  PTHR30461:SF3,SM00857,G3DSA:1.10.10.2600,IPR036162,PS51737, G3DSA:3.40.50.1390,IPR006119,IPR038109,PF07508,IPR011109, SSF53041,PTHR30461,PS51736,cd00338, PF00239
MNVAMYLRKSRADENNPLETLERHKEILLSYAKDNNLTVIDIFEEVISGGMLYNRTEMLKLLDAIPSHIYDAVLCIDLDRLGRGSAADSEKIFDVLKENDVKIITLKKIYDLNNEYDEDYSEFEMFMARKELKFITRRMNRGRIKSINDGCFVSGAPFGYRNAVINKKHTLEVYEPEAKYVRMIFDMYVNQSMGITSISRQLANLGVLSKKNTPLHPTTIARMLRNHTYIGKIVWNKSKSVKGKNTQEKTSKDDWLYVPGLHEPIIDENTFNKAQDIINLKYKPPMRTGTLQNPFAGLLKCANCGRAIVINTSNETVEKYRLCCRTLGCNKASALSIVEDKVFEVLTKEFKDIELSLKNIRQSHNKDKLSCLDTIATLETELKKLDKQQLRLYDLLEQEVYTKELFLERNNAISDRRKKINATISQEREKFKLVDTSSVEERLPLLRELLTNYHSLSAAEKNSILKNFVKKIEYKREKSAPEGDIFLKIYYK

SEQ ID NO: 6399 - protein, 492 aa, Unknown
  Description of Unknown: Integrase B6400 sequence
  PTHR30461:SF3,cd00338,SM00857,G3DSA:1.10.10.2600,IPR036162, PS51737,G3DSA:3.40.50.1390,IPR006119,IPR038109,PF07508, IPR011109,SSF53041,PTHR30461,PS51736,Coil, PF00239
MAYAMYLRKSRIDEEAGLENTLSKHETMLRDMAARMGIHIDETNIYREIVSGESIDARPQMQRLLKAVEMGLYTGVLCVELERLSRGNGEDQARILRTFQFSGTKIITLNKVYDLAGDDEFDEEFFEFGLFMSRREYKTIKRRLLRGRLQAQKDGYFIGSVPPYGYGKRKDGKGWTLCPDPHESHIVRLIFDRYAQGAKINDILRELQASGVKQRTGNDFTRTRIGEILRNRTYLGELQTKRKIKNRRIIDGEIKETYIRNSGMEYVQGRHEPIVSADTFDQCAARLRTMETRTRYAHTNRNPLASLVVCSQCGKTMQRTNGAQAEYLICKTFGCATKSTKLDIVERLTVDAIQAELERLTYVWAGYETKANDNTNELQVLEAEIDKRQKMLERACEAYETGIYDRTTYLQRVQKVNAEKAELLARLETIQDSEPEHDLKRIPVLSKALDEYWTLDSEDRNRLLKGMAERIEYEKTERGTGLNPRLRVTLRI

SEQ ID NO: 6400 - protein, 492 aa, Unknown
  Description of Unknown: Integrase B6401 sequence
  PTHR30461:SF3,SM00857,G3DSA:1.10.10.2600,IPR036162,PS51737, G3DSA:3.40.50.1390,IPR006119,IPR038109,PF07508,IPR011109, SSF53041,PTHR30461,PS51736,cd00338,PF00239
MNVAMYLRKSRADENNPLETLERHKEILLSYAKDNNLTVIDIFEEVISGGMLYNRTEMLKLLDAIPSHIYDAVLCIDLDRLGRGSAADSEKIFDVLKENDVKIITLKKIYDLNNEYDEDYSEFEMFMARKELKFITRRMNRGRIKSINDGCFVSGAPFGYRNAVINKKHTLEVYEPEAKYVRMIFDMYVNQSMGITSISRQLANLGVLSKKNTPLHPTTIARMLRNHTYIGKIVWNKSKSVKGKNTQEKTSKDDWLYVSGLHEPIIDEDTFNKAQDIINLKYKPPMRTGTLQNPFAGLLKCANCGRAIVINTSNETVEKYRLCCRTLGCNKASALSIVEDKVFEVLTKEFKDIELSLKNSRQSHNKDKFSCLDTIATLETELKKLDKQQLRLYDLLEQEVYTKELFIERNNAISDRRKKINATIAQEREKFKLVDTTSIEDRLPLLRELLTNYNSLSADEKNSILKNFVKKIEYKREKSAPEGDIFLKIYYK

SEQ ID NO: 6401 - protein, 492 aa, Unknown
  Description of Unknown: Integrase B6402 sequence
  PTHR30461:SF3,SM00857,G3DSA:1.10.10.2600,IPR036162,PF13408, IPR025827,G3DSA:3.40.50.1390,PS51737,IPR006119,IPR038109, PF07508,SSF53041,IPR011109,PF00239, PTHR30461,PS51736,Coil,cd00338
MKKIAIYSRKSVFTGKGESVENQIALCKDYCEKFLRYDNADYIVYEDEGFSGKNINRPQFKLLLDDIKKHKIDILVCYRLDRISRSVADFASTLEILNKYNVDFLSIREKFDTTSANGRAMLNISATFAQLERETIAERVKDNMLQMAKNGYWTGGQLPLGYDSIRYSTIDGTGKERSYSKLKENIKELDVVRLIYSEFLKNNSILDITKLLNENNLKGKNRCDFDRTQVKRILRNPLYVKSSDLTNLYLSNNYSVYGIANGNGYLTYNKSKAKDKWIVSVANHKGIIEDTNWLLVQKILDNNATKVSNRTGTGTGDNTSLFSGILKCSECGENMVIKYNNKNKYGNPNLYYICSSKTRKFTSKCKTKNLNVKATDIKILEDIKSYNKEVLIKKYEEYINELIANNNTGLKENLKEQIKHKEKQINNLVIKLSNIDTPEISDIILNQLATLTNEVKDLKTKLSNSDIQAANVEKAIGEFKNIKNLGYVTTNS

SEQ ID NO: 6402 - protein, 492 aa, Unknown
  Description of Unknown: Integrase B6403 sequence
  PTHR30461:SF3,IPR036162,PS51737,IPR011109,PTHR30461, PS00397,PF00239,G3DSA:1.10.10.2600,IPR006119,SSF53041, SM00857,IPR025827,IPR038109,PS51736,cd03768, IPR006118,PF13408,G3DSA:3.40.50.1390,PF07508,Coil
MAAIDFNNVVDLYIRVSTSEQAEEGYSVAEQEERLRSYCAAFNYIINAIHIDPGFSGASLDRPGIKKVMYDVEHGRCKKVIVWKLDRLSRSQKDTLILLEDVFLANDCNFISLMESFDTSTPFGRCIVGILAAFAQMERENIKIRTMMGRQARIREGHFHGSRCPLGYKFQYASDGTLLSNDLVVDPYTSKLVQEVYRLSLGGSSFSSIAAHMASIYGCSLYDWSRNTAIRRILSNPIYMGKVKVGNELYPGIHEPLVSETDWYMVAAMLKHNKEQQKRTYAYQISGGAYADNLLTGLLFCGDCGARMYARRVSQNKKKYICHSVAKTSPAMIRSDHCTNRLHPFTVHQLDEMVIDEILKLSLDRPGFDMLCDQPDASSKSEDKEIYEERLAEVNRQLDRLVKLYQTGLIDLDNISARLGDLNQEKNFLEGNLATINEVTPAEIRETAWKSIQSLQSVLNNGDMGEVHRIIHTLIDKVVVLNTDVTIYWSFC

SEQ ID NO: 6403 - protein, 492 aa, Unknown
  Description of Unknown: Integrase B6404 sequence
  cd03768,PTHR30461:SF3,SM00857,G3DSA:1.10.10.2600,IPR036162, PS51737,G3DSA:3.40.50.1390,IPR006119,IPR038109,PF07508, IPR011109,SSF53041,PTHR30461,PS51736,Coil, PF00239
MKKIAIYIRKSVKGDENSISLEAQTEVIKLYFKGENEFIIYKDDGFSGGNTNRPAFKKLMSDAIKNKFDTVACYKLDRIARNTLDFLTTFNTLKEYGIDLICVEDKYDPSTPSGRLMMTLLASLAEMERENIKQRVRDSMLNLARSGRWTGGTAPFGYKVITLEGGKYLKLDDEKNIKYIFNEFLNGKSIIKLGKEFNCNKKKISRILHNITYLQSSKDANAYIKQILEYEVIGEPNGCGYLPYGNHKMINGKKVKNTDGLKIAAISKHRAIINLDTFIKAQEKLKTFEGKRAPRISNKSFLAQMVQCKCGANMLIVLGYKRKDGTRKLYFACPDKCGNSFKDVNDMEADTISALKDITFLYNPNISNNNNNNINKDNSKIKKTIIKEIEDNKKKLDGLTDKLALVDSDLTNIIIEKMKKLNIHVNELETKLNLLEKEYLKINYNKEDLKLKEKNRKTFLKQFDYMDMKERQNAIRGVISKLTWDGENIIIS

SEQ ID NO: 6404 - protein, 492 aa, Unknown
  Description of Unknown: Integrase B6405 sequence
  PTHR30461:SF3,cd00338,SM00857,G3DSA:1.10.10.2600,IPR036162, PS51737,G3DSA:3.40.50.1390,IPR006119,IPR038109,PF07508, SSF53041,IPR011109,PTHR30461,PS51736,Coil, PF00239
MAYAMYLRKSRIDEEAGLENTLSKHETMLRDMAANMGIHVDERHIYREIVSGESIDARPQMQRLLKAVEMGLYTGVLCVELERLSRGNGEDQARILRTFQFSGTKILTLNKVYDLAGDDEFDEEFFEFGLFMSRREYKTIKRRLLRGRLQAQKDGYFIGSVPPYGYGKRKDGKGWTLCPDPHESHIVRLIFDRYAQGAKINDILRELQASGVKQRTGNDFTRTRIGEILRNRTYLGELQTKRKIKNRRIIDGEIKETYIRNSGMEYVQGRHEPIVSTDTFDQCAARLRTMETRTRYAHTNRNPLASLVVCSQCGKTMQRTNGAQAEYLICKTFGCTTKSTKLDIVERLTVDAIQAELERLTYVWSGYETEAKDNDDEMRVLESEIDRRQKMLDRACEAYETGVYDRSTYLQRVQKVNAEKAELTARLEALQAAEPERDIKRIPVLSKALDEYWTLDSEDRNRLLKGMAERIEYEKTERGTGLNPRLRVTLRI

SEQ ID NO: 6405 - protein, 492 aa, Unknown
  Description of Unknown: Integrase B6406 sequence
  PTHR30461:SF3,SM00857,G3DSA:1.10.10.2600,IPR036162,PS51737, G3DSA:3.40.50.1390,IPR006119,IPR038109,PF07508,IPR011109, SSF53041,PTHR30461,PS51736,cd00338,PF00239
MNVAMYLRKSRADENNPLETLERHKEILLSYAKDNNLTVIDIFEEVISGGMLYNRTEMLKLLDAIPSHIYDAVLCIDLDRLGRGSAADSEKIFDVLKENDVKIITLKKIYDLNNEYDEDYSEFEMFMARKELKFITRRMNRGRIKSINDGCFVSGAPFGYRNAVINKKHTLEVYEPEAKYVRMIFDMYVNQSMGITSISRQLANLGVLSKKNTPLHPTTIARMLRNHTYIGKIVWNKSKSVKGKNTQEKTSKNDWLYVPGLHEPIIDEDTFNKAQDIINLKYKPPMRTGTLQNPFAGLLKCANCGRAIVINTSNETVEKYRLCCRTLGCNKASALSIVEDKVFEVLTKEFKDIELSLKNIRQSHNKDKLSCLDTIATLETELKKLDKQQLRLYDLLEQEVYTKELFLERNNAISDRRKKINATIAQEREKFKLVDTSSIEERLPLLRELLTNYHSLSAAEKNSILKNFVKKIEYKREKSAPEGDIFLKIYYK

SEQ ID NO: 6406 - protein, 492 aa, Unknown
  Description of Unknown: Integrase B6407 sequence
  PTHR30461:SF3,SM00857,G3DSA:1.10.10.2600,IPR036162,PS51737, G3DSA:3.40.50.1390,IPR006119,IPR038109,PF07508,SSF53041, IPR011109,PTHR30461,PS51736,cd00338, PF00239
MNVAMYLRKSRADENNPLETLERHKEILLSYAKDNNLTVIDIFEEVISGGMLYNRTEMLKLLDAIPSHIYDAVLCIDLDRLGRGSAADSEKIFDVLKENDVKIITLKKIYDLNNEYDEDYSEFEMFMARKELKFITRRMNRGRIKSINDGCFVSGAPFGYRNAVINKKHTLEVYEPEAKYVRMIFDMYVNQSIGITSISRQLANLGVLSKKNTPLHPTTIARMLRNHTYIGKIVWNKSKSVKGKNTQEKTSKDDWLYVPGLHEPIIDEDTFSKAQDIINLKYKPPMRTGTLQNPFAGLLKCANCGRAIVINTSNETVEKYRLCCRTLGCNKASALSIVEDKVFEVLTKEFKDIELSLKNIRQSHNKDKLSCLDTIATLETELKKLDKQQLRLYDLLEQEVYTKELFLERNNAISDRRKKINATISQEREKFKLVDTSSVEERLPLLRELLTNYHSLSAAEKNSILKNFVKKIEYKREKSAPEGDIFLKIYYK

SEQ ID NO: 6407 - protein, 492 aa, Unknown
  Description of Unknown: Integrase B6408 sequence
  PTHR30461:SF3,IPR036162,PS51737,IPR011109,PTHR30461, PS00397,PF00239,G3DSA:1.10.10.2600,IPR006119,SSF53041, cd00338,SM00857,IPR025827,IPR038109,PS51736, IPR006118,PF13408,G3DSA:3.40.50.1390,PF07508,Coil
MKFKNVALYVRVSTDIQVDGYSIDEQIERLEKYCDANRWIIYNKYIDPGYSGSNMDRPGLTDLVKDIRRKKIDLVLVYKLDRLSRSQKDTLYLIEEEFLPNGVDFISITENFDTSSPFGRAMIGILSVFAQLERENIKHRLAMGHIGRAKAGYWRAGSNPPIGYDYIDGMLIPNEYEALQVKTIFKMFLEGETIHGITRYMNKHFTNKYSSYADAGQTGVILRNTLYIGKIKYKGVEYDGVHEPIIDLDTFERVQKRYKEISGKWSDNYRSPFKAKHLLTGLLYCGNCGARYFAYTQRRIDKETGKQTKKSEKYVYYKCYTRDGNKQMRKADYCKNPTIRVDKLDKAVLDEIKKLKLDPDYMDQIIKSERKEKIEDNTITILKNRLADIESKINKLMDLYTLGTIPISDIGDRVKPLYEEKSKLEIEIADREEEIQEPDTLSVYETRDILDQYVDNIDETDHDLKRELVQSLIKRIEVLPDPDSIKIYWKFV

SEQ ID NO: 6408 - protein, 492 aa, Unknown
  Description of Unknown: Integrase B6409 sequence
  PTHR30461:SF3,SM00857,G3DSA:1.10.10.2600,IPR036162,PS51737, G3DSA:3.40.50.1390,IPR006119,IPR038109,PF07508,IPR011109, SSF53041,PTHR30461,PS51736,cd00338,PF00239
MNVAMYLRKSRADENNPLETLERHKEILLSYAKDNNLTVIDIFEEVISGGMLYNRTEMLKLLDAIPSHIYDAVLCIDLDRLGRGSAADSEKIFDVLKENDVKIITLKKIYDLNNEYDEDYSEFEMFMARKELKFITRRMNRGRIKSINDGCFVSGAPFGYRNAVINKKHTLEVYEPEAKYVRMIFDMYVNQSMGITSISRQLANLGVLSKKNTPLHPTTIARMLRNHTYIGKIVWNKSKSVKGKNTQEKTSKDDWLYVPGLHEPIIDENTFNKAQDIINLKYKPPMRTGTLQNPFAGLLKCANCGRAIVINTSNETVEKYRLCCRTLGCNKASALSIVEDKVFEVLTKEFKDIELSLKNIRQSHNKDKLSCLDTIATLETELKKLDKQQLRLYDLLEQAVYTKELFLERNNAISDRRKKINATIAQEREKFKLVDTSSIEERLPLLRELLTNYNSLSAAEKNSILKNFVKKIEYKREKSAPEGDIFLKIYYK

SEQ ID NO: 6409 - protein, 492 aa, Unknown
  Description of Unknown: Integrase B6410 sequence
  cd00338,SM00857,G3DSA:1.10.10.2600,IPR036162, PS51737,G3DSA:3.40.50.1390,IPR006119,IPR038109, PF07508,IPR011109,SSF53041,PTHR30461, PS51736,Coil,PF00239
MAYAMYLRKSRIDEEAGLENTLSKHETMLRDMAANMGIHVDERYIYREIVSGESIDARPQMQRLLKAVEMGLYTGVLCVELERLSRGNGEDQARILRTFQFSGTKIITLNKVYDLAGDDEFDEEFFEFGLFMSRREYKMIKRRLLRGRLQAQKDGYFVGSVPPYGYGKRKDGKGWTLYPDPGEAQVVRLIFDRYAEGAKINDILRELQASGVRQRTGNEFTRTRIGEILRNRTYLGELQTKRKIKNRRIIDGEIKETYVRNGGMEYVQGRHEPIVSTDAFDQCAARLKTMETRTRHAHTNRNPLASLVVCSQCGKTMQRTNGAQAEYLICKTFGCATKSTKLEIVERMVVDAIQAELERLTYVWSGYETEAKDNDNEMRVLESEIDRRQKMLDRACEAYETGVYDRSTYLQRVQKVNAEKAELTARLEALQAAEPERDIKRIPVLSKALDEYWTLGSEDRNRLLKGMAERIEYEKTERGTGLNPRLRVTLRI

SEQ ID NO: 6410 - protein, 492 aa, Unknown
  Description of Unknown: Integrase B6411 sequence
  PTHR30461:SF3,SM00857,IPR006118,G3DSA:1.10.10.2600,IPR036162, PF13408,IPR025827,G3DSA:3.40.50.1390,Coil,IPR006119, IPR038109,PF07508,IPR011109,SSF53041,PTHR30461, PS00397,cd00338,PF00239
MSELSTNNSQPLEIGAAYIRVSTDDQTELSPDAQLRMILDAAKADGFVIPKEYIFEEKKGISGRKADNRPEFQRMIAIAKSQKPAPFKRLYLWKFSRFARNQEESTFYKGILRKKCGIEIKSISEPIMEGMFGRLIETIIEWFDEYYSFNLSGEVKRGMTEKALREGYQTSPCLGYKAVGDGKPFLINEDTYPIVEYIFQAYHSGRDMTGIARSVNTMGYRTQRGNLFERRSIYRILTNHFYIGEVSWNGITFQGSHETRPAVTSVFDDVQKRITSEYRPKKRREASANAHWLSGMLFCGVCGSSLGFNHSNSQKKRPDFFQCWKYAKGFHPGSCCVSARIAERTVLQSLEKALRNNHLEYEYIPKTESDISGEEIAIKEALERITVKERRIREAYENEIDTLEEYKQNKLRLNAERKELDTALDQLRQKAQQTEAAPPDQAEMMAKVSCVYQILSDPTTNNETKGNALRSICKKIVFDRETRRFTFFFYTS

SEQ ID NO: 6411 - protein, 492 aa, Unknown
  Description of Unknown: Integrase B6412 sequence
  SM00857,G3DSA:1.10.10.2600,IPR036162,PS51737,G3DSA:3.40.50.1390, IPR006119,IPR038109,PF07508,IPR011109,SSF53041, PF00239,PTHR30461,PS51736,Coil,cd00338
MAYAMYLRKSRIDEEAGLENTLSKHETMLRDMAARMGIHIDEMNIYREIVSGESIDARPQMQRLLKAVEMGLYTGVLCVELERLSRGNGEDQARILRTFQFSGTKILTLNKVYDLAGDDEFDEEFFEFGLFMSRREYKTIKRRLLRGRLQAQKDGYFIGSVPPYGYSKRKDGKGWTLCPDPHESHIVRLIFDRYAQGAKINDILRELQASGVKQRTGNDFTRTRIGEILRNRTYLGELQTKRKIKNRRIIDGEIKETYIRNSGMEYVQGRHEPIVSADTFDQCAARLRTMETRTRYAHTNRNPLASLIVCTQCGKTMQRTNGAQAEYLICKTFGCTTKSTKLDIVERLTVDAIQAELERLTYVWAGYETKANDNTNELQVLEAEIDKRQKMLERACEAYETGIYDRTTYLQRVQKVNAEKAELLARLETLQDSEPEHDLKRIPVLSKALDEYWALDSEDRNRLLKGMAERIEYEKTERGTGLNPRLRVTLRI

SEQ ID NO: 6412 - protein, 492 aa, Unknown
  Description of Unknown: Integrase B6413 sequence
  SM00857,G3DSA:1.10.10.2600,IPR036162,PF13408, PS51737,G3DSA:3.40.50.1390,IPR025827,IPR006119, IPR038109,PF07508,SSF53041,IPR011109, PTHR30461,Coil,PS51736,cd00338,PF00239
MNIQEIPTTRKEKPRVCAYVRVSTDSEAQEDSFAFQSNYWQRRFESDESVEYIGLFSDEGIGGAFMKKRDGLKRMFQKVRNGEIDRIYTKSVSRFARNKVELMEVVREFRDIGVEIIFESENIHTLDPKCGLILTVMASLAEEELLSMSQNQKWAARKRFANGSVELARILGYDMVDGKLVINEKEAVIVRRIFELYLQGNSFRTICHILENEGYTPMHGGRWSKSTITGMLRNEKYCGDSIMQKSYSTMKVQKYNYGELPKYYVQDNHEPIVSREDYQKAQEIMIARGNKYRPRGSPTALYPLSGKLICGECGTSFKRKTSAHGTPYMCIKWTCRKKDFYGVKECTSHDIKDEVVTRLLIEAYNESLDANNDVNGITEQEEVLRKLIANEQKLRQLRAKGYISESKCREETDKILIKIKEQETLIKNLRTRDMVKGKYKKSDEMTEQMAEFLVKATVKDWKITFEFQNGYKTTKEYTNGRAGNVNGKLCKH

SEQ ID NO: 6413 - protein, 492 aa, Unknown
  Description of Unknown: Integrase B6414 sequence
  PTHR30461:SF3,SM00857,G3DSA:1.10.10.2600,IPR036162,PS51737, G3DSA:3.40.50.1390,IPR006119,IPR038109,PF07508,SSF53041, IPR011109,PTHR30461,PS51736,cd00338,PF00239
MNVAMYLRKSRADENNPLETLERHKEILLSYAKDNNLTVIDIFEEVISGGMLYNRTEMLKLLDAIPSHIYDAVLCIDLDRLGRGSAADSEKIFDVLKENDVKIITLKKIYDLNNEYDEDYSEFEMFMARKELKFITRRMNRGRIKSINDGCFVSGAPFGYRNAVINKKHTLEVYEPEAKYVRMIFDMYVNQSMGITSISRQLANLGVLSKKNTPLHPTTIARMLRNHTYIGKIVWNKSKSVKGKNTQEKTSKDDWLYVPGLHEPIIDEDTFNKAQDIINLKYKPPMRTGTLQNPFAGLLKCANCGRAIVINTSNETVEKYRLCCRTLGCNKASALSIVEDKVFEVLTKEFKDIELSLKNIRQSHNKDKLSCLDTIATLETELKKLDKQQLRLYDLLEQEVYTKELFIERNNAISDRRKKINATIAQEREKFKLVDTSSIEERLPLLRELLTNYNSLSAAEKNSILKNFVKKIEYKREKSAPEGDIFLKIYYK

SEQ ID NO: 6414 - protein, 492 aa, Unknown
  Description of Unknown: Integrase B6415 sequence
  PTHR30461:SF3,IPR036162,PS51737,IPR011109,PTHR30461, PS00397,PF00239,G3DSA:1.10.10.2600,IPR006119,SSF53041, cd00338,SM00857,IPR025827,IPR038109, IPR006118,PF13408,G3DSA:3.40.50.1390,PF07508,Coil
MSQLSTSNAQPLEIGAAYIRVSTDDQTELSPDAQLRMILDAAKADGFVIPKEYIFEEKKGISGRKADNRPEFQRMIAIAKSQKPAPFKRLYLWKFSRFARNQEESTFYKGILRKKCGIEIKSISEPIMEGMFGRLIETIIEWFDEYYSFNLSGEVKRGMTEKALREGYQTSPCLGYKAVGDGKPFVIDADTYPIVEYIFQAYHSGRDMTGIARSVNTMGYRTRRGNPFERRSIYRILTNPFYTGEVTWNGITFHGTHETRPSITSVFDDVQKRITSEYRPKQRREASANAHWLSGMLFCGVCGSSLGFNRSNDQKKRPDFFQCWKYAKGFHPGSCCVSARIAERTVLRSLEEALGNNRLEYEHIPKTENDISEEEIAIKEALERITVKERRIREAYENEIDTLEEYKQNKLRLNAERKELENALDQLRQKAQQTEAAPPDQAEMMAKVSCVYQTLSDPTADNETKGNALRSLCEKIVFDRETRSFTFFYYTS

SEQ ID NO: 6415 - protein, 492 aa, Unknown
  Description of Unknown: Integrase B6416 sequence
  PTHR30461:SF3,SM00857,G3DSA:1.10.10.2600,IPR036162,PS51737, G3DSA:3.40.50.1390,IPR006119,IPR038109,PF07508,IPR011109, SSF53041,PTHR30461,PS51736,cd00338,PF00239
MNVAIYLRKSRADENNPLETLERHKEILLSYAKDNNLTVIDIFEEVISGGMLYNRTEMLKLLDAIPSHIYDAVLCIDLDRLGRGSAADSEKIFDVLKENDVKIITLKKIYDLNNEYDEDYSEFEMFMARKELKFITRRMNRGRIKSINDGCFVSGAPFGYRNAVINKKHTLEVYEPEAKYVRMIFDMYVNQSMGITSISRQLANLGVLSKKNTPLHPTTIARMLRNHTYIGKIVWNKSKSVKGKNTQEKTSKDDWLYVPGLHEPIIDEDTFNKAQDIINLKYKPPMRTGTLQNPFAGLLKCANCGRAIVINTSNETVEKYRLCCRTLGCNKASALSIVEDKVFEVLTKEFKDIELSLKNIRQSHNKDKLSCLDTIATLETELKKLDKQQLRLYDLLEQEVYTKELFLERNNAISDRRKKINATIAQEREKFKLVDTSSIEERLPLLRELLTNYHSLSATEKNSILKNFVKKIEYKREKSAPEGDIFLKIYYK

SEQ ID NO: 6416 - protein, 492 aa, Unknown
  Description of Unknown: Integrase B6417 sequence
  SM00857,G3DSA:1.10.10.2600,IPR036162,PF13408, IPR025827,G3DSA:3.40.50.1390,PS51737,IPR006119, IPR038109,PF07508,SSF53041,IPR011109, PTHR30461,Coil,PS51736,cd00338,PF00239
MNIQEIPTTRKEKPRVCAYVRVSTDSEAQEDSFAFQSNYWQKRFASDESVEYVGLFSDEGIGGAFMKKRDGLKRMFQKVRNGEIDRIYTKSVSRFARNKVELMEIVREFRDIGVEIIFESENIHTLDPKCGLILTVMASLAEEELISMSQNQKWAARKRFANGSVELARILGYDMVDGKLVINEKEAVIVRRIFELYLQGNSFRTICHILENEGYTPMHGGRWSKSTITGMLRNEKYCGDSIMQKSYSVMKVQKYNYGELPKYYVQDDHEPIVSREDYQKAQEIMMARGNKYRPRGSPTTLYPLSGKLICGECGTSFKRKTSAHGTPYMCIKWTCRKKDVYGVKECTSHDIKDEVVTRLLIEAYNESIDANNEVNGVTEQEEVLRKLIANEQELRQLRAKGYISESKFREETDKILIKIKEQETLIKNLQTRDMVKGKYKKSDELTEQMAEFLVKATVKDWTITFEFQNGYKATKEYTNGRAGNVNGKLCKH

SEQ ID NO: 6417 - protein, 492 aa, Unknown
  Description of Unknown: Integrase B6418 sequence
  PTHR30461:SF3,SM00857,G3DSA:1.10.10.2600,IPR036162,G3DSA:3.40.50 .1390,IPR006119,IPR038109,PF07508,IPR011109,SSF53041, PTHR30461,cd00338,PF00239
MNVAMYLRKSRADENNPLETLERHKEILLSYAKDNNLTVIDIFEEVISGGMLYNRTEMLKLLDAIPSHIYDAVLCIDLDRLGRGSAADSEKIFDVLKENDVKIITLKKIYDLNNEYDEDYSEFEMFMARKELKFITRRMNRGRIKSINDGCFVSGAPFGYRNAVINKKHTLEVYEPEAKYVRMIFDMYVNQSMGITSISRQLANLGVLSKKNTPLHPTTIARMLRNHTYIGKIVWNKSKSVKGKNTQEKTSKDDWLYVPGLHEPIIDEDTFNKAQDIINLKYKPPMRTGTLQNPFAGLLKCANCGRAIVINTSNETVEKYRLCCRTLGCNKASALSIVEDKVFEVLTKEFKDIELSLKNIRQSHNKDKLSCLDTIAALETELKKLDKQQLRLYDLLEQEVYTKELFLERNNAISDRRKKINATIAQEREKFKLVDTSSVEERLPLLRELLTNYHSLSAAEKNSILKNFVKKIEYKREKSAPEGDIFLKIYYK

SEQ ID NO: 6418 - protein, 492 aa, Unknown
  Description of Unknown: Integrase B6419 sequence
  SM00857,G3DSA:1.10.10.2600,IPR036162,PF13408, PS51737,G3DSA:3.40.50.1390,IPR025827,IPR006119, IPR038109,PF07508,SSF53041,IPR011109, PTHR30461,Coil,PS51736,cd00338,PF00239
MNIQEIPTKKVEKPRVCAYVRVSTDSDAQEDSFAFQSNYWQNRFENDESVEYIGLFSDEGIGGAFMKKRDGLKRMFQKVRNGEIDRIYTKSVSRFARNKVELMEVVREFRDLGVEIIFESENIHTLDPKCGLILTVMASLAEEELLSMSQNQKWAARKRFANGSVELARILGYDMVDGKLVINEKEAVIVRRIFELYLQGNSFRTICHILENEGYTPMHGGRWSKSTITGMLRNEKYCGDSIMQKSYSTMKVQKYNYGELPKYYIQGDHEAIVSREDYQKAQEIMMARGNKYRPRGSPTALYPLSGKLICGECGTSFKRKTSAHGTPYMCIKWTCRKKDVYGVKECASHDIKDEVVTRLLIEAYNESLDANNDVNGITEQEEVLRKLIANEQELRQLRAKGYISESKCREETDKILIKIKEQETLIKNLQTRDMVKGKYKKSDKLTEQMAEFLVKAIVKEWTITFEFQNGYKATKEYTNGRAGNVNGKLCKH

SEQ ID NO: 6419 - protein, 492 aa, Unknown
  Description of Unknown: Integrase B6420 sequence
  PTHR30461:SF3,SM00857,G3DSA:1.10.10.2600,IPR036162,PS51737, G3DSA:3.40.50.1390,IPR006119,IPR038109,PF07508,IPR011109, SSF53041,PTHR30461,PS51736,cd00338,PF00239
MNVAIYLRKSRADENNPLETLERHKEILLSYAKDNNLTVIDIFEEVISGGMLYNRTEMLKLLDAIPSHIYDAVLCIDLDRLGRGSAADSEKIFDVLKENDVKIITLKKIYDLNNEYDEDYSEFEMFMARKELKFITRRMNRGRIKSINDGCFVSGAPFGYRNAVINKKHTLEVYEPEAKYVRMIFDMYVNQSMGITSISRQLANLGVLSKKNTPLHPTTIARMLRNHTYIGKIVWNKSKSVKGKNTQEKTSKDDWLYVPGLHEPIIDEDTFNKAQDIINLKYKPPMRTGTLQNPFAGLLKCANCGRAIVINTSNETVEKYRLCCRTLGCNKASALSIVEDKVFEVLTKEFKDIELSLKNIRQSHNKDKLSCLDTIATLETELKKLDKQQLRLYDLLEQEVYTKELFLERNNAISDRRKKINATIAQEREKFKLVDTSSIEERLPLLRELLTNYHSLSAAEKNSILKNFVKKIEYKREKSAPKGDIFLKIYYK

SEQ ID NO: 6420 - protein, 492 aa, Unknown
  Description of Unknown: Integrase B6421 sequence
  SM00857,G3DSA:1.10.10.2600,IPR036162,PS51736, PS51737,G3DSA:3.40.50.1390,IPR006119,IPR038109, PF07508,IPR011109,SSF53041,PTHR30461, Coil,mobidb-lite,cd00338,PF00239
MDGLAIERQREDCENLARFRHWEVVETYVDQSISASDKTKKRPAYLQMVADYEAGLLDAIVCYDLDRLTRQPRELEDWIDRAESRGLLLVTANGDADLSTDGGRMYARIKAAVARAEVERKGARQSRAHVQRARQGRPPKGVRPLGYSTSGQIIPHEAEGVRAIYAAFLRGDSLQGIARALSGTQMDGEGLGVPHLPLHSRTVVLERNARREVEGKVPRPVPEDRPWSASTVLGILRNPRYAGYSVYTSKDVRRQETGESRRKALRDNLVKDENGELVLGQWNAIVETDQWWTVQNFLDDPARVTNRSGSTVRKHLGAGLYRCEVCGEPVRTRARYYSCKAGHLNRTRSAIDDFVRALVVERLKRKDLRRRKKQADPEIKDAFSERIAEQRARIARAERDYDAEVIEGEDLARIRKAARAEITRLEAERLTSGTGTVLAPILGTSDPAQAFLEAPMALQRTMIDTLMTVTLRRAQQGKKGFAPESVEIVWKQ

SEQ ID NO: 6421 - protein, 492 aa, Unknown
  Description of Unknown: Integrase B6422 sequence
  PTHR30461:SF3,SM00857,G3DSA:1.10.10.2600,IPR036162,PS51737, G3DSA:3.40.50.1390,IPR006119,IPR038109,PF07508,IPR011109, SSF53041,PTHR30461,PS51736,cd00338,PF00239
MNVAIYLRKSRADENNPLETLERHKEILLSYAKDNNLTVIDIFEEVISGGMLYNRTEMLKLLDAIPSHIYDAVLCIDLDRLGRGSAADSEKIFDVLKENDVKIITLKKIYDLNNEYDEDYSEFEMFMARKELKFITRRMNRGRIKSINDGCFVSGAPFGYRNAVINKKHTLEVYEPEAKYVRMIFDMYVNQSMGITSISRQLANLGVLSKKNTPLHPTTIARMLRNHTYIGKIVWNKSKSVKGKNTQEKTSKDDWLYVPGLHEPIIDENTFNKAQDIINLKYKPPMRTGTLQNPFAGLLKCANCGRAIVINTSNETVEKYRLCCRTLGCNKASALSIVEDKVFEVLTKEFKDIELSLKNIRQSHNKDKLSCLDTIATLETELKKLDKQQLRLYDLLEQEVYTKELFLERNNAISDRRKKINATIAQEREKFKLVDTSSIEERLPLLRELLTNYNSLSATEKNSILKNFVKKIEYKREKSAPEGDIFLKIYYK

SEQ ID NO: 6422 - protein, 492 aa, Unknown
  Description of Unknown: Integrase B6423 sequence
  PTHR30461:SF3,SM00857,G3DSA:1.10.10.2600,IPR036162,PF13408, IPR025827,G3DSA:3.40.50.1390,PS51737,IPR006119,IPR038109, PF07508,SSF53041,IPR011109,PTHR30461, Coil,PS51736,cd00338,PF00239
MIMETYCIYLRKSRADAEAEARGEGETLARHENTLLELAKRKSLTIAHIYREIVSGDSIAARPQMQQMLQDVTDKIYTGVLVMEIERLARGDTIDQGVVAQAFRDSGTKIITPVKTYDPNNEFDEEYFEFSLFMSRREYKTIKRRMQAGRIASIKEGNYIGTNPPYGYRKIQPEPKVKTLEIVPEEAEAVKMMFGMYLSGNGARAIAAHLNQLNIQPRKAAMWEPVSVRKILRNPIYAGKIEWNTKKDGTILSDGLHPAIISLEQFQQAAERHKRTAPQVPTGYTTQNYYHGILFCGNCGHQMKRRPSQNGTPHMLCRRNECRGKVVSSAITKIDEAVLESIKYRISELNLSKAQSGEEQKEKERQKEIQKNQLEKALEKLKKQKEKLHTLLETDVYTVDVFLERSKALEAQKEELEKALHSITDSAQGKEHLAPEQAVIWLQYVLDNFSAADASQKNKMLQRIIKRIEYRKTERMCYRKRDSDMSLRIDFL

SEQ ID NO: 6423 - protein, 492 aa, Unknown
  Description of Unknown: Integrase B6424 sequence
  PTHR30461:SF3,SM00857,G3DSA:1.10.10.2600,IPR036162,PF13408, PS51737,IPR025827,G3DSA:3.40.50.1390,IPR006119,IPR038109, PF07508,IPR011109,SSF53041,PTHR30461,Coil, PS51736,cd00338,PF00239
MNPTKAVIYARYSSDNQREESIEGQIRECTEYAVRNDITILSSYIDRALSARTADRPEFQRMIADSEKGLFDVVLVWKLDRFSRDRYDSAHYKHILKKNGVRVISARENISEGPEGIILESMLEGYAEYYSAELSEKIQRGQKENALKCRSNGGNVPLGYKIGSDGVLEIDPATAPLVEEIFTRYESGETIKAIADSLNERGLRTRKNRPFRVASLSVTLKNRKYIGEYKYADTVIPNGIPAIINPDLFERVQERMLTNKKAPSRTKADEDYLLTTKLFCGDCGRLMAGECGTSGTNSVKYYYYKCGGAKRKLGCKRKAVKKRWIERAAVIATIERVLRDDEIDRIADAIIDLQNREDTTLPALRQQLKDCEQGIENMLNAIQMGILTPSTKTRLEELESRRESLKVSILQAELEKPKYTKEQIVNWINRFKYGNVDDIEYQRQIIDTFINAIYVYDDKLVFTYNFKDGTETVPLKAVEDAFGSDLTQVAPP

SEQ ID NO: 6424 - protein, 492 aa, Unknown
  Description of Unknown: Integrase B6425 sequence
  PTHR30461:SF3,cd00338,SM00857,G3DSA:1.10.10.2600,IPR036162, PS51737,G3DSA:3.40.50.1390,IPR006119,IPR038109,PF07508, IPR011109,SSF53041,PTHR30461,PS51736,Coil, PF00239
MPKKAVIYARFSCNRQREASIEDQLRVCREWCAREGYEVAAEYCDRAVSGRTDDRPEFQRMIANAGESEIVLVYMMDRFSRGEYDAPIYKRELATHGVKLVSALEAIPDSPEGIIYEKLLEGLAACESRKTAIRTKRGMEGNALMCKTNGVRIFGYRRNGDDEYEVDEAQAAWVREAFALRLERMSMNAIAREFARRGLRTRKGNPCGQAMVQQMLRDRRYTGRYEWGGIVREGGMPAIVDEVTFMEVQGIKCRKQRSSENWGDFALAGTALCAECGRNLQGVSGRGRNNVKYEYYSCPGSCVRNIRREELEGSIASALRGLLGDRGEALQIANMVAERADTAEVRARRRQAEDSLRAAERGLRNILNAIEQGVIAPGVNERIAELEEQQARARYDLEAITDERIDPERFADFLQCGTALDDATLLKAFVWQAVVSEDEILVTLNYDKKGEPARLDIQRVRAKLEWCPVCIDSRTEICAVGTVVLLRIPRAA

SEQ ID NO: 6425 - protein, 492 aa, Unknown
  Description of Unknown: Integrase B6426 sequence
  PTHR30461:SF3,SM00857,IPR006118,G3DSA:1.10.10.2600,IPR036162, PF13408,IPR025827,G3DSA:3.40.50.1390,Coil,IPR006119, IPR038109,PF07508,IPR011109,SSF53041,PTHR30461, PS00397,cd00338,PF00239
MSELSTNNSQPLEIGAAYIRVSTDDQTELSPDAQLRMILDAAKADGFVIPKEYIFEEKKGISGRKADNRPEFQRMIAIAKSQKPAPFKRLYLWKFSRFARNQEESTFYKGILRKKCGIEIKSISEPIMEGMFGRLIETIIEWFDEYYSFNLSGEVKRGMTEKALREGYQTSPCLGYKAVGDGKPFLINEDTYPIVEYIFQAYHSGRDMTGIARSVNTMGYRTQRGNPFERRSIYRILTNHFYIGEVSWNGITFQGSHETRPAVTSVFDDVQKRITSEYRPKKRREASANAHWLSGMLFCGVCGSSLGFNHSNSQKKRPDFFQCWKYAKGFHPGSCCVSARIAERTVLQSLEKALRNNHLEYEYIPKTESDISGEEIAIKEALERITVKERRIREAYENEIDTLEEYKQNKLRLNAERKELDTALDQLRQKAQQTEAAPPDQAEMMAKVSCVYQILSDPTANNETKGNALRSICKKIVFDRETRRFTFFFYTS

SEQ ID NO: 6426 - protein, 492 aa, Unknown
  Description of Unknown: Integrase B6427 sequence
  SM00857,G3DSA:1.10.10.2600,IPR036162,PF13408,PS51737, IPR025827,G3DSA:3.40.50.1390,IPR006119,IPR038109,PF07508, IPR011109,SSF53041,PTHR30461,Coil,PS51736, cd00338,PF00239
MNIQEIPTKKVEKPRVCAYVRVSTDSDAQEDSFAFQSNYWQRRFESDESVEYIGLFSDEGIGGAFMKKRDGLKRMFQKVRNGEIDRIYTKSVSRFARNKVELMEIVREFRDIGVEIIFESENIHTLDPKCGLILTVMASLAEEELISMSQNQKWAARKRFANGSVELTQILGYDMIDGKLVINEKEAVIVRRIFELYLQGNSFRTICHILENEGYTPMHGGRWSKSTITGMLRNEKYCGDSIMQKSYSTMKVQKYNYGELPKYYVQDNHEPIVSREDYQKVQEIMIARGNKYRPRGSPTALYPLSGKLICGECGTSFKRKTSAHGTPYMCIKWTCRKKDFYGVKECTSHDIKDEVVTRLLIEAYNESLDANNDVNGITEQEEVLRKLIANEQELRQLRAKGYISENKCREETDKILIKIKEQETLIKNLRTRDMVKGKYKKSDEMTEQMAEFLVKATVKDWKITFEFQNGYKTTKEYTNGRAGNVNGKLCKH

SEQ ID NO: 6427 - protein, 492 aa, Unknown
  Description of Unknown: Integrase B6428 sequence
  PTHR30461:SF3,IPR036162,PS51737,IPR011109,PTHR30461, PS00397,PF00239,G3DSA:1.10.10.2600,IPR006119,SSF53041, SM00857,IPR025827,IPR038109,PS51736,cd03768, IPR006118,PF13408,G3DSA:3.40.50.1390,PF07508,Coil
MAAIDFNNVVDLYIRVSTSEQAEEGYSVAEQEERLRSYCAAYNYTINAIHVDPGFSGASLDRPGIKKVMYDVEHGRCKKVIVWKLDRLSRSQKDTLILLEDVFLANDCNFISLMESFDTSTPFGRCIVGILAAFAQMERENIKIRTMMGRQARIREGHFHGSRCPLGYKFQYAPDGTLLSNDLVVDPYNSKLVQEVYRLSLGGSSISSIAAHMTSTYGCSLYDWSRNTAIRRILSNPIYMGKVKVGNELYPGIHEPLVSETDWYMVAAMLKHNKEQQKRTYAYQISGGAYADNLLTGLLFCGDCGARMYARRVSQNKKKYICHSVAKTSPAMIKSDHCTNRLHPFTVHQLDEMVIDEILKLSLDRPGFDMLCDQPDDSSKSEDKEIYEERLAEVNRQLDRLVKLYQTGLIDLDNISARLGDLNQEKNFLEGNLATINEVTPAEIRETAWKSIQSLQSVLNNGDMDEVHRIIHTLIDKVVVLNTDVTIYWSFC

SEQ ID NO: 6428 - protein, 492 aa, Unknown
  Description of Unknown: Integrase B6429 sequence
  PTHR30461:SF3,cd00338,SM00857,G3DSA:1.10.10.2600,IPR036162, PS51737,G3DSA:3.40.50.1390,IPR006119,IPR038109,PF07508, SSF53041,IPR011109,PTHR30461,PS51736,Coil, PF00239
MAYALYLRKSRADEELGHENTLARHEEMLRDLADRNNIYVDEAHIYREIVSGESIEARPQMQRLLKAVEAGMYTGVLCIELERLSRGNGADQARILKSFQFSDTKIITLTKTYDLAGDDSFDEEFFEFGLFMSRREYKMIKRRLHRGRMQAQQEGYFIGSVPPYGYGKRKDGKGWSLCPDPSEAQVVRLIFDRYAQGARINDILRELQASGVKQRTGNDFTRTRIGEILRNRTYLGELQTKRKIKNRRIIDGEIKETYVRNSGMEYVQGRHEPIVSADIFDQCAARLKTMETRTRHAHTNRNPLASLVVCSQCGKTMQRTNGAQAEYLICKTFGCTTKSTKLDIVERLTVDAIQAELERLTYVWAGYETKANDNTNELQVLEAEIDKRQKMLERACEAYETGVYDRSTYLQRVQKVNAEKAELLARLETLQDSEPGHDLKQIPVLSKALDEYWTLDSENRNRLLKGMAERIEYEKTERGTGLNPRLRVTLKI

SEQ ID NO: 6429 - protein, 492 aa, Unknown
  Description of Unknown: Integrase B6430 sequence
  PTHR30461:SF3,IPR036162,PS51737,IPR011109,PTHR30461, PS00397,PF00239,G3DSA:1.10.10.2600,IPR006119,SSF53041, cd00338,SM00857,IPR025827,IPR038109,PS51736, IPR006118,PF13408,G3DSA:3.40.50.1390,PF07508,Coil
MSDIAVIYARVSSKEQETGGYSLPAQLDFLKEYAKSKGLEVVKVFTESMTAKEAGRIEFNNMLKFAKKQRYGCHVIVEKNDRLLRNEDDEALIINLTVRQGLIDLHLVKDHLILNRYSTPHEIFMFHMMCGMSSMYPRNLSGEIKKGLDKKADLGDYPAKAPIGYKNVRSSKKRSTIEIDPTNAGYVSKIFELYATGMYSYKTLAERISLDGFYPKNKPCSPKLVEKIIINPFYMGEFEFNGKRYHEANHTPIITKELFYTCKKIRERHDNPRKITHDFLYSGLITCSHCGCQLTAEIKKGKYIYYHCTGNKGGTCKRNKYLKEEYIDEHIRTLLEKIQPSKEDAKAIVEKFKEIVNANFDYDKKSIEEIGKKISLLKNRLNKLYIDRLDGMITDEFYREKKNEFQGELDELELKHDNFLAETDILVDMATQIIELCKNAYNYYLRSDNENKRLLLKILCSNFLYDGSNLVIKLKSTVEPMLLGANFNNGGG

SEQ ID NO: 6430 - protein, 492 aa, Unknown
  Description of Unknown: Integrase B6431 sequence
  cd00338,SM00857,G3DSA:1.10.10.2600,IPR036162,PS51737, G3DSA:3.40.50.1390,IPR006119,IPR038109,PF07508,IPR011109, SSF53041,PTHR30461,PS51736,Coil,PF00239
MAYAIYLRKSRIDEEAGIENTLSKHETMLRDMAARMGIHIDETNIYREIVSGESIDARPQMQRLLKAVEMGLYTGVLCVELERLSRGNGEDQARILRTFQFSGTKILTLNKVYDLSSDDDFDEEFFEFGLFMSRREYKTIKRRLLRGRLQAQRDGYFIGSVPPYGYGKRKDGKGWTLCPDPHESHVVRLIFDRYAQGAKINDILRELQASGVKQRTGNDFTRTRIGEILRNRTYLGELQTKRKIKNRRIIDGEIKETYIRNSGMEYVQGRHEPIVSADTFDQCAARLRTMETRTRYAHTNRNPLASLVVCAQCGKTMQRTNGAQAEYLICKTFGCTTKSTKLDIVERLTVDAIQAELERLTYVWAGYETKANDNTNELQVLEAEIDRRQKMLERACEAYETGIYDRSTYLQRVQKVNAEKAELLARLETLQDSEPEHDMKRIPVLSKALDEYWTLDSENRNRLLKGMAERIEYEKTERGTGLNPRLRVTLRI

SEQ ID NO: 6431 - protein, 492 aa, Unknown
  Description of Unknown: Integrase B6432 sequence
  PTHR30461:SF3,IPR036162,PS51737,IPR011109,PTHR30461, PS00397,PF00239,G3DSA:1.10.10.2600,IPR006119,SSF53041, cd00338,SM00857,IPR025827,IPR038109, PS51736,IPR006118,PF13408,G3DSA:3.40.50.1390,PF07508,Coil
MPKAKDFRTACAYIRVSTDKQEELSPDAQKRLLLEYAKKNDLNIINEHIFTENGISGKKADKRPEFMRMIGMAKSKEHPFDVILVWKFSRFARNQEESIVYKSLLKKANVEVVSVSEPLIDGPFGSLIERIIEWMDEYYSIRLSGEVMRGMTEKALHGGYQSTLPLGYSMDKSTGIPVINNDINIVKLIYSEFENGMTCIEIARKLNSLGYKTQHGNNYEYRTIKYILENPFYVGKVRWNRQHHETHTIKDKSEWITASGKHEAVFSEEYFEHIQELMIKRSRPYKARITGTRHWLSGMVKCSNCGASLGIKRSNGSYTYFNCLNYTKGSCNESHYITLKNLENAVYETFIKSINYGGKLQFALRQRNTDEHPVDTAAIIKEQLKRLEWKESRIKTAYMDGIDTLDEYRENKELLMKERKELEDELNKIPDSSDIDYEAQLKKEMLTVYDIITDKNVDDRKKADALRSIVDKIVYDKAKDEIHIFFYLLDPL

SEQ ID NO: 6432 - protein, 492 aa, Unknown
  Description of Unknown: Integrase B6433 sequence
  PTHR30461:SF3,cd00338,SM00857,G3DSA:1.10.10.2600,IPR036162, PS51737,G3DSA:3.40.50.1390,IPR006119,IPR038109,PF07508, IPR011109,SSF53041,PTHR30461,PS51736,Coil, PF00239
MPKRAVIYARFSCNRQREASIEDQLRVCREWCAREGYEVAAEYCDRAVSGRTDDRPEFQRMIANAGESEIVLVYMMDRFSRGEYDAPIYKRELATHGVKLVSALEQIPDSPEGIIYEKLLEGLAACESRKTAIRTKRGMEGNALKCKTNGVRIFGYRRNGDDEYEVDEAQAAWVREAFALRLERMSMNAIAREFARRGLRTRKGNPCGQAMVQQMLRDRRYTGRYEWGGIVREGGMPQIVDEVTFMEVQGIKCRKQRSSENWGDFALAGAALCAECGRNLQGVSGRGRNNVKYEYYSCPGSCVRNIRREELEGSIASALRGLLGDRGEALQIANMVAERADTAEVRARRRQAEDSLRAAERGLRNILNAIEQGVIAPGVNERIAELEEQQARARYDLEAITDERIDPERFADFLQCGTALDDATLLKAFVWQAVVSEDEILVTLNYDKKGEPARLDIQRVRAKLEWCPVCIDSRTEICAVGTVVLLRIPRAA

SEQ ID NO: 6433 - protein, 492 aa, Unknown
  Description of Unknown: Integrase B6434 sequence
  SM00857,G3DSA:1.10.10.2600,IPR036162,PS51737,G3DSA:3.40.50.1390, IPR006119,IPR038109,PF07508,SSF53041,IPR011109, PS50096,PF00239,PTHR30461,IPR000048,PS51736, Coil,cd00338
MSYLWGLVVAIYLRKSRSDIEDEKKALARGEVYDTLQRHRKELLTFARKNKLKIVDIFEEVVSGDTIEARPEVQSLLENAKNGKYDGVLVVAYDRLGRGDKMDQGLIEKTFKESDTLIITPKTTIDLNDEQGEMQADFEGFLSRMEYRKIKGRLRDGKIRAINEGRNISAAAPIGYYVDNEQKLAIDPKEVHIPRMIFELAIQGFGCVQIANQLYEAGIRHRTGNPIGEQTVRHIIGNPKYIGTQFYSRYSKKPTFAPNSHTPIVSEEVFNEANRMIKIRKPSHNPASFPMRNPLSTILRCSKCDSAMVLRRYIVKGKEYNYYYCRKNYCETVSAGMDEVIDDLVKKLNNTLSNVAVEYEEDENSLLPTLENQLSQAQKKLKTFETKRDNIHDLLEDGTYTKDTFIDRLNKVEMEEQQVLDTIASLNEKIALEREKDSNLNRTLPAISNALEVFEQCDARQKNILLKSFIDKIMYTRTSKKEDFKLDISYHQ

SEQ ID NO: 6434 - protein, 492 aa, Unknown
  Description of Unknown: Integrase B6435 sequence
  PTHR30461:SF3,SM00857,G3DSA:1.10.10.2600,IPR036162,PS51737, G3DSA:3.40.50.1390,IPR006119,IPR038109,PF07508,SSF53041, IPR011109,PTHR30461,PS51736,cd00338,PF00239
MNVAMYLRKSRADENNPLETLERHKEILLSYAKDNNLTVIDIFEEVISGGMLYNRTEMLKLLDAIPSHIYDAVLCIDLDRLGRGSAADSEKIFDVLKENDVKIITLKKIYDLNNEYDEDYSEFEMFMARKELKFITRRMNRGRIKSINDGCFVSGAPFGYRNAVINKKHTLEVYEPEAKYVRMIFDMYVNQSIGITSISRQLANLGVLSKKNTPLHPTTIARMLRNHTYIGKIVWNKSKSVKGKNTQEKTSKDDWLYVPGLHEPIIDEDTFNKAQDIINLKYKPPMRTGTLQNPFAGLLKCANCGRAIVINTSNETVEKYRLCCRTLGCNKASALSIVEDKVFEVLTKEFKDIELSLKNIRQSHNKDKLSCLDTIATLETELKKLDKQQLRLYDLLEQEVYTKELFLERNNAISDRRKKINATIAQEREKFKLVDTSSIEERLPLLRELLTNYNSLSATEKNSILKNFVKKIEYKREKSAPEGDIFLKIYYK

SEQ ID NO: 6435 - protein, 492 aa, Unknown
  Description of Unknown: Integrase B6436 sequence
  PTHR30461:SF3,SM00857,IPR006118,G3DSA:1.10.10.2600,IPR036162, PF13408,IPR025827,G3DSA:3.40.50.1390,IPR006119,IPR038109, PF07508,SSF53041,IPR011109,PF00239, PTHR30461,PS00397,Coil,cd00338
MSQLSTSNAQPLEIGAAYIRVSTDDQTELSPDAQLRMILDAAKADGFVIPKEYIFEEKKGISGRKADNRPEFQRMIAIAKSQKPAPFKRLYLWKFSRFARNQEESTFYKGILRKKCGIEIKSISEPIMEGMFGRLIETIIEWFDEYYSFNLSGEVKRGMTEKALREGYQTAPCLGYKAVGDGKPFLIDEDAYSIVEYIFQAYHSGRDMTGIARSVNTIGYRTQRGNLFDRRAIYRILTNHFYTGEVSWNGITFQGTHETRPAVTSVFDDVQKRITSEYRPKKRREASANAHWLSGMLFCGVCGSSLGFNRSNDQKKRPDFFQCWKYAKGFHPGSCCVSARIAERTVLRSLEKALRNNHLEYEHIPKTENDISEEEIAIKEALERITVKERRIREAYENEIDTLEEYKQNKLRLNAERKELENALDQLRQKAQQTEAAPPDQAEMMAKVSCVYQVLSDPTADNETKGNALRSLCEKIVFDRETRSFTFFYYTS

SEQ ID NO: 6436 - protein, 492 aa, Unknown
  Description of Unknown: Integrase B6437 sequence
  cd00338,SM00857,G3DSA:1.10.10.2600,IPR036162,PS51737, G3DSA:3.40.50.1390,IPR006119,IPR038109,PF07508,IPR011109, SSF53041,PTHR30461,PS51736,Coil,PF00239
MAYAMYLRKSRIDEEAGLENTLSKHETMLRDMAARMGIHIDETNIYREIVSGESIDARPQMQRLLKAVEMGLYTGVLCVELERLSRGNGEDQARILRTFQFSGTKILTLNKVYDLAGDDEFDEEFFEFGLFMSRREYKTIKRRLLRGRLQAQRDGYFIGSVPPYGYSKRKDGKGWTLCPDPHESHIVRLIFDRYAQGAKINDILRELQASGVKQRTGNDFTRTRIGEILRNRTYLGELQTKRKIKNRRIIDGEIKETYIRNSGMEYVQGRHEPIVSADTFDQCAARLRTMETRTRYAHTNRNPLASLIVCTQCGKTMQRTNGAQAEYLICKTFGCTTKSTKLDIVERLTVDAIQAELERLTYVWAGYETKANDNTNELQVLEAEIDKRQKMLERACEAYETGIYDRTTYLQRVQKVNAEKAELLTRLETLQDSEPEHDLKRIPVLSKALDEYWTLDSENRNRLLKGMAERIEYEKTERGTGLNPRLRVTLRI

SEQ ID NO: 6437 - protein, 492 aa, Unknown
  Description of Unknown: Integrase B6438 sequence
  PTHR30461:SF3,SM00857,G3DSA:1.10.10.2600,IPR036162,PS51737, G3DSA:3.40.50.1390,IPR006119,IPR038109,PF07508,SSF53041, IPR011109,PTHR30461,PS51736,cd00338, PF00239
MNVAMYLRKSRADENNPLETLERHKEILLSYAKDNNLTVIDIFEEVISGGMLYNRTEMLKLLDAIPSHIYDAVLCIDLDRLGRGSAADSEKIFDVLKENDVKIITLKKIYDLNNEYDEDYSEFEMFMARKELKFITRRMNRGRIKSINDGCFVSGAPFGYRNAVINKKHTLEVYEPEAKYVRMIFDMYVNQSMGITSISRHLANLGVLSKKNTPLHPTTIARMLRNHTYIGKIVWNKSKSVKGKNTQEKTSKDDWLYVPGLHEPIIDEDTFNKAQDIINLKYKPPMRTGTLQNPFAGLLKCANCGRAIVINTSNETVEKYRLCCRTLGCNKASALSIVEDKVFEVLTKEFKDIELSLKNIRQSHNKDKLSCLDTIATLETELKKLDKQQLRLYDLLEQEVYTKELFIERNNAISDRRKKINATIAQEREKFKLVDTSSIEERLPLLRELLTNYHSLSAAEKNSILKNFVKKIEYKREKSAPEGDIFLKIYYK

SEQ ID NO: 6438 - protein, 492 aa, Unknown
  Description of Unknown: Integrase B6439 sequence
  PTHR30461:SF3,cd00338,SM00857,G3DSA:1.10.10.2600,IPR036162, PS51737,G3DSA:3.40.50.1390,IPR006119,IPR038109,PF07508, IPR011109,SSF53041,PTHR30461,PS51736,Coil, PF00239
MAYAIYLRKSRIDEEAGIENTLSKHETMLRDMAARMGIHIDETNIYREIVSGESIDARPQMQRLLKAVEMGLYTGVLCVELERLSRGNGEDQARILRTFQFSGTKILTLNKVYDLAGDDEFDEEFFEFGLFMSRREYKTIKRRLLRGRLQAQKDGYFIGSVPPYGYGKRKDGKGWTLCPDPSEAQVVRLIFDRYAEGAKINDILRELQASGVKQRTGNDFTRTRIGEILRNRTYLGELQTKRKIKNRRIIDGEIKETYIRNSCMEYVQGRHESIVSADTFDQCAARLRTMETRTRHAHTNRNPLASLVVCSQCGKTMQRTNGAQAEYLICKTFGCTTKSTKLDIVERLTVDAIQAELERMTYVWAGYETKANDNNNELQVLEAEIDKRQKMLERACEAYETGIYDRTTYLQRVQKVNAEKAELLARLETLKDSEPEHDLKRIPVLSKALDEYWTLDSENRNRLLKGMAERIEYEKTERGTGLNPRLRVTLRI

SEQ ID NO: 6439 - protein, 492 aa, Unknown
  Description of Unknown: Integrase B6440 sequence
  PTHR30461:SF3,IPR036162,PS51737,IPR011109,PTHR30461, PS00397,PF00239,G3DSA:1.10.10.2600,IPR006119,SSF53041, SM00857,IPR025827,IPR038109,PS51736,cd03768, IPR006118,PF13408,G3DSA:3.40.50.1390,PF07508,Coil
MAAIDFNNVVDLYIRVSTSEQAEEGYSVAEQEERLRSYCAAYNYTINAVHVDPGFSGASLDRPGIKKVMYDVEHGRCKKVIVWKLDRLSRSQKDTLILLEDVFLANDCNFISLMESFDTSTPFGRCIVGILAAFAQMERENIKIRTMMGRQARIRDGHFHGSRCPLGYKFQYAPDGTLLSNDLVVDPYTSKLVQEVFRLFLSGSSLSSISAHMASTYGCSMYDWSNSTAIRRILSNPIYMGKVRVGNELYPGIHEPLVSETDWYMVAAMLKHNKEQQKRTYAYQISGGAYADNLLTGLLFCGDCGARMYARRVSQNKKKYICHSVAKTSPAMIKSDHCTNRLHPFTVHQLDEMVINEILKLSLDRPGFDMLCDQPDESSKSEDKEIYEERLAEVNRQLDRLVKLYQTGLIDLDNISARLGDLNQEKNFLEGNIATINEITPADLRETAWKSIQSLQSVLDNGDMDEVHRIIHTLTDKVVVLNANVTIYWSFC

SEQ ID NO: 6440 - protein, 491 aa, Unknown
  Description of Unknown: Integrase B6441 sequence
  PTHR30461:SF3,IPR036162,PS51737,IPR011109,PTHR30461, PS00397,PF00239,G3DSA:1.10.10.2600,IPR006119,SSF53041, cd00338,SM00857,IPR025827,IPR038109,PS51736, IPR006118,PF13408,G3DSA:3.40.50.1390,PF07508,Coil
MKQLNFRECALYVRVSTDKQDELSPDAQIRLGTEYAKKNGLHVSKEHTYIEHGISGRKADKRPEFLRMIAAAKSEEHPFDVILVWKFSRFARNQEESIVYKSLLRKKCGVDVVSVSEPIIDGPFGGLIERIIEWMDEYYSVRLSGEVTRGMTEKALRGGYQARPPLGYRIETKKEPPVVVPEEAKIVRSVFDMYVNQHKGFFDIARELNRLGCKTSHGKAFERRSIEYIIQNPTYCGMIRWNRTTNETNVIKPKDEWIITEGNHEAIISKELFEQAQKRFESEYRPRGARPSSTYRHWLSGLMKCPACGRTMTAKHTAGYCYFTCYGYSKGKCLAKQSISSRIIEKSVLQSISEVLADSNLSFRLVKQESKEEINRESLILDQLSRIAGKERRIRDAYRDGIDTLEEYKENKAILVKEQETLEAELEQLRSVSPKEDDPTSAMLARVSSVYEILMSDADDTLKNEMLKTIVEKIVYDKNTDTLKVYYFYNP

SEQ ID NO: 6441 - protein, 491 aa, Unknown
  Description of Unknown: Integrase B6442 sequence
  PTHR30461:SF3,IPR036162,PS51737,IPR011109,PTHR30461, PS00397,PF00239,G3DSA:1.10.10.2600,IPR006119,SSF53041, cd00338,SM00857,IPR025827,IPR038109,PS51736, IPR006118,PF13408,G3DSA:3.40.50.1390,PF07508,Coil
MRFLNVALYVRVSTDIQVDGYSIDEQLERLEKYCDAKDWIIYNKYIDPGFTGSNINRPGLTKLLQDIHKGKIDLVLVYKLDRLSRSQKDTLYLIEEEFLPNNVDFISMTENFDTSTPFGKAMIGILSVFAQLERENIKTRLAMGHVGRAKAGYWRGGSNPPIGYDFINGKLIINEYEALQVRTIYKMFLDGETIHGITRYMSEHFTNRYSNYRTPGQTGVILRNRLYIGKIKYKGVEYDGVHEPIIDIDTFERVQKRYKEISGKWSDHYRSPFKAKHLLTGLLYCGNCGARYFACTQRRKDKTTGKYIKSTESYVYYKCYTRDGNKSMRKGDYCKNPTIRVDKLDKVILDEIKKLKLDPDRLERIINTESKEKVENTELTVLRNKLDNTQSKIDKLMDLYTIGTIPITEIGDRIKPLYEEKEKIELEINTRENELQEPHGLSISETRDILDQFADIDNLDHDLKRELVQSLIKRIEVLPEPDSIKIYWKFV

SEQ ID NO: 6442 - protein, 491 aa, Unknown
  Description of Unknown: Integrase B6443 sequence
  PTHR30461:SF3,cd00338,SM00857,IPR006118,G3DSA:1.10.10.2600, IPR036162,PS51737,G3DSA:3.40.50.1390,IPR006119,IPR038109, PF07508,IPR011109,SSF53041,PTHR30461,PS00397, PS51736,Coil,PF00239
MIKTACAYVRVSTDKQEELSPDSQIREIKEYAARNNMLISKIYVEEHGISGKNASKRPAFQEMIATCKEKSHPYDVVLVWKFSRFARNIDESTYYKSILRKKCNVDVQSVSEPIIEGMYGRLIEMVIEWSDEFYLYNLSGEVHRGMTENALRGGYNSNAPLGYVKKKGCIPEIDPPKADIVKHIFDMYTKDDMAMADIAAKLNALGYRSNRGSKFELKTVAYILDNPFYIGKIRWNYYDRNNHQRKNEDEIIIVDGKHEPIITDEQWGLAQAKRCKARKHGGFGRKRTSVTAGHWLSGMIACSECGSNLGYHRDVHFFNCWKHAKGVCRSTSSITEAKAVQEVLSALQSLAASDFYYIYSEQAGAETDDLEVKRTQSELDSLSVKLKRVKEAYRNGVDTLDEYRENKQLIMARQNELEAKLATLETPIAPKQNRKKVDFGEIIRLIQDESVTTEQKATAIRKIFDHFEWNREKQQFSAFLSDDIMSTQCSS

SEQ ID NO: 6443 - protein, 491 aa, Unknown
  Description of Unknown: Integrase B6444 sequence
  PTHR30461:SF3,cd00338,SM00857,IPR006118,G3DSA:1.10.10.2600, IPR036162,PS51737,G3DSA:3.40.50.1390,IPR006119,IPR038109, PF07508,IPR011109,SSF53041,PTHR30461,PS00397, PS51736,Coil,PF00239
MIKTACAYVRVSTDKQEELSPDSQIREIKEYAARNNMLISKIYVEEHGISGKNASKRPAFQEMIATCKEKSHPYDVVLVWKFSRFARNIDESTYYKSILRKKCNVDVQSVSEPIIEGMYGRLIEMVIEWSDEFYLYNLSGEVHRGMTENALRGGYNSNAPLGYIKKKGCIPEIDPPKADIVKYIYDMYTKDDMAMADIAAKLNALGYRSNRGSKFELKTVAYILDNPFYIGKIRWNYYDRNNHQRKNEDEVIIVDGKHEPIITDEQWGLAQAKRCKARKHGGFGRKRTSVTAGHWLSGMIACSECGSNLGYHRDVHFFNCWKHAKGVCRSTSSITETKAIQEVLSALQSLAASDFYYIYSEQAGTETDDLEVKRTQSELDSLSVKLKRVKEAYRNGVDTLDEYRENKQLIMARQNELEAKLATLETPIAPKQNRKKVDFGEIIRLIQDESVTTEQKATAIRKIFDHFEWNREKQQFSAFLSDDIMSTQCSS

SEQ ID NO: 6444 - protein, 491 aa, Unknown
  Description of Unknown: Integrase B6445 sequence
  cd03768,SM00857,IPR036162,PF13408,PS51737, G3DSA:3.40.50.1390,IPR025827,IPR006119,PF07508,SSF53041, IPR011109,PTHR30461,PS51736,Coil,PF00239
MIAIYTRQSIDKKDSISIETQVEMCQKEIKTQGLEFKIYKDKGFSGKNTDRPAFQNLMADVKQGNIDTIVVYRLDRISRSVLDFANIIDILQKHNVSFISASEKFDTSTPVGKAMLYIVMVFAQLERETIAERVKDNYYQRGETGAWGGGIAPFGYSNTKTTIGGKKVATIQQNDDIELVKQIFYEYANTDKSLGNIASDLTEKLNVMWNNIKLSRMLHSPAYVQADVDIYNYYVAKGCVIESDVSLFNGVNGLNVYGKRDRGANKYNNLKDHHIAVGFHSGVIPSDLWLKCQYKLDKNIQIKNNGKGKHTWLTGLIKCGYCGRAMTVKTYKETKYFNCSGRAIKMCDAEVVTHYVSDIEELVHQKMINYVENFSDCKIKDIENDNRQEINSLKAELVQIEKDIENIVNNLAVANTTLMEYANKKIEELDNKKKQTLDKINKLNVTKDVELKIPNLDGWNSWDIEAKRDVAKTLIDKVYVYKDRIHIKWAY

SEQ ID NO: 6445 - protein, 491 aa, Unknown
  Description of Unknown: Integrase B6446 sequence
  PTHR30461:SF3,SM00857,G3DSA:1.10.10.2600,IPR036162,PF13408, IPR025827,PS51737,G3DSA:3.40.50.1390,IPR006119,IPR038109, PF07508,IPR011109,SSF53041,PTHR30461, Coil,PS51736,cd00338,PF00239
MPEALNAVIYARYSSDRQTEQSIEGQLRECYAFAKANDIAVIDTYIDRAISGKTDNRPAFQKMIEDSAKRQFQAVIVYRLDRFTRNRYDSAIYKARLKKNGVKVLSAMENLNGSPESIIMESLLEGMAEYYSVELSQKITRGMRENALKGKALGGQRVLGYKVNSDCYFEIDETTAPVVVDIFKLYSSGKTVKEICDILNARGVKTARGGAFNKNSLHTILTNKKYIGIYKTKYGEIVGGIPAIIDKELFEMVALRMEQNKKAPARAKAEINYLLSTKLFCGKCRSAMVGESGTSKTGKKYYYYACVKKKREKACDKSNVKKDWIEDLVIQRTVTDILKDDVIEKIADRLVELQKAEAAESGTMLYLQNSLAEIQVSIKNIMTAIEKGIITESTKTRLTELEDEKRNVEIEIAKESIARRIISREQIIYWISSFKDGDITSEKYRQQLIDTFVHAVFVYDDKIVITYNYSGENNTATISDLDLSSPPCELG

SEQ ID NO: 6446 - protein, 491 aa, Unknown
  Description of Unknown: Integrase B6447 sequence
  PTHR30461:SF3,cd00338,SM00857,G3DSA:1.10.10.2600,IPR036162, PF13408,PS51737,G3DSA:3.40.50.1390,IPR025827,IPR006119, IPR038109,PF07508,IPR011109,SSF53041,PTHR30461, PS51736,Coil,PF00239
MDIITRLRAAAYGRYSTELQTENSIAYQLEKIREYCLTNDMDICAVYTDEAMSGTNTERPGFQNLIAAAHRKEFDAVVIYDISRCSRDIGDWFAFRKEMAALGIKVISATQQLGDIVDPNSFLVEFVTAALGQHQVLDARKKSIDGVAVRAKQGVFLGGIPPLGYDVVDQQYVINPREAEAVRRIFSMYADGKSYNYIINQLKDFRGKRGQPLGKNSLNSILKNERYIGVYTWNKRKVKLMRKWAGGALNPDCVRIEGIIPKIIDIKTWERVQKRMCDNKRRASAKAKRTYLLSGLIECAKCGATYVGHTSTNKKGYQSRYYVCGNKYRTHNCDAKNINADELEMFVSQQLKVYLLNTDFSSEAKLIADQINNASPDLSAEKSELAEINNKIKNGVNALLSGMVIPELEEEVNRLRVRKSELEDIIAAHSQKRTTIDPKAIEMLFNDSVHDYSDGNMARVIKAHITKIYANIDGSFTVNIGVHTSGCGGRI

SEQ ID NO: 6447 - protein, 491 aa, Unknown
  Description of Unknown: Integrase B6448 sequence
  PTHR30461:SF3,IPR036162,PS51737,IPR011109,PTHR30461, PS00397,PF00239,G3DSA:1.10.10.2600,IPR006119,SSF53041, cd00338,SM00857,IPR025827,IPR038109,PS51736, IPR006118,PF13408,G3DSA:3.40.50.1390,PF07508,Coil
METKYAFGYVRVSTGKQDELSPDSQAKLLKDYAKSNGYVVSKIFYEVGISGRKADKRPEFQKMISLAKSSDHPADAILVWKYSRFARNQEESIVYKSLLKKKHNVDVISVSEPLVDGPFGSLIERIIEWMDEYYSVRLSGEVTRGMKEKAERGGYQARPPLGYKIVTHKEPPVIVPEEAEIVKLIFEKYANENLGIFEIARLLNMHNFKTSHGKEFERRSIEYILQNPTYCGMIRWNRTINESNEIRPESEWIVTDGEHPAIISKELFDKAQERYKREYRPRGARPVSTYKHWLSGVVKCPACGRTMTANTIRNNTRVYSHFRCYGYTKGKCMANNSISSIKLEPAVLESIKTVLNNGKITYRKIEAKTDDTVDLKTILEDQIKKIDVKLQRIKEAYMNGIDTMEEYKENKQAVQEEKQHLEKQLSEIKEEKNNSKNDDKDMLLRVKNVYDILSSDSVDVMTKNEVLRSVVEKIVYEKDKDLLKVYYYYMP

SEQ ID NO: 6448 - protein, 491 aa, Unknown
  Description of Unknown: Integrase B6449 sequence
  PTHR30461:SF3,SM00857,G3DSA:1.10.10.2600,IPR036162,PF13408, IPR025827,G3DSA:3.40.50.1390,PS51737,IPR006119,IPR038109, PF07508,IPR011109,SSF53041,PTHR30461,Coil, PS51736,cd00338,PF00239
MNKKINAVGYARYSTEFQTDNSIAYQTTAIQEYCEKHDINLLKVYSDEAMTGTNTNRPAFQQMLAAAEQHLFDAVIIYDISRGSRNVVDWFSFRQEMARIDIQVISCNQHLGDILDPNTYLTELITAGIGQHMVLDTRKKSIDGKNERAKKGIFCGGNPPLGYDINDGNYIINPKEAKIVQTIFTMYADGHSYNEILKELDGAVGKAGRPLGKNSLYSILKNERYIGVYTWNKRKIKIMGKWAGGRPNPDIVRIENAIPPIIDETIWRKVEERMKDNSRRATSKSCRHNYLLSGLIQCDKCGATFVGHTSTNQKKISTPYYICGNKYRTHTCCTKNINADRLETFVVMQIKHYLKTADFETLADEICKQVNSAAPDVSAEKKELSEIETKITNGINAILGGVNIPELKDEVDKLRIRKSELEDVITYKEKNKTRTLNRDKLVEMLKESAENIDSTDSNTLIRNFVTKIYAHADGTVTVNLGVHINGCGDWT

SEQ ID NO: 6449 - protein, 491 aa, Unknown
  Description of Unknown: Integrase B6450 sequence
  IPR036162,PS51737,IPR011109,PTHR30461,PS00397, PF00239,G3DSA:1.10.10.2600,IPR006119,SSF53041,cd00338, SM00857,IPR025827,IPR038109,PS51736,IPR006118, PF13408,G3DSA:3.40.50.1390,PF07508,Coil
METKYAFGYVRVSTGKQDELSPDSQAKLLKDYAKSHGYVVSKIFYEVGISGRKADKRPEFQKMIGLAKASDHPADAILVWKYSRFARNQEESIVYKSLLKKKHNVDVISVSEPLVDGPFGSLIERIIEWMDEYYSVRLSGEVTRGMKEKAERGGYQARPPLGYKIVTHKEPPVIVPEEAEIVKLIFEKYANENLGIFEIARLLNMHNFKTSHGKEFERRSIEYILQNPTYCGMIRWNRTINESNEIRPESEWIVTDGEHPAIISKELFDKAQERYKREYRPRGSRPVSTYKHWLSGVVKCPACGRTMTANTIRNNTRVYSHFRCYGYTKGKCMANNSISSIKLEPAVLESIKTVLNNGKITYRKIEAKTDDTVDLKTILEDQIKKIDVKLQRIKEAYMNGIDTMEEYKENKQAVQEEKQHLEKQLSEIKEEKSNSKDDDEDMLLRVKNVYDILSSDSVDATTKNDVLRSVVEKIIYEKDKDLLKVYYYYMP

SEQ ID NO: 6450 - protein, 491 aa, Unknown
  Description of Unknown: Integrase B6451 sequence
  PTHR30461:SF3,IPR036162,PS51737,IPR011109,PTHR30461, PS00397,PF00239,G3DSA:1.10.10.2600,IPR006119,SSF53041, cd00338,SM00857,IPR025827,IPR038109,PS51736, IPR006118,PF13408,G3DSA:3.40.50.1390,PF07508,Coil
MRFLNVALYVRVSTDIQVDGYSIDEQLERLEKYCDAKDWIIYNKYIDPGFTGSNINRPGLTKLLQDIHKGKIDLVLVYKLDRLSRSQKDTLYLIEEEFLPNNVDFISMTENFDTSTPFGRAMIGILSVFAQLERENIKTRLAMGHVGRAKAGYWRGGANPPIGYDFVDGKLVINEYEAYQVRLMYKMYLEGESIYSIFMYIRKHFTNRYSSYRTAKQIGVILKNRIYIGKIKYKGVEYDGIHEPIIDIDTFEKVQKRYKEISSKWSDHYRSPFKGKYLLTGLLFCGNCGARYFASTQRRKDKTTGKYIKSTESYVYYKCYTRDGNKAMRKADYCKNPTIRVDKLDKVILDEIKKLKLNPDRLEQIINSESEKKVEDVELTILKNKLADTQCKIDKLMELYTIGTIPITEIGDRIKPLYEAKEKIELVIDIRKKKLQEPDKLSISETKDILDQFADIDNLNHNLKRELVQSLIKRIEILPEPDSIKIYWKFV

SEQ ID NO: 6451 - protein, 491 aa, Unknown
  Description of Unknown: Integrase B6452 sequence
  PTHR30461:SF3,IPR036162,PS51737,IPR011109,PTHR30461, PS00397,PF00239,G3DSA:1.10.10.2600,IPR006119,SSF53041, SM00857,IPR025827,IPR038109,PS51736,cd03768, IPR006118,PF13408,G3DSA:3.40.50.1390,PF07508,Coil
MRVICYVRVSTREQAEKGYSVGEQQERLRAYCMAKDWIVEDVITDPGFSGAKLERPGIQRVIQLVQEKKCEAVLVWKLDRLSRSQKDTLYLIEDVFLKNGCAFVSMNENFDTSTAFGRAMIGILSVFAQLEREQIRERMAVGRVGRAKAGLFHGGGFAPIGYDYKTIAEGGEGLVVNEYEAMQVREVFSLYLQGWPVNRIRKYMTARYTTKSGDWGNDTTIRDVLKNPLYIGKINWAKKIYDGKHEPIIDEETFNAAAARLASSQWKRDCSDGLERNSPFHSTHLLGGILWCGRCGARYFASGNYSGKGENRKYWPYYVCYSRAKSAKRMIRDPNCKNDRWPVAKLDKIILDQVRQLIFDPEALERAAGGNQEAPPSERRALLNARRAEAKGQIDRLLDLCQMGTLPAAAVADRLKSLQDEVEGIDTALRELAEDDPAERLEAARATLVGAAEILDNGSLDEKRELVHSLIHRIDLDGENIDIHWSFAPES

SEQ ID NO: 6452 - protein, 491 aa, Unknown
  Description of Unknown: Integrase B6453 sequence
  PTHR30461:SF3,cd00338,SM00857,IPR006118,G3DSA:1.10.10.2600, IPR036162,PS51737,G3DSA:3.40.50.1390,IPR006119,IPR038109, PF07508,IPR011109,SSF53041,PTHR30461,PS00397, PS51736,Coil,PF00239
MIKTACAYVRVSTDKQEELSPDSQIREIKEYAARNNMLISKIYVEEHGISGKNASKRPAFQEMIATCKEKSHPYDVVLVWKFSRFARNIDESTYYKSILRKKCNVDVQSVSEPIIEGMYGRLIEMVIEWSDEFYLYNLSGEVHRGMTENALRGGYNSNAPLGYIKKKGCIPEIDPPKADIVKHIFDMYTKNDIAMADIAAKLNALGYRSNRGSKFELKTVAYILDNPFYIGKIRWNYYDRNNHQRKNEDEIIIVDGKHEPIITDEQWGLAQAKRCKARKHGGFGRKRTSVTAGHWLSGMIACSECGSNLGYHRDVHFFNCWKHAKGVCRSTSSITEAKAVQEVLSALQSLAASDFYYIYSEQAGAETDDLEVKRTQSELDSLSVKLKRVKEAYRNGVDTLDEYRENKQLIMARQNELEAKLATLETPIAPKQNRKKVDFGEIIRLIQDESVTTEQKATAIRKIFDHFEWNREKQQFSAFLSDDIMSTQCSS

SEQ ID NO: 6453 - protein, 491 aa, Unknown
  Description of Unknown: Integrase B6454 sequence
  cd03768,SM00857,IPR036162,PF13408,PS51737, G3DSA:3.40.50.1390,IPR025827,IPR006119,PF07508,SSF53041, IPR011109,PTHR30461,PS51736,Coil,PF00239
MIAIYTRQSIDKKDSISIETQVEMCQKEIKTQGLEFKIYKDKGFSGKNTDRPAFQNLMADVKQGNIDTIVVYRLDRISRSVLDFANIIDILQKHNVSFISASEKFDTSTPVGKAMLYIVMVFAQLERETIAERVKDNYYQRGETGAWGGGIAPFGYSNTKTTIGGKKVATIQQNDDIELVKQIFYEYANTDKSLGNIASDLTEKLNVMWNNIKLSRMLHSPAYVQADVDIYNYYVAKGCVIESDVSLFNGVNGLNVYGKRDRGANKYNNLKDHHIAVGFHSGVIPSDLWLKCQYKLDKNIQIKNNGKGKHTWLTGLIKCGYCGRAMTVKTYKETKYFNCSGRAIKMCDAEVVTHYVSDIEELVHQKMINYVENFSDCKIKDIENDNRQEINSLKAELVQIEKDIENIVNNLAVANTTLMEYANKKIEELDNKKKQTLDKINKLNVTKDVELKIPNLDGWDSWDIEAKRDVAKTLIDKVYVYKDRIHIKWAY

SEQ ID NO: 6454 - protein, 491 aa, Unknown
  Description of Unknown: Integrase B6455 sequence
  cd00338,SM00857,IPR006118,G3DSA:1.10.10.2600, IPR036162,PS51737,G3DSA:3.40.50.1390,IPR006119, IPR038109,PF07508,IPR011109,SSF53041, PTHR30461,PS00397,PS51736,Coil,PF00239
MSTTIKTAAAYIRVSTDRQEELSPDAQRRELKNYAKKNGIMITDIFEDTGISGRNAEKRPAFQKMISYAKSKEHPYDYILVWKFSRFARNQEESIVYKSLLQKNGVEVVSITEPLIDGPFASLIERIIEWMDEYYSIRLASDVKRGMEEKALRGGYQAAPPLGYHMEDHIPVIYEPEAVIVREIYRLAAEGKTSTTIARIINDAGYRTRRGKLFEHRGIVYILQNPFYKGYVRWNYRKHSSYHNNADNDIITTKGLHKPLIDENHWTQVQKIVPFVPGHTGQRRRKSDTLFNHYLCGIMRCPACGANLSFHTNKTYTSFVCWKYSKGMHTNTGNIVAWRCEEALVDSLRKTIDSTSADMTFHATLPDAPLASDMLRQYQDSLAKLEQKEQRIKDAYIEGIDTKEEYKENKFRIAEERDHLKKLIKKEERRCTPHTAAINGTTYISMIKNLLDTLEDESVDVVEKHDAVVQIVDHIEYHRDSDTFDIFYSYS

SEQ ID NO: 6455 - protein, 491 aa, Unknown
  Description of Unknown: Integrase B6456 sequence
  PTHR30461:SF3,cd00338,SM00857,IPR006118,G3DSA:1.10.10.2600, IPR036162,PS51737,G3DSA:3.40.50.1390,IPR006119,IPR038109, PF07508,IPR011109,SSF53041,PTHR30461,PS00397, PS51736,Coil,PF00239
MIKTACAYVRVSTDKQEELSPDSQIREIKEYAARNNMLISKIYVEEHGISGKNASKRPAFQEMIATCKEKSHPYDVVLVWKFSRFARNIDESTYYKSILRKKCNVDVQSVSEPIIEGMYGRLIEMVIEWSDEFYLYNLSGEVHRGMTENALRGGYNSNAPLGYIKKKGCIPEIDPPKADIVKHIYDMYTKDDMAMADIATKLNALGYRSNRGSKFELKTVAYILDNPFYIGKIRWNYYDRNNHQRKNEDEIIIVDGKHEPIITDEQWGLAQAKRCKARKHGGFGRKRTSVTAGHWLSGMIACSECGSNLGYHRDVHFFNCWKHAKGVCRSTSSITETKAIQEVLSALQSLAASDFYYIYSEQAGTETDDLEVKRTQSELDSLSVKLKRVKEAYRNGVDTLDEYRENKQLIMARQNELEAKLATLETPIAPKQNRKKVDFGEIIRLIQDESVTTEQKATAIRKIFDHFEWNREKQQFSAFLSDDIMNTQCSS

SEQ ID NO: 6456 - protein, 491 aa, Unknown
  Description of Unknown: Integrase B6457 sequence
  PTHR30461:SF3,SM00857,G3DSA:1.10.10.2600,IPR036162,PF13408, IPR025827,G3DSA:3.40.50.1390,PS51737,IPR006119,IPR038109, PF07508,IPR011109,SSF53041,PTHR30461,PS51736, cd00338,PF00239
MENTRKCKRAVAYVRVSSGSDAQIHSFEFQSAYWHQELDGNPDVEMVGIYADKGISGRSMYKRPQFLTMMQDARDGKFDVIYTKSISRFGRNTVHLLEAVRELRDLGIAVIFQNENINTLSSTSEVFMTIAAALAEGELEEDSKRQRWSYQDRFQNGWISIGTGMYGYRMVKDNQLEIVEDEAAVVREIYAMYLSGMGTIAISNVLNDRGLKTSRGNPWGTNSILEIISNEKYTGDSLMGKHVRVNGVHMDNTGGRYSKQYMVENTHEAIVSHETFDKAQAERARRKNPKMVGVQHDPHDFTGLIECGVCGMRFNHKVNSSGLKWQNPIWACHNQLKHTKKACDNTRIKEDVLCDKFVEAYNRFVIERPCGHSVRAMEIRVKTLQDEERDLAGLALKHLIPDAAFRAEQKKLKAEIAALTERICEQTSKEVTEADYTVISEYDPEKVKKFVTKVIVLKGTVTFVFYNGVEITLEYSNGAPGNKPGWNVKEA

SEQ ID NO: 6457 - protein, 491 aa, Unknown
  Description of Unknown: Integrase B6458 sequence
  PTHR30461:SF3,IPR036162,PS51737,IPR011109,PTHR30461, PS00397,PF00239,G3DSA:1.10.10.2600,IPR006119,SSF53041, cd00338,SM00857,IPR025827,IPR038109,PS51736, IPR006118,PF13408,G3DSA:3.40.50.1390,PF07508,Coil
METKYAFGYVRVSTGKQDELSPDSQAKLLKDYAKSHGYVVSKIFFELGISGRKADKRPEFQKMIGLAKSSDHPADAILVWKFSRFARNQEESIVYKSLLKKKHNVDVISISEPLVDGPFGSLIERIIEWMDEYYSVRLSGEVTRGMREKAERGGYQARPPLGYKIVSHKEPPVIVPEEAEIVKLIFEKYVHDGMGLFEIARLLNSHNFKTSHGKEFERRSIEYILQNPTYCGMVRWNRTINESKEIRPESEWIIAEGEQPAIISKELFDKAQERYKREYRPRGARPASTYKHWLSGIVKCPACGRTMTACKIENNKQTYCYFRCYGYSKGKCAAKNSISSLKLEPAVLESIKSVLDTGKITYRKIEVKTEDTADLKTILEDQIKKIDVKLQRIKEAYMNGIDTMEEYKENKRIVQGEKDSLEKQLSELKEEKISTKNEDNDMLMRVKNVYDILSSDSVDATTKNEVLRSVVEKIVYDREEDELKVYYYHMP

SEQ ID NO: 6458 - protein, 491 aa, Unknown
  Description of Unknown: Integrase B6459 sequence
  cd03768,SM00857,IPR036162,PF13408,PS51737, G3DSA:3.40.50.1390,IPR025827,IPR006119,PF07508,SSF53041, IPR011109,PTHR30461,PS51736,Coil,PF00239
MIAIYTRQSIDKKDSISIETQVEMCQKEIKTQGLEFKIYKDKGFSGKNTDRPAFQNLMADVKQGNIDTIVVYRLDRISRSVLDFANIIDILQKHNVSFISASEKFDTSTPVGKAMLYIVMVFAQLERETIAERVKDNYYQRGETGAWGGGIAPFGYSNTKTTIGGKKVATIQQNDDIELVKQIFYEYANTDKSLGNIASDLTEKLNVMWNNIKLSRMLHSPAYVQADVDIYNYYVAKGCVIESDVSLFNGVNGLNVYGKRDRGANKYNNLKDHHIAVGFHSGVIPSDLWLKCQYKLDKNVQIKNNGKGKHTWLTGLIKCGYCGRAMTVKTYKETKYFNCSGRAIKMCDTEVVTHYVSDIEELVHQKMINYVENFSDCKIKDIENDNRQEINSLKAELVQIEKDIENIVNNLAVANTTLMEYANKKIEELDNKKKQTLDKINKLNVTKDVELKIPNLDGWDSWDIEAKRDVAKTLIDKVYVYKDRIHIKWAY

SEQ ID NO: 6459 - protein, 491 aa, Unknown
  Description of Unknown: Integrase B6460 sequence
  cd00338,SM00857,IPR006118,G3DSA:1.10.10.2600, IPR036162,PS51737,G3DSA:3.40.50.1390,IPR006119, IPR038109,PF07508,IPR011109,SSF53041, PTHR30461,PS00397,PS51736,Coil,PF00239
MSTTIKTAAAYIRVSTDRQEELSPDAQRRELKNYAKKNGIMITDIFEDTGISGRNAEKRPAFQKMISYAKSKEHPYDYILVWKFSRFARNQEESIVYKSLLQKNGVEVVSITEPLIDGPFASLIERIIEWMDEYYSIRLASDVKRGMEEKALRGGYQAAPPLGYHMEDHVPVIYEPEAVIVREIYRLAAEGKTSTTIARIINDAGYRTRRGKLFEHRGIVYILQNPFYKGYVRWNYRKHSSYHNNADNDIITTKGLHKPLINENHWTQVQKIVPFVPGHTGQRRRKSDTLFNHYLCGIMRCPACGANLSFHTNKTYTSFVCWKYSKGMHTNTGNIVAWRCEEALVDSLRKTIDSTSADMTFHATLPDTPLASDMLRQYQDSLAKLEQKEQRIKDAYIEGIDTKEEYKENKFRIAEERDHLKKLIKKEERRCTPHTAAINGTTYISMIKNLLDTLEDESVDVVEKHDAVVQIVDHIEYHRDSDTFDIFYSYS

SEQ ID NO: 6460 - protein, 491 aa, Unknown
  Description of Unknown: Integrase B6461 sequence
  PTHR30461:SF3,cd00338,SM00857,IPR006118,G3DSA:1.10.10.2600, IPR036162,PS51737,G3DSA:3.40.50.1390,IPR006119,IPR038109, PF07508,IPR011109,SSF53041,PTHR30461,PS00397, PS51736,Coil,PF00239
MIKTACAYVRVSTDKQEELSPDSQIREIKEYAARNNMLISKIYVEEHGISGKNASKRPAFQEMIATCKEKSHPYDVVLVWKFSRFARNIDESTYYKSILRKKCNVDVQSVSEPIIEGMYGRLIEMVIEWSDEFYLYNLSGEVHRGMTENALRGGYNSNAPLGYIKKKGCIPEIDPPKADIVKYIYDMYTKDDMAMADIAAKLNALGYRSNRGSKFELKTVAYILDNPFYIGKIRWNYYDRNNHQRKNEDEIIIVDGKHEPIITDEQWGLAQAKRCKARKHGGFGRKRTSVTAGHWLSGMIACSECGSNLGYHRDVHFFNCWKHAKGVCRSTSSITEAKAVQEVLSALQSLAASDFYYIYSEQAGTETDDLEVKRTQSELDSLSVKLKRVKEAYRNGVDTLDEYRENKQLIMARQNELEAKLATLETPIAPKQNRKKVDFGEIIRLIQDESVTTEQKATAIRKIFDHFEWNREKQQFSAFLSDDIMSTQCSS

SEQ ID NO: 6461 - protein, 491 aa, Unknown
  Description of Unknown: Integrase B6462 sequence
  PTHR30461:SF3,SM00857,G3DSA:1.10.10.2600,IPR036162,PS51737, G3DSA:3.40.50.1390,IPR006119,IPR038109,PF07508,IPR011109, SSF53041,PF00239,PTHR30461,PS51736,Coil, cd00338
MYLRKSRQDNPEETVEEVLFRHEIQLQEYAMKNFHYRIAEEDIYREVVSGETIEDRPEMKKVLKLIESSTVKGVLVIEPQRLSRGDMLDCGTIVHVFRYTNTLVVTPPKTYDLTEKYDRKFFEMELSRGSDYLEYTKEILNRGRVLSRKQGNYIGSVAPYGYTKIKNGKEHSLVINEEEAQYVRMAYDLFINGHGSHYIAEQLEAMGAKPRKAKHFTPANIRKMLRNPVYIGQIVLNRSQSVKVYEDGCLKTKRVYNPDYETVPGKHEPIISEEIFELANSEACRKARVPSSKEIRFIFAGLAKCSVCGGSLGLKIHTGREHPYRVGCLKKKYCTNTSILYEDFIDLVVNALKAQIQDFEVQIETNVYKEAFETQSLLESLTKRLEKTDEKMGQLCQYLEEGMYTPDMFVKRRDTLIQEKDELQKAVKEARKKMSGMKDIKEKTSSLHEALNLLRDDSISPRLKNTFLKKIIKAIYFSRLNDKIVLKVVLR

SEQ ID NO: 6462 - protein, 491 aa, Unknown
  Description of Unknown: Integrase B6463 sequence
  PTHR30461:SF3,SM00857,G3DSA:1.10.10.2600,IPR036162,PF13408, PS51737,G3DSA:3.40.50.1390,IPR025827,IPR006119,IPR038109, PF07508,SSF53041,IPR011109,PTHR30461,Coil, PS51736,cd00338,PF00239
MTIIGEYCDRAISGKTDNRPNFQRLIKDSEKGQFEAVIMYTLDRFARNRYDSAIYKAKLKKNGVRVYYAKQPMPDTPEGIILESVLEGYAEYYSENLSRNIKRGMKENALQCLANGGAGMPLGYIVGEDRKYKVDPVGAKIVQEIFQMYADGMSATQIINECNKRGYKTSRGNAFNKNSLRTMLKNDRYIGIYRFADVIVEDGIPPIISRELFNKVQAMLKHNYSARARKKAKDDYLLTTKLFCGHCGSAMVGESGTSKSGKLHHYYKCIDRKRNRKCKKAVEKKDWIEELVVRFTVQKVLTDENIERIAEKAMEIIEKESADTTYIDGLQSKLKDIKKKIKNLMNAIEQGIITSTTKERMNELELEKNEVEGKIAREEMKKPLLTKERIMYWLYSFKSGDIDDIEYRRRVIDTLVNSVYVYDDGEKGRRIVFTFNISGQNTATLSCSDIACAAPPVESLDAQVAFGAFLFIWLGVRVYSGHLFCRCFPSG

SEQ ID NO: 6463 - protein, 491 aa, Unknown
  Description of Unknown: Integrase B6464 sequence
  PTHR30461:SF3,IPR036162,PS51737,IPR011109,PTHR30461, PS00397,PF00239,G3DSA:1.10.10.2600,IPR006119,SSF53041, cd00338,SM00857,IPR025827,IPR038109,PS51736, IPR006118,PF13408,G3DSA:3.40.50.1390,PF07508,Coil
MRFLNVALYVRVSTDIQVDGYSIDEQLERLEKYCDAKDWIIYNKYIDPGFTGSNINRPGLTKLLQDIHKGKIDLVLVYKLDRLSRSQKDTLYLIEEEFLPNNVDFISMTENFDTSTPFGKAMIGILSVFAQLERENIKTRLAMGHIGRAKAGYWRGGSNPPIGYDFINGKLIINEYEALQVRTIYKMFLDGETIHGITRYMSEHFTNRYSNYRTPGQTGVILRNRLYIGKIKYKGVEYDGVHDPIIDIDTFERVQKRYKEISGKWSDHYRSPFKAKHLLTGLLYCGNCGARYFACTQRRKDKTTGKYIKSTESYVYYKCYTRDGNKSMRKGDYCKNPTIRVDKLDKVILDEIKKLKLDPDRLERIINIESKEKVENTELTVLRNKLDNTQSKIDKLMDLYTIGTIPITEIGDRIKPLYEEKEKIELEINTRENELQEPHGLSISETRDILNQFADIDNLDHDLKRELVQSLIERIEVLPEPDSIKIYWKFV

SEQ ID NO: 6464 - protein, 491 aa, Unknown
  Description of Unknown: Integrase B6465 sequence
  IPR036162,PS51737,IPR011109,PTHR30461,PS00397, PF00239,G3DSA:1.10.10.2600,IPR006119,SSF53041,cd00338, SM00857,IPR025827,IPR038109,PS51736,IPR006118, PF13408,G3DSA:3.40.50.1390,PF07508,Coil
METKYAFGYVRVSTGKQDELSPDSQAKLLKDYAKSHGYVVSKIFFELGISGRKADKRPEFQKMIGLAKSSDHPADAILVWKFSRFARNQEESIVYKSLLKKKHNVDVISISEPLVDGPFGSLIERIIEWMDEYYSVRLSGEVTRGMREKAERGGYQARPPLGYKIVSHKEPPVIVPEEAEVVKLIFEKYVHDGMGLFEIARLLNSRNFKTSHGKEFERRSIEYILQNPTYCGMVRWNRTINESKEIRPESEWIIAEGEQPAIISKELFDKAQERYKREYRPRGARPVSTYKHWLSGIVKCPACGRTMTACKIENNKQTYCYFRCYGYSKGKCAAKNSISSLKLEPAVLESIKSVLDTGKITYRKIEVKTEDTADLKTILEDQIKKIDVKLQRIKEAYMNGIDTMEEYKENKRIVQGEKDSLEKQLSELEEEKISTKNEDNDMLMRVKNVYDILSSDSVDATTKNEVLRSVVEKIVYDREEDELKVYYYHMP

SEQ ID NO: 6465 - protein, 491 aa, Unknown
  Description of Unknown: Integrase B6466 sequence
  IPR036162,PS51737,IPR011109,PTHR30461,PS00397, PF00239,G3DSA:1.10.10.2600,IPR006119,SSF53041,cd00338, SM00857,IPR025827,IPR038109,PS51736,IPR006118, PF13408,G3DSA:3.40.50.1390,PF07508,Coil
MEAKYAFGYVRVSTGKQDELSPDSQAKLLKDYAKSHGYVVSKIFYEVGISGRKADKRPEFQKMIGLAKASDHPADAILVWKYSRFARNQEESIVYKSLLKKKHNVDVISVSEPLVDGPFGSLIERIIEWMDEYYSVRLSGEVTRGMKEKAERGGYQARPPLGYKIVTHKEPPVIVPEEAEIVKLIFEKYANENLGIFEIARLLNMHNFKTSHGKEFERRSIEYILQNPTYCGMIRWNRTINESNEIRPESEWIVTDGEHPAIISKELFDKAQERYKREYRPRGARPVSTYKHWLSGVVKCPTCGRTMTANTIRNNTRVYSHFRCYGYTKGKCMANNSISSIKLEPAVLESIKTVLDNGKITYRKIEAKTDDTVDLKTILEDQIKKIDVKLQRIKEAYMNGIDTIEEYKENKQAVQEEKQHLEKQLSEIKEEKSNSKDDDEDMLLRVKNVYDILSSDSVDATTKNDVLRSVVEKIIYEKDKDLLKVYYYYMP

SEQ ID NO: 6466 - protein, 491 aa, Unknown
  Description of Unknown: Integrase B6467 sequence
  PTHR30461:SF3,IPR036162,PS51737,IPR011109,PTHR30461, PS00397,PF00239,G3DSA:1.10.10.2600,IPR006119,SSF53041, SM00857,IPR025827,IPR038109,PS51736,cd03768, IPR006118,PF13408,G3DSA:3.40.50.1390,PF07508,Coil
MRVICYVRVSTREQAEKGYSVGEQQERLRAYCMAKDWIVEDVITDPGFSGAKLERPGIQRVIQLVQEKKCEAVLVWKLDRLSRSQKDTLYLIEDVFLKNGCAFVSMNENFDTSTAFGRAMIGILSVFAQLEREQIRERMAVGRVGRAKAGLFHGGGFAPIGYDYKTIAEGGEGLVVNEYEAMQVREVFSLYLQGWPVNRIRKYMTARYTTKSGDWGNDTTIRDVLKNPLYIGKINWAKKIYDGKHEPIIDEETFNAAAARLASSQWKRDCSDGLERNSPFHSTHLLGGILWCGRCGARYFASGNYSGKGENRKYWPYYVCYSRAKSAKRMIRDPNCKNDRWPVAKLDKIILDQVRQLIFDPEALERAAGGNQEAPPSERRGLLNARRAEAKGQIDRLLDLCQMGTLPAAAVADRLKSLQDEVEGIDTALRELAEDDPAERLEAARGTLVGAAEILDNGSLDEKRELVHSLIHRIDLDGENIDIHWSFAPES

SEQ ID NO: 6467 - protein, 491 aa, Unknown
  Description of Unknown: Integrase B6468 sequence
  PTHR30461:SF3,IPR036162,PS51737,IPR011109,PTHR30461, PS00397,PF00239,G3DSA:1.10.10.2600,IPR006119,SSF53041, cd00338,SM00857,IPR025827,IPR038109,PS51736, IPR006118,PF13408,G3DSA:3.40.50.1390,PF07508,Coil
METQYAFGYVRVSTGKQDELSPDSQAKLLKDYAKSHGYVVSKIFYEVGISGRKADKRPEFQKMIGLAKASDHPADAILVWKYSRFARNQEESIVYKSLLKKKHNVDVISVSEPLVDGPFGSLIERIIEWMDEYYSVRLSGEVTRGMKEKAERGGYQARPPLGYKIVTHKEPPVIVPEEAEIVKLIFEKYANENLGIFEIARLLNMHNFKTSHGKEFERRSIEYILQNPTYCGMIRWNRTINESNEIRPESEWIVTDGEHPAIISKELFDKAQERYKREYRPRGSRPVSTYKHWLSGVVKCPACGRTMTANTIRNNTRVYSHFRCYGYTKGKCMANNSISSIKLEPAVLESIKTVLDSGKITYRKIEAKTDDTVDLKTILEDQIKKIDVKLQRIKEAYMNGIDTMEEYKENKQAVQEEKQHLEKQLSEIKEEKSNSKDDDEDMLLRVKNVYDILSSDSVDATTKNDVLRSVVEKIIYEKDKDLLKVYYYYMP

SEQ ID NO: 6468 - protein, 491 aa, Unknown
  Description of Unknown: Integrase B6469 sequence
  PTHR30461:SF3,cd00338,SM00857,IPR006118,G3DSA:1.10.10.2600, IPR036162,PS51737,G3DSA:3.40.50.1390,IPR006119,IPR038109, PF07508,IPR011109,SSF53041,PTHR30461,PS00397, PS51736,Coil,PF00239
MIKTACAYVRVSTDKQEELSPDSQIREIKEYAARNNMLISKIYVEEHGISGKNASKRPAFQEMIATCKEKSHPYDVVLVWKFSRFARNIDESTYYKSILRKKCNVDVQSVSEPIIEGMYGRLIEMVIEWSDEFYLYNLSGEVHRGMTENALRGGYNSNAPLGYIKKKGCIPEIDPPKADIVKHIFDMYTKNDMAMADIAAKLNALGYRSNRGSKFELKTVAYILDNPFYIGKIRWNYYDRNNHQRKNENEIIIVDGKHEPIITDEQWGLAQAKRCKARKHGGFGRKRTSVTAGHWLSGMIACSECGSNLGYHRDVHFFNCWKHAKGVCRSTSSITEAKAIQEVLSALQSLAASDFYYIYSEQAGAETDDLEVKRTQSELDSLSVKLKRVKEAYRNGVDTLDEYRENKQLIMARQNELEAKLATLETPIAPKQNRKKVDFGEIIRLIQDESVTTEQKATAIRKIFDHFEWNREKQQFSAFLSDDIMSTQCSS

SEQ ID NO: 6469 - protein, 491 aa, Unknown
  Description of Unknown: Integrase B6470 sequence
  cd03768,SM00857,IPR036162,PF13408,PS51737, G3DSA:3.40.50.1390,IPR025827,IPR006119,PF07508,SSF53041, IPR011109,PTHR30461,PS51736,Coil,PF00239
MIAIYTRQSIDKKDSISIETQVEMCQKEIKTQGLEFKIYKDKGFSGKNTDRPAFQNLMADVKQGNIDTIVVYRLDRISRSVLDFANIIDVLQKHNVSFISASEKFDTSTPVGKAMLYIVMVFAQLERETIAERVKDNYYQRGETGAWGGGIAPFGYSNTKITIGGKKVATIQQNDDIELVKQIFYEYANTDKSLGNIASDLTEKLNVMWNNIKLSRMLHSPAYVQADVDIYNYYIAKGCVVESDISLFNGVNGLNVYGKRDRGANKYNNLKDHHIAVGFHEGVISSDLWLKCQYKLDKNVQIKNNGKGKHTWLTGLIKCGYCGRAMTVKTYKETKYFNCSGRAIKMCDAEVVTHYVSDIEELVHQKMINYVENFSDCKIKDIENDNRQEINSLKAELVQIEKDIENIVNNLTVANTTLMEYANKKIEELDNKKKQTLDKINKLNVTKDVELKIPNLDGWNNWDIEAKRDVAKTLIEKVYVYKDRIHIKWAY

SEQ ID NO: 6470 - protein, 491 aa, Unknown
  Description of Unknown: Integrase B6471 sequence
  PTHR30461:SF3,IPR036162,PS51737,IPR011109,PTHR30461, PS00397,PF00239,G3DSA:1.10.10.2600,IPR006119,SSF53041, SM00857,IPR025827,IPR038109,PS51736, cd03768,IPR006118,PF13408,G3DSA:3.40.50.1390,PF07508,Coil
MRVICYVRVSTREQAEKGYSVGEQQERLRAYCIAKDWIVEDVITDPGFSGAKLERPGIQRVIQLVQEKKCEAVLVWKLDRLSRSQKDTLYLIEDVFLKNGCAFVSMNENFDTSTAFGRAMIGILSVFAQLEREQIRERMAVGRVGRAKAGLFHGGGYAPIGYDYKTIAEGGEGLVVNEYEAMQVRKVFSLYLQGWPVNRIRKYMTARYTTKSGDWGNDTTIRDVLKNPLYIGKINWAKKIYDGKHEPIIDEETFNAAAARLASSQWKRDCSDGLERNSPFHSTHLLGGILWCGRCGARYFASGNYSGKGENRKYWPYYVCYSRAKSAKRMIRDPNCKNDRWPVAKLDKIILDQVRQLIFDPEALERAAGGNQETPPSERRALLNARRAETKGQIDRLLDLCQMGTLPAAAVADRLKSLQDEVEGIDTALRELAEDDPAERLEAARATLVGAAEILDNGSLDEKRELVHSLIHRIDLEGENIDIHWSFAPES

SEQ ID NO: 6471 - protein, 491 aa, Unknown
  Description of Unknown: Integrase B6472 sequence
  PTHR30461:SF3,cd00338,SM00857,IPR006118,G3DSA:1.10.10.2600, IPR036162,PS51737,G3DSA:3.40.50.1390,IPR006119,IPR038109, PF07508,IPR011109,SSF53041,PTHR30461,PS00397, PS51736,Coil,PF00239
MIKTACAYVRVSTDKQEELSPDSQIREIKEYAARNNMLISKIYVEEHGISGKNASKRPAFQEMIATCKEKSHPYDVVLVWKFSRFARNIDESTYYKSILRKKCNVDVQSVSEPIIEGMYGRLIEMVIEWSDEFYLYNLSGEVHRGMTENALRGGYNSNAPLGYVKKKGCIPEIDPPKADIVKHIFDMYTKDDMAMADIAAKLNALGYRSNRGSKFELKTVAYILDNPFYIGKIRWNYYDRNNHQRKNEDEIIIVDGKHEPIITDEQWGLAQAKRCKARKHGGFGRKRTSVTAGHWLSGMIACSECGSNLGYHRDVHFFNCWKHAKGVCRSTSSITEAKAVQEVLSALQSLAASDFYYIYSEQAGAETDDLEVKRTQSELDSLSVKLKRVKEAYRNGVDTLDEYRENKQLIMARQNELEAKLATLETPIAPKQNRKKVDFGEIIRLIQDESVTTEQKATAIRKIFDHFEWNREKQQFTAFLSDDIMSTQCSS

SEQ ID NO: 6472 - protein, 491 aa, Unknown
  Description of Unknown: Integrase B6473 sequence
  PTHR30461:SF3,cd00338,SM00857,IPR006118,G3DSA:1.10.10.2600, IPR036162,PS51737,G3DSA:3.40.50.1390,IPR006119,IPR038109, PF07508,IPR011109,SSF53041,PTHR30461,PS00397, PS51736,Coil,PF00239
MIKTACAYVRVSTDKQEELSPDSQIREIKEYAARNNMLISKIYVEEHGISGKNASKRPAFQEMIATCKEKSHPYDVVLVWKFSRFARNIDESTYYKSILRKKCNVDVQSVSEPIIEGMYGRLIEMVIEWSDEFYLYNLSGEVHRGMTENALRGGYNSNAPLGYIKKKGCIPEIDPPKADIVKHIYDMYTKDDMAMADIAAKLNALGYRSNRGSKFELKTVAYILDNPFYIGKIRWNYYDRNNHQRKNEDEIIIVDGKHEPIITDEQWGLAQAKRCKARKHGGFGRKRTSVTAGHWLSGMIACSECGSNLGYHRDVHFFNCWKHAKGVCRSTSSITETKAIQEVLSALQSLAASDFYYIYSEQAGTETDDLEMKRTQSELDNLSVKLKRVKEAYRNGVDTLDEYRENKQLIMARQNELEAKLATLETPIAPKQNRKKVDFGEIIRLIQDESVTTEQKATAIRKIFDHFEWNREKQQFTAFLSDDIMSTQCSS

SEQ ID NO: 6473 - protein, 491 aa, Unknown
  Description of Unknown: Integrase B6474 sequence
  SM00857,G3DSA:1.10.10.2600,IPR036162,PS51737,G3DSA:3.40.50.1390, IPR006119,IPR038109,PF07508,IPR011109,SSF53041, PF00239,PTHR30461,PS51736,Coil,cd00338
MASRRGSRKAPEKDHKRCVIYARYSSARQREESIEDQVRVCTMFAKSNGMEVERVYADKALSGKSDDRPQFQRMVADSRDAGWGVVVVYRLDRFARDRFDSASYRMRLRDNGVSLLSAMERIPDAPEGSILESVLEGVNEWYSRELSQNVRRGMAGNARKCKANGVRVFGYRVGDDGRYAVDEDEAACVRRAFAMAANGSTKTEVRDWLNTACRNVRGGAWTVNSVTTLLGNRKYLGIYKFGDVVVEGGMPALVTQERFDAANGKRKHGRVGAFPLTGKLFDAESGHAYRGDGGTGCTGKRYFYYSCPLDGGGMIRYRQEAVEDAVTDVVSSVMARPGQAEALADAVLAAIERRDEAKRLERAREELREVQRGRERLVDAIIGGVDPELVQERLEGMGDEARRLECEIANLERATTPDRDWAIRWLRAKFPKKITKQVLRRTIGRVEISGDGTVTVEVPWAVTGSMGKEKPSELPGSWQFGGITFGGRYKI

SEQ ID NO: 6474 - protein, 491 aa, Unknown
  Description of Unknown: Integrase B6475 sequence
  cd00338,SM00857,IPR006118,G3DSA:1.10.10.2600, IPR036162,PS51737,G3DSA:3.40.50.1390,IPR006119, IPR038109,PF07508,IPR011109,SSF53041, PTHR30461,PS00397,PS51736,Coil,PF00239
MSTTIKTAAAYIRVSTDRQEELSPDAQRRELKNYAKKNGIMITDIFEDTGISGRNAEKRPAFQKMISYAKSKEHPYDYILVWKFSRFARNQEESIVYKSLLQKNGVEVVSITEPLIDGPFASLIERIIEWMDEYYSIRLASDVKRGMEEKALRGGYQAAPPLGYHMEDHIPVIYEPEAVIVREIYRLAAEGKTSTTIARIINDAGYRTRRGKLFEHRGIVYILQNPFYKGYVRWNYRKHSSYHNNADNDIITTKGLHKPLIDENHWTQVQKIVPFVPGHTGQRRRKSDTLFNHYLCGIMRCPACGANLSFHTNKTYTSFVCWKYSKGMHANTGNIVAWRCEEALVDSLRKTIDNTSADMTFHATLPDTPLASDMLRQYQDSLAKLEQKEQRIKDAYIEGIDTKEEYKENKFRIAEERDHLKKLIKKEERRCTPHTAAINGTTYISMIKNLLDTLEDESGDVVEKHDAVVQIVDHMEYHRDSDTFDIFYSYS

SEQ ID NO: 6475 - protein, 491 aa, Unknown
  Description of Unknown: Integrase B6476 sequence
  PTHR30461:SF3,IPR036162,PS51737,IPR011109,PTHR30461, PS00397,PF00239,G3DSA:1.10.10.2600,IPR006119,SSF53041, SM00857,IPR025827,IPR038109,PS51736,cd03768, IPR006118,PF13408,G3DSA:3.40.50.1390,PF07508,Coil
MRVICYVRVSTREQAEKGYSVGEQQERLRAYCMAKDWIVEDVITDPGFSGAKLERPGIQRVIQLVQEKKCEAVLVWKLDRLSRSQKDTLYLIEDVFLKNGCAFVSMNENFDTSTAFGRAMIGILSVFAQLEREQIRERMAVGRVGRAKAGLFHGGGFAPIGYDYKTIAEGGEGLVVNEYEAMQVREVFSLYLQGWPVNRIRKYMTARYTTKSGDWGNDTTIRDVLKNPLYIGKINWAKKIYDGKHEPIIDEETFNAAAARLASSQWKRDCSDGLERNSPFHSTHLLGGILWCGRCGARYFASGNYSGKGENRKYWPYYVCYSRAKSAKRMIRDPNCKNDRWPVAKLDKIILDQVRQLIFDPEALERAAGGNQEAPPSERRALLNARRAEAKGQIDRLLDLCQMGTLPAAAVADRLKSLQDEVEGIDTALRELAEDDPAERLGAARATLVGAAEILDNGSLDEKRELVHSLIRRIDLDGENIDIHWSFAPES

SEQ ID NO: 6476 - protein, 491 aa, Unknown
  Description of Unknown: Integrase B6477 sequence
  PTHR30461:SF3,cd00338,SM00857,IPR006118,G3DSA:1.10.10.2600, IPR036162,PS51737,G3DSA:3.40.50.1390,IPR006119,IPR038109, PF07508,IPR011109,SSF53041,PTHR30461,PS00397, PS51736,Coil,PF00239
MIKTACAYVRVSTDKQEELSPDSQIREIKEYAARNNMLISKIYVEEHGISGKNASKRPAFQEMIATCKEKSHPYDVVLVWKFSRFARNIDESTYYKSILRKKCNVDVQSVSEPIIEGMYGRLIEMVIEWSDEFYLYNLSGEVHRGMTENALRGGYNSNAPLGYIKKKGCIPEIDPPKADIVKYIYDMYTKDDMAMADIAAKLNALGYRSNRGSKFELKTVAYILDNPFYIGKIRWNYYDRNNHQRKNADEIIIVDGKHEPIITDEQWGLAQAKRCKARKHGGFGRKRTSVTAGHWLSGMIACSECGSNLGYHRDVHFFNCWKHAKGVCRSTSSITEAKAIQEVLSALQSLAASDFYYIYSEQAGAETDDLEVKRTQSELDSLSVKLKRVKEAYRNGVDTLDEYRENKQLIIARQNELEAKLATLETPIAPKQNRKKVDFGEIIRLIQDESVTTEQKATAIRKIFDHFEWNREKQQFTAFLSDDIISTQCSS

SEQ ID NO: 6477 - protein, 491 aa, Unknown
  Description of Unknown: Integrase B6478 sequence
  PTHR30461:SF3,SM00857,G3DSA:1.10.10.2600,IPR036162,PF13408, IPR025827,G3DSA:3.40.50.1390,PS51737,IPR006119,IPR038109, PF07508,SSF53041,IPR011109,PF00239,PTHR30461, PS51736,Coil,cd00338
MYLRKSRAEEGQSTEEVLAKHRAALEELADRLGLPVDGVYEEVASGEKLYARPEMLKLLERIRAGEVEAVLCMDIDRLGRGGMADQGTILDAFRESGTLIITPEKTYDLTNDVDIEMTEFKAFFARAEWRAIRKRMRRGLMQTIEAGGYTANAPYGYRRCRIGKLPSLEVIPEEARFVRYIYERYLAGIGAQTIAQELNAMGSTPRRGAEWNRNTVRHVLRNPTFAGKVAWNRVKHYRPGAHGKDKHHVVYTPEGEWLMVDGVHEAIIPWDTWLEAQERRKQRYIPPSNTGQRANPFAGIIRCSKCGNNMQRMGTNKGEPYLLCTTKGCAAGAKFEYVEERMVELLYDELARLRLLIDSGAAPNIDALEAALAAAQREQERVQARIPRLYEFLEDGTYDRSTFRSRLDAAEKELAELASKRAGLERQIDERRRIDPRKAAAALENLVQLYPTMSPADKNSALKALGAEVTYTKEKKTKPRDFTLELQLRDF

SEQ ID NO: 6478 - protein, 491 aa, Unknown
  Description of Unknown: Integrase B6479 sequence
  PTHR30461:SF3,cd00338,SM00857,IPR006118,G3DSA:1.10.10.2600, IPR036162,PS51737,G3DSA:3.40.50.1390,IPR006119,IPR038109, PF07508,IPR011109,SSF53041,PTHR30461,PS00397, PS51736,Coil,PF00239
MIKTACAYVRVSTDKQEELSPDSQIREIKEYAARNNMLISKIYIEEHGISGKNASKRPAFQEMIATCKEKSHPYDVVLVWKFSRFARNIDESTYYKSILRKKCNVDVQSVSEPIIEGMYGRLIEMVIEWSDEFYLYNLSGEVHRGMTENALRGGYNSNAPLGYIKKKGCIPEIDPPKADIVKHIYDMYTKDDMAMADIAAKLNALGYRSNRGSKFELKTVAYILDNPFYIGKIRWNYYDRNNHQRKNEDEIIIVDGKHEPIITDEQWGLAQAKRCKARKHGGFGRKRTSVTAGHWLSGMIACSECGSNLGYHRDVHFFNCWKHAKGVCRSTSSITEAKAVQEVLSALQSLAASDFYYIYSEQAGAETDDLEVKRTQSELDSLSVKLKRVKEAYRNGVDTLDEYRENKQLIMARQNELEAKLATLETPIAPKQNRKKVDFGEIIRLIQDESVTTEQKATAIRKIFDHFEWNREKQQFSAFLSDDIMSTQCSS

SEQ ID NO: 6479 - protein, 491 aa, Unknown
  Description of Unknown: Integrase B6480 sequence
  SM00857,G3DSA:1.10.10.2600,IPR036162,PS51737,G3DSA:3.40.50.1390, IPR006119,IPR038109,PF07508,IPR011109,SSF53041, PF00239,PTHR30461,PS51736,Coil,cd00338
MYLRKSRQDNPEETVEEVLFRHEVQLQEYAMKNFHYRIKEEDIYREVVSGETIEDRPKMKKVLKLIESSTVKGVLVIEPQRLSRGDMLDCGTIVHVFRYTNTLVVTPPKTYDLTEKYDRKFFEMELSRGSDYLEYTKEILNRGRVLSRKQGNYIGSVAPYGYTKIKNGKEHSLVINEEEAQYVRMAYDLFIQGHGSHYIGEQLEAMGAKPRKAKHFTPANIRKMLRNPVYIGQIVLNRSQSVKVYEDGCLKTKRVYNPDYETVPGKHEPIISNEIFELANSEACRKARVPSSKEIRFIFAGLAKCSVCGGSLGLKIHTGREHPYRVGCLKKKYCTNTSILYEDFIDLVVNALKEQIQDFEVQIETNVYKDAFETQSLLESLTKRLEKTDEKMGQLCQYLEEGMYTPDMFVKRRDTLIQEKDELQKAVREARKKMSGMKDIKEKTSSLHEALNLLRDDSISPRLKNTFLKKIIKVIYFSRINDEIVLKVVLR

SEQ ID NO: 6480 - protein, 491 aa, Unknown
  Description of Unknown: Integrase B6481 sequence
  PTHR30461:SF3,SM00857,G3DSA:1.10.10.2600,IPR036162,PF13408, IPR025827,G3DSA:3.40.50.1390,PS51737,IPR006119,IPR038109, PF07508,SSF53041,IPR011109,PF00239, PTHR30461,PS51736,Coil,cd00338
MYLRKSRAEEGQSTEEVLAKHRAALEELADRLGLPVDGVYEEVASGEKLYARPEMLKLLERIRAGEVEAVLCMDIDRLGRGGMADQGTILDAFRESGTLIITPEKTYDLTNDVDIEMTEFKAFFARAEWRAIRKRMRRGLMQTIEAGGYTANAPYGYRRCRIGKLPSLEVIPEEARFVRYIYERYLAGIGAQTIAQELNAMGSCPRRGAEWNRNTVRHVLRNPTFAGKVAWNRVKHYRPGAHGKDKHHVVYTPEGEWLMVDGVHEAIIPWDTWLEAQERRKQRYIPPSNTGQRANPFAGIIRCSKCGNNMQRMGTNKGEPYLLCTTKGCTAGAKFEYVEERMVELLYDELARLRLLIDSGAAPNVDALEAALAAAQREQERVQARIPRLYEFLEDGTYDRSTFRSRLEAAEKELAELANKRADLERHIDERRRSDPRKAAAALENLVQLYPTMSPADKNSALKALGVEVTYTKEKKTKPRDFTLELQLRDF

SEQ ID NO: 6481 - protein, 491 aa, Unknown
  Description of Unknown: Integrase B6482 sequence
  IPR036162,PS51737,IPR011109,PTHR30461,PS00397, PF00239,G3DSA:1.10.10.2600,IPR006119,SSF53041,cd00338, SM00857,IPR025827,IPR038109,PS51736,IPR006118, PF13408,G3DSA:3.40.50.1390,PF07508,Coil
METKYAFGYVRVSTGKQDELSPDSQAKLLKDYAKSHGYVVSKIFYEVGISGRKADKRPEFQKMVGLAKASDHPADAILVWKFSRFARNQEESIVYKSLLKKKHNVDVISISEPLVDGPFGSLIERIIEWMDEYYSVRLSGEVTRGMREKAERGGYQARPPLGYKIVSHKEPPVIVPEEAEIVKLIFEKYVHDGMGLFEIARLLNSHNFKTSHGKEFERRSIEYILQNPTYCGMVRWNRTINESKEIRPESEWIIAEGEQPAIISKELFDKAQERYKREYRPRGARPVSTYKHWLSGIVKCPACGRTMTACKIENNKQTYCYFRCYGYSKGKCAAKNSISSLKLEPAVLESIKSVLDTGKITYRKIEVKTEDTADLKTILEDQIKKIDVKLQRIKEAYMNGIDTMEEYKENKRIVQGEKDSLEKQLSELKEEKISTKNEDNDMLMRVKNVYDILSSDSVDATTKNEVLRSVVEKIVYDREEDELKVYYYHMP

SEQ ID NO: 6482 - protein, 491 aa, Unknown
  Description of Unknown: Integrase B6483 sequence
  PTHR30461:SF3,IPR036162,PS51737,IPR011109,PTHR30461, PS00397,PF00239,G3DSA:1.10.10.2600,IPR006119,SSF53041, cd00338,SM00857,IPR025827,IPR038109,PS51736, IPR006118,PF13408,G3DSA:3.40.50.1390,PF07508,Coil
METKYAFGYVRVSTGKQDELSPDSQAKLLKDYAKSHGYVVSKIFYEVGISGRKADKRPEFQKMIGLAKASDHPADVILVWKYSRFARNQEESIVYKSLLKKKHNVDVISVSEPLVDGPFGSLIERIIEWMDEYYSVRLSGEVTRGMKEKAERGGYQARPPLGYKIVTHKEPPVIVPEEAEIVKLIFEKYANENLGIFEIARLLNMHNFKTSHGKEFERRSIEYILQNPTYCGMIRWNRTINESNEIRPESEWIVTDGEHPAIISKELFDKAQERYKREYRPRGSRPVSTYKHWLSGVVKCPACGRTMTANTIRNNTRVYSHFRCYGYTKGKCMANNSISSIKLEPAVLESIKTVLNNGKITYRKIETKTDDTVDLKTILKDQIKKIDVKLQRIKEAYMNGIDTMEEYKENKQAVQEEKQHLEKQLSEIKEEKNNSKNDDKDMLLRVKNVYDILSSNSVDVMTKNEVLRSVVEKIVYEKDKDLLKVYYYYMP

SEQ ID NO: 6483 - protein, 491 aa, Unknown
  Description of Unknown: Integrase B6484 sequence
  PTHR30461:SF3,SM00857,G3DSA:1.10.10.2600,IPR036162,PF13408, PS51737,G3DSA:3.40.50.1390,IPR025827,IPR006119,IPR038109, PF07508,SSF53041,IPR011109,PTHR30461,Coil, PS51736,cd00338,PF00239
METKYAFGYVRVSTGKQDELSPDSQAKLLKDYAKSHGYVVSKIFYEVGISGRKADKRPEFQKMIGLAKASDHPADVILVWKYSRFARNQEESIVYKSLLKKKHNVDVISVSEPLIDGPFGSLIERIIEWMDEYYSVRLSGEVTRGMREKAERGGYQARPPLGYKIVTHKEPPVIVPEEAEIVKLIFEKYANENLGIFEIARLLNMHNFKTSHGKEFERRSIEYILQNPTYCGMIRWNRTINESNEIRPESEWIVTDGEHPAIISKELFDKAQERYKREYRPRGSRPVSTYKHWLSGVVKCPACGRTMTANTIRNNTRVYSHFRCYGYTKGKCMANNSISSIKLEPAVLESIKTVLDNGKITYRKIEAKTDDTVDLKTILEDQIKKIDVKLQRIKEAYMNGIDTIEEYKENKQAVQEEKQHLEKQLSEIKEEKSNSKDDDEDMLLRVKNVYDILSSDSVDATTKNDVLRSVVEKIIYEKDKDLLKVYYYYMP

SEQ ID NO: 6484 - protein, 491 aa, Unknown
  Description of Unknown: Integrase B6485 sequence
  SM00857,G3DSA:1.10.10.2600,IPR036162,PS51737,G3DSA:3.40.50.1390, IPR006119,IPR038109,PF07508,IPR011109,SSF53041, PF00239,PTHR30461,PS51736,Coil,cd00338
MYLRKSRQDNPEETVEEVLFRHEIQLQEYALKNFHYRIKEEDIYREVVSGETIEDRPEMKKVLKLIESSTVKGVLVIEPQRLSRGDMLDCGTIVHVFRYTNTLVVTPPKTYDLTEKYDRKFFEMELSRGSDYLEYTKEILNRGRVLSRKQGNYIGSVAPYGYTKIKNGKEHSLVINEEEAQYVRMAYDLFIHGHGSHYIGEQLEAMGAKPRKAKHFTPANIRKMLRNPVYIGQIVLNRSQSVKVYEDGCLKTKRVYNPDYETVPGKHEPIISEEIFELANSEACRKARVPSSKEIRFIFAGLAKCSVCGGSLGLKIHTGREHPYRVGCLKKKYCTNTSILYEDFIDLVVNALKEQIQDFEVQIETNVYKEAFETQSLLESLTKRLEKTDEKMGQLCQYLEEGMYTPDMFVKRRDTLIQEKDELQKAVKETRKKMSGMKDIKEKTSSLHEALNLLRDDSISPRLKNTFLKKIIKVIYFSRINDEIVLKVVLR

SEQ ID NO: 6485 - protein, 491 aa, Unknown
  Description of Unknown: Integrase B6486 sequence
  cd03768,SM00857,IPR036162,PF13408, IPR025827,G3DSA:3.40.50.1390,PS51737,IPR006119, PF07508,SSF53041,IPR011109,PTHR30461, PS51736,Coil,PF00239
MIAIYTRQSIDKKDSISIETQVEMCQKEIKTQGLEFKIYKDKGFSGKNTDRPAFQNLMADVKQGNIDTIVVYRLDRISRSVLDFANIIDILQKHNVSFISASEKFDTSTPVGKAMLYIVMVFAQLERETIAERVKDNYYQRGETGAWGGGIAPFGYSNTKITIGGKKVATIQQNDDIELVKQIFYEYANADKSLGNIASDLTEKLNVMWNNIKLSRMLHSPAYVQADVDIYNYYVAKGCVIESDVSLFNGVNGLNVYGKRDRGANKYNNLKDHHIAVGFHSGVIPSDLWLKCQYKLDKNIQIKNNGKGKHTWLTGLIKCGYCGRAMTVKIYKETKYFNCSGRAIKMCDAEVVTHYVSDIEELVHQKMINYVDNFSDCKIKDIENDNRQEINSLKAELVQIEKDIENIVNNLTVANTTLMEYANKKIEELDNKKKQTLDKINKLNVTKDVELKIPSLDGWNSWDIEAKRDVAKTLIEKVYIYKDRIHIKWAY

SEQ ID NO: 6486 - protein, 491 aa, Unknown
  Description of Unknown: Integrase B6487 sequence
  PTHR30461:SF3,cd00338,SM00857,IPR006118,G3DSA:1.10.10.2600, IPR036162,PS51737,G3DSA:3.40.50.1390,IPR006119,IPR038109, PF07508,IPR011109,SSF53041,PTHR30461,PS00397, PS51736,Coil,PF00239
MIKTACAYVRVSTIQQEELSPDSQIREIKEYAARNNMLISKIYVEEHGISGKNASKRPAFQEMIATCKEKSHPYDVVLVWKFSRFARNIDESTYYKSILRKKCNVDVQSVSEPIIEGMYGRLIEMVIEWSDEFYLYNLSGEVHRGMTENALRGGYNSNAPLGYIKKKGCIPEIDPPKADIVKYIYDMYTKDDMAMADIAAKLNALGYRSNRGSKFELKTVAYILDNPFYIGKIRWNYYDRNNHQRKNEDEIIIVDGKHEPIITDEQWGLAQAKRCKARKHGGFGRKRTSVTAGHWLSGMIACSECGSNLGYHRDVHFFNCWKHAKGVCRSTSSITETKAIQEVLSALQSLAASDFYYIYSEQAGTETDDLEVKRTQSELDSLSVKLKRVKEAYRNGVDTLDEYRENKQLIMARQNELEAKLATLETPIAPKQNRKKVDFREIIRLIQDESVTTEQKATAIRKIFDHLEWNREKQQFSAFLSDDIMSTQCSS

SEQ ID NO: 6487 - protein, 491 aa, Unknown
  Description of Unknown: Integrase B6488 sequence
  PTHR30461:SF3,IPR036162,PS51737,IPR011109,PTHR30461, PS00397,PF00239,G3DSA:1.10.10.2600,IPR006119,SSF53041, SM00857,IPR025827,IPR038109,PS51736,cd03768, IPR006118,PF13408,G3DSA:3.40.50.1390,PF07508,Coil
MNNNLVPLSNSAINELVDLYVRVSTLEQAEEGYSIAEQEAKLRAYCSAMGYTVYNVHIDPGYSGASLDRPGIKKIISDVRAGKVRKVIVWKLDRLSRSQKDTMVMLEDVFLENKCDFVSLLESFDTSTPFGRAIVGLLAVFAQLERENIKERTAMGRQARIKKGYFHGSHAPLGYQFKSGCNDLVIDEYSANMVREVFRLFLSGGSINGIASHMICKYGSNRYEWNNTSVRRILRNPVYIGNVTLGDKIYEGIHESIISESEFYMASAILEHNKSLDKRNYSYSTGKFKADNLLTGLLFCGDCGARMYARKVSKSKKKYICHSVARTSKPMIKSDNCTNRLHPFTVGQVDNMIIDEIKKLSLDRDYFKSILADVPPKLDDLQTYRERIEEIEKQINRMLNLYQTGIIDMDEVMDRVNPLKDEKDKLETHVKKHEDAPVGISSEEAWDLACTLEDAISAGSNEEVHRIIHTLVDKIVMLNDEITIHWSFCQN

SEQ ID NO: 6488 - protein, 491 aa, Unknown
  Description of Unknown: Integrase B6489 sequence
  PTHR30461:SF3,IPR036162,PS51737,IPR011109,PTHR30461, PS00397,PF00239,G3DSA:1.10.10.2600,IPR006119,SSF53041, cd00338,SM00857,IPR025827,IPR038109,PS51736, mobidb-lite,IPR006118,PF13408,G3DSA:3.40.50.1390,PF07508,Coil
METKYAFGYVRVSTGKQDELSPDSQAKLLKDYAKSHGYVVSKIFYEVGISGRKADKRPEFQKMIGLAKSSDHPADAILVWKYSRFARNQEESIVYKSLLKKKHNVDVISVSEPLVDGPFGSLIERIIEWMDEYYSVRLSGEVTRGMKEKAERGGYQARPPLGYKIVTHKEPPVIVPEEAEIVKLIFEKYANENLGIFEIARLLNMHNFKTSHGKEFERRSIEYILQNPTYCGMIRWNRTINESNEIRPESEWIVTDGEHPAIISKELFGKAQERYKREYRPRGARPVSTYKHWLSGVVKCPACGRTMTANTIRNNTRVYSHFRCYGYTKGKCMANNSISSIKLEPAVLESIKTVLDSSKITYRKIETKTDDTVDLKTILEDQIKKIDVKLQRIKEAYMNGIDTMEEYKENKQAVQEEKQHLEKQLSEIKEEKSNSKDDDEDMLLRVKNVYDILSSDSVDATTKNDVLRSVVEKIIYEKDKDLLKVYYYYMP

SEQ ID NO: 6489 - protein, 491 aa, Unknown
  Description of Unknown: Integrase B6490 sequence
  PTHR30461:SF3,cd00338,SM00857,IPR006118,G3DSA:1.10.10.2600, IPR036162,PS51737,G3DSA:3.40.50.1390,IPR006119,IPR038109, PF07508,IPR011109,SSF53041,PTHR30461,PS00397, PS51736,Coil,PF00239
MIKTACAYVRVSTDKQEELSPDSQIREIKEYAARNNMLISKIYVEEHGISGKNASKRPAFQEMIATCKEKSHPYDVVLVWKFSRFARNIDESTYYKSILRKKCNVDVQSVSEPIIEGMYGRLIEMVIEWSDEFYLYNLSGEVHRGMTENALRGGYNSNAPLGYIKKKGCIPEIDPPKADIVKYIYDMYTKDDMAMADIAAKLNALGYRSNRGSKFELKTVAYILDNPFYIGKIRWNYYDRNNHQRKNEDEVIIVDGKHEPIITDEQWGLAQAKRCKARKHGGFGRKRTSVTAGHWLSGMIACSECGSNLGYHRDVHFFNCWKHAKGVCRSTSSITETKAIQEVLSALQSLAASDFYYIYSEQAGTETDDLEVKRTQSELDSLSVKLKRVKEAYRNGVDTLDEYRENKQLIMARQNELEAKLATLETPIAPKQNRKKVDFGEIIRLIQDESVTTEQKATAIRKIFDHFEWNREKQQFSAFLSDDIMNTQCSS

SEQ ID NO: 6490 - protein, 491 aa, Unknown
  Description of Unknown: Integrase B6491 sequence
  PTHR30461:SF3,SM00857,G3DSA:1.10.10.2600,IPR036162,PS51737, G3DSA:3.40.50.1390,IPR006119,IPR038109,PF07508,SSF53041, IPR011109,PTHR30461,Coil,PS51736,cd00338, PF00239
MYLRKSRQDNPEETVEEVLFRHEIQLQEYAMKNFHYRIKEEDIYREVVSGETIEDRPEMKKVLKLIESSTVKGVLVIEPQRLSRGDMLDCGTIVHVFRYTNTLVVTPPKTYDLTEKYDRKFFEMELSRGSDYLEYTKEILNRGRVLSRKQGNYIGSVAPYGYTKIKNGKEHSLVINEEEAQYVRMAYDLFIQGHGSHYIGEQLEAMGAKPRKAKHFTPANIRKMLRNPVYIGQIVLNRSQSVKVYEDGCLKTKRVYNPDYETVPGKHEPIISNEIFELANSEACRKARVPSSKEIRFIFAGLAKCSVCGGSLGLKVHTGREHPYRVGCLKKKYCTNTSILYEDFIDLVVNALKEQIQDFEVQIETNVYKEAFETQSLLESLTKRLEKTDEKMGQLCQYLEEGMYTPDMFVKRRDTLIQEKDELQKAVREARKKMSGMKDIKEKTSSLHEALNLLRDDSISPRLKNTFLKKIIKVIYFSKINDEIVLKVVLR

SEQ ID NO: 6491 - protein, 491 aa, Unknown
  Description of Unknown: Integrase B6492 sequence
  PTHR30461:SF3,SM00857,G3DSA:1.10.10.2600,IPR036162,PS51737, G3DSA:3.40.50.1390,IPR006119,IPR038109,PF07508,IPR011109, SSF53041,PF00239,PTHR30461,PS51736,Coil, cd00338
MYLRKSRQDNPEETVEEVLFRHEIQLQEYAMKNFHYRIAEEDIYREVVSGETIEDRPEMKKVLKLIESSTVKGVLVIEPQRLSRGDMLDCGTIVHVFRYTNTLVVTPPKTYDLTEKYDRKFFEMELSRGSDYLEYTKEILNRGRILSRKQGNYIGSVAPYGYTKIKNGKEHSLVINEEEAQYVRMAYDLFIQGHGSHYIGEQLEAMGAKPRKAKHFTPANIRKMLRNPVYIGQIVLNRSQSVKVYEDGCLKTRRVYNPDYETVPGKHEPIISNEIFELANSEACRKARVPSSKEIRFIFAGLAKCSVCGGSLGLKIHTGREHPYRVGCLKKKYCTNTSILYEDFIDLVVNALKEQIQDFEVQIETNVYKEAFETQSLLESLTKRLEKTDEKMGQLCQYLEEGMYTPDMFVKRRDTLIQEKDELQKAVKEARKKMSGMKDIKEKTSSLHEALNLLRDDSISPRLKNTFLKKIIKVIYFSRINDEIVLKVVLR

SEQ ID NO: 6492 - protein, 491 aa, Unknown
  Description of Unknown: Integrase B6493 sequence
  cd03768,SM00857,IPR036162,PF13408,PS51737, G3DSA:3.40.50.1390,IPR025827,IPR006119,PF07508,IPR011109, SSF53041,PTHR30461,PS51736,Coil,PF00239
MIAVYTRQSIDKKDSISIETQVEMCQKEIKTQGLEFKIYKDKGFSGKNTDRPAFQNLMADVKQGNIDTIVVYRLDRISRSVLDFANIIDILQKHNVSFISASEKFDTSTPVGKAMLYIVMVFAQLERETIAERVKDNYYQRGETGAWGGGIAPFGYSNTKITIGGKKVATIQQNNDIELVKQIFYEYANTDKSLGNIASDLTEKLNVMWNNIKLSRMLHSPAYVQADVDIYNYYVAKGCVIESDVSLFNGVNGLNVYGKRDRGANKYNNLKDHHIAVGFHSGVIPSDLWLKCQYKLDKNIQIKNNGKGKHTWLTGLIKCGYCGRAMTVKTYKETKYFNCSGRAIKMCDAEVVTHYVSDIEELVHQKMINYVENFSDCKVKSIENENKQEINSLKAGLVQIEKEIENIINNLTVANSTLMEYANKKIEELDNKKKQTLDKINKLNITKDVELKIPNLDGWNSWDIEAKRDVAKTLIDKVYVYKDRIHIKWAY

SEQ ID NO: 6493 - protein, 491 aa, Unknown
  Description of Unknown: Integrase B6494 sequence
  cd03768,PTHR30461:SF3,SM00857,G3DSA:1.10.10.2600, IPR036162,PF13408,IPR025827,G3DSA:3.40.50.1390, PS51737,IPR006119,IPR038109,PF07508, IPR011109,SSF53041,PTHR30461,PS51736,PF00239
MIAIYSRQSIDKKDSISIETQIEFCRHEAKGEEYKVYSDKGYSGKNTNRPGFENMMDDIKRGLINKVVVYRLDRISRSIVDFADFIDSLEKYNTSFISATEKFDTAAPMGRAMLYIIIVFAQLERETIAERIKDNYYERIKRGGIGGGPAPYGFDISKITIDGTKMSSYTPNGNIETVKKIFDMYTSAGVSLADIQRYLKEKNIKTASGKPWDNTKLSTLIKSPSYVKADISIYNYYKQKGAVIASPLEDFNGENACLLVGKRNSNTRKYSDITDHILAVSAHKGIVDSGTFLLCQQKLSENRQIKNLHKGKYSWLTGFVKCGYCGYSFSVRKSRTSEGETAYFYDSGKYLYKTCTHNQTHRVKDVEDVVESELIRIIEKIDFKEKEDTPVNNQNINKIKEIDAKISNLILALEDCSGVSSSYINTRIAELDMEKQELLDKISSDALNRKKIALPKIEDYNNMSFEEKRLLAKMLIDKVILTDDKIEISYK

SEQ ID NO: 6494 - protein, 491 aa, Unknown
  Description of Unknown: Integrase B6495 sequence
  cd00338,SM00857,IPR006118,G3DSA:1.10.10.2600,IPR036162, PS51737,G3DSA:3.40.50.1390,IPR006119,IPR038109,PF07508, IPR011109,SSF53041,PTHR30461,PS00397,PS51736, Coil,PF00239
MSTTIKTAAAYIRVSTDRQEELSPDAQRRELKNYAKKNGIMITDIFEDTGISGRNAEKRPAFQKMISYAKSKEHPYDYILVWKFSRFARNQEESIVYKSLLQKNGVEVVSITEPLIDGPFASLIERIIEWMDEYYSIRLASDVKRGMEEKALRGGYQAAPPLGYHMEDHIPVIYEPEAVIVREIYRLAAEGKTSTTIARIINDAGYRTRRGKLFEHRGIVYILQNPFYKGYVRWNYRKHSSYHNNADNDIITTKGLHKPLIDENHWTQVQKIVPFVPGHTGQRRRKSDTLFNHYLCGIMRCPACGANLSFHTNKTYTSFVCWKYSKGMHTNTGNIVAWRCEEALVDSLRKTIDSTSADMTFHATLPDTPLASDMLRQYQDSLAKLEQKEQRIKDAYIEGIDTKEEYKENKFRIAEERDHLKKLIKKEERRCTPHTAAINGATYISMIKNLLDTLEDESIDVAEKHEAVAKIIDHMEYHRDSDTFNIFYSYS

SEQ ID NO: 6495 - protein, 491 aa, Unknown
  Description of Unknown: Integrase B6496 sequence
  cd03768,SM00857,IPR036162,PF13408,IPR025827, G3DSA:3.40.50.1390,PS51737,IPR006119,PF07508,SSF53041, IPR011109,PTHR30461,PS51736,Coil,PF00239
MIAIYTRQSIDKKDSISIETQVEMCQKEIKTQGLEFKIYKDKGFSGKNTDRPAFQNLMADVKQGNIDTIVVYRLDRISRSVLDFANIIDILQKHNVSFISASEKFDTSTPVGKAMLYIVMVFAQLERETIAERVKDNYYQRGETGAWGGGIAPFGYSNTKTTIGGKKVATIQQNDDIELVKQIFYEYANTDKSLGNIASDLTEKLNVMWNNIKLSRMLHSPAYVQADVDIYNYYVAKGCVIESDVSLFNGVNGLNVYGKRDRGANKYNNLKDHHIAVGFHSGVIPSDLWLKCQYKLDKNIQIKNNGKGKHTWLTGLIKCGYCGRAMTVKTYKETKYFNCSRRAIKMCDAEVVTHYVSDIEELVHQKMINYVENFSDCKIKDIENDNRQEINSLKAELVQIEKDIENIVNNLAVANTTLMEYANKKIEELDNKKKQTLDKINKLNVTKDVELKIPNLDGWDSWDIEAKRDVAKTLIDKVYVYKDRIHIKWAY

SEQ ID NO: 6496 - protein, 491 aa, Unknown
  Description of Unknown: Integrase B6497 sequence
  PTHR30461:SF3,IPR036162,PS51737,IPR011109,PTHR30461, PS00397,PF00239,G3DSA:1.10.10.2600,IPR006119,SSF53041, cd00338,SM00857,IPR025827,IPR038109, PS51736,IPR006118,PF13408,G3DSA:3.40.50.1390,PF07508,Coil
MRFLNVALYVRVSTDIQVDGYSIDEQLERLEKYCDAKDWIIYNKYIDPGFTGSNINRPGLTKLLQDIHKGKIDLVLVYKLDRLSRSQKDTLYLIEEEFLPNNVDFISMTENFDTSTPFGKAMIGILSVFAQLERENIKTRLAMGHVGRAKAGYWRGGSNPPIGYDFINGKLIINEYEALQVRTIYKMFLDGETIHGITRYMSEHFTNRYSNYRTPGQTGVILRNRLYIGKIKYKGVEYDGVHEPIIDIDTFERVQKRYKEISGKWSDHYRSPFKAKHLLTGLLYCGNCGARYFACTQRRKDKTTGKYIKSTESYVYYKCYTRDGNKSMRKGDYCKNPTIRVDKLDKVILDEIKKLKLDPDRLERIINTESKEKVENTELTVLRNKLDNTQSKIDKLMDLYTIGTIPITEIGDRIKPLYEEKEKIELEINTRENELQEPHGLSISETRDILDQFADIDNLDHDLKRELVQSLIERIEVLPEPDSIKIYWKFV

SEQ ID NO: 6497 - protein, 490 aa, Unknown
  Description of Unknown: Integrase B6498 sequence
  PTHR30461:SF3,SM00857,G3DSA:1.10.10.2600,IPR036162,PF13408, IPR025827,G3DSA:3.40.50.1390,PS51737,IPR006119,IPR038109, PF07508,IPR011109,SSF53041,PF00239,PTHR30461, PS51736,Coil,cd00338
MKAALYTRVSTDEQAEHGFSLEAQKKRLIEYCNKNNIEIYKLYSDEGISGHSIIKRKALQEMLQDAKEHKFNYVIAYKTDRISRNLLDLLTIKNQLDEADVELLLSDEAIDTKDDAGMTMFSIMGAFAELERKKITERMMAGKRQKLMNEHIKLKNGRVPYGYLYDDENKKYIIDESRRSIVELIYKLASQGWSYNKITRHIAEETAANSSDSKKKWYISDIRAILTNPIYKGYSGISYYYNFNDRAKKPKNSAILYKATNVEPYFTEEYWDTLYSQLEKKTQYFKRKHPIDSYIFSDVLFCATCGLKIGTRQHHANYLYYVCNSKHKMYDNDHICDYAININKFNNWFIEFIRGIDENNIKLSVSKPKDLDRELQAVRSQISIKEKNREVLLDKLMNGVIDDTEYRLASNMVIASLNSLKSQEKELSDKMDSLKEKEQTKRYNRLKIKALKVLVNDWDNLTDQAKKTLINSSINKIMITKDGIQEIEFN

SEQ ID NO: 6498 - protein, 490 aa, Unknown
  Description of Unknown: Integrase B6499 sequence
  SM00857,IPR006118,G3DSA:1.10.10.2600,IPR036162,PF13408, PS51737,PS00397,G3DSA:3.40.50.1390,IPR025827,IPR006119, IPR038109,PF07508,SSF53041,IPR011109,PTHR30461, Coil,cd00338,PF00239
MTAKNAESFLEIGAAYIRVSTDDQTELSPDAQVRVIQEEAKKDGFFIPTEYIFIEHKGISGRKASNRPEFQKMIATAKSQKPSPFKRLYLWKFSRFARNQEESTFYKGILRKKCGVEIKSVSEPIMEGMFGRLIETIIEWFDEYYSYNLSGEVLRGMTEKALRSGYQATPCLGYQAIGEGKPFVLDPKAVPLVEYIFQSYNQGKDMTYIARNLNKQGHVTRRGNAFGRRTVHGILTNPFYKGEVCWNGIKFTGSHELIPSVASIFDSVQERINAEYHPKQRREASSTAHWLSGLLKCGTCGSSLGFCRSKDQKKRPDFFQCWRYSKGFHPDSCSVSARIAEKAVLDSLKSAIDTQSINYEYVPSADIQNQSEEALIQEALTRLETKERRIKEAYENEVDTLEEYKDNKCRLQAERKSLLTSLERLHQEQPDFSNQIAHKQKLLAEIATIYDFVLDPNVSNEDKGNALRRVLKKIVFDRKTSVFTFFYYVS

SEQ ID NO: 6499 - protein, 490 aa, Unknown
  Description of Unknown: Integrase B6500 sequence
  PTHR30461:SF3,IPR036162,PS51737,IPR011109,PTHR30461, PS00397,PF00239,G3DSA:1.10.10.2600,IPR006119,SSF53041, cd00338,SM00857,IPR025827,IPR038109,PS51736, IPR006118,PF13408,G3DSA:3.40.50.1390,PF07508,Coil
MAKDILNMKSACAYIRVSTDKQEELSPDAQKRLLIDFAKKNNMSLLASNIYLDNGISGKKADKRPEFMKMIGMAKSKEHPFDVILVWKFSRFARNQEESIVYKSLLKKNHVEVVSISEPLIDGPFGSLIERIIEWMDEYYSIRLSGEVLRGMTEKALRGGYQSSLPLGYKMNKDTGIPYIYDDEAVIVRKIYHDYISGHSYLEIARELNSLGYRTKRGSTYEGRTVEYILSNPFYYGAVRWNRQKHDDHTIKSVSDWIIAEGKHESLIDKETWDEVQHLIALRSRPYKARAAGHMKHWLGGIVKCSDCGASLMAGLNATRYQCGNYNKGKCSHSHYIKTVALEHAVYEAFERVLDGSGELHYELKKSSNEPDTDDRSVILNQLSKLEDKEARIKQAYRDGIDTLEEYKENKQLLKDEREALEKQLEAFSSASDDSNSNATMLKSISTVYDIIKDTSRDTLTRSNAIRSIVDHFVYDKEKDKLEVYFFMQK

SEQ ID NO: 6500 - protein, 490 aa, Unknown
  Description of Unknown: Integrase B6501 sequence
  PTHR30461:SF3,IPR036162,PS51737,IPR011109,PTHR30461, PS00397,PF00239,G3DSA:1.10.10.2600,IPR006119,SSF53041, cd00338,SM00857,IPR025827,IPR038109,PS51736, IPR006118,PF13408,G3DSA:3.40.50.1390,PF07508,Coil
MAKDILNMKSACAYIRVSTDKQEELSPDAQKRLLIDFAKKNNMSLLASNIYLDNGISGKKADKRPEFMKMIGMAKSKEHPFDVILVWKFSRFARNQEESIVYKSLLKKNHVEVVSISEPLIDGPFGSLIERIIEWMDEYYSIRLSGEVLRGMTEKALRGGYQSSLPLGYKMNKDTGIPYIYDDEAVIVRKIYHDYISGHSYLEIARELNSLGYRTKRGSTYEGRTVEYILSNPFYYGAVRWNRQKHDDHTIKSVSDWIIAEGKHESLIDKETWDEVQHLIALRSRPYKSRAAGHMKHWLGGIVKCSDCGASLMAGLNATRYQCGNYNKGKCSHSHFIKTTALEEAVYKSLERVLDGSIELHYELKKSTNEPEEDSKSMLLNRLSKLDDKETRIKQAYRDGIDTIEEYKENKQLLKDEREELQRKLESFKNTSSDEDGNKLLLKNISSVLNIIKDTSNDTLTRANAIRSIVDHFVYDKEKDKLEVYFFLQE

SEQ ID NO: 6501 - protein, 490 aa, Unknown
  Description of Unknown: Integrase B6502 sequence
  PTHR30461:SF3,IPR036162,PS51737,IPR011109,PTHR30461, PS00397,PF00239,G3DSA:1.10.10.2600,IPR006119,SSF53041, cd00338,SM00857,IPR025827,IPR038109,IPR006118, PF13408,G3DSA:3.40.50.1390,PF07508,Coil
MTTKNTESFLEIGAAYIRVSTDDQTELSPDAQLRVIQEEAKKDGYIIPKEFIFEEKKGISGRKADNRPAFQRMIAVAKSQKPAPFKRLYLWKFSRFARNQEESTFYKGILRKKCGVEIKSVSEPITDGMFGRLIETIIEWFDEYYSYNLSGEVLRGMTEKALRSGYQTVPCLGYKAVGGGRPFVLDPDAVPIVEYIFQAYSQGKDMLSIARDLNLQGYKTNRGGSFELRGVHRILVNRFYIGDVTWNGITFHGTHETIPAVVSVFGSVQERIQAEYQPRHRKQASATAHWLSGLLKCSTCGASLGYTCTKDSKKHPAFFQCWKYAKGLHQGSCSVSASIAERAVLNSLRSALESHDVNYEYIPPKNSVTLTEEALLTEALARLDVKERRVKEAYENEIDTLEEYKNNKLRLKLEREDLLSQLERLRQDSPSAPDPQQCKEKLLEQISTVYDFITDPNVNYVEKNNALRRIIKKIVFDRKTGTFTFFYYTL

SEQ ID NO: 6502 - protein, 490 aa, Unknown
  Description of Unknown: Integrase B6503 sequence
  PTHR30461:SF3,IPR036162,PS51737,IPR011109,PTHR30461, PS00397,PF00239,G3DSA:1.10.10.2600,IPR006119,SSF53041, cd00338,SM00857,IPR025827,IPR038109,PS51736, IPR006118,PF13408,G3DSA:3.40.50.1390,PF07508,Coil
MAKDILNMKSACAYIRVSTDKQEELSPDAQKRLLIDFAKKNNMSLLAENIYIDNGISGKKADKRPEFMKMIGLSKSKEHPFDVILVWKFSRFARNQEESIVYKSLLKKNHVDVMSVSEPLIDGPFGTLIERIIEWMDEYYSIRLSGEVLRGMTEKALRGGYQSSLPLGYRMNKDTGIPYIYEEEAVIVRKIYNDYIAGHSYLEIARELNALGYKTKRGAAFEGRTVEYILSNPFYYGAVRWNRQNHDNHTIKDISEWIIVMGKHPAIINKETWDLVQHLIALRSKPYKARAAGHMKHWLGGIVKCSDCGASLMAGLNATRYQCGNYNKGKCLHSHFIKTAALEEAVYESLERVLNGSIELHYELKKSSNEPEEDSKSILLGQLSKLEDKEARIKQAYRDGIDTIEEYKENKQLLKDERESLSAKLQSLKDTLSDKDDTAAMLNNISNVLDIIKDASKDTLTRANAIRSIVDHFVYDKEKDKLEVYFFLQK

SEQ ID NO: 6503 - protein, 490 aa, Unknown
  Description of Unknown: Integrase B6504 sequence
  cd00338,SM00857,G3DSA:1.10.10.2600,IPR036162,PF13408, PS51737,G3DSA:3.40.50.1390,IPR025827,IPR006119,IPR038109, PF07508,IPR011109,SSF53041,PTHR30461,PS51736, Coil,PF00239
MAYCMYLRKSRADKDYENLSTETILNRHEKALMELAQKHNYDISKIFREVVSGETLSQRPQMQILLNEVENNMYDGVLVMEVERLARGNSVDQGIIAQAFKYSNTLIITPTKTYDPQNEFDEEYFEFGLFMSRREYKTINRRLNAGRLASCKEGKFVGSVTPYGYTKEKLKNQKGYKLVPDLEESKVLKLIFDLYTNSMGIRNICKHLDSLGIKPRNSENWSTSTIRDILKNPVYIGKILWQKTYSTKTTKDGFVKSKRYKNKEDFYTFNGIHSPLISEDTFQKAQNILLQNSHPPVNNTSLKNPFAGILYCNLCGKAIVRRFVNNKYQYLMCNNPNCQNTATELKNIENCILNIIENHFNYTTSPTVFEKEDNTNELFYINKEIKKLKLQFSNIFDLLEQKIYSKETFLERKQMLEKNIEILTLQKEKFENNASQINPINTPVTILELYNKLDDIKNKNQLLKNIFSKIYYSKIDNNIKITIYSKLPIK

SEQ ID NO: 6504 - protein, 490 aa, Unknown
  Description of Unknown: Integrase B6505 sequence
  PTHR30461:SF3,IPR036162,PS51737,IPR011109,PTHR30461, PS00397,PF00239,G3DSA:1.10.10.2600,IPR006119,SSF53041, cd00338,SM00857,IPR025827,IPR038109,PS51736, IPR006118,PF13408,G3DSA:3.40.50.1390,PF07508,Coil
MAKDILNMKSACAYIRVSTDKQEELSPDAQKRLLIDFAKKNNMSLLAENIYIDNGISGKKADKRPEFMKMIGLSKSKEHPFDVILVWKFSRFARNQEESIVYKSLLKKNHVDVMSVSEPLIDGPFGTLIERIIEWMDEYYSIRLSGEVLRGMTEKALRGGYQSSLPLGYRMNKDTGIPYIYEEEAVIVRKIYNDYIAGHSYLEIARELNALGYKTKRGAAFEGRTVEYILSNPFYYGAVRWNRQNHDNHTIKSISDWIIAEGKHKPLIDKETWDLVQHLIALRSKPYKARAAGHMKHWLGGIVKCSDCGASLMAGLNATRYQCGNYNKGKCLHSHFIKTAALEEAVYESLERVLNGSIELHYELKKSSNEPEEDSKSILLGQLSKLEDKEARIKQAYRDGIDTIEEYKENKQLLKDEREELQRKLESFKNTSSDEDGNKLLLKNISSVLNIIKDTSNDTLTRANAIRSIVDHFVYDKEKDKLEVYFFLQE

SEQ ID NO: 6505 - protein, 490 aa, Unknown
  Description of Unknown: Integrase B6506 sequence
  SM00857,IPR006118,G3DSA:1.10.10.2600,IPR036162,PF13408, PS51737,G3DSA:3.40.50.1390,IPR025827,PS00397,IPR006119, IPR038109,PF07508,SSF53041,IPR011109,PTHR30461, Coil,cd00338,PF00239
MTAKNAESFLEIGAAYIRVSTDDQTELSPDAQVRVIQEEAKKDGFFIPTEYIFIEHKGISGRKASNRPEFQKMIATAKSQKPSPFKRLYLWKFSRFARNQEESTFYKGILRKKCGVEIKSVSEPIMEGMFGRLIETIIEWFDEYYSYNLSGEVLRGMTEKALRSGYQATPCLGYQAIGEGKPFVLDPKAVPLVEYIFQSYNQGKDMTYIARNLNKQGHVTRRGNAFGRRTVHGILTNPFYKGEVCWNGIKFTGSHELIPSVASIFDSVQERINAEYHPKQRREASSTAHWLSGLLKCGTCGSSLGFCRSKDQKKRPDFFQCWRYSKGFHPDSCSVSARIAEKAVLDSLKSAIDTQSINYEYVPSADIQNQSEEALILEALTRLETKERRIKEAYENEVDTLEEYKDNKCRLQAERKSLLTSLERLHQEQPDFSNQIAHKQKLLAEIATIYDFVLDPNVSNEDKGNALRRVLKKIVFDRKTSVFTFFYYVS

SEQ ID NO: 6506 - protein, 490 aa, Unknown
  Description of Unknown: Integrase B6507 sequence
  SM00857,IPR006118,G3DSA:1.10.10.2600,IPR036162,PF13408, PS51737,G3DSA:3.40.50.1390,IPR025827,PS00397,IPR006119, IPR038109,PF07508,SSF53041,IPR011109,PTHR30461, Coil,cd00338,PF00239
MTAKNAESFLEIGAAYIRVSTDDQTELSPDAQVRVIQEEAKKDGFFIPTEYIFIEHKGISGRKASNRPEFQKMIATAKSQKPSPFKRLYLWKFSRFARNQEESTFYKGILRKKCGVEIKSVSEPIMEGMFGRLIETIIEWFDEYYSYNLSGEVLRGMTEKALRSGYQATPCLGYQAIGEGKPFVLDPKAVPLVEYIFQSYNQGKDMTYIARNLNKQGHVTRRGNAFGRRTVHGILTNPFYKGEVCWNGIKFTGSHELIPSVASIFDSVQERINAEYHPKQRREASSTAHWLSGLLKCGTCGSSLGFCRSKDQKKRPDFFQCWRYSKGFHPDSCSVSARIAEKAVLDSLKSAIDTQSINYEYVPSADIQNQSEEALIQEALTRLETKERRIKEAYENEVDTLEEYKDNKCRLQAERKSLLTNLERLHQEQPDISNQIAHKQKLLAEIATIYDFVLDPNVSNEDKGNALRRVLKKIVFDRKTSVFTFFYYVS

SEQ ID NO: 6507 - protein, 490 aa, Unknown
  Description of Unknown: Integrase B6508 sequence
  PTHR30461:SF3,IPR036162,PS51737,IPR011109,PTHR30461, PS00397,PF00239,G3DSA:1.10.10.2600,IPR006119,SSF53041, cd00338,SM00857,IPR025827,IPR038109,PS51736, IPR006118,PF13408,G3DSA:3.40.50.1390,PF07508,Coil
MAKDILNMKSACAYIRVSTDKQEELSPDAQKRLLIDFAKKNNMSLLASNIYLDNGISGKKADKRPEFMKMIGMAKSKEHPFDVILVWKFSRFARNQEESIVYKSLLKKNHVEVVSVSEPLVDGPFGTLIERIIEWMDEYYSIRLSGEVLRGMTEKALRGGYQSTLPLGYRMNKDTGIPYIYEPEAVIVRKIYKDYIAGLSYLEIARELNALGYKTKRGAAFEGRTVEYILSNPFYYGAVRWNRQKHDDHTIKSISDWIIAEGKHPALIDKAIWDEVQHLIALRSRPYKARAAGHMKHWLGGIVKCSDCGASLMAGLNATRYQCGNYNKGKCLHSHFIKTAALERAVYEAFKRILDGSVELHYELKKSSNEPDTDDRSIILNQLSKLDDKDARIKQAYRDGIDTIDEYKENKQLLKDERAALEKQLEAFNNSSSDTDSNAAMLKNISSVYDIIKDTSKDTLTRANAIRSVVDHMVYDRENDKLEIYFFLQK

SEQ ID NO: 6508 - protein, 490 aa, Unknown
  Description of Unknown: Integrase B6509 sequence
  PTHR30461:SF3,IPR036162,PS51737,IPR011109,PTHR30461, PS00397,PF00239,G3DSA:1.10.10.2600,IPR006119,SSF53041, SM00857,IPR025827,IPR038109,PS51736,cd03768, IPR006118,PF13408,G3DSA:3.40.50.1390,PF07508
MERKVACYIRVSTQEQATHGFSVGEQETRLRKYCEAHEWTIAGVYEDPGFSGAYLDRPGIQKLIRDVDLGIFDTVLVWKLDRLSRSQKNTMYMIEDVFLKHNINFISMNENFDTSTPFGRAMVGILSVFAQLDRDQITQRMTMGRIGRAKAGYYSGGSQPPIGYTYTRADGGEKKTLEVDEYEAMQVRMVYDLFLNGLDGKDMTFSDITRYMAAHYSNRYGGWQQPCTVSRMLSNPVYIGKVKFSGEFYDGTHEPIISEETFKKAQEKYQRHIQNFSKSIQNFKGCYLLTGLIHCGACGSRYFVTSTKNTNKTASIKPYYHSYACYGRKPVNVNMMKNGRCKNKIYKMEVLDAYVLDEIQKLKENPELIGDLRTGPKDDKTAAIESRIRELDKQMGKLVDLYQLGTIAFDEIRKRTDAIRAERDKLKGELGHEKRPDGVISETEFRDRLDAFDADIFSDLDIERKQAIVRSLINKIVIYPDLIEIRWAFH

SEQ ID NO: 6509 - protein, 490 aa, Unknown
  Description of Unknown: Integrase B6510 sequence
  PTHR30461:SF3,IPR036162,PS51737,IPR011109,PTHR30461, PS00397,PF00239,G3DSA:1.10.10.2600,IPR006119,SSF53041, cd00338,SM00857,IPR025827,IPR038109,PS51736, IPR006118,PF13408,G3DSA:3.40.50.1390,PF07508,Coil
MAKDILNMKSACAYIRVSTDKQEELSPDAQKRLLIDFAKKNNMSLLASNIYLDNGISGKKADKRPEFMKMIGMAKSKEHPFDVILVWKFSRFARNQEESIVYKSLLKKNHVEVVSISEPLIDGPFGSLIERIIEWMDEYYSIRLSGEVLRGMTEKALRGGYQSSLPLGYKMNKDTGIPYIYDDEAVIVRKIYHDYISGHSYLEIARELNSLGYRTKRGSTYEGRTVEYILSNPFYYGAVRWNRQKHDDHTIKSVSDWIIAEGKHESLIDKETWDEVQHLIALRSRPYKARAAGHMKHWLGGIVKCSDCGASLMAGLNATRYQCGNYNKGKCSHSHYIKTVALEHAVYEAFERVLDGSVELHYELKKSSNEPDTDDRSVILNQLSKLEDKEARIKQAYRDGIDTLEEYKENKQLLKDEREALEKQLEAFSSASDDSNSNATMLKSISTVYDIIKDTSRDTLTRSNAIRSIVDHFVYDKEKDKLEVYFFMQK

SEQ ID NO: 6510 - protein, 490 aa, Unknown
  Description of Unknown: Integrase B6511 sequence
  SM00857,G3DSA:1.10.10.2600,IPR036162,PF13408,PS51737, G3DSA:3.40.50.1390,IPR025827,IPR006119,IPR038109,PF07508, IPR011109,SSF53041,PF00239,PTHR30461,PS51736, Coil,cd00338
MAYCMYLRKSRADKDYENLSTETILNRHEKTLMELAQKHNYDISKIFREVVSGETLSQRPQMQILLNEVENNMYDGVLVMEVERLARGNSVDQGIIAQAFKYSNTLIITPTKTYDPQNEFDEEYFEFGLFMSRREYKTINRRLNAGRLASCKEGKFVGSVTPYGYTKEKLKNQKGYKLVPDLEESKVLKLIFDLYTNSMGIRNICKHLDSLGIKPRNSENWSTSTIRDILKNPVYIGKILWQKTYSTKTTKDGFVKSKRYKNKEDFYTFNGIHSPLISEDTFQKAQNILLQNSHPPVNNTSLKNPFAGILYCNLCGKAIVRRFVNNKYQYLMCNNPNCQNTATELKNIENCILNIIENHFNYTTSPTVFEKEDNTNELFYINKEIKKLKLQFSNIFDLLEQKIYSKETFLERKQMLEKNIEILTLQKEKFENNASQINPINTPVTILELYNKLDDIKNKNQLLKNIFSKIYYSKIDNNIKITIYSKLPIK

SEQ ID NO: 6511 - protein, 490 aa, Unknown
  Description of Unknown: Integrase B6512 sequence
  PTHR30461:SF3,IPR036162,PS51737,IPR011109,PTHR30461, PS00397,PF00239,G3DSA:1.10.10.2600,IPR006119,SSF53041, cd00338,SM00857,IPR025827,IPR038109,PS51736, IPR006118,PF13408,G3DSA:3.40.50.1390,PF07508,Coil
MAKDILNMKSACAYIRVSTDKQEELSPDAQKRLLIDFAKKNNMSLLASNIYLDNGISGKKADKRPEFMKMIGMAKSKEHPFDVILVWKFSRFARNQEESIVYKSLLKKNHVEVVSISEPLIDGPFGSLIERIIEWMDEYYSIRLSGEVLRGMTEKALRGGYQSSLPLGYKMNKDTGIPYIYDDEAVIVRKIYHDYIFGHSYLEIARELNSLGYRTKRGSTYEGRTVEYILSNPFYYGAVRWNRQKHDDHTIKSVSDWIIAEGKHESLIDKETWDEVQHLIALRSRPYKARAAGHMKHWLGGIVKCSDCGASLMAGLNATRYQCGNYNKGKCSHSHFIKTTALEEAVYKSLERVLDGSIELHYELKKSTNEPEEDSKSMLLNRLSKLDDKETRIKQAYRDGIDTIEEYKENKQLLKDEREELQRKLESFKNTSSDEDGNKLLLKNISSVLNIIKDTSNDTLTRANAIRSIVDHFVYDKEKDKLEVYFFLQE

SEQ ID NO: 6512 - protein, 490 aa, Unknown
  Description of Unknown: Integrase B6513 sequence
  PTHR30461:SF3,cd00338,SM00857,G3DSA:1.10.10.2600,IPR036162, PF13408,PS51737,G3DSA:3.40.50.1390,IPR025827,IPR006119, IPR038109,PF07508,SSF53041,IPR011109,PTHR30461, PS51736,Coil,PF00239
MRVVLYMRYSSDRQTEQSIEGQNRVCTAFCEQQGYEIVDRYIDRATSAFKDTDKRTEFQRMIRDSEKQLWEGIVIYKLDRFARNRYDSATYKARLKKNGVRVISATENISDNPEGVILEAVLEGMAEFYSKELSQKITRGMFESANKCHSIGGHIPLGYKIENKKLVIDEAGAAIVREAFDLYANGATVAEICDTFNTKGYRTAKNAEFNKNSFRSMFKNERYIGIYKYKDLRIEGGVPAIVDKDIFAIVQKKLSKNAEAPSRGKAKIDYLLSQKLFCGHCGSLMTGESGTGKGGTTYFYYTCGKRKREHTCDKKPLKKDFIERAVVEDALTLLTPETIDELADIAVNESIREMEENSIIPALKDQLHDTERSINNLVKMVEKGVESDTIADRLKELEKEKRAIEKRLVVAQDDYVLLEKDHIVWWLSEFCNGDIEDEEFRRHIIDLLVNSVTVWDEPDGWYKITSVYNLTSNKTKTFRCSDLSGQAPPI

SEQ ID NO: 6513 - protein, 490 aa, Unknown
  Description of Unknown: Integrase B6514 sequence
  PTHR30461:SF3,IPR036162,PS51737,IPR011109,PTHR30461, PS00397,PF00239,G3DSA:1.10.10.2600,IPR006119,SSF53041, cd00338,SM00857,IPR025827,IPR038109,PS51736, IPR006118,PF13408,G3DSA:3.40.50.1390,PF07508,Coil
MAKDILNMKSACAYIRVSTDKQEELSPDAQKRLLIDFAKKNNMSLLASNIYLDNGISGKKADKRPEFMKMIGMAKSKEHPFDVILVWKFSRFARNQEESIVYKSLLKKNHVEVVSVSEPLADGPFGTLIERIIEWMDEYYSIRLSGEVLRGMTEKALRGGYQSTLPLGYRMNKDTGIPYIYEPEAVIVRKIYKDYIAGLSYLEIARELNALGYKTKRGAAFEGRTVEYILSNPFYYGAVRWNRQKHDDHTIKSISDWIIAEGKHPALIDKAIWDEVQHLIALRSRPYKARAAGHMKHWLGGIVKCSDCGASLMAGLNATRYQCGNYNKGKCLHSHFIKTATLEQAVYEAFKRILDGSVELHYELKKSSNEPDTDDRSIILNQLSKLDDKEARIKQAYRDGIDTIDEYKENKLLLKDERAALEKQLEAFNNSSSDTDSNAAMLKNISSVYDIIKDTSKDTLTRANAIRSVVDHMVYDRENDKLEIYFFLHM

SEQ ID NO: 6514 - protein, 490 aa, Unknown
  Description of Unknown: Integrase B6515 sequence
  PTHR30461:SF3,IPR036162,PS51737,IPR011109,PTHR30461, PS00397,PF00239,G3DSA:1.10.10.2600,IPR006119,SSF53041, cd00338,SM00857,IPR025827,IPR038109,PS51736, IPR006118,PF13408,G3DSA:3.40.50.1390,PF07508,Coil
MATDIANMKVACAYIRVSTDKQEELSPDAQKRLLIDYAKKHNMSLLAENIYIDNGISGKKADKRPEFMKMISLAKSKEHPFDIILVWKFSRFARNQEESIVYKSLLKKNNVEVVSISEPLIDGPFGSLIERIIEWMDEYYSIRLSGEVLRGMTEKALRGGYQSLSSLPLGYKMNKDTGIPYIYEDEAIIVKKIYKDYIAGHSYLEISRELNALGYTTKRGAAFEGRTVEYILSNPFYYGAIRWNRQKHDDHTIKDISEWIIVIGKHPAIIDKETWDEVQHLMALRSRPYKARAAGHMKHWLGGIVKCSDCGASLMAGLNATRYQCGNYNKGKCSHSHYIKTAALEQAIYEAFERVLDGSMDLHYELKKSPNDGNTTDRDMILNQISKLGDKEARIKQAYRDGIDTIEEYKENKQLIENERKSLEAQLDSLKSSEADSSDEMLQHITSALNIIKDTSKDTLTRANAIRSVVDHCVYDKENDKLEVYFFLQK

SEQ ID NO: 6515 - protein, 490 aa, Unknown
  Description of Unknown: Integrase B6516 sequence
  IPR036162,PS51737,IPR011109,PTHR30461,PS00397, PF00239,G3DSA:1.10.10.2600,IPR006119,SSF53041,cd00338, SM00857,IPR025827,IPR038109,PS51736,IPR006118, PF13408,G3DSA:3.40.50.1390,PF07508,Coil
MNQNESLKTAFGYIRVSTHMQEEISPEAQKHELQKWAKQHNILITQWFQDNGISGKKAENRTAFQNMIALAKEKDHPDYILAWKFSRFARNQEESIVYKSLLRKNNVQVVSISEPLPDGPFAPLIERIIEWMDEYYSIRLSGEVKRGMKEKAKKGGYQSAPPLGYRREKGDTVPVIYEPEAKIYRLIKKYFIQDEYNPTTIARTLNDQGYRTRQGNRFEARVVIYILRNPFYIGKIRWNRSSHGGYYENSDGQHEPLCTSEEWDTISKRIKKYTPGSTGRRRSKTLLPHYLSGGLFRCPICGASMCYQRGVSKKLPRAYPYFCCWKYAKGIHSENVNASAPKTEEALLNSLQEFVDHGHSDITYTVEKVEEPSGNNAAQYEQLLDKLAIRKQRAKEAYLDGIDTKEEYRENRELIDAEVKSIKEKLATLETAAVITTTEEFHVDIREIILKLKDDTLSTLEKHTALASILDYMEYDKEKNEYSFYYKFEE

SEQ ID NO: 6516 - protein, 490 aa, Unknown
  Description of Unknown: Integrase B6517 sequence
  PTHR30461:SF3,IPR036162,PS51737,IPR011109,PTHR30461, PS00397,PF00239,G3DSA:1.10.10.2600,IPR006119,SSF53041, cd00338,SM00857,IPR025827,IPR038109,IPR006118, PF13408,G3DSA:3.40.50.1390,PF07508,Coil
MTTKNTESFLEIGAAYIRVSTDDQTELSPDAQVRVIQEESKKDGFFIPTEYIFIEHKGISGRKASNRPEFQKMIATAKSQKPSPFKRLYLWKFSRFARNQEESTFYKGILRKKCGVEIKSVSEPIMEGMFGRLIETIIEWFDEYYSYNLSGEVLRGMTEKALRSGYQATPCLGYQAIGEGKPFVLDPKAVPLVEYIFQSYNQGKDMTYIARNLNKQGHVTRRGNAFGRRTVHGILTNPFYKGEVCWNGIKFTGSHELIPSVASIFDSVQERINAEYHPKQRREASSTAHWLSGLLKCGTCGSSLGFCRSKDQKKRPDFFQCWKYSKGFHPDSCSVSARIAEKAVLDSLKSAIDTQSINYEYVPSADIQNQSEEALIQEALTRLETKERRIKEAYENEVDTLEEYKDNKCRLQAERKSLLTNLERLHQEQPDISNQIAHKQKLLAEIATIYDFVLDPNVSNEDKGNALRRVLKKIVFDRKTSVFTFFYYVS

SEQ ID NO: 6517 - protein, 490 aa, Unknown
  Description of Unknown: Integrase B6518 sequence
  PTHR30461:SF3,SM00857,G3DSA:1.10.10.2600,IPR036162,PF13408, PS51737,G3DSA:3.40.50.1390,IPR025827,IPR006119,IPR038109, PF07508,IPR011109,SSF53041,PF00239,PTHR30461, PS51736,Coil,cd00338
MKAALYTRVSTDEQAEHGFSLEAQKKRLIEYCNKNNIEIYKLYSDEGISGHSIIKRKALQEMLQDAKEHKFNYVIAYKTDRISRNLLDLLTIKNQLDEADVELLLSDEAIDTKDDAGMTMFSIMGAFAELERKKITERMMAGKRQKLMNEHIKLKNGRVPYGYLYDDENKRYVIDESRRSVVELIYKLASQGWSYNKITRHIAEETAANSSDSKKKWYISDIRAILTNPIYKGYSGISYYYNFNDRAKKPKNSAILYKATNVEPYFTEEYWDTLYSQLEKKTQYFKRKHPIDSYIFSDVLFCATCGLKIGTRQHHANYLYYVCNSKHKMYDNDHICDYAININKFNNWFIEFIRGIDENNIKLSVSKPKDLDRELQAVRSQISIKEKNREVLLDKLMNGVIDDTEYRLASNMVIASLNSLKSQEKELSDKMDSLKEKEQTKRYNRLKIKALKVLVNDWDNLTDQAKKTLINSSINKIMITKDGIQEIEFN

SEQ ID NO: 6518 - protein, 490 aa, Unknown
  Description of Unknown: Integrase B6519 sequence
  PTHR30461:SF3,IPR036162,PS51737,IPR011109,PTHR30461, PS00397,PF00239,G3DSA:1.10.10.2600,IPR006119,SSF53041, cd00338,SM00857,IPR025827,IPR038109,IPR006118, PF13408,G3DSA:3.40.50.1390,PF07508,Coil
MTTKNTESFLEIGAAYIRVSTDDQTELSPDAQVRVIQEEAKKDGFFIPTEYIFIEHKGISGRKASNRPEFQKMIATAKSQKPSPFKRLYLWKFSRFARNQEESTFYKGILRKKCGVEIKSVSEPIMEGMFGRLIETIIEWFDEYYSYNLSGEVLRGMTEKALRSGYQATPCLGYQAIGEGKPFVLDPKAVPLVEYIFQSYNQGKDMTYIARNLNKQGHVTRRGNAFGRRTVHGILTNPFYKGEVCWNGIKFTGSHELIPSVASIFDSVQERINAEYHPKQRREASSTAHWLSGLLKCGTCGSSLGFCRSKDQKKRPDFFQCWKYSKGFHPDSCSVSARIAEKAVLDSLKSAIDTQSINYEYVPSADIQNQSEEALIQEALTRLETKERRIKEAYENEVDTLEEYKDNKCRLQAERKSLLTNLERLHQEQPDISNQIAHKQKLLAEIATIYDFVLDPNVSNEDKGNALRRVLKKIVFDRKTSVFTFFYYVS

SEQ ID NO: 6519 - protein, 490 aa, Unknown
  Description of Unknown: Integrase B6520 sequence
  PTHR30461:SF3,IPR036162,PS51737,IPR011109,PTHR30461, PS00397,PF00239,G3DSA:1.10.10.2600,IPR006119,SSF53041, cd00338,SM00857,IPR025827,IPR038109,IPR006118, PF13408,G3DSA:3.40.50.1390,PF07508,Coil
MSDKPTPKNLEIGAAYIRVSTDDQAELSPDAQIRVIMETAKADGYIIPKEFIFEEKKGISGRKADNRPEFQRMIAVAKSQKPSPFKRLYLWKFSRFARNQEESTFYKGILRKKCGVEIKSVSEPIADGMFGRLIETIIEWFDEYYSYNLSGEVLRGMTEKALRSGYQAVPCLGYKAVGGGRPFVLDPDAVPIVEYIFQAYSHGKDMLTIARDLNLQGYKTNRGCPFELRGVQRILVNRFYVGDVTWNGITFHGTHETIPAVTSVFESVQARIQSEYQPRHRKQASATAHWLSGLLKCGVCGGSLGFNRTKDEKRRPSFFQCWKYSKGVHPDSCSVSVSIAERAVLDSLRSALESHDVTYEYIPPENPVTLTEEALLKEALSRLDVKERRIKEAYESEIDTLEEYKNNKVRLKSERAEILSQLEKLQQGQPSAPDPQQSKEKLLAQISTVYDLILDPDVSYVEKNNALRRILKKIVFDRKTGTFTFFYYTL

SEQ ID NO: 6520 - protein, 490 aa, Unknown
  Description of Unknown: Integrase B6521 sequence
  SM00857,G3DSA:1.10.10.2600,IPR036162,PF13408,PS51737, G3DSA:3.40.50.1390,IPR025827,IPR006119,IPR038109,PF07508, IPR011109,SSF53041,PF00239,PTHR30461,PS51736, Coil,cd00338
MAYCMYLRKSRADKDYENSSTEAILNRHEKALLELAQNNNYKISQIFREVVSGETLSQRPEMQKLLAQVENNMYDGVLVMEVERLARGNSVDQGIIAQAFKYSNTLIITPTKVYDPQNEFDEEYFEFGLFMSRREYKTINRRLNAGRLASCKEGKFVGSITPYGYSKEKLKNQKGYKLVPDLEESKVLKLIFELYTNSMGIRNICKYLDSLGIKPRNSQNWSTSTIRDILKNPVYTGKILWNKTYSTKTTKDGIVKSKRHRNKDNFYTFDGIHSPLISDDIFQKAQNILLQNSHTPVNNLLLKNPFAGILYCNLCGKAIVRRLVNNKYQYLMCNNPNCQNNSIDLKAIEKYILNSIQKYFNYTVDFSNYERKDNSTELFYIDRELKKLTLQLNNIFDLLEQKIYNRETFLERKQVLEENINILNSQKEKILSNTPQLNSIDSPITILELYNRLENIKSKNQLLKNIFSKIYYSKIDNNIEITIYSKIPIK

SEQ ID NO: 6521 - protein, 490 aa, Unknown
  Description of Unknown: Integrase B6522 sequence
  cd03768,PTHR30461:SF3,SM00857,G3DSA:1.10.10.2600,IPR036162, PS51737,G3DSA:3.40.50.1390,IPR006119,IPR038109,PF07508, IPR011109,SSF53041,PTHR30461,PS51736,Coil, PF00239
MKKIAIYIRKSVKGDENSISLEAQTEVIKHYFKGENKFTVYKDDGFSGGNTNRPAFQKLMADAMEGKFDTVACYKLDRIARNTLDFLTTFNTLKEYNIDLICVEDKYDPSTPAGRLMMTLLASLAEMERENIKQRVSDSMLNLAKQGRWTGGTAPFGYRVISKDGGKYLELEDSKNIKYIFNEFINGKGIIKLGNEFNCDKKKISRMLHNITYLQSSKDANIYLKQVLGYEVIGQVDGCGYLPYGKYKILNGKKVRNYDGLKVATVSKHEAVIDLDTFIKAQDRLKTFAGKKAPRISTKTFLAQMVQCGICGANMLVTLGQKRKDGTRKLYFSCSNKCGNKFKDVSELENDVLTTLKDVNFFDEIRKNTNIMNKDNSKIKKSMLKELEEKKKILDGLMDKLALVDSNLANVIIEKMNSVNVDINDLQNKINLLEKEEIASSYNKEDFKLKEENRKHFIEDFENMTMEEKQNSIRGVINKVVWDGKNIIIS

SEQ ID NO: 6522 - protein, 490 aa, Unknown
  Description of Unknown: Integrase B6523 sequence
  PTHR30461:SF3,IPR036162,PS51737,IPR011109,PTHR30461, PS00397,PF00239,G3DSA:1.10.10.2600,IPR006119,SSF53041, cd00338,SM00857,IPR025827,IPR038109,IPR006118, PF13408,G3DSA:3.40.50.1390,PF07508,Coil
MSDKPTPKSLEIGAAYIRVSTDDQAELSPDAQIRVIMETAKADGYIIPKEFIFEEKKGISGRKADNRPEFQRMIAVAKSQKPSPFKRLYLWKFSRFARNQEESTFYKGILRKKCGVEIKSVSEPIADGMFGRLIETIIEWFDEYYSYNLSGEVLRGMTEKALRSGYQAVPCLGYKAVGGGRPFVLDPDAVPIVEYIFQAYSQGKDMLTIARDLNLQGYKTNRGCPFELRGVQRILVNRFYVGDVTWNGITFHGTHETIPAVTSVFESVQARIQSEYQPRHRKQASATAHWLSGLLKCGVCGGSLGFNRTKDEKRRPSFFQCWKYSKGVHPDSCSVSVSIAERAVLDSLRSALESHDVTYEYIPPENPVTLTEEALLKEALSRLDVKERRIKEAYESEIDTLEEYKNNKVRLKSERAEILSQLEKLQQGQPSAPNPQQSKEKLLAQISTVYDLILDPDVSYVEKSNALRRILKKIVFDRKTGTFTFFYYTL

SEQ ID NO: 6523 - protein, 490 aa, Unknown
  Description of Unknown: Integrase B6524 sequence
  PTHR30461:SF3,IPR036162,PS51737,IPR011109,PTHR30461, PS00397,PF00239,G3DSA:1.10.10.2600,IPR006119,SSF53041, cd00338,SM00857,IPR025827,IPR038109,IPR006118, PF13408,G3DSA:3.40.50.1390,PF07508,Coil
MTTKNTESFLEIGAAYIRVSTDDQTELSPDAQVRVIQEESKKDGFFIPTEYIFIEHKGISGRKASNRPEFQKMIATAKSQKPSPFKRLYLWKFSRFARNQEESTFYKGILRKKCGVEIKSVSEPIMEGMFGRLIETIIEWFDEYYSYNLSGEVLRGMTEKALRSGYQATPCLGYQAIGEGKPFVLDPKAVPLVEYIFQSYNQGKDMTYIARNLNKQGHVTRRGNAFGRRTVHGILTNPFYKGEVCWNGIKFTGSHELIPSVASIFDSVQERINAEYHPKQRREASSTAHWLSGLLKCGTCGSSLGFCRSKDQKKRPDFFQCWKYSKGFHPDSCSVSARIAEKAVLDSLKSAIDTQSINYEYVPSADIQNQSEEALILEALTRLETKERRIKEAYENEVDTLEEYKDNKCRLQAERKSLLTSLERLHQEQPDFSNQIAHKQKLLAEIATIYDFVLDPNVSNEDKGNALRRVLKKIVFDRKTSVFTFFYYVS

SEQ ID NO: 6524 - protein, 490 aa, Unknown
  Description of Unknown: Integrase B6525 sequence
  PTHR30461:SF3,IPR036162,PS51737,IPR011109,PTHR30461, PF00239,G3DSA:1.10.10.2600,IPR006119,SSF53041,cd00338, SM00857,IPR025827,IPR038109,PS51736,mobidb-lite, PF13408,G3DSA:3.40.50.1390,PF07508,Coil
MEKAVAYIRVSTKSDFQLHSYEYQLEYWKNKIESEDNKILVSVYQDYGISGRSIHKRPQLLKLLEDAKKHEFSIVYTKSVSRFARNTTELLEMVRTLREENVKVIFEKENIDTFDPSAELYLTIAASVAENDLKIYSENQRWSYKERFKKGYIWANKMLGYRMNNETNTLEVVEDEAKIVKKIFELYISGYGITKICKILQSENLINTKGTMTWSKSAIRYIISNEKYKGCSLNQKSVYVNGIKQLNKGYEKQYYIEDSHKAIISKEVFDKVQKIIYERASKKQLGRGIIPPYPFTGKIYCGICGHKYHHKFNNTNKSWRVAIWSCKNKQDNGKTVCDSTDIKETVLKEKFIEAYNEFITTNRFTSEEQVLQDKVKILIEEETELKKLKINRMIENIDYDKEIKEIHQEIEEINNALLKYSLKNITKKDLQTISIFDEDKVDKFINKVIITRYKVKFIFINGIEIEKEYSNGQSGNKKGWNLNKQRKEQN

SEQ ID NO: 6525 - protein, 490 aa, Unknown
  Description of Unknown: Integrase B6526 sequence
  PTHR30461:SF3,cd00338,SM00857,G3DSA:1.10.10.2600,IPR036162, PF13408,IPR025827,G3DSA:3.40.50.1390,PS51737,IPR006119, IPR038109,PF07508,IPR011109,SSF53041,PTHR30461, PS51736,Coil,PF00239
MNKRVAGYARYSTDNQTENSIEFQMRCIEEYCQKNNLNLVLRYHDDAISGTTMERPAFKQLCRDASQHLFDAVVIYDITRGSRDVSDWFAFRKAMDLLGVEIISTQDKLGDIMNPNDFLVELLGIGIGQHHVLQTRQKTIEGTTQKALEGKFLGGIPPYGYDIVDQEYVINETEAKNVQMIFEMYADGYSYADIIEKLHGALGKRGKPFGKTSLYSILRNDRYTGLYTWNRRNVKKLGKWAGGTPNSNIVQLENKIPRIISRELFDAVQMRLSKNNHRTSSDPVAPKSAKRTYLLSGYIVCEKCGCNYVGHTTHSHGYKNAYYYCGTKYRTRNCDAPNLPAERIEKWVIEQINVFLLNFSDAAADRILEEMKKRMNNCDSEKNRLREIELKLKNATDAILSGITYPELMEEIKSLRQERAELEATIARASSEKVPVTKKDIMNAFSERLDNENVDYRQLMRKYVISIKVNERQIKLSLGVVHFASSGNWI

SEQ ID NO: 6526 - protein, 490 aa, Unknown
  Description of Unknown: Integrase B6527 sequence
  PTHR30461:SF3,SM00857,G3DSA:1.10.10.2600,IPR036162,PF13408, PS51737,G3DSA:3.40.50.1390,IPR025827,IPR006119,IPR038109, PF07508,IPR011109,SSF53041,PF00239,PTHR30461, PS51736,Coil,cd00338
MKAVIYARYSSDNQREESIEGQLRECKEYAERNGILVLQSYIDRALSAKTDNRPEFQRMIRDSAKGLFDTVLVWKLDRFARNRYDSAHYKSQLRKNGVKVVSATESIADGPEGIILESMLEGMAEYYSAELAQKVNRGMRENALKARSNGGTIPLGYRLDEEHRLKIDPLTAPVVREVFQRYADGENLRTIIRSLNERGIRTSRNYPFRHSSFNTMLKNRKYIGEYHYKDVVIPDAVPPIIPKELFERVQERMKKNQHAPARAKAEEEYLLTTKLFCGHCGRLMIGESGKGRNGTIHRYYKCAGAKRRLGCHKKAAKKDWIERVAVQYTIQRVFQDDLIAQIADELVALQGTEDSALPLLRRQLADTERGIENMLNAIQQGIFTSSTRQRLEELENLRAELKSSILQAELERPQYSREDIIQWISRFKGGDPNDKAYQRQIIDIFLNSIYVFDDKLVFTYNYKNGSQTVSLADIFAAFGSDSRAGASPYV

SEQ ID NO: 6527 - protein, 490 aa, Unknown
  Description of Unknown: Integrase B6528 sequence
  SM00857,IPR006118,G3DSA:1.10.10.2600,IPR036162,PF13408, IPR025827,G3DSA:3.40.50.1390,PS00397,PS51737,IPR006119, IPR038109,PF07508,SSF53041,IPR011109,PTHR30461, Coil,cd00338,PF00239
MTIKSTESFLEIGAAYIRVSTDDQTELSPDAQVRVIQEEAKKDGFFIPTEYIFIEHKGISGRKASNRPEFQKMIATAKSQKPSPFKRLYLWKFSRFARNQEESTFYKGILRKKCGVEIKSVSEPIMDGMFGRLIETIIEWFDEYYSYNLSGEVLRGMTEKALRSGYQATPCLGYQAIGEGKPFVLDPKAVPLVEYIFQSYNQGKDMTYIARNLNKQGHVTRRGNAFGRRTVHGILTNPFYKGEVCWNGIKFTGSHELIPSVASIFDSVQERINAEYHPKQRREASSTAHWLSGLLKCGTCGSSLGFCRSKDQKKRPDFFQCWRYSKGFHPYSCSVSARIAEKAVLDSLKSAIDTQSINYEYVPSADIQNQSEEALIQEALTRLETKERRIKEAYENEVDTLEEYKDNKCRLQAERKSLLTSLERLHQEQPDFSNQIAHKQKLLAEIATIYDFVLDPNVSNEDKGNALRRVLKKIVFDRKTSVFTFFYYVS

SEQ ID NO: 6528 - protein, 490 aa, Unknown
  Description of Unknown: Integrase B6529 sequence
  SM00857,G3DSA:1.10.10.2600,IPR036162,PF13408,PS51737, G3DSA:3.40.50.1390,IPR025827,IPR006119,IPR038109,PF07508, SSF53041,IPR011109,PF00239,PTHR30461,PS51736, Coil,cd00338
MAYCMYLRKSRADKDYENLSTETILNRHEKTLMELAQKHNYDISKIFREVVSGETLSQRPQMQILLNEVENNMYDGVLVMEVERLARGNSVDQGIIAQAFKYSNTLIITPTKTYDPQNEFDEEYFEFGLFMSRREYKTINRRLNAGRLASCKEGKFVGSVTPYGYTKEKLKNQKGYKLVPDLEESKVLKLIFDLYTNSMGIRNICKHLDSLGIKPRNSENWSTSTIRDILKNPVYIGKILWQKTYSTKTTKDGFVKSKRYKNKEDFYTFNGIHSPLISEDTFQKAQNILLQNSHPPVNNTSLKNPFAGILYCNLCGKAIVRRFVNNKYQYLMCNNPNCQNTATELKNIENCILNIIENHFNYTTSPTVFEKEDNTNELFYINKEIKKLKLQFSNIFDLLEQKIYSKETFLERKQMLEKNIEILTLQKGKFENNASQINPINTPVTILELYNKLDDIKNKNQLLKNIFSKIYYSKIDNNIKITIYSKLPIK

SEQ ID NO: 6529 - protein, 490 aa, Unknown
  Description of Unknown: Integrase B6530 sequence
  PTHR30461:SF3,IPR036162,PS51737,IPR011109,PTHR30461, PS00397,PF00239,G3DSA:1.10.10.2600,IPR006119,SSF53041, cd00338,SM00857,IPR025827,IPR038109,PS51736, IPR006118,PF13408,G3DSA:3.40.50.1390,PF07508,Coil
MAKDILNMKSACAYIRVSTDKQEELSPDAQKRLLIDFAKKNNMSLLAENIYIDNGISGKKADKRPEFMKMIGMAKSKEHPFDVILVWKFSRFARNQEESIVYKSLLKKNRVDVVSVSEPLIDGPFGTLIERIIEWMDEYYSIRLSGEVLRGMTEKALRGGYQSSLPLGYRMNKDTGIPYIYEEEAVIVRKIYNDYIAGHSYLEIARELNALGYKTKRGAAFEGRTVEYILSNPFYYGAVRWNRQNHDNHTIKDISEWIIVMGKHPAIINKETWDLVQHLMALRSKPYKARAAGHMKHWLGGIVKCSDCGASLMAGLNATRYQCGNYNKGKCLHSHFIKTAALEKAVYESLERVLNGSIELHYELKKSSNEPEEDSQSILLGQLSKLEDKEARIKQAYRDGIDTIDEYKENKQLLAEERESLSAKLQSLKDTLSDKDDTAAMLNNISNVLDIIKDASKDTLTRANAIRSIVDHFVYDKEKDKLEVYFFLQK

SEQ ID NO: 6530 - protein, 490 aa, Unknown
  Description of Unknown: Integrase B6531 sequence
  SM00857,IPR006118,G3DSA:1.10.10.2600,IPR036162,PF13408, PS51737,G3DSA:3.40.50.1390,Coil,IPR025827,IPR006119, IPR038109,PF07508,SSF53041,IPR011109,PTHR30461, PS00397,cd00338,PF00239
MTIKSTESFLEIGAAYIRVSTDDQTELSPDAQVRVIQEEAKKDGFFIPTEYIFIEHKGISGRKASNRPEFQKMIATAKSQKPSPFKRLYLWKFSRFARNQEESTFYKGILRKKCGVEIKSVSEPIMEGMFGRLIETIIEWFDEYYSYNLSGEVLRGMTEKALRSGYQATPCLGYQAIGEGKPFVLDPKAVPLVEYIFQSYNQGKDMTYIARNLNKQGHVTRRGNAFGRRTVHGILTNPFYKGEVCWNGIKFTGSHELIPSVASIFDSVQERINAEYHPKQRREASSTAHWLSGLLKCGTCGSSLGFCRSKDQKKRPDFFQCWRYSKGFHPDSCSVSARIAEKAVLDSLKSAIDTQSINYEYVPSADIQNQSEEALIQEALTRLETKERRIKEAYENEVDTLEEYKDNKCRLQAERKSLLTSLERLHQEQPDFSNQIAHKQKLLAEIATIYDFVLDPNVSNEDKGNALRRVLKKIVFDRKTSVFTFFYYVS

SEQ ID NO: 6531 - protein, 490 aa, Unknown
  Description of Unknown: Integrase B6532 sequence
  PTHR30461:SF3,cd00338,SM00857,IPR006118,G3DSA:1.10.10.2600, IPR036162,PS51737,G3DSA:3.40.50.1390,IPR006119,IPR038109, SSF53041,IPR011109,PTHR30461,PS00397,PS51736, Coil,PF00239
MIRAAIYIRVSTEEQARHGFSLAEQEHDLTDYADKHHYLVVGVYADEGSSARKAITRRKQLQRLLDDVRADRVDIILLKCLDRWFRNVADFYKVQAILDEHHVQWVCTQEDYNTTTTNGRLMLNLKLSIAQNESDQTSDRIKYVNQGILRRKREIGGKAPFGYHFVDLEDGGKRIAVVEEQRAAVEFIFASHLSGHSPMRIAHDVFAQYGIPITCRRVRCVLRNETYTGRRYGIDNFCPAIISPDTFRQAQERITGNKFWPKNRDFLYLFRGKIICPGCGKILLGHHGSRKRNGYVSHYCNYWCSKHFVSGAPDVAAGGCVYGGAVGERPIERYLLDHLAELLESYQLDISKRHSSSRLSPDQRIQTVTAKLTRLKDLYVDGFIDKPTYQTDYAKLQQEVSTALAEKQATRTPPEAVQNLILHANDIRKIYATMDRQHKYDLWQSTIKSIKIGEPKPSPGHAYKNLSSSFINFFAHLSIPLSDPCVMALS

SEQ ID NO: 6532 - protein, 490 aa, Unknown
  Description of Unknown: Integrase B6533 sequence
  PTHR30461:SF3,SM00857,G3DSA:1.10.10.2600,IPR036162,PF13408, IPR025827,G3DSA:3.40.50.1390,PS51737,IPR006119,IPR038109, PF07508,SSF53041,IPR011109,PF00239,PTHR30461, PS51736,Coil,cd00338
MKAALYTRVSTDEQAEHGFSLEAQKKRLIEYCNKNNIEIYKLYSDEGISGHSIIKRKALQEMLQDAKEHKFNYVIAYKTDRISRNLLDLLTIKNQLDEADVELLLSDEAIDTKDDAGMTMFSIMGAFAELERKKITERMMSGKRQKLMNEHIKLKNGRVPYGYLYDDENKKYIIDESRRSIVELIYKLASQGWSYNKITRHIAEETAANSSDSKKKWYISDIRAILTNPIYKGYSGISYYYNFNDRAKKPKNSAILYKATNVEPYFTEEYWDTLYSQLEKKTQYFKRKHPIDSYIFSDVLFCATCGLKIGTRQHHANYLYYVCNSKHKMYDSDHICDYAININKFNNWFIEFIRGIDENNIKLSVSKPKDLDKELQAVRSQISLKEKNREVLLDKLMNGVIDDTEYRLASNMVIASLNSLKSQEKELSDKMDSLKEKEQTKRYNRLKIKALKVLVNDWDNLTDQAKKTLINSSINKIMITKDGIQEIEFN

SEQ ID NO: 6533 - protein, 490 aa, Unknown
  Description of Unknown: Integrase B6534 sequence
  IPR036162,PS51737,IPR011109,PTHR30461,PS00397, PF00239,G3DSA:1.10.10.2600,IPR006119,SSF53041,SM00857, IPR025827,IPR038109,PS51736,cd03768,IPR006118, PF13408,G3DSA:3.40.50.1390,PF07508,Coil
MNVLDNVVDLYVRVSTTEQAEEGFSVGAQEEKLRAYCKAYNYQINAVHVDPGFSGATMDRPALKQIIHDVENNHCKKVIVWKLDRLSRSQKDTLILLEDVFAAHDCHFVSLMESFDTSTPIGRCMVGILAAFAQMERENIKARTMMGRQAKVKQGHYSGNKPPIGYVFNTASDGSVISNDLIVDPYNAKIVQDIFRWYLEGYSLNGIAKRLADAGTGSYAWQHSTSIRRILSNPVYIGKVKLNNELYEGMHEPLISESDFNEVSCMLARQKELHKRPAASYRTKNGCRSANLLSGLLYCGDCGARMYARKVCKDSPIRRYMCYSVAKTVKSMIRSDCCTNREHPYTVEQLDEIVLNEIKKLALDKAQFSRIASKSDTVHEDAKIYNERLEELNKQIKRLMNLYQTGIIDLADISDRLQALNDEKLGVQSRLDELKEADNSDAKLKAWEQLESFPAILDAGDVQQIHRIVNALIDKIVVLNRDVTIYWSFS

SEQ ID NO: 6534 - protein, 490 aa, Unknown
  Description of Unknown: Integrase B6535 sequence
  PTHR30461:SF3,IPR036162,PS51737,IPR011109,PTHR30461, PS00397,PF00239,G3DSA:1.10.10.2600,IPR006119,SSF53041, cd00338,SM00857,IPR025827,IPR038109,IPR006118, PF13408,G3DSA:3.40.50.1390,PF07508,Coil
MTTKNTESFLEIGAAYIRVSTDDQTELSPDAQVRVIQEEAKKDGFFIPAEYIFIEHKGISGRKASNRPEFQKMIATAKSQKPSPFKRLYLWKFSRFARNQEESTFYKGILRKKCGVEIKSVSEPIMEGMFGRLIETIIEWFDEYYSYNLSGEVLRGMTEKALRSGYQATPCLGYQAIGEGKPFVLDPKAVPLVEYIFQSYVQGKDMTYIARNLNKQGHVTRRGNAFGRRTVHGILTNPFYKGEVCWNGIKFTGSHELIPSVASIFDSVQERINAEYHPKQRREASSTAHWLSGLLKCGTCGSSLGFCRSKDQKKRPDFFQCWRYSKGFHPDSCSVSARIAEKAVLDSLKSAIDTQSINYEYVPSADIQNQSEEALILEALTRLETKEQRIKEAYENEVDTLEEYKDNKCRLQAERKSLLTSLERLHQEQPDFSNQIAHKQKLLAEIATIYDFVLDPNVSNEDKGNALRRVLKKIVFDRKTSVFTFFYYVS

SEQ ID NO: 6535 - protein, 490 aa, Unknown
  Description of Unknown: Integrase B6536 sequence
  SM00857,IPR006118,G3DSA:1.10.10.2600,IPR036162,PF13408, PS51737,G3DSA:3.40.50.1390,IPR025827,PS00397,IPR006119, IPR038109,PF07508,IPR011109,SSF53041,PTHR30461, Coil,cd00338,PF00239
MTTKNTESFLEIGAAYIRVSTDDQTELSPDAQVRVIQEEAKKDGFFIPTEYIFIEHKGISGRKASNRPEFQKMIATAKSQKPSPFKRLYLWKFSRFARNQEESTFYKGILRKKCGVEIKSVSEPIMEGMFGRLIETIIEWFDEYYSYNLSGEVLRGMTEKALRSGYQATPCLGYQAIGEGKPFVLDPKAVPLVEYIFQSYNQGKDMTYIARNLNKQGHVTRRGNAFGRRTVHGILTNPFYKGEVCWNGIKFTGSHELISSVASIFDSVQERINAEYHPKQRREASSTAHWLSGLLKCGTCGSSLGFCRSKDQKKRPDFFQCWKYSKGFHPDSCSVSARIAEKAVLDSLKSAIDTQSINYEYVPSADIQNQSEEALIQEALTRLETKERRIKEAYENEVDTLEEYKDNKCRLQAERKSLLTNLERLHQEQPDISNQIAHKQKLLAEIATIYDFVLDPNVSNEDKGNALRRVLKKIVFDRKTSVFTFFYYVS

SEQ ID NO: 6536 - protein, 490 aa, Unknown
  Description of Unknown: Integrase B6537 sequence
  cd03768,PTHR30461:SF3,SM00857,G3DSA:1.10.10.2600,IPR036162, PS51737,G3DSA:3.40.50.1390,IPR006119,IPR038109,PF07508, IPR011109,SSF53041,PTHR30461,PS51736,Coil, PF00239
MKSIAIYIRKSVKGDDNSISLEAQTEVIKHYFKNENKFTIYKDDGFSGGNTNRPAFQKLMHDATQNKFEAVACYKLDRIARNTLDFLTTFNTLKEYGIDLICVEDKYDPSTPAGRLMMTLLASLAEMERENIKQRVTDSMLNLARSGRWTGGTPPFGYKVITIDGGKYLELEDKNNILYIFDEFINGKGILKLSNEFNCDKKKISRILHNITYLKSSTEANTYLKQTLKYEIVGTPNGCGYLPYGKNKVINGKKIKNVEGLKIAAVSKHKAIIELETFIKAQEKLKTFEGRKAPRISNKSFLAQMVQCTCGSNMLIVLGHKKKDGTRKLYFSCPSKCGNTFGDVKEIEEDTLLTLKDVNFFEKINKNKPTINNKDSSRIKASLLKELENKKKLLDGLVQKLALVDSDLANILIDKMETLNENIKELQSKIDLLEKEEISLSYNKEDLNLKEKNRKHFIKEFENMNMQEKQTSIRKVINKITWTGENIIIS

SEQ ID NO: 6537 - protein, 490 aa, Unknown
  Description of Unknown: Integrase B6538 sequence
  PTHR30461:SF3,cd00338,SM00857,G3DSA:1.10.10.2600,IPR036162, PF13408,PS51737,G3DSA:3.40.50.1390,IPR025827,IPR006119, IPR038109,PF07508,IPR011109,SSF53041,PTHR30461, PS51736,Coil,PF00239
MKAALYTRVSTDEQAEHGFSLEAQKKRLIEYCNKNNIEIYKLYSDEGISGHSIVKRKALQEMLQDAKEHKFNYVIAYKTDRISRNLLDLLTIKNQLDEADVELLLSDEAIDTKDDAGMTMFSIMGAFAELERKKITERMMSGKRQKLMNEHIKLKNGRVPYGYLYDDENKKYIIDESRRSIVELIYKLASQGWSYNKITRHIAEETAANSSDSKKKWYISDIRAILTNPMYKGYSGISYYYNFNDRAKKPKNSAILYKATNVEPYFTEEYWDTLYSQLEKKTQYFKRKHPIDSYIFSDVLFCATCGLKIGTRQHHANYLYYVCNSKHKMYDNDHICDYAININKFNNWFIEFIRGIDENNIKLSVSKPKDLDKELQAVRSQISLKEKNREVLLDKLMNGVIDDTEYRLASNMVIASLNSLKSQEKELSDKMDSLKEKEQTKRYNRLKIKALKVLVNDWDNLTDQAKKTLINSSINKIMITKDGIQEIEFN

SEQ ID NO: 6538 - protein, 490 aa, Unknown
  Description of Unknown: Integrase B6539 sequence
  cd00338,SM00857,IPR006118,G3DSA:1.10.10.2600,IPR036162, PF13408,IPR025827,G3DSA:3.40.50.1390,PS51737,IPR006119, IPR038109,PF07508,IPR011109,SSF53041,PTHR30461, PS00397,Coil,PF00239
MTIKNTESFLEIGAAYIRVSTDDQTELSPDAQVRVIQEEAKKDGFFIPAEYIFIEHKGISGRKASNRPEFQKMIATAKSQKPSPFKRLYLWKFSRFARNQEESTFYKGILRKKCGVEIKSVSEPIMEGMFGRLIETIIEWFDEYYSYNLSGEVLRGMTEKALRSGYQATPCLGYQAVGEGKPFILDPKAAPIVEYIFQTYSQGKDMTYIARALNKQGHITRRGRPFERRTIYRILTNQFYAGQVSWNGIQFTGSHELIPSVTAVFDTVQERIKAEYRPKQRREASSTAHWLSGLLKCGTCGASLGYNRTNNSKRHPATFNCWKYGKGFHPDSCSVTVRIAEQAVLDSLKTAIDTQSIDYEYVSPIDINQKNEEALIKEALSRLETKERRIKEAYENEIDTLEEYKDNKQRLQAERESLLTDMERLHQEHPNASDQIAHKQKLLAEIATIYDFVSNPNVSNEDKGNALRRVLKKIVFDRKNGVFTFFYYVS

SEQ ID NO: 6539 - protein, 490 aa, Unknown
  Description of Unknown: Integrase B6540 sequence
  PTHR30461:SF3,IPR036162,PS51737,IPR011109,PTHR30461, PS00397,PF00239,G3DSA:1.10.10.2600,IPR006119,SSF53041, SM00857,IPR025827,IPR038109,PS51736,cd03768, IPR006118,PF13408,G3DSA:3.40.50.1390,PF07508
MERRVACYIRVSTQEQATHGFSVGEQETRLRKYCEAHEWTIAGVYEDPGFSGAYLDRPGIQKLIRDVDLGIFDTVLVWKLDRLSRSQKNTMYMIEDVFLKHNINFISMNENFDTSTPFGRAMVGILSVFAQLDRDQITQRMTMGRIGRAKAGYYSGGSQPPIGYTYTRADGGEKKTLEVDEYEAMQVRMVYDLFLNGLDGKDMTFSDITRYMAAHYSNRYGGWQQPCTVSRMLSNPVYIGKVKFSGEFYNGTHEPIISEETFKKAQEKYQRHIQNFSKSIQNFKGCYLLTGLIHCGACGSRYFVTSTKNTNKTASIKPYYHSYACYGRKPVNVNMMKNGRCKNKIYKMEVLDAYVLDEIQKLKENPELIGDLRTGPKEDKTAAIESRIRELDKQMGKLVDLYQLGTIAFDEIRKRTDAIRAERDKLKGELEHEKRPDGVISETEFRDRLDAFDADIFSDLDIERKQAIVRSLINKIVIYPDLIEIHWAFH

SEQ ID NO: 6540 - protein, 490 aa, Unknown
  Description of Unknown: Integrase B6541 sequence
  PTHR30461:SF3,IPR036162,PS51737,IPR011109,PTHR30461, PS00397,PF00239,G3DSA:1.10.10.2600,IPR006119,SSF53041, cd00338,SM00857,IPR025827,IPR038109,PS51736, IPR006118,PF13408,G3DSA:3.40.50.1390,PF07508,Coil
MAKDILNMKSACAYIRVSTDKQEELSPDAQKRLLIDFAKKNNMSLLASNIYLDNGISGKKADKRPEFMKMIGMAKSKEHPFDVILVWKFSRFARNQEESIVYKSLLKKNHVEVVSISEPLIDGPFGSLIERIIEWMDEYYSIRLSGEVLRGMTEKALRGGYQSSLPLGYRMNKDTGIPYIYEDEAIIVKKIYKDYIAGHSYLEIARELNALGYKTKRGAAFEGRTVEYILSNPFYYGAVRWNRQKHDDHTIKSISDWIIAEGKHPALIDKAIWDEVQHLIALRSRPYKARAAGHMKHWLGGIVKCSDCGASLMAGLNATRYQCGNYNKGKCLHSHFIKTAALEQAVYEAFKRILDGSVELHYELKKSSNEPDTDDRSIILNQLSKLDDKEARIKQAYRDGIDTIDEYKENKLLLKDERAALEKQLEAFNNTSSDTDSNAAMLKNISSVYDIIKDTSKDTLTRANAIRSIVDHMVYDRENDKLEIYFFLHM

SEQ ID NO: 6541 - protein, 490 aa, Unknown
  Description of Unknown: Integrase B6542 sequence
  PTHR30461:SF3,SM00857,G3DSA:1.10.10.2600,IPR036162,PF13408, PS51737,G3DSA:3.40.50.1390,IPR025827,IPR006119,IPR038109, PF07508,IPR011109,SSF53041,PF00239,PTHR30461, PS51736,Coil,cd00338
MKAALYTRVSTDEQAEHGFSLEAQKKRLIEYCNKNNIEIYKLYSDEGISGHSIIKRKALQEMLQDAKEHKFNYVIAYKTDRISRNLLDLLTIKNQLDEADVELLLSDEAIDTKDDAGMTMFSIMGAFAELERKKITERMMAGKRQKLMNEHIKLKNGRVPYGYLYDDENKKYIIDESRRSIVELIYKLASQGWSYNKITRHIAVETAANSSDSKKKWYISDIRAILTNPIYKGYSGISYYYNFNDRAKKPKNSAILYKATNVEPYFTEEYWDTLYSQLEKKTQYFKRKHPIDSYIFSDVLFCATCGLKIGTRQHHANYLYYVCNSKHKMYDSDHICDYAININKFNNWFIEFIRGIDENNIKLSVSKPKDLDKELQAVRSQISLKEKNREVLLDKLMNGVIDDTEYRLASNMVIASLNSLKSQEKELSDKMDSLKEKEQTKRYNRLKIKALKVLVNDWDNLTDQAKKTLINSSINKIMITKDGIQEIEFN

SEQ ID NO: 6542 - protein, 490 aa, Unknown
  Description of Unknown: Integrase B6543 sequence
  cd03768,PTHR30461:SF3,SM00857,G3DSA:1.10.10.2600,IPR036162, PS51737,G3DSA:3.40.50.1390,IPR006119,IPR038109,PF07508, SSF53041,IPR011109,PTHR30461,PS51736,Coil, PF00239
MKNIAIYIRKSVKGDDNSISLEAQTEVIKHYFKNENKFTIYKDDGFSGGNTNRPAFQKLMHDATQNKFEAVACYKLDRIARNTLDFLTTFNTLKEYGIDLICVEDKYDPSTPAGRLMMTLLASLAEMERENIKQRVTDSMLNLARSGRWTGGTPPFGYKVITIDGGKYLELEDKNNILYIFDEFINGKGILKLSNEFNCDKKKISRILHNITYLKSSTEANTYLKQTLKYEIVGTPNGCGYLPYGKNKVINGKKIKNVEGLKIAAVSKHKAIIELETFIKAQEKLKTFEGRKAPRISNKSFLAQMVQCTCGSNMLIVLGHKKKDGTRKLYFSCPSKCGNTFGDVKEIEEDTLLTLKDVNFFEKINKNKPTINNKDSSRIKASLLKELENKKKLLDGLVQKLALVDSDLANILIDKMETLNENIKELQSKIDLLEKEEISLSYNKEDLNLKEKNRKHFIKEFENMNMQEKQTSIRKVINKITWTGENIIIS

SEQ ID NO: 6543 - protein, 490 aa, Unknown
  Description of Unknown: Integrase B6544 sequence
  PTHR30461:SF3,IPR036162,PS51737,IPR011109,PTHR30461, PS00397,PF00239,G3DSA:1.10.10.2600,IPR006119,SSF53041, cd00338,SM00857,IPR025827,IPR038109,PS51736, IPR006118,PF13408,G3DSA:3.40.50.1390,PF07508,Coil
MAKDILNMKSACAYIRVSTDKQEELSPDAQKRLLIDFAKKNNMSLLASNIYLDNGISGKKADKRPEFMKMIGMAKSKEHPFDVILVWKFSRFARNQEESIVYKSLLKKNHVEVVSVSEPLADGPFGTLIERIIEWMDEYYSIRLSGEVLRGMTEKALRGGYQSTLPLGYRMNKDTGIPYIYEPEAVIVRKIYKDYIAGLSYLEIARELNALGYKTKRGAAFEGRTVEYILSNPFYYGAVRWNRQKHDDHTIKSISDWIIAEGKHPALIDKAIWDEVQHLIALRSRPYKARAAGHMKHWLGGIVKCSDCGASLMAGLNATRYQCGNYNKGKCLHSHFIKTAALEQAVYEAFKRILDGSVELYYELKKSSNEPDTDDRSIILNQLSKLDDKEARIKQAYRDGIDTIDEYKENKLLLKDERATLEKQLEAFNNSSSDTDSNAAMLKNISSVYDIIKDTSKDTLTRANAIRSVVDHIVYDRENDKLEIYFFLHM

SEQ ID NO: 6544 - protein, 490 aa, Unknown
  Description of Unknown: Integrase B6545 sequence
  PTHR30461:SF3,IPR036162,PS51737,IPR011109,PTHR30461, PS00397,PF00239,G3DSA:1.10.10.2600,IPR006119,SSF53041, SM00857,IPR025827,IPR038109,PS51736,cd03768, IPR006118,PF13408,G3DSA:3.40.50.1390,PF07508
MERRVACYIRVSTQEQATHGFSVGEQETRLRKYCEAHEWTIAGVYEDPGFSGAYLDRPGIQKLIRDVDLGIFDTVLVWKLDRLSRSQKNTMYMIEDVFLKHNINFISMNENFDTSTPFGRAMVGILSVFAQLDRDQITQRMTMGRIGRAKAGYYSGGSQPPIGYTYTRADGGEKKTLEVDEYEAMQVRMVYDLFLNGLDGKDMTFSDITRYMAAHYSNRYGGWQQPCTVSRMLSNPVYIGKVKFSGEFYDGTHEPIISEETFKKAQEKYQRHIQNFSKSIQNFKGCYLLTGLIHCGACGSRYFVTSTKNTNKTASIKPYYHSYACYGRKPVNVNMMKNGRCKNKIYKMEVLDAYVLDEIQKLKENPELIGDLRTGPNDDKTAAIESRIRELDKQMGKLVDLYQLGTIAFDEIRKRTDAIRAERDKLKGELEHEKRPDGVISETEFRDRLDAFDADIFSDLDIERKQAIVRSLINKIVIYPDLIEIHWAFH

SEQ ID NO: 6545 - protein, 490 aa, Unknown
  Description of Unknown: Integrase B6546 sequence
  cd03768,PTHR30461:SF3,SM00857,G3DSA:1.10.10.2600,IPR036162, PS51737,G3DSA:3.40.50.1390,IPR006119,IPR038109,PF07508, IPR011109,SSF53041,PTHR30461,PS51736,Coil, PF00239
MKKIAIYIRKSVKGDENSISLEAQTEVIKHYFKGENKFTVYKDDGFSGGNTNRPAFQKLMADAMEGKFDTVACYKLDRIARNTLDFLTTFNTLKEYNIDLICVEDKYDPSTPAGRLMMTLLASLAEMERENIKQRVSDSMLNLAKQGRWTGGTAPFGYRVISKDGGKYLELEDSKNIKYIFNEFINGKGIIRLGNEFNCDKKKISRMLHNITYLQSSKDANIYLKQVLGYEVVGQVDGCGYLPYGKYKILNGKKVRNYDGLKVATVSKHEAVIDLDTFIKAQDRLKTFAGKKAPRISTKTFLAQMVQCGICGANMLVTLGQKRKDGTRKLYFSCPNKCGNKFKDVSELENDVLTTLKDVNFFDEIKKNTNIMNKDNSKIKKSMLKELEEKKKILDGLMDKLALVDSNLANVIIEKMNSVNVDINDLQNKIDLLEKEEIASSYNKEDFKLKEENRKHFIEDFENMDMEEKQNSIRGIINKVVWDGKNIIIS

SEQ ID NO: 6546 - protein, 489 aa, Unknown
  Description of Unknown: Integrase B6547 sequence
  IPR036162,PS51737,IPR011109,PTHR30461,PS00397, PF00239,G3DSA:1.10.10.2600,IPR006119,SSF53041,cd00338, SM00857,IPR025827,IPR038109,PS51736,IPR006118, PF13408,G3DSA:3.40.50.1390,PF07508,Coil
MVKDILNMKSACAYIRVSTDKQEELSPDAQKRLLIDFAKKNNMSLLAENIYIDNGISGKKADKRPEFLKMIGLAKSKEHPFDVILVWKFSRFARNQEESIVYKSLLKKNHVEVVSVSEPLVDGPFGTLIERIIEWMDEYYSIRLSGEVLRGMTEKALRGGYQSSLPLGYKMNKDTGVPYIYEDEAIIVKKIYKDYIAGHSYLEIARELNALGYKTKRGAAFEGRTVEYILSNPFYYGAVRWNRQKHDDHTIKSVNDWIISQGKHEPLIDKTKWDEIQHLIALRSKPYRARAAGHMRHWLGGLVKCSDCGASLMAGLNATRYQCGNYNKGKCLHSHFIKAAALEDAVYKSLERVLQNSDELHYELKKSSNEPDTNDRDIILNQLSKLNDKEARIKQAFRDGIDTIEEYKENKQLLANERGELQSQLESLSPASSNDSSAEMLKNISTVLDIVKDTSNDTLTRANAIRSVVDHCIYDKENDKLEVYFFLQK

SEQ ID NO: 6547 - protein, 489 aa, Unknown
  Description of Unknown: Integrase B6548 sequence
  PTHR30461:SF3,IPR036162,PS51737,IPR011109,PTHR30461, PS00397,PF00239,G3DSA:1.10.10.2600,IPR006119,SSF53041, cd00338,SM00857,IPR025827,IPR038109,PS51736, IPR006118,PF13408,G3DSA:3.40.50.1390,PF07508,Coil
MKKTLNEMKNACAYIRVSTDKQEELSPDAQKRLLLDYAKSNHIMILPEHIFIENGISGKKADKRPQFMQMIGMAKSKEHPFNMILVWKFSRFARNQEESIVYKSLLKKCGVEVVSVSEPLVDGPFGSLIERIIEWMDEYYSIRLSGEVMRGMKEKALRGGYQSAMPLGYRMNRETKIPEIYEPEAVIVRKIYDEYSGNGKSYLEIARELNTLGYKTRRGANYEERTIKYILQNPFYTGMVRWNRQNHNEHTIKDESEWIISQGRHEAIITQEVYDLVQEQIVKRSRPYKAHSTGSIKHWLSGIVKCSSCGSSLNGSVLSAGGKVTSFQCGNYSRGSCMTSHFIKAEKLEQAVYAAFEQVIKTNEFSYEVRKPQNEADDSLLLRRQLEKLDDKEKRIKQAYRDGIDTLEEYKENKKLLADERQRIEEQLSALTDNEPERKEQLARNIRSIYDIIRDETLDKRTRANALRSVVNVMVYDKAEDTLSVEFYI

SEQ ID NO: 6548 - protein, 489 aa, Unknown
  Description of Unknown: Integrase B6549 sequence
  PTHR30461:SF3,IPR036162,PS51737,IPR011109,PTHR30461, PS00397,PF00239,G3DSA:1.10.10.2600,IPR006119,SSF53041, cd00338,SM00857,IPR025827,IPR038109,PS51736, IPR006118,PF13408,G3DSA:3.40.50.1390,PF07508,Coil
MKKTLNEMKNACAYIRVSTDKQEELSPDAQKRLLLDYAKSNHIMILPEHIFIENGISGKKADKRPQFMRMIGMAKSKERPFDVILVWKFSRFARNQEESIVYKSLLKKCGVEVVSVSEPLVDGPFGSLIERIIEWMDEYYSIRLSGEVMRGMKEKALRGGYQSAMPLGYRMNRETKIPEIYEPEAVIVRKIYDEYSGNGKSYLEIARELNTLGYKTRRGANYEERTIKYILQNPFYTGMVRWNRQNHNEHTIKDESEWIISQGRHEAIITQEVYDLVQEQIVKRSRPYKAHSTGSIKHWLSGMVKCSSCGSSLNGSVLSAGGKVTSFQCGNYSRGSCMTSHFIKAEKLEQAVYAAFEQVIKTNEFSYEVRTPQNEADDSLLLNRQLEKLDDKEKRIKQAYRDGIDTLEEYKENKQLLADERQRIEEQLSALTDSEPERKEQLARNIRSIYDIIRDESLDKRTRANALRSVVNVMVYDKAEDTLSVEFYI

SEQ ID NO: 6549 - protein, 489 aa, Unknown
  Description of Unknown: Integrase B6550 sequence
  PTHR30461:SF3,IPR036162,PS51737,IPR011109,PTHR30461, PS00397,PF00239,G3DSA:1.10.10.2600,IPR006119,SSF53041, cd00338,SM00857,IPR025827,IPR038109,PS51736, IPR006118,PF13408,G3DSA:3.40.50.1390,PF07508,Coil
MAKDILNMKSACAYIRVSTDKQEELSPDAQKRLLIDFAKKNNMSLLASNIYLDNGISGKKADKRPEFMKMIGMAKSKEHPFDVILVWKFSRFARNQEESIVYKSLLKKNHVEVVSISEPLIDGPFGSLIERIIEWMDEYYSIRLSGEVLRGMTEKALRGGYQSSLPLGYKMNKDTGIPYIYDDEAVIVRKIYHDYISGHSYLEIARELNSLGYRTKRGSTYEGRTVEYILSNPFYYGAVRWNRQKHDDHTIKSVSDWIIAEGKHESLIDKETWDEVQHLIALRSRPYKARAAGHMKHWLGGIVKCSDCGASLMAGLNATRYQCGNYSKGKCSHSHYIKTVALEQAVYEAFERALNGSVELHYELKKGSNEPDTDDRSVILSQLSKLEDKEARIKQAYRDGIDTLEEYKENKQLLKDERAALEKQLEAFNNTSSTDSNAAMLKSISTVYDIIKDTSNNTLTRANAIRSVVDHMVYDKENDKLEVYFFLQK

SEQ ID NO: 6550 - protein, 489 aa, Unknown
  Description of Unknown: Integrase B6551 sequence
  PTHR30461:SF3,IPR036162,PS51737,IPR011109,PTHR30461, PS00397,PF00239,G3DSA:1.10.10.2600,IPR006119,SSF53041, cd00338,SM00857,IPR025827,IPR038109,PS51736, IPR006118,PF13408,G3DSA:3.40.50.1390,PF07508,Coil
MKKTLNEMKNACAYIRVSTDKQEELSPDAQKRLLLDYAKSNHIMILPEHIFIENGISGKKADKRPQFMQMIGMAKSKEHPFDVILVWKFSRFARNQEESIVYKSLLKKCGVEVVSVSEPLVDGPFGSLIERIIEWMDEYYSIRLSDEVMRGMKEKALRGGYQSAMPLGYRMNRETKIPEIYEPEAVIVRKIYDEYSGNGKSYLEIARELNTLGYKTRRGANYEERTVKYILQNPFYTGMVRWNRQNHNEHTIKDESEWIISRGQHEAIISQEAFDLVQEQIIKRSRPYKAHSAGAIKHWLSGMVKCSSCGSSLNGSVLSAGGKVTSFQCGNYRRGSCMTSHFIKAEKLEQAVYAAFEQVIKTNEFSYEVRKPQNKADDSLLLSRQLEKLDDKEKRIKQAYRDGIDTLEEYKENKKLLADERQRIEEQLSALTDSEPERKEQLAQNIRSIYDIIRDESLDKRTRANALRSVVNVMVYDKAEDLLSVEFYI

SEQ ID NO: 6551 - protein, 489 aa, Unknown
  Description of Unknown: Integrase B6552 sequence
  SM00857,IPR006118,G3DSA:1.10.10.2600,IPR036162,PF13408, PS51737,IPR025827,G3DSA:3.40.50.1390,Coil,IPR006119, IPR038109,PF07508,SSF53041,IPR011109,PTHR30461, PS00397,cd00338,PF00239
MATKISENLEIGAAYIRVSTDDQTELSPDAQVRVIQEEAKKDGFFIPAEFIFIERKGISGRKASNRPEFQKMIATAKSQKPAPFKRLYLWKFSRFARNQEESTFYKGILRKKCGVEIKSVSEPIMEGMFGRLIETIIEWFDEYYSYNLSGEVLRGMTEKALKAGYQATPCLGYQAVGEGKPFVLDPKAVPVIEYIFQAYSQGKDMTYIARNLNRQGHVTRRGRPFERRTIYRILTNPFYSGQVIWNGIQFTGSHELIPAAASAFDAVQERVKEEYRPRQRREASSTAHWLSGLLKCGACGASLGFNRTKDQKKRPDFFQCWRYGKGFHPGSCAVAARIAEQAVLDSLKTAIDTQSIDYEYIPPTDVQMQGEEVLIQEALSRLEVKERRIREAYESEVDTLEEYKNNKKRLQAERENLLADLDRLQKEQPSVPDQDACKKKLLAEIATVYDYVSDPSVSNEDKGNALRRILKKIVFDRESGVFTFFYYVS

SEQ ID NO: 6552 - protein, 489 aa, Unknown
  Description of Unknown: Integrase B6553 sequence
  PTHR30461:SF3,IPR036162,PS51737,IPR011109,PTHR30461, PS00397,PF00239,G3DSA:1.10.10.2600,IPR006119,SSF53041, cd00338,SM00857,IPR025827,IPR038109,PS51736, IPR006118,PF13408,G3DSA:3.40.50.1390,PF07508,Coil
MAKDILNMKSACAYIRVSTDKQEELSPDAQKRLLIDYAKKNNMSLLADNIYLDNGISGKKADKRPEFMKMIGMAKAKEHPFDVILVWKFSRFARNQEESIVYKSLLKKNHVEVVSVSEPLVDGPFGTLIERIIEWMDEYYSIRLSGEVLRGMTEKALRGGYQSTLPLGYRMNKDTGIPYIYEPEAVIVRKIYKDYISGLSYLEIARELNALGYKTKRGAAFEGRTVEYILSNPFYYGAVRWNRQKHDDHTIKSISDWIIAEGKHPALIDKAIWDEVQHLIALRSRPYKARAAGHMKHWLGGIVKCSDCGASLMAGLNATRYQCGNYNKGKCLHSHFIKTAALEQAVYEAFKRILDGSVELHYELKKSPNEPDTDDRSIILNQLSKLDDKEARIKQAYRDGIDTIDEYKENKQLLKDERAALEKQLEAFNNTSSTDSNAAMLKSISTVYDIIKDTSKDTLTRANAIRSVVDHCVYDKENDKLEIYFFLQK

SEQ ID NO: 6553 - protein, 489 aa, Unknown
  Description of Unknown: Integrase B6554 sequence
  PTHR30461:SF3,IPR036162,PS51737,IPR011109,PTHR30461, PS00397,PF00239,G3DSA:1.10.10.2600,IPR006119,SSF53041, cd00338,SM00857,IPR025827,IPR038109,PS51736, IPR006118,PF13408,G3DSA:3.40.50.1390,PF07508,Coil
MAKDILNMKSACAYIRVSTDKQEELSPDAQKRLLIDFAKKNNMSLLASNIYLDNGISGKKADKRPEFMKMIGMAKSKEHPFDVILVWKFSRFARNQEESIVYKSLLKKNHVEVVSISEPLIDGPFGSLIQRIIEWMDEYYSIRLSGEVLRGMTEKALRGGYQSSLPLGYKMNKDTGIPYIYDDEAVIVRKIYHDYISGHSYLEIARELNSLGYRTKRGSTYEGRTVEYILSNPFYYGAVRWNRQKHDDHTIKSVSDWIIAEGKHESLIDKETWDEVQHLIALRSRPYKARAAGHMKHWLGGIVKCSDCGASLMAGLNATRYQCGNYSKGKCSHSHYIKTVALEQAVYEAFERALNGSVELHYELKKGSNEPDTDDRSVILSQLSKLEDKEARIKQAYRDGIDTLEEYKENKQLLKDERAALEKQLEAFNNTSSTDSNAAMLKSISTVYDIIKDTSNNTLTRANAIRSVVDHMVYDKENDKLEVYFFLQK

SEQ ID NO: 6554 - protein, 489 aa, Unknown
  Description of Unknown: Integrase B6555 sequence
  PTHR30461:SF3,SM00857,G3DSA:1.10.10.2600,IPR036162,PF13408, IPR025827,G3DSA:3.40.50.1390,PS51737,IPR006119,IPR038109, PF07508,SSF53041,IPR011109,PTHR30461,Coil, PS51736,cd00338,PF00239
MLKNIPAVVYARYSSSNQREESIEDQLRECYKFADREGYNVIGQYCDHAISGRTDDRPEFLRMICDAEKQLFKAVIVYRLDRFARNRFDSVLYKSRLAQYKVNVVSATECIPEGSDGVLIEALHEALAQKYSDDLSQIIRRGLYGNAEHCKSNGPLPFGYKANPTTRLVEIDEETAPIVKQIFTMIAEGSNYNQALAYCTRMGYPKTKNALYHILRNERYKGIYIYANKRTEGGIPCIVSEELFAAANATRQKHINKPNAGSYKYLLTGKLYCKDCENLYSGGYGTSRWGKKSYYYVCSGKKRKHICAAANINAPKIESMVVDALYMFILNEDIISAIIDAALECQERNSPHKNNIMVINRRIAEIEKKLNNLLKAIEAGVLTETTMSRMQELEEKKKSLQRSLMKEKLKAPKISRSQLEFFFEKLRGEDPHARKFQKCLIDTFVNRIYPDGNTVKMVVNLGAPDDETLTYSKLSACFAGFDKRNFWWR

SEQ ID NO: 6555 - protein, 489 aa, Unknown
  Description of Unknown: Integrase B6556 sequence
  PTHR30461:SF3,cd00338,SM00857,G3DSA:1.10.10.2600,IPR036162, PS51737,G3DSA:3.40.50.1390,IPR006119,IPR038109,PF07508, SSF53041,IPR011109,PTHR30461,PS51736,Coil, PF00239
METYCIYLRKSRADAEAEARGEGETLARHEHTLLELAKRQRLTIAHIYREIVSGDSIAARPQMQQMLQDITDGKYTGVLVMEIERLARGDTIDQGVVAQAFRESETKIITPVKTYDPNNEFDEEYFEFSLFMSRREYKTIKRRMQAGRIAAVKEGNYIGTNPPYGYRKIHPQPKVNTLEIVPEEAEYIRCVFEWYLSGMGARAIAARLNQLQVPPRKAAAWEPISIRKILGNPTYAGKVEWHTKKDGTILADGLHPGIISWEQFQQVQERRKQKAPPVPTGYTTQNYYHNVLYCANCGHQMKRRPTADGGAHMLCRRNECRGKVVSASVTKVDEAVLESIRYRIQELELRKDKMEQMAKTESETREKQRARIEKALEKLHRQKEKLHTLLETDVYSVETFLERSKALEKQKAELEAQLQACSADVAAESLTPEQALLWLQYVLDHFETADAEQKNKMLCRVIRRIEYSKTERMCCNKRHSDMQLHVVFL

SEQ ID NO: 6556 - protein, 489 aa, Unknown
  Description of Unknown: Integrase B6557 sequence
  PTHR30461:SF3,cd00338,SM00857,G3DSA:1.10.10.2600,IPR036162, PS51737,G3DSA:3.40.50.1390,IPR006119,IPR038109,PF07508, SSF53041,IPR011109,PTHR30461,PS51736,Coil, PF00239
METYCIYLRKSRADAEAEARGEGETLARHEHTLLELAKRQRLTIAHIYREIVSGDSIAARPQMQQMLQDITDGKYTGVLVMEIERLARGDTIDQGVVAQAFRESETKIITPVKTYDPNNEFDEEYFEFSLFMSRREYKTIKRRMQAGRIAAVKEGNYIGTNPPYGYRKIHPQPKVNTLEIVPEEAEYIRCVFEWYLSGMGARAIAARLNQLQVPPRKAAAWEPISIRKILGNPTYAGKVEWHTKKDGTILADGLHPGIISWEQFQQVQERRKQKAPPVPTGYTTQNYYHNVLYCANCGHQMKRRPTADGGAHMLCRRNECRGKVVSASVTKVDEAVLESIRYRIQELELRKDKMEQTAKTESETREKQRARIERALEKLHKQKEKLHTLLETDVYSVETFLERSKALEKQKAELETELQACSADVAAESLTPEQALLWLQYVLDHFETADAEQKNKMLCRVIRRIEYSKTERMCCNKRHSDMQLHVVFL

SEQ ID NO: 6557 - protein, 489 aa, Unknown
  Description of Unknown: Integrase B6558 sequence
  PTHR30461:SF3,IPR036162,PS51737,IPR011109,PTHR30461, PS00397,PF00239,G3DSA:1.10.10.2600,IPR006119,SSF53041, cd00338,SM00857,IPR025827,IPR038109,PS51736, IPR006118,PF13408,G3DSA:3.40.50.1390,PF07508,Coil
MAKDILNMKSACAYIRVSTDKQEELSPDAQKRLLIDFAKKNNMSLLASNIYLDNGISGKKADKRPEFMKMIGMAKSKEHPFDVILVWKFSRFARNQEESIVYKSLLKKNHVEVVSVSEPLVDGPFGTLIERIIEWMDEYYSIRLSGEVLRGMTEKALRGGYQSSLPLGYRMNKDTGIPYISDDEAIIVKRIYKDYIAGHSYLEIARELNSLGYRTKRGSTYEGRTVEYILSNPFYYGAVRWNRQKHDDHTIKSVSDWIIAEGKHESLIDKETWDEVQHLIALRSRPYKARAAGHMKHWLGGIVKCSDCGASLMAGLNATRYQCGNYSKGKCSHSHYIKTVALEQAVYEAFERALNGSVELHYELKKGSNEPDTDDRSVILSQLSKLEDKEARIKQAYRDGIDTLEEYKENKQLLKDERAALEKQLEAFNNTSSTDSNAAMLKSISTVYDIIKDTSKDTLTRANAIRSVVDHCVYDKENDKLEIYFFLQK

SEQ ID NO: 6558 - protein, 489 aa, Unknown
  Description of Unknown: Integrase B6559 sequence
  PTHR30461:SF3,IPR036162,PS51737,IPR011109,PTHR30461, PS00397,PF00239,G3DSA:1.10.10.2600,IPR006119,SSF53041, cd00338,SM00857,IPR025827,IPR038109,PS51736, IPR006118,PF13408,G3DSA:3.40.50.1390,PF07508,Coil
MAKDILNMKSACAYIRVSTDKQEELSPDAQKRLLIDFAKKNNMSLLASNIYLDNGISGKKADKRPEFMKMIGMAKSKEHPFDVILVWKFSRFARNQEESIVYKSLLKKNHVEVVSISEPLIDGPFGSLIERIIEWMDEYYSIRLSGEVLRGMTEKALRGGYQSSLPLGYKMNKDTGIPYIYDDEAVIVRKIYHDYISGHSYLEIARELNSLGYRTKRGSTYEGRTVEYILSNPFYYGAVRWNRQKHDDHTIKSVSDWIIAEGKHESLIDKETWDEVQHLIALRSRPYKARAAGHMKHWLGGIVKCSDCGASLMAGLNATRYQCGNYSKGKCSHSHYIKTVALEQAVYEAFERALNGSVELHYELKKGSNEPDTDDRSVILSQLSKLEDKEARIKQAYRDGIDTLEEYKENKQLLKDERAALEKQLEAFNNTSSTDSNAAMLKSISTVYDIIKDTSKDTLTRANAIRSVVDHCVYDKENDKLEIYFFLQK

SEQ ID NO: 6559 - protein, 489 aa, Unknown
  Description of Unknown: Integrase B6560 sequence
  SM00857,G3DSA:1.10.10.2600,IPR036162,PF13408,IPR025827, PS51737,G3DSA:3.40.50.1390,IPR006119,IPR038109,PF07508, IPR011109,SSF53041,PF00239,PTHR30461,PS51736, Coil,cd00338
MLKTVIYARYSSDKQNEQSIEGQIHECEQFAKTHDMVIIKHYIDRALSGKTDDRPSFLQMIKDSSSGLFDAILVYKTDRFARNRYDSAVYKAKLKKNGIKIFYAKENIPDGPEGIILESMLEGFAEYYSAELSQKVKRGIKENIRKGLSFGGACPFGYKIVNKKYVIDDEQAPYVKKIFEDYAKGRRAIDIFNELNTLPNYAGKGRKWNRSSLNRMLTNKKYIGIYELEDVCVKDAIPPIIDEALFNKVQSRILFNRRHTTRAKVNYLLSGKLFCGLCEHSMTGKTGTSKTKAKYHYYVCSHRHCKQKKYRKELLEDIIIQYTVKDILNPKHFKMIAKKCLEIQQADNKTNDMLLMLKKQLTAIKTKINNLMNAIEAGIITTSTKDRLEQLEQEKYKLELEISTQQLNSNRLLSEKQIIYMLNVFYNKRVDVSFYNKIIDCFIYKIYIYSDKICIVYNLNNSDKDVTYSDINELYKSSHLNSCGSPYDL

SEQ ID NO: 6560 - protein, 489 aa, Unknown
  Description of Unknown: Integrase B6561 sequence
  SM00857,G3DSA:1.10.10.2600,IPR036162,PF13408,IPR025827, PS51737,G3DSA:3.40.50.1390,IPR006119,IPR038109,PF07508, SSF53041,IPR011109,PF00239,PTHR30461,PS51736, Coil,cd00338
MLKTIIYARYSSDKQNEQSIEGQIHECEQFAKTHDMVIIKHYIDRALSGKTDDRPSFLQMIKDSSSGLFDAILVYKTDRFARNRYDSAVYKAKLKKNGIKIFYAKENIPDGPEGIILESMLEGFAEYYSAELSQKVKRGIKENIRKGLSFGGACPFGYKIVNKKYVIDDEQAPYVKKIFEDYAKGRRAIDIFNELNTLPNYAGKGRKWNRSSLNRMLTNKKYIGIYELEDVCVKDAIPSIIDEALFNKVQSRILFNRRHTTRAKVNYLLSGKLFCGLCEHSMTGKTGTSKTKVKYHYYVCSNRHCKQKKYRKELLEDIIIQYTVKDILNPKHFKMIAKKCLEIQQADNKINDILLMLKKQLTATKTKINNLMNAIEAGIITTSTKDRLEQLEQEKYKLELEISTQQLNSNRLLSEKQIIYMLNVFYNKRVDVSFYNQIIDCFIYKIYIYSDKICIVYNLNNSDKDVTYSDINELYKSSHLNSCGSPYDL

SEQ ID NO: 6561 - protein, 489 aa, Unknown
  Description of Unknown: Integrase B6562 sequence
  PTHR30461:SF3,IPR036162,PS51737,IPR011109,PTHR30461, PS00397,PF00239,G3DSA:1.10.10.2600,IPR006119,SSF53041, cd00338,SM00857,IPR025827,IPR038109,PS51736, IPR006118,PF13408,G3DSA:3.40.50.1390,PF07508,Coil
MAKDILNMKSACAYIRVSTDKQEELSPDAQKRLLIDFAKKNNMSLLASNIYLDNGISGKKADKRPEFMKMIGMAKSKEHPFDVILVWKFSRFARNQEESIVYKSLLKKNHVEVVSISEPLIDGPFGSLIERIIEWMDEYYSIRLSGEVLRGMTEKALRGGYQSSLPLGYKMNKDTGIPYIYDDEAVIVRKIYHDYISGHSYLEIARELNSLGYRTKRGSTYEGRTVEYILSNPFYYGAVRWNRQKHDDHTIKSVSDWIIAEGKHESLIDKETWDEVQHLIALRSRPYKARAAGHMKHWLGGIVKCSDCGASLMAGLNATRYQCGNYSKGKCSHSHYIKTVALEQAVYEAFERALNGSVELHYELKKGSNEPDTDDISVILSQLSKLEDKEARIKQAYRDGIDTLEEYKENKQLLKDERAALEKQLEAFNNTSSTDSNAAMLKSISTVYDIIKDTSKDTLTRANAIRSVVDHCVYDKENDKLEIYFFLQK

SEQ ID NO: 6562 - protein, 489 aa, Unknown
  Description of Unknown: Integrase B6563 sequence
  PTHR30461:SF3,IPR036162,PS51737,IPR011109,PTHR30461, PS00397,PF00239,G3DSA:1.10.10.2600,IPR006119,SSF53041, cd00338,SM00857,IPR025827,IPR038109,PS51736, IPR006118,PF13408,G3DSA:3.40.50.1390,PF07508,Coil
MKKALNEMKNACAYIRVSTDKQEELSPDAQKRLLLDYAKSNHIMILPEHIFIENGISGKKADKRPQFMQMVGMAKSKEHPFDVILVWKFSRFARNQEESIVYKSLLKKCGVEVVSVSEPLVDGPFGSLIERIIEWMDEYYSIRLSDEVMRGMKEKALRGGYQSAMPLGYRMNRETKIPEIYEPEAVIVRKIYDEYSGNGKSYLEIARELNTLGYKTRRGANYEERTVKYILQNPFYTGMVRWNRQNHAEHTIKDESEWIISRGQHEAIISREAFDLVQEQIVKRSRPYKAHSTGSIKHWLSGMVKCSSCGSSLNGSVLSADGKVTSFQCGNYSRGSCMTSHFIKAEKLEQAVYAAFEQVIKTNEFSYEVRTPQNEADDSLLLNRQLEKLDDKEKRIKQAYRDGIDTLEEYKENKQLLADERQRIEEQLSALTDSEPERKEQLARNIRSIYDIIRDETLDKRTRANALRSVVNVMVYDKAEDTLSVEFYI

SEQ ID NO: 6563 - protein, 489 aa, Unknown
  Description of Unknown: Integrase B6564 sequence
  PTHR30461:SF3,IPR036162,PS51737,IPR011109,PTHR30461, PS00397,PF00239,G3DSA:1.10.10.2600,IPR006119,SSF53041, cd00338,SM00857,IPR025827,IPR038109,PS51736, IPR006118,PF13408,G3DSA:3.40.50.1390,PF07508,Coil
MVKDILNMKSACAYIRVSTDKQEELSPDAQKRLLIDFAKKNNMSLLAENIYIDNGISGKKADKRPEFLKMIGLAKSKEHPFDVILVWKFSRFARNQEESIVYKSLLKKNHVEVVSVSEPLVDGPFGTLIERIIEWMDEYYSIRLSGEVIRGMTEKALRGGYQSSLPLGYKMNKDTSIPYIYEDEAVIVRKIYADYTAGHSYLEIARALNSLGYKTKRGAAFEGRTIEYILSNPFYNGSVRWNRQKHDDHTIKSVNEWIIAQGKHEPLIDKTKWDEIQHLIALRSKPYRARAAGHMRHWLGGLVKCSDCGASLMAGLNATRYQCGNYNKGKCLHSHFIKAAALEDAVYKSLERVLQNSDELHYELKKSSNEPDTNDRDIILNQLSKLNDKEARIKQAFRDGIDTIEEYKENKQLLANERKALQSQLESLSPASSNDSSAEMLKNISTVLDIVKDTSNDTLTRANAIRSVVDHCVYDKENDKLEVYFFLQK

SEQ ID NO: 6564 - protein, 489 aa, Unknown
  Description of Unknown: Integrase B6565 sequence
  PTHR30461:SF3,IPR036162,PS51737,IPR011109,PTHR30461, PS00397,PF00239,G3DSA:1.10.10.2600,IPR006119,SSF53041, cd00338,SM00857,IPR025827,IPR038109,PS51736, IPR006118,PF13408,G3DSA:3.40.50.1390,PF07508,Coil
MKKTLNEMKNACAYIRVSTDKQEELSPDAQKRLLLDYAKSNHIMILPEHIFIENGVSGKKADKRPQFMQMIGMAKSKEHPFDVILVWKFSRFARNQEESIVYKSLLKKCGVEVVSVSEPLVDGPFGSLIERIIEWMDEYYSIRLAGEVMRGMKEKALRGGYQSAMPLGYRMNRETKIPEIYEPEAVIVRKIYDEYSGNGKSYLEIARELNTLGYKTRRGANYEERTVKYILQNPFYTGMVRWNRQNHNEHTIKDESEWIISMGQHEAIISREAFDLVQEQIVKRSRPYKAHSTGSIKHWLSGMVKCSSCGSSLNGSVLSAGGKVTSFQCGNYRRGSCMTSHFIKAEKLEQAVYAAFEQVIKTNEFSYEVRKPQNKADDSLLLSRQLEKLDDKEKRIKQAYRDGIDTLEEYKENKKLLADERQRIEEQLSALTDSEPERKEQLAQNIRSIYDIIRDESLDKRTRANALRSVVNVMVYDKAEDLLSVEFYI

SEQ ID NO: 6565 - protein, 489 aa, Unknown
  Description of Unknown: Integrase B6566 sequence
  SM00857,G3DSA:1.10.10.2600,IPR036162,PF13408,IPR025827, PS51737,G3DSA:3.40.50.1390,IPR006119,IPR038109,PF07508, SSF53041,IPR011109,PF00239,PTHR30461,PS51736, Coil,cd00338
MLKTVIYARYSSDKQNEQSIEGQIHECEQFAKTHDMVIIKHYIDRALSGKTDDRPSFLQMIKDSSSGLFDAILVYKTDRFARNRYDSAVYKAKLKKNGIKIFYAKENIPDGPEGIILESMLEGFAEYYSAELSQKVKRGIKENIRKGLSFGGACPFGYKIVNKKYVIDDEQSPYVKKIFEDYAKGRRAIDIFNELNTLPNYAGKGRKWNRSSLNRMLTNKKYIGIYELEDVCVKDAIPPIIDEALFNKVQSRILFNRRHTTRAKVNYLLSGKLFCGLCEHSMTGKTGTSKTKVKYHYYVCSNRHCKQKKYRKELLEDIIIQYTVKDILNPKHFKMIAKKCLEIQQADNKINDILLMLKKQLTATKTKINNLMNAIEAGIITTSTKDRLEQLEQEKYKLELEISTQQLNSNRLLSEKQIIYMLNVFYNKRVDVSFYNQIIDCFIYKIYIYSDKICIVYNLNNSDKDVTYSDINELYKSSHLNSCGSPYDL

SEQ ID NO: 6566 - protein, 489 aa, Unknown
  Description of Unknown: Integrase B6567 sequence
  PTHR30461:SF3,cd00338,SM00857,G3DSA:1.10.10.2600,IPR036162, PF13408,IPR025827,G3DSA:3.40.50.1390,PS51737,IPR006119, IPR038109,PF07508,IPR011109,SSF53041,PTHR30461, PS51736,Coil,PF00239
MDDLLKIGASYIRVSDERQDEYSPDSQLKKIREYASKEGYIIPDEYVFYDDGISGRSVKRRGDFKRMIATAKEKDHPFDTIYVWKFSRFARNQEEAMVYKNLLRKSNVSVVSVSEPIPEGHFGTLIERIIEWMDEFYSVNLGAEVSRGMEEKFTRGEPTCSPPFAYYMKDKKWLVDEENAAIVREVFQRFADGEGTRAIAVDLGNRGIKTKHGSVPDNRWIDYMLNNPAYIGKLRRSPNGSRAISKRSYRNDEIMIIDGCHQAIISKELWDSVQERIKMIKSIYPKYAKREQPIDYMLKGIVKCSSCGGTLIMSSVTSGKSNTPTLQCCNYSRGSCTVSHSITVPKMEKALMDGLDRVIRTKQFNIVPRTPKDPDAAPVDYDRLIAIEERKLERAKQAFLAEVDTIEQYAQNKEEITARIERLTAKRDEEAPRTEIDLDAYVRRVTEIVNFVNRNDVSEGAKNEALRTIIESVICEKNRDNLAIYFYEF

SEQ ID NO: 6567 - protein, 489 aa, Unknown
  Description of Unknown: Integrase B6568 sequence
  PTHR30461:SF3,IPR036162,PS51737,IPR011109,PTHR30461, PS00397,PF00239,G3DSA:1.10.10.2600,IPR006119,SSF53041, cd00338,SM00857,IPR025827,IPR038109,PS51736, IPR006118,PF13408,G3DSA:3.40.50.1390,PF07508,Coil
MAKDILNMKSACAYIRVSTDKQEELSPDAQKRLLIDFAKKNNMSLLASNIYLDNGISGKKADKRPEFMKMIGMAKSKEHPFDVILVWKFSRFARNQEESIVYKSLLKKNHVEVVSISEPLIDGPFGSLIERIIEWMDEYYSIRLSGEVLRGMTEKALRGGYQSSLPLGYKMNKDTGIPYIYDDEAVIVRKIYHDYISGHSYLEIARELNSLGYRTKRGSTYEGRTVEYILSNPFYYGAVRWNRQKHDDHTIKSVSDWIIAEGKHKSLIDKETWDEVQHLIALRSRPYKARAAGHMKHWLGGIVKCSDCGASLMAGLNATRYQCGNYSKGKCSHSHYIKTVALEQAVYEAFERALNGSVELHYELKKGSNEPDTDDRSVILSQLSKLEDKEARIKQAYRDGIDTLEEYKENKQLLKDERAALEKQLEAFNNTSSTDSNAAMLKSISTVYDIIKDTSNNTLTRANAIRSVVDHMVYDKENDKLEVYFFLQK

SEQ ID NO: 6568 - protein, 489 aa, Unknown
  Description of Unknown: Integrase B6569 sequence
  SM00857,G3DSA:1.10.10.2600,IPR036162,PF13408,IPR025827, G3DSA:3.40.50.1390,PS51737,IPR006119,IPR038109,PF07508, SSF53041,IPR011109,PF00239,PTHR30461,PS51736, Coil,cd00338
MLKTVIYARYSSDKQNEQSIEGQIHECEQFAKTHDMVIIKHYIDRALSGKTDDRPSFLQMIKDSSSGLFDAVLVYKTDRFARNRYDSAVYKAKLKKNGIKIFYAKENIPDGPEGIILESMLEGFAEYYSAELSQKVKRGIKENIRKGLSFGGACPFGYKIVNKKYVIDDEQAPYVKKIFEDYAKGRRAIDIFNELNTLPNYAGKGRKWNRSSLNRMLTNKKYIGIYELEDVCVKDAIPPIIDEALFNKVQSRILFNRRHTTRAKVNYLLSGKLFCGLCEHSMTGKTGTSKTKVKYHYYVCSNRHCKQKKYRKELLEDIIIQYTVKDILNPKHFKMIAKKCLEIQQADNKINDILLMLKKQLTATKTKINNIMNAIEAGIITTSTKDRLEQLEQEKYKLELEISTQQLNSNRLLSEKQIIYMLNVFYNKRVDVSFYNQIIDCFIYKIYIYSDKICIVYNLNNSDKDVTYSDINELYKSSHLNSCGSPYDL

SEQ ID NO: 6569 - protein, 489 aa, Unknown
  Description of Unknown: Integrase B6570 sequence
  PTHR30461:SF3,cd00338,SM00857,G3DSA:1.10.10.2600,IPR036162, PS51737,G3DSA:3.40.50.1390,IPR006119,IPR038109,PF07508, IPR011109,SSF53041,PTHR30461,PS51736,Coil, PF00239
MRKKNVCLMRVSTDVQETTSQRVAIEKYIKENHISIDEWLEEDGVSGFKTKLENRVALMKLKEMALNDELDTLVVFNLDRIGRRMELVGFLTLLDSCNVKILSVTEGCLNDGNDTDILVNSIKMWVAEYESKKKSKAVKAGKKVSAMRGNFLGGKPNFGYTVKDKKLEIDEDEASIVRLLFDLYINKGTAKTIDKFEQLGIKRRGSNWTRANIVKTIKNTVYVGKKPLQDGEIPYDETLRIVSDEVFYKAQEMIKQRTSKSKGTSTKFVNRSEALLEGLLFHRCPDGNLRKLSIDYNSGTKKSPNKKLLYRCSNCKDHRYEGVQKSFGGKKLNELIVGNIKDIIKSITQQDLKLYYEKYKYGDIEELQQEVLRLKAKLEKKEKALSNAQIELEKIFMGDSSMDKDTINSIIVKLKDEVKQIHEEIQNKETEVESKTKKNIKSFKILEKYKDFEKIYDQAENYNKKMILQEIVDKIIIDEDKIEIKLNIW

SEQ ID NO: 6570 - protein, 489 aa, Unknown
  Description of Unknown: Integrase B6571 sequence
  PTHR30461:SF3,IPR036162,PS51737,IPR011109,PTHR30461, PS00397,PF00239,G3DSA:1.10.10.2600,IPR006119,SSF53041, cd00338,SM00857,IPR025827,IPR038109,PS51736, IPR006118,PF13408,G3DSA:3.40.50.1390,PF07508,Coil
MAKDILNMKSACAYIRVSTDKQEELSPDAQKRLLIDFAKKNNMSLLASNIYLDNGISGKKADKRPEFMKMIGMAKSKEHPFDVILVWKFSRFARNQEESIVYKSLLKKNHVEVVSVSEPLVDGPFGTLIERIIEWMDEYYSIRLSGEVLRGMTEKALRGGYQSSLPLGYRMNKDTGIPYISDDEAIIVKRIYKDYIAGHSYLEIARELNSLGYRTKRGSTYEGRTVEYILSNPFYYGAVRWNRQKHDDHTIKSVSDWIIAEGKHESLIDKETWDEVQHLIALRSRPYKARAAGHMKHWLGGIVKCSDCGASLMAGLNATRYQCGNYSKGKCSHSHYIKTVALEQAVYEAFERALNGSVELHYELKKGSNEPDTDDRSVILSQLSKLEDKEARIKQAYRDGIDTLEEYKENKQLLKDERAALEKQLEAFNNTSSTDSNAAMLKSISTVYDIIKDTSNNTLTRANAIRSVVDHMVYDKENDKLEVYFFLQK

SEQ ID NO: 6571 - protein, 489 aa, Unknown
  Description of Unknown: Integrase B6572 sequence
  cd00338,SM00857,G3DSA:1.10.10.2600,IPR036162,PF13408, IPR025827,G3DSA:3.40.50.1390,PS51737,IPR006119,IPR038109, PF07508,SSF53041,IPR011109,PTHR30461,PS51736, Coil,PF00239
MLKTVIYARYSSDKQNEQSIEGQIHECEQFAKTHDMVIIKHYIDRALSGKTDDRPSFLQMIKDSSSGLFDAILVYKTDRFARNRYDSAVYKAKLKKNGIKIFYAKENIPDGPEGIILESMLEGFAEYYSAELSQKVKRGIKENIRKGLSFGGACPFGYKIVNKKYVIDDEQAPYVKKIFEDYAKGRRAIDIFNELNTLPNYAGKGRKWNRSSLNRMLTNKKYIGIYELEDVCVKDAIPPIIDEALFNKVQSRILFNRRHTTRAKVNYLLSGKLFCGLCEHSMTGKTGTSKTKVKYHYYVCSNRHCKQKKYRKELLEDIIIQYTVKDILNPKHFKMIAKKCLEIQQADNKINDILLMLKKQLTATKTKINNIMNAIEAGIITTSTKDRLEQLEQEKYKLELEISTQQLNSNRLLSEKQIIYMLNVFYNKRVDVSFYNQIIDCFIYKIYIYSDKICIVYNLNNSDKDVTYSDINELYKSSHLNSCGSPYDL

SEQ ID NO: 6572 - protein, 489 aa, Unknown
  Description of Unknown: Integrase B6573 sequence
  SM00857,G3DSA:1.10.10.2600,IPR036162,PF13408,IPR025827, G3DSA:3.40.50.1390,PS51737,IPR006119,IPR038109,PF07508, SSF53041,IPR011109,PF00239,PTHR30461,PS51736, Coil,cd00338
MLKTVIYARYSSDKQNEQSIEGQIHECEQFAKTHDMVIIKHYIDRALSGKTDDRPSFLQMIKDSSSGLFDAVLVYKTDRFARNRYDSAVYKAKLKKNGIKIFYAKENIPDGPEGIILESMLEGFAEYYSAELSQKVKRGIKENIRKGLSFGGACPFGYKIVNKKYVIDDEQAPYVKKIFEDYAKGRRAIDIFNELNTLPNYAGKGRKWNRSSLNRMLTNKKYIGIYELEDVCVKDAIPPIIDEALFNKVQSRILFNRRHTTRAKVNYLLSGKLFCGLCEHSMTGKTGTSKTKAKYHYYVCSHRHCKQKKYRKELLEDIVIQYTVKDILNPKHFKMIAKKCLEIQQADNKTNDMLLILKKQLTAIKTKINNLMNAIEAGIITTSTKDRLEQLEQEKYKLELEISTQQLNSNRLLSEKQIIYMLNVFYNKRVDVSFYNQIIDCFIYKIYIYSDKICIVYNLNNSDKDVTYSDINELYKSSHLNSCGSPYVN

SEQ ID NO: 6573 - protein, 489 aa, Unknown
  Description of Unknown: Integrase B6574 sequence
  PTHR30461:SF3,IPR036162,PS51737,IPR011109,PTHR30461, PS00397,PF00239,G3DSA:1.10.10.2600,IPR006119,SSF53041, cd00338,SM00857,IPR025827,IPR038109,PS51736, IPR006118,PF13408,G3DSA:3.40.50.1390,PF07508,Coil
MKKTLNEMKNACAYIRVSTDKQEELSPDAQKRLLLDYAKNNHIMILPEHIFIENGISGKKADKRPQFMQMIGMAKSKEHPFDVILVWKFSRFARNQEESIVYKSLLKKCGVEVVSVSEPLVDGPFGSLIERIIEWMDEYYSIRLSDEVMRGMKEKALRGGYQSAMPLGYRMNRETKIPEIYEPEAVIVRKIYDEYSGNGKSYLEIARELNTLGYKTRRGANYEERTVKYILQNPFYTGMVRWNRQNHNEHTIKDESEWIISKGQHEAIISQEAFDLVQEQIIKRSRPYKAHSAGAIKHWLSGMVKCSSCGSSLNGSVLSAGGKVTSFQCGNYSRGSCMTSHFIKAEKLEQAVYAAFEQVIKTNEFSYEVRTPQNEADDSLLLNRQLEKLDDKEKRIKQAYRDGIDTLEEYKENKKLLADERQRIEEQLSALTDSEPERKEQLAQNIRSIYDIIKNETLDKRTRANALRSVVNVMVYDKAEDSLSVEFYI

SEQ ID NO: 6574 - protein, 489 aa, Unknown
  Description of Unknown: Integrase B6575 sequence
  PTHR30461:SF3,IPR036162,PS51737,IPR011109,PTHR30461, PS00397,PF00239,G3DSA:1.10.10.2600,IPR006119,SSF53041, cd00338,SM00857,IPR025827,IPR038109,PS51736, IPR006118,PF13408,G3DSA:3.40.50.1390,PF07508,Coil
MAKDILNMKSACAYIRVSTDKQEELSPDAQKRLLIDFAKKNNMSLLASNIYLDNGISGKKADKRPEFMKMIGMAKNKEHPFDVILVWKFSRFARNQEESIVYKSLLKKNHVEVVSISEPLIDGPFGSLIERIIEWMDEYYSIRLSGEVLRGMTEKALRGGYQSSLPLGYRMNKDTGIPYIYEDEAIIVKKIYKDYIAGHSYLEIARELNALGYKTKRGAAFEGRTIEYILCNPFYYGAIRWNRQKHDDHTIKSVSDWIIAEGKHEALINKETWDEVQHLMALRSRPYKSRAAGHMKHWLGGIVKCSSCGASLMAGLNATRYQCGNYSKGKCSHSHYIKTVALEQAVYEAFERALNGSVELHYELKKSSNEPDTDDRSVILSQLSKLEDKEARIKQAYRDGIDTLEEYKENKQLLKDERAALEKQLEAFNNTSSTDSNAAMLKSISTVYDIIKDTSKDTLTRANAIRSVVDHCVYDKENDKLEIYFFLQK

SEQ ID NO: 6575 - protein, 489 aa, Unknown
  Description of Unknown: Integrase B6576 sequence
  cd00338,SM00857,G3DSA:1.10.10.2600,IPR036162,PF13408, PS51737,G3DSA:3.40.50.1390,IPR025827,IPR006119,IPR038109, PF07508,IPR011109,SSF53041,PTHR30461,PS51736, Coil,PF00239
METYCIYLRKSRADAEAETRGEGETLARHEHTLLDLAKRQNLTITCIYREIVSGDSIAARPQMQQMLQDITDGKYAGVLVMEIERLARGDTIDQGVVAQAFRESGTKILTPIKTYDPNNEFDEEYFEFSLFMSRREYKTIKRRMQAGRAASVKEGNYIGTNPPYGYRKVQPEPKVKTLEVVPEEAEAIRMMFEMYLSGDGARAIAARLNQLQILPRKAAMWEPVSVRKILHNPIYAGKIEWHTKKDGTILADGRHPAIISWEQYQQSIERRKQTAPQVPTGYTTQNYYHGILFCANCGHQMKRRPAANGTAHMLCRRNECRGKVVSSTVKKIDEAVLEAIRYRMQELMLCKDTIQQNEGHKKETAKRQRAKIEKALEKLQHQKEKLHTLLETDVYTVEVFLERSKIIQQQIEALEAELEAIQHEAEAQGLSPEQSLLWLQYVLDNFLGATPEQKNQMLRKVIRRIEYRKTQRMCYRKQDSDLSLHIDFL

SEQ ID NO: 6576 - protein, 489 aa, Unknown
  Description of Unknown: Integrase B6577 sequence
  PTHR30461:SF3,cd00338,SM00857,G3DSA:1.10.10.2600,IPR036162, PF13408,PS51737,IPR025827,G3DSA:3.40.50.1390,IPR006119, IPR038109,PF07508,IPR011109,SSF53041,PTHR30461, PS51736,Coil,PF00239
MLKAVIYARYSSEKQNEQSIEGQIHECEQFARTHDMVVVNHYIDRALSGKTDDRPSFLQMIKDSATGSFDAVLVYKTDRFARNRYDSAVYKAKLKKNGIKIFYAKENIPDGPEGIILESMLEGFAEYYSAELSQKVKRGIKENIRKGLSFGGACPYGYKIVNKKYTVNDEQAPYVQKIFSDYASGRRAVDIFNELNSMPNYAGKGRKWNRSSLNRMLTNKKYIGIYELEDVCVKDAIPPIISEELFNKVQAIIVYNRRHTTKHRINYLLSGRLFCGLCGSPMTGKTGTSKTGVKYHYYVCSDKRCQQKKYRQDLLEDSVIQYTVRDILNPHNFKRIAKRCMQIQKENNPYDAILISLQKQLSDTNTKLSNIMKAIEAGIITASTKERLNELERQKFSLETEIKQQKMANNLLLTEEQITYVLNEFYQKRVDKNFYNRIIDGFVHKIYLYDDKISIIYNLTSNGKELLKSDIDNLYKSSQADACGSPYDL

SEQ ID NO: 6577 - protein, 489 aa, Unknown
  Description of Unknown: Integrase B6578 sequence
  cd00338,SM00857,G3DSA:1.10.10.2600,IPR036162,PF13408, IPR025827,PS51737,G3DSA:3.40.50.1390,IPR006119,IPR038109, PF07508,IPR011109,SSF53041,PTHR30461,PS51736, Coil,PF00239
MNAYCIYLRKSRADAEAEARGEGETLARHEHTLLDLAKRQNLTITCIYREIVSGDSIAARPQMQQMLQDITDGKYAGVLVMEIERLARGDTIDQGVVAQAFRESGTKILTPIKTYDPNNEFDEEYFEFSLFMSRREYKTIKRRMQAGRAASVKEGNYIGTNPPYGYRKVQPEPKVKTLEIVPEEAEAIRMMFEMYLSGDGARAIAARLNQLQILPRKAAMWEPVSVRKILHNPIYAGKIEWHTKKDGTILADGRHPAIISWEQYQQSIERRKQTAPQVPTGYTTQNYYHGILFCANCGHQMKRRPAANGTAHMLCRRNECRGKVVSSTVKKIDEAVLEAIRYRMQELMLCKDTIRQDETHKKETAKRQRAKIEKALEKLQHQKEKLHTLLETDVYTVEVFLERSKIIQQQIEALEAELGAIQHEAEAQGLSPEQSLLWLQYVLDNFLGATPEQKNQMLRKVIRRIEYRKTQRMCYRKQDSDLSLHIDFL

SEQ ID NO: 6578 - protein, 489 aa, Unknown
  Description of Unknown: Integrase B6579 sequence
  PTHR30461:SF3,IPR036162,PS51737,IPR011109,PTHR30461, PS00397,PF00239,G3DSA:1.10.10.2600,IPR006119,SSF53041, cd00338,SM00857,IPR025827,IPR038109,PS51736, IPR006118,PF13408,G3DSA:3.40.50.1390,PF07508,Coil
MKKTLNEMKNACAYIRVSTDKQEELSPDAQKRLLLDYAKSNHIMILPEHIFIENGISGKKADKRPQFMQMIGLAKSKEHPFDVILVWKFSRFARNQEESIVYKSLLKKCGVEVVSVSEPLVDGPFGSLIERIIEWMDEYYSIRLSDEVMRGMKEKALRGGYQSAMPLGYRMNRETKIPEIYEPEAVIVRKIYDEYSGNGKSYLEIARELNTLGYKTRRGANYEERTVKYILQNPFYTGMVRWNRQNHNDHTIKDESEWIISRGQHEAIISREAFDLVQEQIVKRSRPYKAHSTGSIKHWLSGMVKCSSCGSSLNGSVLSAGGKVTSFQCGNYSRGSCMTSHFIKAEKLEQAVYAAFEQVIKTNKFSYEVRKPQNKADDSLLLNRQLEKLDDKEKRIKQAYRDGIDTLEEYKENKKLLADERQRIEEQLSALTDNEPERKEQLARNIRSIYDIIKDESLDKRTRANALRSVVNVMVYDKAEDTLSVEFYI

SEQ ID NO: 6579 - protein, 489 aa, Unknown
  Description of Unknown: Integrase B6580 sequence
  PTHR30461:SF3,IPR036162,PS51737,IPR011109,PTHR30461, PS00397,PF00239,G3DSA:1.10.10.2600,IPR006119,SSF53041, cd00338,SM00857,IPR025827,IPR038109,PS51736, IPR006118,PF13408,G3DSA:3.40.50.1390,PF07508,Coil
MAKNILNMKTAAGYIRVSTDKQEELSPDAQKRLLIDYAKKHSISLLAENIYIDNGISGKKADKRPEFMKMIGMAKSKEHPFDVILVWKFSRFARNQEESIVYKSLLKKNSVEVVSVSEPLIDGPFGSLIERIIEWMDEYYSIRLSGEVLRGMTEKALRGGYQSSLPLGYKMNKDTGIPYIYESEAIIVRKIYKEYIDGHSYLEIARELNALGYKTKRGAAYEGRTVEYILSNPFYYGAVRWNRQKHDDHTIKDVGDWIIVMGKHQAIIDKETWDQVQHLMALRSRPYKARAAGHMKHWLGGIVKCSDCGASLMAGLNATRYQCGNYNKGKCSHSHFIKTAALEEAVYEAFDRVMKNPDELLHYELKKASNEANTNDRDMILNQISKLSDKEARIKQAYRDGIDTIDEYKENKQIIDNERKALEAQLDSLKASEADSSDEMLQHITSVLNIIKDSSKDTLTRANAIRSVVDHCVYDKENDRLEVYFFLQK

SEQ ID NO: 6580 - protein, 489 aa, Unknown
  Description of Unknown: Integrase B6581 sequence
  cd00338,SM00857,G3DSA:1.10.10.2600,IPR036162,PF13408, IPR025827,G3DSA:3.40.50.1390,PS51737,IPR006119,IPR038109, PF07508,IPR011109,SSF53041,PTHR30461,PS51736, Coil,PF00239
MLKTVIYARYSSDKQNEQSIEGQIHECEQFAKTHDMVIIKHYIDRALSGKTDDRPSFLQMIKDSSSGLFDAVLVYKTDRFARNRYDSAVYKAKLKKNGIKIFYAKENIPDGPEGIILESMLEGFAEYYSAELSQKVKRGIKENIRKGLSFGGACPFGYKIVNKKYVIDDEQAPYVKKIFEDYAKGRRAIDIFNELNTLPNYAGKGRKWNRSSLNRMLTNKKYIGIYELEDVCVKDAIPPIIDEALFNKVQSRILFNRRHTTRAKVNYLLSGKLFCGLCEHSMTGKTGTSKTKVKYHYYVCSNRHCKQKKYRKELLEDIIIQYTVKDILNPKHFKMIAKKCLEIQQADNKINDILSMLKKQLTATKTKINNLMNAIEAGIITTSTKDRLEQLELEKYKLELEISTQQLNSNRLLSEEQIIYMLNEFYKKRADVSFYNQIIDCFIYKIYIYSDKICIVYNLNNSDKDVTYSDINELYKSSHLNSCGSPYDL

SEQ ID NO: 6581 - protein, 489 aa, Unknown
  Description of Unknown: Integrase B6582 sequence
  PTHR30461:SF3,cd00338,SM00857,G3DSA:1.10.10.2600,IPR036162, PS51737,G3DSA:3.40.50.1390,IPR006119,IPR038109,PF07508, SSF53041,IPR011109,PTHR30461,PS51736,Coil, PF00239
METYCIYLRKSRADAEAEARGEGETLARHEHTLLELAKRQRLTIAHIYREIVSGDSIAARPQMQQMLQDITDGKYTGVLVMEIERLARGDTIDQGVVAQAFRESETKIITPVKTYDPNNEFDEEYFEFSLFMSRREYKTIKRRMQAGRIAAVKEGNYIGTNPPYGYRKIHPQPKVNTLEIVPEEAEYIRCVFEWYLSGMGARAIAARLNQLQVPPRKAAAWEPISIRKILGNPTYAGKVEWHTKKDGTILADGLHPGIISWEQFQQVQERRKQKAPPVPTGYTTQNYYHNVLYCANCGHQMKRRPTADGGAHMLCRRNECRGKVVSASVTKVDEAVLESIRYRIQELELRKDKMEQMAKTELETREKQRARIEKALEKLHRQKEKLHTLLETDVYSVETFLERSKALEKQKAELETELQACSADVAAESLTPEQALLWLQYVLDHFETADAEQKNKMLCRVIRRIEYSKTERMCCNKRHSDMQLHVVFL

SEQ ID NO: 6582 - protein, 489 aa, Unknown
  Description of Unknown: Integrase B6583 sequence
  cd00338,SM00857,G3DSA:1.10.10.2600,IPR036162,PF13408, IPR025827,G3DSA:3.40.50.1390,PS51737,IPR006119,IPR038109, PF07508,SSF53041,IPR011109,PTHR30461,PS51736, Coil,PF00239
MLKTVIYARYSSDKQNEQSIEGQIHECEQFAKTHDMVIIKHYIDRALSGKTDDRPSFLQMIKDSSSGLFDAVLVYKTDRFARNRYDSAVYKAKLKKNGIKIFYAKENIPDGPEGIILESMLEGFAEYYSAELSQKVKRGIKENIRKGLSFGGACPFGYKIVNKKYVIDDEQAPYVKKIFEDYAKGRRAIDIFNELNTLPNYAGKGRKWNRSSLNRMLTNKKYIGIYELEDVCVKDAIPPIIDEALFNKVQSRILFNRRHTTRAKVNYLLSGKLFCGLCEHSMTGKTGTSKTKAKYHYYVCSHRHCKQKKYHKELLEDIVIQYTVKDILNPKHFKMIAKKCLEIQQADNKTNDMLLILKKQLTAIKTKINNLMNAIEAGIITTSTKDRLEQLEQEKYKLELEISTQQLNSNRLLSEKQIIYMLNVFYNKRVDVSFYNQIIDCFIYKIYIYSDKICIVYNLNNSDKDVTYSDINELYKSSHLNSCGSPYVN

SEQ ID NO: 6583 - protein, 489 aa, Unknown
  Description of Unknown: Integrase B6584 sequence
  cd00338,SM00857,G3DSA:1.10.10.2600,IPR036162,PF13408, IPR025827,G3DSA:3.40.50.1390,PS51737,IPR006119,IPR038109, PF07508,IPR011109,SSF53041,PTHR30461,PS51736, Coil,PF00239
MLKTVIYARYSSDKQNEQSIEGQIHECEQFAKTHDMVIIKHYIDRALSGKTDDRPSFLQMIKDSSSGLFDAVLVYKTDRFARNRYDSAVYKAKLKKNGIKIFYAKENIPDGPEGIILESMLEGFAEYYSAELSQKVKRGIKENIRKGLSFGGACPFGYKIVNKKYVIDDEQAPYVKKIFEDYAKGRRAIDIFNELNTLPNYAGKGRKWNRSSLNRMLTNKKYIGIYELEDVCVKDAIPPIIDEALFNKVQSRILFNRRHTTRAKVNYLLSGKLFCGLCEHSMTGKTGTSKTKAKYHYYVCSHRHCKQKKYRKELLEDIIIQYTVKDILNPKHFKMIAKKCLEIQQADNKTNDMLLMLKKQLTATKTKINNLMNAIEAGIITTSTKDRLEQLEQEKYKLELEISTQQLNSNRLLSEKQIIYMLNVFYNKRVDVSFYNQIIDCFIYKIYIYSDKICIVYNLNNSDKDVTYSDINELYKSSHLNSCGSPYVN

SEQ ID NO: 6584 - protein, 489 aa, Unknown
  Description of Unknown: Integrase B6585 sequence
  cd00338,SM00857,G3DSA:1.10.10.2600,IPR036162,PF13408, IPR025827,G3DSA:3.40.50.1390,PS51737,IPR006119,IPR038109, PF07508,SSF53041,IPR011109,PTHR30461,PS51736, Coil,PF00239
MLKTVIYARYSSDKQNEQSIEGQIHECEQFAKTHDMVIIKHYIDRALSGKTDDRPSFLQMIKDSSSGLFDAVLVYKTDRFARNRYDSAVYKAKLKKNGIKIFYAKENIPDGPEGIILESMLEGFAEYYSAELSQKVKRGIKENIRKGLSFGGACPFGYKIVNKKYVIDDEQAPYVKKIFEDYAKGRRAIDIFNELNTLPNYAGKGRKWNRSSLNRMLTNKKYIGIYELEDVCVKDAIPPIIDEALFNKVQSRILFNRRHTTRAKVNYLLSGKLFCGLCEHSMTGKTGTSKTKVKYHYYVCSNRHCKQKKYRKELLEDIIIQYTVKDILNPKHFKMIAKKCLEIQQADNKTNDMLLMLKKQLTATKTKINNLMNAIEAGIITTSTKDRLEQLEQEKYKLELEISTQQLNSNRLLSEKQIIYMLNVFYNKRVDVSFYNQIIDCFIYKIYIYSDKICIVYNLNNSDKDVTYSDINELYKSSHLNSCGSPYVN

SEQ ID NO: 6585 - protein, 489 aa, Unknown
  Description of Unknown: Integrase B6586 sequence
  PTHR30461:SF3,SM00857,G3DSA:1.10.10.2600,IPR036162,PF13408, IPR025827,G3DSA:3.40.50.1390,PS51737,IPR006119,IPR038109, PF07508,IPR011109,SSF53041,PTHR30461,Coil, PS51736,cd00338,PF00239
MKEYKKGAISVRVSTDMQTKYSPDSQIKMCLAYAKQHEIYISEEHIYRDDGISGRNADKRTDFQRMIADAKKKPKPFDCILVYDFSRFARNKEESVMYKAMLRKKYDIDVVSITQPLGDGKERVILESMYEAMDEYYVLNLSENVKRGKKEKATRGEHQGATPFGYRYDKNTQMLYPNENTKDSVVFIFEEWIKPETTINNLTVKINAMGIKTSRGNKWCEESLKVVLNNPIYIGYTRFTDGGMGRNYDNPNIVLTKGKHEPIISDELWNKAQEKIKEHNKIWFKYKKPSVKHQYWLRGLIKCSNCGKNLIMIERHSGSKKKPFYQCNGYNKKSCNESHSILQEKLEDALLNELEIIFKDKININIVQSKSETNEISVINNSINKCKNRLERIEVAYMDGIDSLEEYKIKKKKIIEEIEKLNAELQNINTKEYEDLKKERVYSLCEYAHKILKDNKIDFKIKEKIANELFDNIIYNKKENTLYVTFKEV

SEQ ID NO: 6586 - protein, 489 aa, Unknown
  Description of Unknown: Integrase B6587 sequence
  PTHR30461:SF3,IPR036162,PS51737,IPR011109,PTHR30461, PS00397,PF00239,G3DSA:1.10.10.2600,IPR006119,SSF53041, cd00338,SM00857,IPR025827,IPR038109,PS51736, IPR006118,PF13408,G3DSA:3.40.50.1390,PF07508,Coil
MKKTLNEMKNACAYIRVSTDKQEELSPDAQKRLLLDYAKSNHIMILPEHIFIENGISGKKADKRPQFMRMIGMAKSKERPFDVILVWKFSRFARNQEESIVYKSLLKKCGVEVVSVSEPLVDGPFGSLIERIIEWMDEYYSIRLSGEVMRGMKEKALRGGYQSAMPLGYRMNRETKIPEIYELEAVIVRKIYDEYSGNGKSYLEIARELNTLGYKTRRGANYEERTIKYILQNPFYTGMVRWNRQNHNEHTIKDESEWIISQGRHEAIITQEVYDLVQEQIVKRSRPYKAHSTGSIKHWLSGIVKCSSCGSSLNGSVLSAGGKVTSFQCGNYSRGSCMTSHFIKAEKLEQAVYAAFEQVIKTNEFSYEVRKPQNEADDSLLLRRQLEKLDDKEKRIKQAYRDGIDTLEEYKENKKLLADERQRIEEQLSALTDSEPERKEQLARNIRSIYDIIKDESLDKRTRANALRSVVNVMVYDKAEDTLSVEFYI

SEQ ID NO: 6587 - protein, 489 aa, Unknown
  Description of Unknown: Integrase B6588 sequence
  PTHR30461:SF3,SM00857,G3DSA:1.10.10.2600,IPR036162,PF13408, PS51737,G3DSA:3.40.50.1390,IPR025827,IPR006119,IPR038109, PF07508,IPR011109,SSF53041,PF00239,PTHR30461, PS51736,Coil,cd00338
MLKAVIYARYSSEKQNEQSIEGQIHECEQFARMHDMVVVNHYVDRALSGKTDDRPSFLQMIKDSATGSFDAVLVYKTDRFARNRYDSAVYKAKLKKNGIKIFYAKENIPDGPEGIILESMLEGFAEYYSAELSQKVKRGIKENIRKGLSFGGACPYGYKIVNKKYTVNDEQAPYVQKIFSDYASGRRAVDIFNELNSMPNYAGKGRKWNRSSLNRMLTNKKYIGIYELEDVCVKDAIPPIISEELFNKVQAIIVYNRRHTTKHRINYLLSGRLFCGLCNSPMTGKTGTSKTGVKYHYYVCSDKRCQQKKYRQDLLEDTVIQYTVRDILNPHNFKRIAKRCMQIQKENNPYDAILISLQKQLSDTNIKLSNIMKAIEAGIITASTKERLNELERQKFSLETEIKQQKMANNLLLTEEQIIYVLNEFYQKRVDKNFYNRIIDGFVHKVYLYKDKISIVYNLTGNGKELLKSDIDNLYKSSQADACGSPYNL

SEQ ID NO: 6588 - protein, 489 aa, Unknown
  Description of Unknown: Integrase B6589 sequence
  PTHR30461:SF3,IPR036162,PS51737,IPR011109,PTHR30461, PS00397,PF00239,G3DSA:1.10.10.2600,IPR006119,SSF53041, cd00338,SM00857,IPR025827,IPR038109,PS51736, IPR006118,PF13408,G3DSA:3.40.50.1390,PF07508,Coil
MAIDIANMKVACAYIRVSTDKQEELSPDAQKRLLIDYAKKHNMSLLAENIYIDNGISGKKADKRPEFMKMIGMAKSKEHPFDVILVWKFSRFARNQEESIVYKSLLKKNSVEVVSVSEPLIDGPFGSLIERIIEWMDEYYSIRLSGEVLRGMTEKALRGGYQSSLPLGYKMNKDTGIPYIYESEAIIVRKIYKEYIDGHSYLEIARELNTLGYKTKRGAAYEGRTVEYILSNPFYYGAVRWNRQKHDDHTIKDVGDWIIVMGKHQAIIDKETWDQVQHLMALRSRPYKARAAGHMKHWLGGIVKCSDCGASLMAGLNATRYQCGNYNKGKCSHSHFIKTAALEEAVYEAFDRVMQNPDELLHYELKKASNEANTNDRDMILNQISKLSDKEARIKQAYRDGIDTIDEYKENKQIIDNERKALEAQLDSLKASEADSSDEMLQHITSVLNIIKDTSKDTLTRANAIRSVVDHCVYDKENDRLEVYFFLQK

SEQ ID NO: 6589 - protein, 489 aa, Unknown
  Description of Unknown: Integrase B6590 sequence
  PTHR30461:SF3,cd00338,SM00857,G3DSA:1.10.10.2600,IPR036162, PS51737,G3DSA:3.40.50.1390,IPR006119,IPR038109,PF07508, IPR011109,SSF53041,PTHR30461,PS51736,Coil, PF00239
METYCIYLRKSRADAEAEARGEGETLARHEHTLLELAKRQRLTIAHIYREIVSGDSIAARPQMQQMLQDITDGKYTGVLVMEIERLARGDTIDQGVVAQAFRESETKIITPVKTYDPNNEFDEEYFEFSLFMSRREYKTIKRRMQAGRIAAVKEGNYIGTNPPYGYRKIHPQPKVNTLEIVPEEAEYIRCVFEWYLSGMGARAIAARLNQLQVPPRKAAAWEPISIRKILGNPTYAGKVEWHTKKDGTILADGLHPGIISWEQFQQVQERRKQKAPPVPTGYTTQNYYHNVLYCANCGHQMKRRPTADGGAHMLCRRNECRGKVVSASVTKVDEAVLESIRYRIQELELRKDKMEQMAKTESETREKQRARIERALEKLHKQKEKLHTLLETDVYSVETFLERSKALEKQKAELEAQLQACSTDAAAKALDPEQALLWLQYVLDHFETADAEQKNKMLCRVIRRIEYSKTERMCCNKRHSDMQLHVVFL

SEQ ID NO: 6590 - protein, 489 aa, Unknown
  Description of Unknown: Integrase B6591 sequence
  PTHR30461:SF3,IPR036162,PS51737,IPR011109,PTHR30461, PS00397,PF00239,G3DSA:1.10.10.2600,IPR006119,SSF53041, cd00338,SM00857,IPR025827,IPR038109,PS51736, IPR006118,PF13408,G3DSA:3.40.50.1390,PF07508,Coil
MISNKKECFAYIRVSTDDQLDYSPDSQLRLLKDYATQHDMIITSVFKDLGISGRQAKKRPQFQEMIDRAKRGECDAILVWKYSRFARNQEESVIYKSMLRKMGVDVISISEELPEDWLASHLVEAVYEIMDEQYSRNLSVEVKRGMQQKAMEGGYNGPIPIGYIKERGSDTIPVPDPVYAPVIERIFDEYLSGKALSDIAYRLNADGFRTKRGGKFENRVISYILRNPFYTGHVRFNYYDKESKTYNTDPIIVKAKHEPIISQKIFDKAQHIYQTTNLNKRKPRTAASVKHWLSGVVKCSVCGASLGYHAVNKSVKTAHFACWKSAKGQCESRSYANATQLEQAVIDGFTRIANSPELNYERIPADSKADKNLEYYNNLLSKLDKKEKRIKEAYINGIDTLEEYKLNKEIILNERQSIQEKLNAFSESCTEKNINTDNLMRAKLTNLIELLNNPDATDIDKANALRSICDRIIFSKETFELKFYLFLKL

SEQ ID NO: 6591 - protein, 489 aa, Unknown
  Description of Unknown: Integrase B6592 sequence
  PTHR30461:SF3,SM00857,G3DSA:1.10.10.2600,IPR036162,PF13408, IPR025827,G3DSA:3.40.50.1390,PS51737,IPR006119,IPR038109, PF07508,IPR011109,SSF53041,PTHR30461,Coil, PS51736,cd00338,PF00239
MNKKINAVGYARYSTEFQTDNSIAYQTTAIQEYCEKHDINLLKVYSDEAMTGTNTNRPAFQQMLAAAEQHLFDAVIIYDISRGSRNVVDWFSFRQEMARIDIQVISCNQHLGDILDPNTYLTELITAGIGQHMVLDTRKKSIDGKNERAKKGIFCGGTPPLGYDINDGNYIINPKEAKIVQTIFTMYADGHSYNEILKELDGAVGKAGRPLGKNSLYSILKNERYIGVYTWNKRKIKIMGKWAGGRPNPDIVRIENAIPPIIDETIWRKVEERMKDNSRRATSKSCRHNYLLSGLIQCDKCGATFVGHTSTNQKKISTPYYICGNKYRTHTCCTKNINADRLETFVVMQIKHYLKTADFETLADEICKQVNSAAPDVSAEKKELSEIETKITNGINAILGGVNIPELKDEVDKLRIRKSELEDVITYKEKNKTRTLNRDKLVEMLKESAENIDSTDSNTLIRNFVTKIYAHADGTVTVNLGVHINGCGD

SEQ ID NO: 6592 - protein, 489 aa, Unknown
  Description of Unknown: Integrase B6593 sequence
  SM00857,G3DSA:1.10.10.2600,IPR036162,PF13408,IPR025827, G3DSA:3.40.50.1390,PS51737,IPR006119,IPR038109,PF07508, SSF53041,IPR011109,PF00239,PTHR30461,PS51736, Coil,cd00338
MLKTVIYARYSSDKQNEQSIEGQIHECEQFAKTHDMVIIKHYIDRALSGKTDDRPSFLQMIKDSSSGLFDAILVYKTDRFARNRYDSAVYKAKLKKNGIKIFYAKENIPDGPEGIILESMLEGFAEYYSAELSQKVKRGIKENIRKGLSFGGACPFGYKIVNKKYVINDEQAPYVKKIFEDYAKGRRAIDIFNELNTLPNYAGKGRKWNRSSLNRMLTNKKYIGIYELEDVCVKDAIPPIIDEALFNKVQSRILFNRRHTTRAKVNYLLSGKLFCGLCEHSMTGKTGTSKTKVKYHYYVCSNRHCKQKKYRKELLEDIIIQYTVKDILNPKHFKMIAKKCLEIQQADNKINDILLMLKKQLTATKTKINNLMNAIEAGIITTSTKDRLEQLEQEKYKLELEISAQQLNSNRLLSEKQIIYMLNVFYNKRVDVSFYNQIIDCFIYKIYIYSDKICIVYNLNNSDKDVTYSDINELYKSSHLNSCGSPYVN

SEQ ID NO: 6593 - protein, 489 aa, Unknown
  Description of Unknown: Integrase B6594 sequence
  PTHR30461:SF3,IPR036162,PS51737,IPR011109,PTHR30461, PS00397,PF00239,G3DSA:1.10.10.2600,IPR006119,SSF53041, cd00338,SM00857,IPR025827,IPR038109,PS51736, IPR006118,PF13408,G3DSA:3.40.50.1390,PF07508,Coil
MKKTLNEMKNACAYIRVSTDKQEELSPDAQKRLLLDYAKSNHIMILPEHIFIENGISGKKADKRPQFMQMVGMAKSKEHPFDMILVWKFSRFARNQEESIVYKSLLKKCDVEVVSVSEPLVDGPFGSLIERIIEWMDEYYSIRLAGEVMRGMKEKALRGGYQSAMPLGYRMNRETKIPEIYEPEAVIVRKIYDEYSGNGKSYLEIARELNTLGYKTRRGANYEERTVKYILQNPFYTGMVRWNRQNHNEHTIKDESEWIISRGQHEAIISREAFDLVQEQIVKRSRPYKAHSTGSIKHWLSGMVKCSSCGSSLNGSVLSAGGKVTSFQCGNYSRGSCMTSHFIKAEKLEQAVYAAFEQVIKTNEFSYEVRKPQNEADDSLLLRRQLEKLDDKEKRIKQAYRDGIDTLEEYKENKKLLADERQRIEEQLSALTDSEPERKEQLARDIRSIYDIIRDESLDKRTRANALRSVVNVMVYDKAEDSLSVEFYI

SEQ ID NO: 6594 - protein, 489 aa, Unknown
  Description of Unknown: Integrase B6595 sequence
  SM00857,G3DSA:1.10.10.2600,IPR036162,PS51737,G3DSA:3.40.50.1390, IPR006119,IPR038109,PF07508,IPR011109,SSF53041, PTHR30461,Coil,PS51736,cd00338,PF00239
MRQYCMYLRKSRADAEAEARGEGETLARHQVMLMEIAKKQKLSVVKVYKEIVSGDSIAARPEMQAMLADITECKYAGVLVVEIERLARGDTIDQGVVAQAFKQSDTKIITPTKTYDPQNEYDEEYFEFSLFMSRREYKTIKRRMQAGRLAAVKEGNYISTTPPYGYRKIQPEPKVHTLEIVPEEAEVIRLIYDIYLGGRGAKYIAEELNRMGIKPQKSEYWEAPSIKKILANPIYCGKLQWKTKSSGDTLYQGRHEPIISEEIFDKAQEKRKNNPAAQVQTNQELLNYYHGILYCKNCGHQMRRRLIRASGHEHMLCTHRECRGIVVSASFPEIDESLLTLLLYRVEKLKALRAHGNPMSKASISPDRIKPLVAELEKEKRRQAKLYDLLEQEVYDTATFLERSQVVAQRIKSLESAIAEEEARKEPQKLPPKEAIARLTYVINNFKTASPNEKNTMLHTVVEKIYYSKTQRMCCNNRNSDLTLDAVFL

SEQ ID NO: 6595 - protein, 489 aa, Unknown
  Description of Unknown: Integrase B6596 sequence
  PTHR30461:SF3,IPR036162,PS51737,IPR011109,PTHR30461, PS00397,PF00239,G3DSA:1.10.10.2600,IPR006119,SSF53041, cd00338,SM00857,IPR025827,IPR038109, PS51736,IPR006118,PF13408,G3DSA:3.40.50.1390,PF07508,Coil
MAKDILNMKSACAYIRVSTDKQEELSPDAQKRLLIDFAKKNNMSLLASNIYLDNGISGKKADKRPEFMKMIGMAKSKEHPFDVILVWKFSRFARNQEESIVYKSLLKKNHVEVVSVSEPLVDGPFGTLIERIIEWMDEYYSIRLSGEVLRGMTEKALRGGYQSSLPLGYRMNKDTGIPYISDDEAIIVKRIYKDYIAGHSYLEIARELNSLGYRTKRGSTYEGRTVEYILSNPFYYGAVRWNRQKHDDHTIKSVSDWIIAEGKHESLIDKETWDEVQHLIALRSRPYKARAAGHMKHWLGGIVKCSDCGASLMAGLNATRYQCGNYSKGKCSHSHYIKTVALEQAVYEAFERALNGSVELHYELKKGSNEPDTDDRSVILSQLSKLEDKEARIKQAYRDGIDTLEEYKENKQLLKDERAALEKQLEAFNNTYSTDSNAAMLKSISTVYDIIKDTSNNTLTRANAIRSVVDHMVYDKENDKLEVYFFLQK

SEQ ID NO: 6596 - protein, 489 aa, Unknown
  Description of Unknown: Integrase B6597 sequence
  cd00338,SM00857,G3DSA:1.10.10.2600,IPR036162,PF13408, IPR025827,G3DSA:3.40.50.1390,PS51737,IPR006119,IPR038109, PF07508,IPR011109,SSF53041,PTHR30461,PS51736, Coil,PF00239
MNAYCIYLRKSRADAEAEARGEGETLARHEHTLLDLAKRQNLTITCIYREIVSGDSIAARPQMQQMLQDITDGKYAGVLVMEIERLARGDTIDQGVVAQAFRESGTKILTPIKTYDPNNEFDEEYFEFSLFMSRREYKTIKRRMQAGRAASVKEGNYIGTNPPYGYRKVQPEPKVKTLEIVPEEAEAIRMMFEMYLSGDGARAIAARLNQLQILPRKAAMWEPVSVRKILHNPIYAGKIEWHTKKDGTILADGRHPAIISWEQYQQSIERRKQTAPQVPTGYTTQNYYHGILFCANCGHQMKRRPAANGTAHMLCRRNECRGKVVSSTVKKIDEAVLEAIRYRMQELMLCKDTIRQDETHKKENAKRQRAKIEKALEKLQHQKEKLHTLLETDVYTVEVFLERSKIIQQQIEALEAELGAIQHEAEAQGLSPEQSLLWLQYVLDNFLGATPEQKNQMLRKVIRRIEYRKTQRMCYRKQDSDLSLHIDFL

SEQ ID NO: 6597 - protein, 489 aa, Unknown
  Description of Unknown: Integrase B6598 sequence
  SM00857,G3DSA:1.10.10.2600,IPR036162,PF13408,IPR025827, G3DSA:3.40.50.1390,PS51737,IPR006119,IPR038109,PF07508, SSF53041,IPR011109,PF00239,PTHR30461,PS51736, Coil,cd00338
MLKTVIYARYSSDKQNEQSIEGQIHECEQFAKTHDMVIIKHYIDRALSGKTDDRPSFLQMIKDSSSGLFDAVLVYKTDRFARNRYDSAVYKAKLKKNGIKIFYAKENIPDGPEGIILESMLEGFAEYYSAELSQKVKRGIKENIRKGLSFGGACPFGYKIVNKKYVIDDEQAPYVKKIFEDYAKGRRAIDIFNELNILPNYAGKGRKWNRSSLNRMLTNKKYIGIYELEDVCVKDAIPPIIDEALFNKVQSRILFNRRHTTRAKVNYLLSGKLFCGLCEHSMTGKTGTSKTKVKYHYYVCSNRHCKQKKYRKELLEDIIIQYTVKDILNPKHFKMIAKKCLEIQQADNKINDILLILKKQLTATKTKINNLMNAIEAGIITTSTKDRLEQLEQEKYKLELEISTQQLNSNRLLSEKQIIYMLNVFYNKRVDVSFYNQIIDCFIYKIYIYSDKICIVYNLNNSDKDVTYSDINELYKSSHLNSCGSPYDL

SEQ ID NO: 6598 - protein, 489 aa, Unknown
  Description of Unknown: Integrase B6599 sequence
  PTHR30461:SF3,IPR036162,PS51737,IPR011109,PTHR30461, PS00397,PF00239,G3DSA:1.10.10.2600,IPR006119,SSF53041, cd00338,SM00857,IPR025827,IPR038109,PS51736, IPR006118,PF13408,G3DSA:3.40.50.1390,PF07508,Coil
MKKTLNEMKNACAYIRVSTDKQEELSPDAQKRLLLDYAKSNHIMILPEHIFIENGISGKKADKRPQFMQMIGLAKSKEHPFDVILVWKFSRFARNQEESIVYKSLLKKCGVEVVSVSEPLVDGPFGSLIERIIEWMDEYYSIRLAGEVMRGMKEKALRGGYQSAMPLGYRMNRETKIPEIYEPEAIIVRKIYDEYSANGKSYLEIARELNTLGYKTRRGANYEERTVKYILQNPFYTGMVRWNRQNHNEHTIKDESEWIISQGQHEAIISQEVYDLVQEQIVKRSRPYKAHSTGSIKHWLSGIVKCSSCGSSLNGSVLSAGGKVTSFQCGNYSRGSCMTSHFIKAEKLEQAVYAAFEQVIKTNEFSYEVRTPQNEADDSLLLNRQLEKLDDKEKRIKQAYRDGIDTLEEYKENKQLLADERQRIEEQLSALTDSEPERKEQLARNIRSIYDIIRDESLDKRTRANALRSVVNVMVYDKAEDTLSVEFYI

SEQ ID NO: 6599 - protein, 489 aa, Unknown
  Description of Unknown: Integrase B6600 sequence
  PTHR30461:SF3,IPR036162,PS51737,IPR011109,PTHR30461, PS00397,PF00239,G3DSA:1.10.10.2600,IPR006119,SSF53041, cd00338,SM00857,IPR025827,IPR038109,PS51736, IPR006118,PF13408,G3DSA:3.40.50.1390,PF07508,Coil
MKKTLNEMKNACAYIRVSTDKQEELSPDAQKRLLLDYAKNNHIMILPEHIFIENGISGKKADKRPQFMQMIGMAKSKEHPFDMILVWKFSRFARNQEESIVYKSLLKKCGVEVVSVSEPLVDGPFGSLIERIIEWMDEYYSIRLSGEVMRGMKEKALRGGYQSAMPLGYRMNRETKIPEIYEPEAIIVRKIFDEYSGNGKSYLEIARELNTLGYKTRRGANYEERTVKYILQNPFYTGMVRWNRQNHNEHTIKDESEWIISRGQHEAIISQETFDLVQEQIIKRSRPYKAHGTGSIKHWLSGMVKCSSCGSSLNGSVLSAGGRVTSFQCGNYSRGSCMTSHYIKAEKLEQAVYAAFEQVINTNEFSYEVRKPQNKADDSLLLNRQLEKLDDKEKRIKQAYRDGIDTLEEYKENKKLLADERQRIEEQLSALTDNEPERKEQLARDIRSIYDIIRDESLDKRTRANALRSVVNVMVYDKAEDSLSVEFYI

SEQ ID NO: 6600 - protein, 489 aa, Unknown
  Description of Unknown: Integrase B6601 sequence
  PTHR30461:SF3,cd00338,SM00857,G3DSA:1.10.10.2600,IPR036162, PF13408,PS51737,G3DSA:3.40.50.1390,IPR025827,IPR006119, IPR038109,PF07508,IPR011109,SSF53041,PTHR30461, Coil,PF00239
MTIIGEYCDRAISGKTDNRPNFQRLIKDSEKGQFEAVIMYTLDRFARNRYDSAIYKAKLKKSGVKVYYAKQPMPDTPEGIILESVLEGYAEYYSENLSRNIKRGLKENALQCLAVGGAGMPLGYTVGEDRKYKIDPVGAKIVQEIFQMYADGMSATQIINECNRRGYKTSRGNAFNKNSLRTMLKNDRYIGVYRFADVVVEDGVPPIISRELFEKVQTALKHNYSARARNKAKDDYLLTTKLFCGHCGSSMVGESGTSRSGKLHHYYKCIDRKRNHKCKKAVEKKDWIEELVVRFTVQNVLNDETIERIARKTMEIIEKESADTSYLNGLQNELKDIKKKIKNLMNAIEQGIITPTTKERMDELEAEKNDLEGKIAREEMKKPLLTKERIMHWFNSFKSGDVNDIEYRRRVIDTLVNSVYVYDDGDKGRRIVFTFNMSGQNTATLSCSDIACVAPPKEEASNSSFTRTSLRLCIGWGMPDGVPFPFPLP

SEQ ID NO: 6601 - protein, 489 aa, Unknown
  Description of Unknown: Integrase B6602 sequence
  PTHR30461:SF3,IPR036162,PS51737,IPR011109,PTHR30461, PS00397,PF00239,G3DSA:1.10.10.2600,IPR006119,SSF53041, cd00338,SM00857,IPR025827,IPR038109,PS51736, IPR006118,PF13408,G3DSA:3.40.50.1390,PF07508,Coil
MAKDILNMKSACAYIRVSTDKQEELSPDAQKRLLIDFAKKNNMSLLASNIYLDNGISGKKADKRPEFMKMIGMAKSKEHPFDVILVWKFSRFARNQEESIVYKSLLKKNHVEVVSVSEPLVDGPFGTLIERIIEWMDEYYSIRLSGEVLRGMTEKALRGGYQSSLPLGYRMNKDTGIPYISDDEAIIVKRIYKDYIAGHSYLEIARELNSLGYRTKRGSTYEGRTVEYILSNPFYYGAVRWNRQKHDDHTIKSVSDWIIAEGKHESLIDKDTWDEVQHLIALRSRPYKARAAGHMKHWLGGIVKCSDCGASLMAGLNATRYQCGNYSKGKCSHSHYIKTVALEQAVYEAFERALNGSVELHYELKKGSNEPDTDDRSVILSQLSKLEDKEARIKQAYRDGIDTLEEYKENKQLLKDERAALEKQLEAFNNTSSTDSNAAMLKSISTVYDIIKDTSKDTLTRANAIRSVVDHCVYDKENDKLEIYFFLQK

SEQ ID NO: 6602 - protein, 488 aa, Unknown
  Description of Unknown: Integrase B6603 sequence
  PTHR30461:SF3,IPR036162,PS51737,IPR011109,PTHR30461, PS00397,PF00239,G3DSA:1.10.10.2600,IPR006119,SSF53041, cd00338,SM00857,IPR025827,IPR038109,PS51736, IPR006118,PF13408,G3DSA:3.40.50.1390,PF07508,Coil
MATDIANMKVACAYIRVSTDKQEELSPDAQKRLLIDYAKKHNMSLLAENIYIDNGISGKKADKRPEFMKMISLAKSKEHPFDIILVWKFSRFARNQEESIVYKSLLKKNNVEVVSISEPLIDGPFGSLIERIIEWMDEYYSIRLSGEVLRGMTEKALRGGYQSSLPLGYKMNKDTGIPYIYEPEAIIVRKIFKDYIAGHSYLEIARELNALGYKTKRGAAFEGRTVEYILSNPFYYGAIRWNRQKHDDHTIKDISEWIIVTGKHPAIIDKETWDEVQHLMALRSRPYKARAAGHMKHWLGGIVKCSNCGASLMAGLNATRYQCGNYNKGKCSRSHYIKTAALEQAIYEAFERVLDGSMDLHYELKKSPNDGNTTDRDMILNQISKLCDKEARIKQAYRDGIDTIDEYKENKQIIDNERKALEAQLDSLKTSEADSSDEMLQNITSVLGIIKDTSKDTLTRANAIRSVVDHCVYDKENDKLEVYFFLQK

SEQ ID NO: 6603 - protein, 488 aa, Unknown
  Description of Unknown: Integrase B6604 sequence
  PTHR30461:SF3,IPR036162,PS51737,IPR011109,PTHR30461, PS00397,PF00239,G3DSA:1.10.10.2600,IPR006119,SSF53041, cd00338,SM00857,IPR025827,IPR038109,PS51736, IPR006118,PF13408,G3DSA:3.40.50.1390,PF07508,Coil
MARDILNMKSACAYIRVSTDKQEELSPDAQKRLLIDFAKKNNMSLLAENIYIDNGISGKKADKRPEFMKMIGMAKSKEHPFDVILVWKFSRFARNQEESIVYKSLLKKNRVDVVSVSEPLIDGPFGTLIERIIEWMDEYYSIRLSGEVLRGMTEKALRGGYQSSLPLGYRMNKETGIPYIYEEEAVIVRKIYNDYIAGHSYLEIARELNALGYKTKRGAAFEGRTVEYILSNPFYYGAVRWNRQNHDNHTIKDISEWIIVMGKHPAIINKETWDLVQHLMALRSKPYKARAAGHMKHWLGGIVKCSDCGASLMAGLNATRYQCGNYNKGKCLHSHFIKTAALEQAVYNAFERVFDGTAELHYELKKASNEANTDDRDILLSKLSKLDDKEARIKQAYRDGIDTIEEYKENKQLIKDERKALKKQLEAFSLASDDSNAAMLKSISTVYDIIKDTSNNTLTRANAIRSVVDHMVYDKENDKLEVYFFLQK

SEQ ID NO: 6604 - protein, 488 aa, Unknown
  Description of Unknown: Integrase B6605 sequence
  PTHR30461:SF3,IPR036162,PS51737,IPR011109,PTHR30461, PS00397,PF00239,G3DSA:1.10.10.2600,IPR006119,SSF53041, cd00338,SM00857,IPR025827,IPR038109,PS51736, IPR006118,PF13408,G3DSA:3.40.50.1390,PF07508,Coil
MATDIANMKVACAYIRVSTDKQEELSPDAQKRLLIDYAKKHNMSLLAENIYIDNGISGKKADKRPEFMKMISLAKSKEHPFDIILVWKFSRFARNQEESIVYKSLLKKNNVEVVSISEPLIDGPFGSLIERIIEWMDEYYSIRLSGEVLRGMTEKALRGGYQSSLPLGYRMNKDTGIPYIYEPEAIIVRKIYKEYVAGHSYLEIARELNALGYKTKRGAAYEGRTVEYILSNPFYYGAVRWNRQKHDDHTIKDVGDWIIAMGKHPAIIDKETWDEVQHLMALRSRPYKARAAGHMKHWLGGIVKCSDCGASLIAGLNATRYQCGNYNKGKCSHSHFIKTAALEEAVYEAFDRVMQNPDELHYELKKPSNEANANDKDMILNQISKLSDKEARIKQAYRDGIDTIDEYKENKQIIDNERKALEAQLYSLKTSEADSSDEMLQNITSVLGIIKDTSKDTLTRANAIRSVVDHCVYDKENDKLEVYFFLQK

SEQ ID NO: 6605 - protein, 488 aa, Unknown
  Description of Unknown: Integrase B6606 sequence
  PTHR30461:SF3,IPR036162,PS51737,IPR011109,PTHR30461, PS00397,PF00239,G3DSA:1.10.10.2600,IPR006119,SSF53041, cd00338,SM00857,IPR025827,IPR038109,PS51736, IPR006118,PF13408,G3DSA:3.40.50.1390,PF07508,Coil
MAANIANMKVACAYIRVSTDKQEELSPDAQKRLLIDYAKKHNMSLLAENIYIDNGISGKKADKRPEFMKMISLAKSKEHPFDIILVWKFSRFARNQEESIVYKSLLKKNNVEVVSISEPLIDGPFGSLIERIIEWMDEYYSIRLSGEVLRGMTEKALRGGYQSSLPLGYKMNKDTGIPYIYEDEAIIVKKIYNDYISGHSYLEIARELNALGYTTKRGAAFEGRTVEYILSNPFYYGAIRWNRQKHDDHTIKDISEWIIVMGKHPAIIDKETWDEVQHLMALRSRPYKARAAGHMKHWLGGIVKCSDCGASLMAGLNATRYQCGNYNKGKCSHSHYIKTAALEQAIYEAFERVLDGSMDLHYELKKSPNDGNTTDRDMILNQISKLGDKEARIKQAYRDGIDTIEEYRENKQLIENERKTLEAQLDSLKSSEADSSDEMLQHITSVLNIIKDTTKDTLTRANAIRSVVDHCVYDKENDKLEVYFFLQK

SEQ ID NO: 6606 - protein, 488 aa, Unknown
  Description of Unknown: Integrase B6607 sequence
  PTHR30461:SF3,IPR036162,PS51737,IPR011109,PTHR30461, PS00397,PF00239,G3DSA:1.10.10.2600,IPR006119,SSF53041, cd00338,SM00857,IPR025827,IPR038109,PS51736, IPR006118,PF13408,G3DSA:3.40.50.1390,PF07508,Coil
MAKNILNMKIAAGYIRVSTDKQEELSPDAQKRLLIDYAKKNNISLLAENIYIDNGISGKKADKRPEFMKMIGMAKSKEHPFDVILVWKFSRFARNQEESIVYKSLLKKNNVEVVSVSEPLIDGPFGSLIERIIEWMDEYYSIRLSGEVLRGMTEKALRGGYQSSLPLGYKMNKDTGIPYIYEDEAIIVKKIYNDYISGHSYLEIARELNALGYTTKRGAAFEGRTVEYILSNPFYYSAIRWNRQKHDDHTIKDISEWIIVMGKHPAIIDKETWDDVQHLMALRSRPYKSRAAGHMKHWLGGIVKCSDCGASLIAGLNATRYQCGNYNKGKCSHSHFIKTAALEEAVYEAFDRVIQNPNELRYELKKASNEANTNDRDMILNQISKLSDKEARIKQAYRDGIDTIDEYKENKQIIDNERKALEAQLDSLKASEADSSDEMLQHITSVLNIIKDTSKDTLTRANAIRSVVDHCVYDKENDKLEVYFFLQK

SEQ ID NO: 6607 - protein, 488 aa, Unknown
  Description of Unknown: Integrase B6608 sequence
  PTHR30461:SF3,IPR036162,PS51737,IPR011109,PTHR30461, PS00397,PF00239,G3DSA:1.10.10.2600,IPR006119,SSF53041, cd00338,SM00857,IPR025827,IPR038109,PS51736, IPR006118,PF13408,G3DSA:3.40.50.1390,PF07508,Coil
MAKDILNMKSACAYIRVSTDKQEELSPDAQKRLLIDFAKKNNMSLLAENIYIDNGISGKKADKRPEFMKMIGMAKSKEHPFDVILVWKFSRFARNQEESIVYKSLLKKNRVDVVSVSEPLIDGPFGTLIERIIEWMDEYYSIRLSGEVLRGMTEKALRGGYQSSLPLGYRMNKETGIPYIYEEEAVIVRKIYNDYIAGHSYLEIARELNAIGYKTKRGATFEGRTVEYILSNPFYYGAVRWNRQNHDNHTIKDISEWIIVMGKHPAIIDKETWDLVQHLMALRSKPYKARAAGHMKHWLGGIVKCSDCGASLMAGLNATRYQCGNYNKGKCLRSHFIKTAALEQAVYNAFERVFDGTTELHYELKKASNEANTNDRDILLSKLSKLDDKEARIKQAYRDGIDTIEEYKENKQLLNDERKALEKQLEAFSLASDDSNADMLKNISTVYDIIKDTSNDTLTRANAIRSVVDHMVYDKENDKLEVYFFLQK

SEQ ID NO: 6608 - protein, 488 aa, Unknown
  Description of Unknown: Integrase B6609 sequence
  PTHR30461:SF3,IPR036162,PS51737,IPR011109,PTHR30461, PS00397,PF00239,G3DSA:1.10.10.2600,IPR006119,SSF53041, cd00338,SM00857,IPR025827,IPR038109,PS51736, IPR006118,PF13408,G3DSA:3.40.50.1390,PF07508,Coil
MARDILNMKSACAYIRVSTDKQEELSPDAQKRLLIDFAKKNNMSLLAENIYIDNGISGKKADKRPEFMKMIGMAKSKEHPFDVILVWKFSRFARNQEESIVYKSLLKKNRVDVVSVSEPLIDGPFGTLIERIIEWMDEYYSIRLSGEVLRGMTEKALRGGYQSSLPLGYRMNKETGIPYIYEEEAVIVRKIYNDYIAGHSYLEIARKLNAIGYKTKRGATFEGRTVEYILSNPFYYGAVRWNRQNHDNHTIKDISEWIIVMGKHPAIIDKETWDLVQHLMALRSKPYKARAAGHMRHWLGGIVKCSDCGASLMAGLNATRYQCGNYNKGKCLHSHFIKTAALEQAVYNAFERVFDGTAELHYELKKASNEANTDDKDILLSKLSKLDDKEARIKQAYRDGIDTIEEYKENKQLLKDERKALEKQLEAFSLASDVSNAAMLKNISTVYDIIKDTSNDTLTRANAIRSVVDHMVYDKENDKLEVYFFLQK

SEQ ID NO: 6609 - protein, 488 aa, Unknown
  Description of Unknown: Integrase B6610 sequence
  PTHR30461:SF3,IPR036162,PS51737,IPR011109,PTHR30461, PS00397,PF00239,G3DSA:1.10.10.2600,IPR006119,SSF53041, cd00338,SM00857,IPR025827,IPR038109,PS51736, IPR006118,PF13408,G3DSA:3.40.50.1390,PF07508,Coil
MAKNILNMKIAAGYIRVSTDKQEELSPDAQKRLLIDYAKKHNISLLVENIYIDNGISGKKADKRPEFMKMIGMAKSKEHPFDVILVWKFSRFARNQEESIVYKSLLKKNNVEVVSVSEPLIDGPFGSLIERIIEWMDEYYSIRLSGEVLRGMTEKALRGGYQSSLPLGYKMNKDTGIPYIYESEAIIVRKIYKEYIDGHSYLEIARELNALGYKTKRGAAYEGRTVEYILSNPFYYGAVRWNRQKHDDHTIKDVGDWIIVMGKHPAIIEKETWGEVQHLMALRSRPYKARAAGHMKHWLGGIVKCSDCGASLMAGLNATRYQCGNYNKGKCSHSHYIKTAALEQAIYEAFERVLDGSMDLHYELKKSPNDGNTTNRDMILNQISKLGDKEARIKQAYRDGIDTIEEYKENKQLIENERKSLEAQLDSLKSSEADSSDEMLQHITSVLNIIKDTSKDTLTRANAIRSVVDHCVYDKENDKLEVYFFLQK

SEQ ID NO: 6610 - protein, 488 aa, Unknown
  Description of Unknown: Integrase B6611 sequence
  PTHR30461:SF3,IPR036162,PS51737,IPR011109,PTHR30461, PS00397,PF00239,G3DSA:1.10.10.2600,IPR006119,SSF53041, cd00338,SM00857,IPR025827,IPR038109,PS51736, IPR006118,PF13408,G3DSA:3.40.50.1390,PF07508,Coil
MATDIANMKVACAYIRVSTDKQEELSPDAQKRLLIDYAKKHNISLLAENIYIDNGISGKKADKRPEFMKMISLAKSKEHPFDIILVWKFSRFARNQEESIVYKSLLKKNNVEVVSISEPLIDGPFGSLIERIIEWMDEYYSIRLSGEVLRGMTEKALRGGYQSSLPLGYKMNKDTGIPYIYEPEAIIVRKIFKDYIAGHSYLEIARELNALGYKTKRGAAFEGRTVEYILSNPFYYGAIRWNRQKHDDHTIKDISEWIIVTGKHPAIIDKETWDEVQHLMALRSRPYKARAAGHMKHWLGGIVKCSNCGASLMAGLNATRYQCGNYNKGKCSHSHYIKTAALEQAIYEAFERVLDGSMDLHYELKKSPNDGNTTDRDMILNQISKLGDKEARIKQAYRDGIDTIDEYKENKQIIDNERKALEAQLDSLKTSEADSSDEMLQNITSVLGIIKDTSKDTLTRANAIRSVVDHCVYDKEYDKLEVYFFLQK

SEQ ID NO: 6611 - protein, 488 aa, Unknown
  Description of Unknown: Integrase B6612 sequence
  PTHR30461:SF3,IPR036162,PS51737,IPR011109,PTHR30461, PS00397,PF00239,G3DSA:1.10.10.2600,IPR006119,SSF53041, cd00338,SM00857,IPR025827,IPR038109,PS51736, IPR006118,PF13408,G3DSA:3.40.50.1390,PF07508,Coil
MAKNILNMKIAAGYIRVSTDKQEELSPDAQKRLLIDYAKKNNISLLAENIYIDNGISGKKADKRPEFMKMIGMAKSKEHPFDVILVWKFSRFARNQEESIVYKSLLKKNNVEVVSVSEPLIDGPFGSLIERIIEWMDEYYSIRLSGEVLRGMTEKALRGGYQSSLPLGYRMNKDTGIPYIYEPEAIIVRKIYKEYVAGHSYLEIARELNALGYKTKRGAAYEGRTVEYILSNPFYYGAVRWNRQKHDDHTIKDVGDWIIVMGKHPAIIDKETWDEVQHLMALRSRPYKARAAGHMKHWLGGIVKCSDCGASLIAGLNATRYQCGNYNKGKCSHSHFIKTAALEEAVYEAFDRVMQNPDELHYELKKPSNEANANDKDMILNQISKLSDKEARIKQAYRDGIDTIDEYKENKQIIDNERKNLEAQLYSLKTSEADSSDEMLQNITSVLGIIKDTSKDTLTRANAIRSVVDHCVYDKENDKLEVYFFLQK

SEQ ID NO: 6612 - protein, 488 aa, Unknown
  Description of Unknown: Integrase B6613 sequence
  PTHR30461:SF3,IPR036162,PS51737,IPR011109,PTHR30461, PS00397,PF00239,G3DSA:1.10.10.2600,IPR006119,SSF53041, cd00338,SM00857,IPR025827,IPR038109,PS51736, IPR006118,PF13408,G3DSA:3.40.50.1390,PF07508,Coil
MKKIAAAYIRVSTHMQEELSPDAQLRFIRTWADAHGYYVPDEFVFIDSGISGRKAKKRHDFLRMVGLAKTKPAAPFEAILLWKFNRFARNQEESIVYKSMLRKKCNVDVISTTQQTTKDIYGDLIERIIEWTDEFYSIQLGEDVFRGMTENALRGHFQSSPAFGYKVEQKGQGPVVVEDQASIVRMIYNLYTTSTMGFYEIARYLNRIGYKTARNKPFENRTIRYIIQNPIYKGYLRWNYQSNATKEIKDASEWIIVKSSQITPIVSEELWNQANDRLKQEYHPKGGKPVSKHRHWLSGLVKCSSCGASLSTSVQYRHDRTYINFQCYKYLKGKCMVSHGISEKKLVPLILNVLKEDMNKSYIECERIEKVVENQQDILDVQLKRLDAREVRIKEAYLNGVDSLAEYKSNKEQIQQERELLLQQSQNHDKEEKGSNELPNKIRGVYDILVSDQCSKDEKQAAIRSIVKKIVFDKENKTLDFHYYIKED

SEQ ID NO: 6613 - protein, 488 aa, Unknown
  Description of Unknown: Integrase B6614 sequence
  PTHR30461:SF3,IPR036162,PS51737,IPR011109,PTHR30461, PS00397,PF00239,G3DSA:1.10.10.2600,IPR006119,SSF53041, cd00338,SM00857,IPR025827,IPR038109,PS51736, IPR006118,PF13408,G3DSA:3.40.50.1390,PF07508,Coil
MATDIANMKVACAYIRVSTDKQEELSPDAQKRLLIDYAKKHNMSLLAENIYIDNGISGKKADKRPEFMKMISLAKSKEHPFDIILVWKFSRFARNQEESIVYKSLLKKNNVEVVSISEPLIDGPFGSLIERIIEWMDEYYSIRLSGEVLRGMTEKALRGGYQSSLPLGYRMNKDTGIPYIYEPEAIIVRKIYKEYVAGHSYLEIARELNALGYKTKRGAAYEGRTVEYILSNPFYYGAVRWNRQKHDDHTIKDVGDWIIVMGKHPAIIDKETWDEVQHLMALRSRPYKARAAGHMKHWLGGIVKCSDCGASLIAGLNATRYQCGNYNKGKCSHSHFIKTAALEEAVYEAFDRVMQNPDELHYELKKPSNEANANDKDMILNQISKLSDKEARIKQAYRDGIDTIDEYKENKQIIDNERKALEAQLYSLKTSEADSSDEMLQNITSVLGIIKDTSKDTLTRANAIRSVVDHCVYDKENDKLEVYFFLQK

SEQ ID NO: 6614 - protein, 488 aa, Unknown
  Description of Unknown: Integrase B6615 sequence
  PTHR30461:SF3,IPR036162,PS51737,IPR011109,PTHR30461, PS00397,PF00239,G3DSA:1.10.10.2600,IPR006119,SSF53041, cd00338,SM00857,IPR025827,IPR038109,PS51736, IPR006118,PF13408,G3DSA:3.40.50.1390,PF07508,Coil
MATDIANMRVACAYIRVSTDKQEELSPDAQKRLLIDYAKKHNMSLLAENIYIDNGISGKKADKRPEFMKMISLAKSKEHPFDIILVWKFSRFARNQEESIVYKSLLKKNNVEVVSISEPLIDGPFGSLIERIIEWMDEYYSIRLSGEVLRGMTEKALRGGYQSSLPLGYKMNKDTGIPYIYEPEAIVVRKIFKDYIAGHSYLEIARALNALGYKTKRGAAFEGRTVEYILSNPFYYGAIRWNRQKHDDHTIKDISEWIIVMGKHPAIIDKETWDEVQHLMALRSRPYKARAAGHMKHWLGGIVKCSDCGASLMAGLNATRYQCGNYNKGKCSHSHYIKTAALEQAIYEAFERVLDGSMDLHYELKKSPNDGNTTDRDMILNQISKLGDKEARIKQAYRDGIDTIEEYRENKQLIENERKTLEAQLDSLKSSEADSSDEMLQHITSVLNIIKDTTKDTLTRANAIRSVVDHCVYDKENDKLEVYFFLQK

SEQ ID NO: 6615 - protein, 488 aa, Unknown
  Description of Unknown: Integrase B6616 sequence
  PTHR30461:SF3,IPR036162,PS51737,IPR011109,PTHR30461, PS00397,PF00239,G3DSA:1.10.10.2600,IPR006119,SSF53041, cd00338,SM00857,IPR025827,IPR038109,PS51736, IPR006118,PF13408,G3DSA:3.40.50.1390,PF07508,Coil
MAKDILNMRSACAYIRVSTDKQEELSPDAQKRLLIDFAKKNNMSLLAENIYIDNGISGKKADKRPEFMKMIGMAKSKEHPFDVILVWKFSRFARNQEESIVYKSLLKKNRVDVVSVSEPLIDGPFGTLIERIIEWMDEYYSIRLSGEVLRGMTEKALRGGYQSSLPLGYRMNKETGIPYIYEDEAIIVRKIYNDYIAGHSYLEIARELNALGYKTKRGATFEGRTVEYILSNPFYYGAVRWNRQNHDNHTIKDISEWIIVMGKHPAIIDKETWDLVQYLMALRSKPYKARAAGHMKHWLGGIVKCSNCGASLMAGLNATRYQCGNYNKGKCLHSHFIKTAALEQAVYNAFERVFDGTAELHYELKKASNEANTDDRDILLSKLSKLDDKEARIKQAYRDGIDTIEEYKENKQLLNDERKALKKQLEAFNLASDDSNADMLKSISTVYDIIKDATNDTLTRANAIRSVVDHMVYDKENDKLEVYFFLQK

SEQ ID NO: 6616 - protein, 488 aa, Unknown
  Description of Unknown: Integrase B6617 sequence
  PTHR30461:SF3,IPR036162,PS51737,IPR011109,PTHR30461, PS00397,PF00239,G3DSA:1.10.10.2600,IPR006119,SSF53041, cd00338,SM00857,IPR025827,IPR038109,PS51736, IPR006118,PF13408,G3DSA:3.40.50.1390,PF07508,Coil
MATDIVNMKVACAYIRVSTDKQEELSPDAQKRILIDFAKKNNMSLLASNIYLDNGISGKKADKRPEFMKMIGMAKSKEHPFDVILVWKFSRFARNQEESIVYKSLLKKNHVEVVSVSEPLVDGPFGTLIERIIEWMDEYYSIRLSGEVLRGMTEKALRGGYQSSLPLGYRMNKDTGIPYIYEDEAIIVKKIYKDYIAGHSYLEIARELNALGYTTKRGAAFEGRTVEYILSNPFYYGAIRWNRQKHDDHTIKDISEWIIVMGKHPAIIDKETWDEVQHLMALRSRPYKARAAGHMKHWLGGIVKCSDCGASLMAGLNATRYQCGNYNKGKCSHSHYIKTAALEQAIYEAFERVLDGSMDLHYELKKSPNDGNTTDRDMILNQISKLGDKEARIKQAYRDGIDTIDEYKENKQIIDNERKALEAQLDSLKTSEADSSDEMLQHITSVLNIIKDTSKDTLTRANAIRSVVDHCVYDKENDKLEVYFFLQK

SEQ ID NO: 6617 - protein, 488 aa, Unknown
  Description of Unknown: Integrase B6618 sequence
  PTHR30461:SF3,SM00857,G3DSA:1.10.10.2600,IPR036162,PF13408, PS51737,IPR025827,G3DSA:3.40.50.1390,IPR006119,IPR038109, PF07508,IPR011109,SSF53041,PTHR30461,Coil, PS51736,cd00338,PF00239
MKKAVGYCRFSTDMQREESIMAQMRAIDEFAKRESIEIIKYYKDQGQSGTSDNRDDFQLMMKEVKNIDYVIVHKFDRFARNSFDHVINERKLNNKGIKLVSVLEPVGENPESILTKNLLIGMNEYFSLNLSREVKKGHKENALQCKFNGGTPPLGYKIVDGFYKIDEEEAKIVEKIFALRLQNYSYQKIADTLNGLGYKNKYGKEFNRNSFYEMLQNKRYKGTYIYGVNDGSGEVRNYRKRNSEWVEIEDAIPAIITKEVWEEVNKKYRKRSGAFKKDARDYILSGLVFCEQCGAPMLGCSRQSSTGKKYYYYRCNDRCGAKSIRADLLEEVVTSLIRDHLIHEKNIDVIVDYVVSNYEMENPYRELEKQKNKLIRQRDNIVNLMAETGSKALIDKLEQLDRQIDNIYIPPFKQVVLDRDVIKKRYLQFLHEPLTGSMIRLLIKKIKVNDHKTIINLVNYPNELLNGYSNGAGKTPQNLYPREIELIS

SEQ ID NO: 6618 - protein, 488 aa, Unknown
  Description of Unknown: Integrase B6619 sequence
  PTHR30461:SF3,IPR036162,PS51737,IPR011109,PTHR30461, PS00397,PF00239,G3DSA:1.10.10.2600,IPR006119,SSF53041, cd00338,SM00857,IPR025827,IPR038109,PS51736, IPR006118,PF13408,G3DSA:3.40.50.1390,PF07508,Coil
MAKNILNMKIAAGYIRVSTDKQEELSPDAQKRLLIDYAKKNNISLPAENIYIDNGISGKKADKRPEFMKMIGMAKSKEHPFDVILVWKFSRFARNQEESIVYKSLLKKNNVEVVSVSEPLIDGPFGSLIERIIEWMDEYYSIRLSGEVLRGMTEKALRGGYQSSLPLGYKMNKDTGIPYIYEDEAIIVKKIYNDYISGHSYLEIARELNALGYTTKRGAAFEGRTVEYILSNPFYYGAIRWNRQKHDDHTIKDISEWIIVMGKHPAIIDKETWDEVQHLMALRSRPYKSRAAGHMKHWLGGIVKCSDCGASLIAGLNATRYQCGNYNKGKCSHSHFIKTAALEEAVYEAFDRVMQNPDELHYELKKASNEVNTNDRDMILNQISKLSDKEARIKQAYRDGIDTIDEYKENKQIIDNERKALEAQLYSLKTSEADSSDEMLQNITSVLGIIKDTSKDTLTRANAIRSVVDHCVYDKENDKLEVYFFLQK

SEQ ID NO: 6619 - protein, 488 aa, Unknown
  Description of Unknown: Integrase B6620 sequence
  PTHR30461:SF3,IPR036162,PS51737,IPR011109,PTHR30461, PS00397,PF00239,G3DSA:1.10.10.2600,IPR006119,SSF53041, cd00338,SM00857,IPR025827,IPR038109,PS51736, IPR006118,PF13408,G3DSA:3.40.50.1390,PF07508,Coil
MAKDILNMKSACAYIRVSTDKQEELSPDAQKRLLIDFAKKNNMSLLAENIYIDNGISGKKADKRPEFMKMIGMAKSKEHPFDVILVWKFSRFARNQEESIVYKSLLKKNRVDVVSVSEPLIDGPFGTLIERIIEWMDEYYSIRLSGEVLRGMTEKALRGGYQSSLPLGYRMNKETGIPYIYEEEAVIVRKIYNDYIAGHSYLEIARELNAIGYKTKRGATFEGRTVEYILSNPFYYGAVRWNRQNHDNHTIKDISEWIIVMGKHPAIIDKETWDLVQHLMALRSKPYKARAAGHMRHWLGGIVKCSDCGASLMAGLNATRYQCGNYNKGKCLHSHFIKTAALEQAVYNAFERVFDGTTELHYELKKASNEANTNDRDILLSKLSKLDDKEARIKQAYRDGIDTIEEYKENKQLLNDERKALEKQLEAFSLASDDSNADMLKNISTVYDIIKDTSNDTLTRANAIRSVVDHMVYDKENDKLEVYFFLQK

SEQ ID NO: 6620 - protein, 488 aa, Unknown
  Description of Unknown: Integrase B6621 sequence
  PTHR30461:SF3,IPR036162,PS51737,IPR011109,PTHR30461, PS00397,PF00239,G3DSA:1.10.10.2600,IPR006119,SSF53041, cd00338,SM00857,IPR025827,IPR038109,PS51736, IPR006118,PF13408,G3DSA:3.40.50.1390,PF07508,Coil
MARDILNMKSACAYIRVSTDKQEELSPDAQKRLLIDFAKKNNMSLLAENIYIDNGISGKKAYKRPEFMKMIGLAKSKEHPFDVILVWKFSRFARNQEESIVYKSLLKKNHVDVMSVSEPLIDGPFGTLIERIIEWMDEYYSIRLSGEVLRGMTEKALRGGYQSSLPLGYRMNKDTGIPYIYEEEAVIVRKIYNDYIAGHSYLEIARELNALGYKTKRGAAFEGRTVEYILSNPFYYGAVRWNRQNHDNHTIKDISEWIIVMGKHPAIINKETWDLVQHLMALRSKPYKARAAGHMKHWLGGIVKCSDCGASLMAGLNATRYQCGNYNKGKCLHSHFIKTAALEQAVYNAFERVFDGTAELHYELKKASNEANTDDRDILLSKLSKLDDKEARIKQAYRDGIDTIEEYKENKQLLKNERKSLEKQLEAINLASDDSNADMLKNISTVYDIIKDTSNDTLTRANAIRSVVDHMVYDKENDKLEVYFFLQK

SEQ ID NO: 6621 - protein, 488 aa, Unknown
  Description of Unknown: Integrase B6622 sequence
  PTHR30461:SF3,IPR036162,PS51737,IPR011109,PTHR30461, PS00397,PF00239,G3DSA:1.10.10.2600,IPR006119,SSF53041, cd00338,SM00857,IPR025827,IPR038109,PS51736, IPR006118,PF13408,G3DSA:3.40.50.1390,PF07508,Coil
MATDIANMKVACAYIRVSTDKQEELSPDAQKRLLIDYAKKHNMSLLAENIYIDNGISGKKADKRPEFMKMISLAKSKEHPFDIILVWKFSRFARNQEESIVYKSLLKKNNVEVVSISEPLIDGPFGSLIERIIEWMDEYYSIRLSGEVLRGMTEKALRGGYQSSLPLGYKMNKDTGIPYIYEPEAIIVRKIFKDYIAGYSYLEIARELNALGYKTKRGAAFEGRTVEYILSNPFYYGAIRWNRQKHDDHTIKDISEWIIVMGKHPAIIDKETWDEVQHLMALRSRPYKARAAGHMKHWLGGIVKCSDCGASLMAGLNATRYQCGNYSKGKCSHSHYIKTAALEQAIYEAFERVLDGSMDLHYELKKSPNEGNTTDKDMILNQISKLSDKEARIKQAYRDGIDTIEEYKENKQLIENERKTLEAQLDSLKSSEADSSDEMLQHITSVLNIIKDTTKDTLTRANAIRSVVDHCVYDKENDKLEVYFFLQK

SEQ ID NO: 6622 - protein, 488 aa, Unknown
  Description of Unknown: Integrase B6623 sequence
  PTHR30461:SF3,IPR036162,PS51737,IPR011109,PTHR30461, PS00397,PF00239,G3DSA:1.10.10.2600,IPR006119,SSF53041, cd00338,SM00857,IPR025827,IPR038109,PS51736, IPR006118,PF13408,G3DSA:3.40.50.1390,PF07508,Coil
MKKIAAAYIRVSTHMQEELSPDAQLRFIRTWADAHGYYVPDEFVFIDSGISGRKAKKRHDFLRMVGLAKTKPAAPFEAILLWKFNRFARNQEESIVYKSMLRKKCNVDVISTTQQTTKDIYGDLIERIIEWTDEFYSIQLGEDVFRGMTENALRGHFQASPAFGYKVEQKGQGPVVVEDQASIVRMIYNLYTTSTMGFYEIARYLNEIGYKTARNKPFENRTIRYIIQNPIYKGYLRWNYQSNATKEIKDASEWIIVNSSQITPIVSEELWNQANDRLKREYHPKGGKPVSKHRHWLSGLVKCSSCGASLSTSVQHRHDRTYINFQCYKYLKGKCMVSHGISEKKLVPLILNVLKEDMNKSYIECERIEKVVENQQDILDVQLKRLNAREVRIKEAYLNGVDSLAEYKSNKEQIQQERELLLKQLQNHGEEEKGSNELPNKIRGVYDILVSDQCSKDEKQAAIRSIVKKIVFDKENKTLDFHYYIKED

SEQ ID NO: 6623 - protein, 488 aa, Unknown
  Description of Unknown: Integrase B6624 sequence
  PTHR30461:SF3,IPR036162,PS51737,IPR011109,PTHR30461, PS00397,PF00239,G3DSA:1.10.10.2600,IPR006119,SSF53041, cd00338,SM00857,IPR025827,IPR038109,PS51736, IPR006118,PF13408,G3DSA:3.40.50.1390,PF07508,Coil
MATDIANMKVACAYIRVSTDKQEELSPDAQKRLLIDYAKKHNMSLLAENIYIDNGISGKKADKRPEFMKMISLAKSKEHPFDIILVWKFSRFARNQEESIVYKSLLKKNNVEVVSISEPLIDGPFGSLIERIIEWMDEYYSIRLSGEVLRGMTEKALRGGYQSSLPLGYRMNKDTGIPYIYEPEAIIVRKIYKEYVAGHSYLEIARELNALGYKTKRGAAYEGRTVEYILSNPFYYGAVRWNRQKHDDHTIKDVGDWIIVMGKHPAIIDKETWDEVQHLMALRSRPYKARAAGHMKHWLGGIVKCSDCGASLIAGLNATRYQCGNYNKGKCSHSHFIKTAALEEAVYEAFDRVMQNPDELHYELKKPSNEANANDKDMILNQISKLSDKEARIKQAYRDGIDTIDEYKENKQIIDNERKNLEAQLYSLKTSEADSSDEMLQNITSVLGIIKDTSKDTLTRANAIRSVVDHCVYDKENDKLEVYFFLQK

SEQ ID NO: 6624 - protein, 488 aa, Unknown
  Description of Unknown: Integrase B6625 sequence
  PTHR30461:SF3,IPR036162,PS51737,IPR011109,PTHR30461, PS00397,PF00239,G3DSA:1.10.10.2600,IPR006119,SSF53041, cd00338,SM00857,IPR025827,IPR038109,PS51736, IPR006118,PF13408,G3DSA:3.40.50.1390,PF07508,Coil
MAKNILNMKIASGYIRVSTDKQEELSPDAQKRLLIDYAKKNNISLLAENIYIDNGISGKKADKRPEFMKMIGMAKSKEHPFDVILVWKFSRFARNQEESIVYKSLLKKNNVEVVSVSEPLIDGPFGSLIERIIEWMDEYYSIRLSGEVLRGMTEKALRGGYQSSLPLGYKMNKDTGIPYIYEDEAIIVKKIYNDYISGHSYLEIARELNALGYTTKRGAAFEGRTVEYILSNPFYYGAIRWNRQKHDDHTIKDISEWIIVMGKHPAIIDKETWDEVQHLMALRSRPYKSRAAGHMKHWLGGIVKCSDCGASLIAGLNATRYQCGNYNKGKCSHSHYIKTAALEQAIYEAFERVLDGSMDLHYELKKSPNDGNTTDRDMILNQISKLGDKEARIKQAYRDGIDTIEEYKENKQLIENERKSLEAQLDSLKSSEADSSDEMLQHITSVLNIIKDTSKDTLTRANAIRSVVDHCVYDKENDKLEVYFFLQK

SEQ ID NO: 6625 - protein, 488 aa, Unknown
  Description of Unknown: Integrase B6626 sequence
  PTHR30461:SF3,SM00857,G3DSA:1.10.10.2600,IPR036162,PF13408, PS51737,G3DSA:3.40.50.1390,IPR025827,IPR006119,IPR038109, PF07508,IPR011109,SSF53041,PTHR30461,Coil, PS51736,cd00338,PF00239
MPEALNAVIYARYSSDRQTEQSIEGQLRECYAFAKANDIAVIDTYIDRAISGKTDNRPAFQKMIEDSAKRQFQAVIVYRLDRFTRNRYDSAIYKARLKKNGVKVLSAMENLNGSPESIIMESLLEGMAEYYSVELSQKITRGMRENALKGKALGGQRVLGYKVNSDCYFEIDETTAPVVVDIFKLYSSGKTVKEICDILNARGVKTARGGAFNKNSLHTILTNKKYIGIYKTKYGEIVGGIPAIIDKELFEMVALRMEQNKKAPARAKAEINYLLSTKLFCGKCRSAMVGESGTSKTGKKYYYYACVKKKREKACDKSNVKKDWIEDLVIQRTVTDILKDDVIDKIADRLVELQKAEAAESGTMLYLENSLAEIQVSIKNIMTAIEKGIITESTKTRLTELEDEKRNVEIEIAKESIARRIISREQIIYWISSFKDGDITSEKYRQQLIDTFVHAVFVYDDKIVITYNYSGENNTATISDLDLSSPPF

SEQ ID NO: 6626 - protein, 488 aa, Unknown
  Description of Unknown: Integrase B6627 sequence
  PTHR30461:SF3,IPR036162,PS51737,IPR011109,PTHR30461, PS00397,PF00239,G3DSA:1.10.10.2600,IPR006119,SSF53041, cd00338,SM00857,IPR025827,IPR038109,PS51736, IPR006118,PF13408,G3DSA:3.40.50.1390,PF07508,Coil
MAKDILNMKSACAYIRVSTDKQEELSPDAQKRLLIDFAKKNNMSLLASNIYLDNGISGKKADKRPEFMKMIGMAKSKEHPFDVILVWKFSRFARNQEESIVYKSLLKKNRVDVVSVSEPLIDGPFGTLIERIIEWMDEYYSIRLSGEVLRGMTEKALRGGYQSSLPLGYRMNKETGIPYIYEEEAVIVRKIYNDYIAGHSYLEIARELNALGYKTKRGAAFEGRTVEYILSNPFYYGAVRWNRQNHDNHTIKDISEWIIVMGKHPAIINKETWDLVQHLMALRSKPYKARAAGHMKHWLGGIVKCSDCGASLMAGLNATRYQCGNYNKGKCLHSHFIKTAALEQAVYNAFERVFDGTAELHYELKKASNEANTDDRDILLSKLSKLDDKEARIKQAYRDGIDTIEEYKENKQLLKNERKALEKQLEAINLASDDSNADMLKNISTVYDIIKDTSNDTLTRANAIRSVVDHMVYDKENDKLEVYFFLQK

SEQ ID NO: 6627 - protein, 488 aa, Unknown
  Description of Unknown: Integrase B6628 sequence
  PTHR30461:SF3,IPR036162,PS51737,IPR011109,PTHR30461, PS00397,PF00239,G3DSA:1.10.10.2600,IPR006119,SSF53041, cd00338,SM00857,IPR025827,IPR038109,PS51736, IPR006118,PF13408,G3DSA:3.40.50.1390,PF07508,Coil
MQTASARIAALYIRVSTDKQEELSPDAQKRLLLDYAEKNNMIISEQYIFIESGISGKKADKRPQFQKMIGLAKQKDHPFHVILVWKYSRFARNQEESIVYKSLLKKNGVDVISISEPLVDGPFGSLIERIIEWMDEYYSIRLSGEVYRGMTEKALRGGYQASPPLGYRIEHHGSIPVIVSEEAEIVKTIFNKYVYEGLTSFQLAKYLNALNLKTKQGKKFERRSVEYIIQNPIYKGYIRWNRVHNDSRTVKDESEWIIEKGEQEPIISEELFEKAQERFNREYAPLSKSRPVTEYKHWLSGLIKCVHCGRTMTSSTTTRSKYRQFICNGYNKGKCPISNSVSENILIPYIMKSLEEIIASEQVEYEIIKHEYKSDTTLLEQQLNKILSKEKRVKNAYVNGIDTLEEYKRNKEMLLKEKKDVMKQINQLKNNIDKDHTSEMVQRIKEVYQIITNDKIDNITKNKAMKSIIEKIVYNKREGIIDFYYYYS

SEQ ID NO: 6628 - protein, 488 aa, Unknown
  Description of Unknown: Integrase B6629 sequence
  PTHR30461:SF3,IPR036162,PS51737,IPR011109,PTHR30461, PS00397,PF00239,G3DSA:1.10.10.2600,IPR006119,SSF53041, cd00338,SM00857,IPR025827,IPR038109,PS51736, IPR006118,PF13408,G3DSA:3.40.50.1390,PF07508,Coil
MATDIANMKVACAYIRVSTDKQEELSPDAQKRLLIDYAKKHNMSLLAENIYIDNGISGKKADKRPEFMKMISLAKSKEHPFDIILVWKFSRFARNQEESIVYKSLLKKNNVEVVSISEPLIDGPFGSLIERIIEWMDEYYSIRLSGEVLRGMTEKALRGGYQSSLPLGYKMNKDTGIPYIYEPEAIIVRKIFKDYIAGHSYLEIARELNALGYKTKRGAAFEGRTVEYILSNPFYYGAIRWNRQKHDDHTIKDISEWIIVTGKHPAIIDKETWDEVQHLMALRSRPYKARAAGHMKHWLGGIVKCSNCGASLMAGLNATRYQCGNYNKGKCSRSHYIKTAALEQAIYEAFERVLDGSMDLHYELKKSPNDGNTTDRDMILNQMSKLCDKEARIKQAYRDGIDTIDEYKENKQIIDNERKALEAQLDSLKTSEADSSDEMLQNITSVLGIIKDTSKDTLTRANAIRSVVDHCVYDKENDKLEVYFFLQK

SEQ ID NO: 6629 - protein, 488 aa, Unknown
  Description of Unknown: Integrase B6630 sequence
  PTHR30461:SF3,IPR036162,PS51737,IPR011109,PTHR30461, PS00397,PF00239,G3DSA:1.10.10.2600,IPR006119,SSF53041, cd00338,SM00857,IPR025827,IPR038109,PS51736, IPR006118,PF13408,G3DSA:3.40.50.1390,PF07508,Coil
MATDIANMKVACAYIRVSTDKQEELSPDAQKRLLIDYAKKHNMSLLAENIYIDNGISGKKADKRPEFMKMISLAKSKEHPFDIILVWKFSRFARNQEESIVYKSLLKKNNVEVVSISEPLIDGPFGSLIERIIEWMDEYYSIRLSGEVLRGMTEKALRGGYQSSLPLGYKMNKDTGIPYIYEPEAIIVRKIYKEYVAGHSYLEIARELNALGYKTKRGAAYEGRTVEYILSNPFYYGAVRWNRQKHDDHTIKDVGDWIIVMGKHPAIIDKETWDEVQHLMALRSRPYKARAAGHMKHWLGGIVKCSDCGASLMAGLNATRYQCGNYNKGKCSHSHYIKTAALEEAVYEAFDRVMQNPDELHYELKKASNEANTNDRDMILNQISKLSDKEARIKQAYRDGIDTIDEYKENKQIIDNERKALEAQLYSLKTSEADSSDEMLQNITSVLGIIKDTSKDTLTRANAIRSVVDHCVYDKENDKLEVYFFLQK

SEQ ID NO: 6630 - protein, 488 aa, Unknown
  Description of Unknown: Integrase B6631 sequence
  PTHR30461:SF3,IPR036162,PS51737,IPR011109,PTHR30461, PS00397,PF00239,G3DSA:1.10.10.2600,IPR006119,SSF53041, cd00338,SM00857,IPR025827,IPR038109,PS51736, IPR006118,PF13408,G3DSA:3.40.50.1390,PF07508,Coil
MATDIANMKVACAYIRVSTDKQEELSPDAQKRLLIDYAKKHNMSLLAENIYIDNGISGKKADKRPEFMKMISLAKSKEHPFDIILVWKFSRFARNQEESIVYKSLLKKNNVEVVSISEPLIDGPFGSLIERIIEWMDEYYSIRLSGEVLRGMTEKALRGGYQSSLPLGYKMNKDTGIPYIYEDEAIIVKKIYNDYISGHSYLEIARELNALGYTTKRGAAFEGRTVEYILSNPFYYGAIRWNRQKHDDHTIKDISEWIIVMGKHPAIIDKETWDEVQHLMALRSRPYKSRAAGHMKHWLGGIVKCSDCGASLIAGLNATRYQCGNYNKGKCSHSHFIKTAALEEAVYEAFDRVMQNPDELHYELKKASNEVNTNDRDMILNQISKLSDKEARIKQAYRDGIDTIDEYKENKQIIDNERKALEAQLYSLKTSEADSSDEMLQNITSVLGIIKDTSKDTLTRANAIRSVVDHCVYDKENDKLEVYFFLQK

SEQ ID NO: 6631 - protein, 488 aa, Unknown
  Description of Unknown: Integrase B6632 sequence
  PTHR30461:SF3,IPR036162,PS51737,IPR011109,PTHR30461, PS00397,PF00239,G3DSA:1.10.10.2600,IPR006119,SSF53041, cd00338,SM00857,IPR025827,IPR038109,PS51736, IPR006118,PF13408,G3DSA:3.40.50.1390,PF07508,Coil
MKKIAAAYIRVSTHMQEELSPDAQLRFIRTWADAHGYYVPDEFVFIDSGISGRKAKKRHDFLRMVGLAKTKPAAPFEAILLWKFNRFARNQEESIVYKSMLRKKCNVDVISTTQQTTKDIYGDLIERIIEWTDEFYSIQLGEDVFRGMTENALRGHFQASPAFGYKVEQKGQGPVVVEDQASIVRMIYNLYTTSTMGFYEIARYLNEIGYKTARNKPFENRTIRYIIQNPIYKGYLRWNYQSNATKEIKDASEWIIVKSSQITPIVSEELWNQANDRLKQEYHPKGGKPVSKHRHWLSGLVKCSSCGASLSTSVQYRHDRTYINFQCYKYLKGKCMVSHGISEKKLVPLILNVLKEDMNKSYIECERIEKVVENQQDILDVQLKRLDAREVRIKEAYLNGVDSLAEYKSNKEQIQQERELLLQQSQNHDKEEKGSNELPNKIRGVYDILVSDQCSKDEKQAAIRSIVKKIVFDKENKTLDFHYYIKED

SEQ ID NO: 6632 - protein, 488 aa, Unknown
  Description of Unknown: Integrase B6633 sequence
  PTHR30461:SF3,IPR036162,PS51737,IPR011109,PTHR30461, PS00397,PF00239,G3DSA:1.10.10.2600,IPR006119,SSF53041, cd00338,SM00857,IPR025827,IPR038109,PS51736, IPR006118,PF13408,G3DSA:3.40.50.1390,PF07508,Coil
MAKNILNMKIAAGYIRVSTDKQEELSPDAQKRLLIDYAKKNNISLLAENIYIDNGISGKKADKRPEFMKMIGMAKSKEHPFDVILVWKFSRFARNQEESIVYKSLLKKNNVEVVSVSEPLIDGPFGSLIERIIEWMDEYYSIRLSGEVLRGMTEKALRGGYQSSLPLGYKMNKDTGIPYICEPDAIIVRKIFKDYIDGRSYLEIARELNALGYKTKRGAAFEGRTVEYILSNPFYYGAIRWNRQKHDDHTIKDISEWIIVMGKHPAIIDKETWDEVQHLMALRSRPYKARAAGHMKHWLGGIVKCSDCGASLMAGLNATRYQCGNYNKGKCSHSHYIKTAALEQAIYEAFERVLDGSMDLHYKLKKSPNDGNTTDRDMILNQISKLGDKEARIKQAYRDGIDTIEEYKENKQLIENERKSLEAQLDSLKSSEVDSSDEMLQHITSVLNIIKDTSKDTLTRANAIRSVVDHCVYDKENDKLEVYFFLQK

SEQ ID NO: 6633 - protein, 488 aa, Unknown
  Description of Unknown: Integrase B6634 sequence
  PTHR30461:SF3,IPR036162,PS51737,IPR011109,PTHR30461, PS00397,PF00239,G3DSA:1.10.10.2600,IPR006119,SSF53041, cd00338,SM00857,IPR025827,IPR038109,PS51736, IPR006118,PF13408,G3DSA:3.40.50.1390,PF07508,Coil
MATDIANMKVACAYIRVSTDKQEELSPDAQKRLLIDYGKKHNMSLLAENIYIDNGISGKKADKRPEFMKMISLAKSKEHPFDIILVWKFSRFARNQEESIVYKSLLKKNNVEVVSISEPLIDGPFGSLIERIIEWMDEYYSIRLSGEVLRGMTEKALRGGYQSSLPLGYKMNKDTGIPYIYEPEAIIVRKIYKEYVAGHSYLEIARELNALGYKTKRGAAYEGRTVEYILSNPFYYGAVRWNRQKHDDHTIKDVGDWIIVMGKHPAIIDKETWDEVQHLMALRSRPYKARAAGHMKHWLGGIVKCSDCGASLIAGLNATRYQCGNYNKGKCSHSHFIKTAALEEAVYEAFDRVMQNPDELHYELKKPSNEANANDKDMILNQISKLSDKEARIKQAYRDGIDTIDEYKENKQIIDNERKNLEAQLYSLKTFEADSSDEMLQNITSVLGIIKDTSKDTLTRANAIRSVVDHCVYDKENDKLEVYFFLQK

SEQ ID NO: 6634 - protein, 488 aa, Unknown
  Description of Unknown: Integrase B6635 sequence
  PTHR30461:SF3,IPR036162,PS51737,IPR011109,PTHR30461, PS00397,PF00239,G3DSA:1.10.10.2600,IPR006119,SSF53041, cd00338,SM00857,IPR025827,IPR038109,PS51736, IPR006118,PF13408,G3DSA:3.40.50.1390,PF07508,Coil
MAKDILNMKSACAYIRVSTDKQEELSPDAQKRLLIDFAKKNNMSLLAENIYIDNGISGKKADKRPEFMKMIGMAKSKEHPFDVILVWKFSRFARNQEESIVYKSLLKKNRVDVVSVSEPLIDGPFGTLIERIIEWMDEYYSIRLSGEVLRGMTEKALRGGYQSSLPLGYRMNKETGIPYIYEEEAVIVRKIYNDYIAGHSYLEIARELNAIGYKTKRGATFEGRTVEYILSNPFYYGAVRWNRQNHDNHTIKDISEWIIVMGKHPAIIDKETWDLVQHLMALRSKPYKARAAGHMKHWLGGIVKCSDCGASLMAGLNATRYQCGNYNKGKCLHSHFIKTAALEQAVYNAFERVFDGTAELHYELKKASNEANTDDKDILLSKLSKLDDKEARIKQAYRDGIDTIEEYKENKQLLNDERKALEKQLEAFSLASDVSNAAMLKSISTVYDIIKDTSKDTLTRANAIRSVVDHCVYDKENDKLEIYFFLQK

SEQ ID NO: 6635 - protein, 488 aa, Unknown
  Description of Unknown: Integrase B6636 sequence
  PTHR30461:SF3,IPR036162,PS51737,IPR011109,PTHR30461, PS00397,PF00239,G3DSA:1.10.10.2600,IPR006119,SSF53041, cd00338,SM00857,IPR025827,IPR038109,PS51736, IPR006118,PF13408,G3DSA:3.40.50.1390,PF07508,Coil
MAKDILNMKSACAYIRVSTDKQEELSPDAQKRLLIDFAKKNNMSLLASNIYLDNGISGKKADKRPEFMKMIGMAKSKEHPFDVILVWKFSRFARNQEESIVYKSLLKKNHVEVVSVSEPLVDGPFGTLIERIIEWMDEYYSIRLSGEVLRGMTEKALRGGYQSSLPLGYRMNKDTGIPYIYEEEAVIVRKIYNDYIAGHSYLEIARELNALGYKTKRGAAFEGRTVEYILSNPFYYGAVRWNRQNHDNHTIKDISEWIIVMGKHPAIINKETWDLVQHLMALRSKPYKARAAGHMKHWLGGIVKCSDCGASLMAGLNATRYQCGNYNKGKCLHSHFIKTAALEQAVYNAFERVFDGTAELHYELKKASNEANTDDRDILLSKLSKLDDKEARIKQAYRDGIDTIEEYKENKQLLKNERKSLEKQLEAINLASDDSNADMLKNISTVYDIIKDTSNDTLTRANAIRSVVDHMVYDKENDKLEVYFFLQK

SEQ ID NO: 6636 - protein, 488 aa, Unknown
  Description of Unknown: Integrase B6637 sequence
  PTHR30461:SF3,cd00338,SM00857,G3DSA:1.10.10.2600,IPR036162, PS51737,G3DSA:3.40.50.1390,IPR006119,IPR038109,PF07508, SSF53041,IPR011109,PTHR30461,PS51736,Coil, PF00239
MGGRAAIYARFSSHNQRGESIEIQVEKSRAYCAENDLRVVATYCDFAQTGTNTDRAEFQRMMADAKRGLFDFVVIYKVTRIMRNRDEMAMARIMLRRCRVEILYAGEDISDGSAGVLQLGMLEVLAEYESALDGERIRDGIQKNAERCMANGCVRYGWDIVDGRYVVNEEEAAAIRLGVRMVLSGKSVADVVRAWEPYRTKRGGKWRFQTVRRILMRRENGGEYRYAGVVVPGGMPAIVPMDDEERVIRMLEDSHRPRAKTEAWDFPLTGKLYDGRDGGLMTGTSGTGKSGRPYHYYRCRSCGRTVRRDVVEKRVADAVREALGSADSRERIARMLADAEEERADEKPLSETIKGELAKIETAFSNIWTAIESGIAPPGGKERIDALKQRQALLKDELRTAEALEAARLDYDRALFWLEGMAAAEVDDAQLLRTFVARVVLGGPDDDDGLRVAFTFDDSAGLGDNPSLPGAIGPGGEVFDRMNASSTM

SEQ ID NO: 6637 - protein, 488 aa, Unknown
  Description of Unknown: Integrase B6638 sequence
  PTHR30461:SF3,IPR036162,PS51737,IPR011109,PTHR30461, PS00397,PF00239,G3DSA:1.10.10.2600,IPR006119,SSF53041, cd00338,SM00857,IPR025827,IPR038109,PS51736, IPR006118,PF13408,G3DSA:3.40.50.1390,PF07508,Coil
MAKDILNMKSACAYIRVSTDKQEELSPDAQKRLLIDFAKKNNMSLLAENIYIDNGISGKKADKRPEFMKMIGMAKSKEHPFDVILVWKFSRFARNQEESIVYKSLLKKNRVDVVSVSEPLIDGPFGTLIERIIEWMDEYYSIRLSGEVLRGMTEKALRGGYQSSLPLGYRMNKETGIPYIYEEEAVIVRKIYNDYIAGHSYLEIARELNAIGYKTKRGATFEGRTVEYILSNPFYYGAVRWNRQNHDTHTIKDISEWIIVMGKHPAIIDKETWDLVQHLMALRSKPYKARAAGHMRHWLGGIVKCSDCGASLMAGLNATRYQCGNYNKGKCLHSHFIKTAALEQAVYNAFERVFDGTAELHYELKKASNEANTDDKDILLSKLSKLDDKEARIKQAYRDGIDTIEEYKENKQLLNDERKALEKQLEAFNLASDDSNADMLKSISTVYDIIKDATNDTLTRANAIRSVVDHMVYDKENDKLEVYFFLQK

SEQ ID NO: 6638 - protein, 488 aa, Unknown
  Description of Unknown: Integrase B6639 sequence
  PTHR30461:SF3,IPR036162,PS51737,IPR011109,PTHR30461, PS00397,PF00239,G3DSA:1.10.10.2600,IPR006119,SSF53041, cd00338,SM00857,IPR025827,IPR038109,PS51736, IPR006118,PF13408,G3DSA:3.40.50.1390,PF07508,Coil
MATDIANMKVACAYIRVSTDKQEELSPDAQKRLLIDYAKKHNMSLLAENIYIDNGISGKKADKRPEFMKMISLAKSKEHHFDIILVWKFSRFARNQEESIVYKSLLKKNNVEVVSISEPLIDGPFGSLIERIIEWMDEYYSIRLSGEVLRGMTEKALRGGYQSSLPLGYKMNKDTGIPYIYEPEAIIVRKIYKEYVAGHSYLEIARELNALGYKTKRGAAYEGRTVEYILSNPFYYGAVRWNRQKHDDHTIKDVGDWIIVMGKHPAIIDKETWDEVQHLMALRSRPYKARAAGHMKHWLGGIVKCSDCGASLMAGLNATRYQCGNYNKGKCSHSHYIKTAALEEAVYEAFDRVMQNPDELHYELKKASNEANTNDRDMILNQISKLSDKEARIKQAYRDGIDTIDEYKENKQIIDNERKALEAQLYSLKTSEADSSDEMLQNITSVLGIIKDTSKDTLTRANAIRSVVDHCVYDKENDKLEVYFFLQK

SEQ ID NO: 6639 - protein, 488 aa, Unknown
  Description of Unknown: Integrase B6640 sequence
  PTHR30461:SF3,IPR036162,PS51737,IPR011109,PTHR30461, PS00397,PF00239,G3DSA:1.10.10.2600,IPR006119,SSF53041, cd00338,SM00857,IPR025827,IPR038109,PS51736, IPR006118,PF13408,G3DSA:3.40.50.1390,PF07508,Coil
MATDIANMKVACAYIRVSTDKQEELSPDAQKRLLIDYAKKHNMSLLAENIYIDNGISGKKADKRPEFMKMISLAKSKEHPFDIILVWKFSRFARNQEESIVYKSLLKKNNVEVVSISEPLIDGPFGSLIERIIEWMDEYYSIRLSGEVLRGMTEKALRGGYQSSLPLGYKMNKDTGIPYIYEPEAIIVRKIYKEYVAGHSYLEIARELNALGYKTKRGAAYEGRTVEYILSNPFYYGAVRWNRQKHDDHTIKDVGDWIIVMGKHPAIIDKETWDEVQHLMALRSRPYKARAAGHMKHWLGGIVKCSDCGASLMAGLNATRYQCGNYNKGKCSHSHYIKTAALEEAVYEAFDRVMQNPDELHYELKKASNEANTNDRDMILNQISKLSDKEARIKQAYRDGIDTIDEYKENKQIIDNERKALEAQLDSLKTSEADSSDEMLQNITSVLSIIKDTSKDTLTRANAIRSVVDHCVYDKENDRLEVYFFLQK

SEQ ID NO: 6640 - protein, 488 aa, Unknown
  Description of Unknown: Integrase B6641 sequence
  PTHR30461:SF3,IPR036162,PS51737,IPR011109,PTHR30461, PS00397,PF00239,G3DSA:1.10.10.2600,IPR006119,SSF53041, cd00338,SM00857,IPR025827,IPR038109,PS51736, IPR006118,PF13408,G3DSA:3.40.50.1390,PF07508,Coil
MATDIANMKVACAYIRVSTDKQEELSPDAQKRLLIDFAKKNNMSLLAENIYIDNGISGKKADKRPEFMKMIGMAKSKEHPFDVILVWKFSRFARNQEESIVYKSLLKKNNVEVVSISEPLIDGPFGSLIERIIEWMDEYYSIRLSGEVLRGMTEKALRGGYQSSLPLGYKMNKDTGVPYIYEPDAIIVRKIFKDYIDGRSYLEIARELNALGYKTKRGATFEGRTVEYILSNPFYYGAIRWNRQKHDDHTIKDISEWIIVMGKHPAIIDKETWDEVQHLMALRSRPYKARAAGHMKHWLGGIVKCSDCGASLMAGLNATRYQCGNYNKGKCSHSHYIKTAALEQAIYEAFERVLDGSMDLHYELKKSPNDGNTTDRDMILNQISKLGDKKARIKQAYRDGIDTIEEYRENKQLIENERKTLEAQLDSLKSSEADSSDEMLQHITSVLNIIKDTSKDTLTRANAIRSVVEHCVYDKENDKLEVYFFLQK

SEQ ID NO: 6641 - protein, 488 aa, Unknown
  Description of Unknown: Integrase B6642 sequence
  PTHR30461:SF3,IPR036162,PS51737,IPR011109,PTHR30461, PS00397,PF00239,G3DSA:1.10.10.2600,IPR006119,SSF53041, cd00338,SM00857,IPR025827,IPR038109,PS51736, IPR006118,PF13408,G3DSA:3.40.50.1390,PF07508,Coil
MKKIAAAYIRVSTHMQEELSPDAQLRCIRDWGNVHGYYIPDEYVFIDNGISGRKVKKRHDFLRMIGLAKTKPASPFEAILLWKFNRFARNQEESIVYKSMLRKKCNVDVISTTQQTTKDIYGDLIERIIEWTDEFYSIQLGEDVFRGMTENALRGHFQASPAFGYKVEQKGQGPVVVEDQASIVRMIYNLYTTSTMGFYEIARYLNEIGYKTARNKPFENRTIRYIIQNPIYKGYLRWNYQSNATKEIKDASEWIIVKSSQITPIVSEELWNQANDRLKQEYHPKGGKPVSKHRHWLSGLVKCSSCGASLSTSVQYRHDRTYINFQCYKYLKGKCMVSHGISEKKLVPLILNVLKEDMNKSYIECERIEKVVENQQDILDVQLKRLDAREVRIKEAYLNGVDSLAEYKSNKEQIQQERELLLQQSQNHDKEEKGSNELPNKIRGVYDILVSDQCSKDEKQAAIRSIVKKIVFDKENKTLDFHYYIKED

SEQ ID NO: 6642 - protein, 488 aa, Unknown
  Description of Unknown: Integrase B6643 sequence
  PTHR30461:SF3,IPR036162,PS51737,IPR011109,PTHR30461, PS00397,PF00239,G3DSA:1.10.10.2600,IPR006119,SSF53041, cd00338,SM00857,IPR025827,IPR038109,PS51736, IPR006118,PF13408,G3DSA:3.40.50.1390,PF07508,Coil
MATDIANMKVACAYIRVSTDKQEELSPDAQKRLLIDYAKKHNMSLLAENIYIDNGISGKKADKRPEFMKMISLAKSKEHPFDIILVWKFSRFARNQEESIVYKSLLKKNNVEVVSISEPLIDGPFGSLIERIIEWMDEYYSIRLSGEVLRGMTEKALRGGYQSSLPLGYRMNKDTGIPYIYEPEAIIVRKIYKEYVAGHSYLEIARELNALGYKTKRGAAYEGRTVEYILSNPFYYGAVRWNRQKHDDHTIKDVGDWIIVMGKHPAIIDKETWDEVQHLMALRSRPYKARAAGHMKHWLGGIVKCSDCGASLIAGLNATRYQCGNYNKGKCSHSHFIKTAALEEAVYEAFDRVMQNPNELHYELKKPSNEANANDKDMILNQISKLSDKEARIKQAYRDGIDTIDEYKENKQIIDNERKALEAQLYSLKTSEADSSDEMLQNITSVLGIIKDTSKDTLTRANAIRSVVDHCVYDKENDKLEVYFFLQK

SEQ ID NO: 6643 - protein, 488 aa, Unknown
  Description of Unknown: Integrase B6644 sequence
  PTHR30461:SF3,SM00857,G3DSA:1.10.10.2600,IPR036162,PF13408, PS51737,G3DSA:3.40.50.1390,IPR025827,IPR006119,IPR038109, PF07508,IPR011109,SSF53041,PTHR30461,Coil, PS51736,cd00338,PF00239
MPEALNAVIYARYSSDRQTEQSIEGQLRECYAFAKANDIAVIDTYIDRAISGKTDNRPAFQKMIEDSAKRQFQAVIVYRLDRFTRNRYDSAIYKARLKKNGVKVLSAMENLNGSPESIIMESLLEGMAEYYSVELSQKITRGMRENALKGKALGGQRVLGYKVNSDCYFEIDETTAPVVVDIFKLYSSGKTVKEICDILNARGVKTARGGAFNKNSLHTILTNKKYIGIYKTKYGEIVGGIPAIIDKELFEMVALRMEQNKKAPARAKAEINYLLSTKLFCGKCRSAMVGESGTSKTGKKYYYYACVKKKREKACDKSNVKKDWIEDLVIQRTVTDILKDDVIEKIADRLVELQKAEAAESGTMLYLQNSLAEIQVSIKNIMTAIEKGIITESTKTRLTELEDEKRNVEIEIAKESIARRIISREQIIYWISSFKDGDITSEKYRQQLIDTFVHAVFVYDDKIVITYNYSGENNTATISDLDLSSPPT

SEQ ID NO: 6644 - protein, 488 aa, Unknown
  Description of Unknown: Integrase B6645 sequence
  PTHR30461:SF3,IPR036162,PS51737,IPR011109,PTHR30461, PS00397,PF00239,G3DSA:1.10.10.2600,IPR006119,SSF53041, cd00338,SM00857,IPR025827,IPR038109,PS51736, IPR006118,PF13408,G3DSA:3.40.50.1390,PF07508,Coil
MAANIANMKVACAYIRVSTDKQEELSPDAQKRLLIDYAKKHNMSLLAENIYIDNGISGKKADKRPEFMKMISLAKSKEHPFDIILVWKFSRFARNQEESIVYKSLLKKNNVEVVSISEPLIDGPFGSLIERIIEWMDEYYSIRLSGEVLRGMTEKALRGGYQSSLPLGYKMNKDTGIPYIYEDEAIIVKKIYNDYISGHSYLEIARELNALGYTTKRGAAFEGRTVEYILSNPFYYGAIRWNRQKHDDHTIKDISEWIIVMGKHPAIIDKETWDEVQHLMALRSRPYKARAAGHMKHWLGGIVKCSDCGASLMAGLNATRYQCGNYNKGKCSHSHYIKTAALEQAIYEAFERVLDGSMDLHYELKKSPNDGNTTDRDMILNQISKLGDKEARIKQAYRDGIDTIEEYKENKQLIENERKSLEAQLDSLKSSEADSSDEMLQHITSVLNIIKDTSKDTLTRANAIRSVVDHCVYDKENDKLEVYFFLQK

SEQ ID NO: 6645 - protein, 488 aa, Unknown
  Description of Unknown: Integrase B6646 sequence
  PTHR30461:SF3,SM00857,G3DSA:1.10.10.2600,IPR036162,PF13408, PS51737,G3DSA:3.40.50.1390,IPR025827,IPR006119,IPR038109, PF07508,IPR011109,SSF53041,PTHR30461,Coil, PS51736,cd00338,PF00239
MPEALNAVIYARYSSDRQTEQSIEGQLRECYAFAKANDIAVIDTYIDRAISGKTDNRPAFQKMIEDSAKRQFQAVIVYRLDRFTRNRYDSAIYKARLKKNGVKVLSAMENLNGSPESIIMESLLEGMAEYYSVELSQKITRGMRENALKGKALGGQRVLGYKVNSDCYFEIDETTAPVVVDIFKLYSSGKTVKEICDILNARGVKTARGGAFNKNSLHTILTNKKYIGIYKTKYGEIVGGIPAIIDKELFEMVALRMEQNKKAPARAKAEINYLLSTKLFCGKCRSAMVGESGTSKTGKKYYYYACVKKKREKACDKSNVKKDWIEDLVIQRTVTDILKDDVIEKIADRLVELQKAEAAQSGTMLYLENSLAEIQVSIKNIMTAIEKGIITESTKTRLTELEDEKRNVEIEIAKESIARRIISREQIIYWISSFKDGDITSEKYRQQLIDTFVHAVFVYDDKIVITYNYSGENNTATISDLDLSSPPI

SEQ ID NO: 6646 - protein, 487 aa, Unknown
  Description of Unknown: Integrase B6647 sequence
  PTHR30461:SF3,IPR036162,PS51737,IPR011109,PTHR30461, PS00397,PF00239,G3DSA:1.10.10.2600,IPR006119,SSF53041, cd00338,SM00857,IPR025827,IPR038109,PS51736, IPR006118,PF13408,G3DSA:3.40.50.1390,PF07508,Coil
MKKIAAAYIRVSTHMQEELSPDAQLRCIRDWGNVHGYYIPDEYVFIDNGISGRKAKKRHDFLRMIGLAKTKPASPFEAILLWKFNRFARNQEESIVYKSMLRKKCNVDVISTTQQTTKDIYGDLIERIIEWTDEFYSIQLGEDVFRGMTENALRGNFQSSPAFGYKVEKGQGLVIVEDQANIVRMIFNLYANTMMGFYEIARHLNRLGYKTKKGGAFETRTIRYIIQNPIYKGYLRWNYANGTTRVVNDESEWIIVKSPLVPIIVSEELWDRANERLKNEYRPKNGKPVSKHRHWLSGLVKCSSCGASLSTSVQYRHDRTYINFQCYKYLKGKCLVSHGISEKKLVPLVLNVLKEDMSKSYIECERIEKVVENQQDILDVQLKRLATREARIKEAYLNGIDSLAEYKANKEEIQKEREFLLQQSQDHNKTEKESNELPNKIRGVYDILVSDQCSKDEKQAAIRSIVKKIVFDKENKTLDFHYYIKED

SEQ ID NO: 6647 - protein, 487 aa, Unknown
  Description of Unknown: Integrase B6648 sequence
  PTHR30461:SF3,SM00857,G3DSA:1.10.10.2600,IPR036162,PS51737, G3DSA:3.40.50.1390,IPR006119,IPR038109,PF07508,IPR011109, SSF53041,PF00239,PTHR30461,PS51736,Coil, cd00338
MPKTAVIYARFSCNKQREASIDDQLRICRQWCQRERYAIVAEYCDYAISGRTDDRPEFQRMVANAGESDIVLVYMMDRFSRGEYDAPIYKRELAQHGVKLVSALEQIPDSPEGIIYEKLLEGLAACESKKTAIRTRRGMEGNALKCKTNGVRVFGYASNEADEYVIDEDEAAFVREAFKRRIAKETTNSIARDFAARGVKTSQGNPCGYSMVERMVKNRKYTGRYEWGGVVKEGGMPAIIDEVTFMEAQGIRAAKERSAESWGDFALSGKAICAGCGRNLQGVSGRGRKNVKYEYYRCHDGCVKPVRREELEGEIVKALRALLQDREEALKIARMVAESSDGAEVAARRKQAAQSLSAAERGLKNILNAIEQGIIAPGAKERIAELEHQRDRAKLDLEAIRDDQIDPERLADFLQCGSALDDATLLKAFVYQASVSDEECIVTLNYDVENNEPARLDIQRVRTKCKWCPRADSNRRHADYDSAALTN

SEQ ID NO: 6648 - protein, 487 aa, Unknown
  Description of Unknown: Integrase B6649 sequence
  PTHR30461:SF3,IPR036162,PS51737,IPR011109,PTHR30461, PS00397,PF00239,G3DSA:1.10.10.2600,IPR006119,SSF53041, cd00338,SM00857,IPR025827,IPR038109,PS51736, IPR006118,PF13408,G3DSA:3.40.50.1390,PF07508,Coil
MKKIAAAYIRVSTHMQEELSPDAQLRCIRVWGDAHGYYVPDEYVFIDNGISGRKAKKRHDFLRMIGLAKTKPASPFEAILLWKFNRFARNQEESIVYKSMLRKKCNVDVISTTQQTTKDIYGDLIERIIEWTDEFYSIQLGEDVFRGMTENALRGNFQASPAFGYKVEKGLGLVIVEDQANIVRMIFNLYANTRMGFYEIARHLNRLGYKTKKGGAFEARAIRYIIQNPIYKGYLRWNYANGTTRVVNDESEWIIVKSPLVPIIVSEELWDRANERLKNEYRPKNGKPVTKHRHWLSGLVKCSSCGASLSTSVQYRHDRTYINFQCYKYLKGKCMVSHGISEKKLVPLVLNVLKEDMSKSYIECERIEKVVENQQDILDVQLKRLATRETRIKEAYLNGIDSLAEYKANKEEIQKEREFLLQQSQDHNKTENESNELPNKIRGVYDILVSDQCSKDEKQAAIRSIVKKIVFDKENKTLDFHYYIKED

SEQ ID NO: 6649 - protein, 487 aa, Unknown
  Description of Unknown: Integrase B6650 sequence
  PTHR30461:SF3,IPR036162,PS51737,IPR011109,PTHR30461, PS00397,PF00239,G3DSA:1.10.10.2600,IPR006119,SSF53041, cd00338,SM00857,IPR025827,IPR038109,PS51736, IPR006118,PF13408,G3DSA:3.40.50.1390,PF07508,Coil
MNDIKRGALYIRVSTDDQTEYSPDSQIKLCYKYAKEHNIEILKEHIYQEDGISGTNVEKRTSFKRMIAIAKKKPKPFDVILIYSFSRFARNREDAIMYKSLLRKKLGIDVVSITQPLSEGKESILMEALYEAMDEYYSVDLAEQSIRGKIEKASRGEHQGGTPYGYIYNKNTKTLYPDKEKAEIVKLIFKEWIKPEQSIRGLCRMLNDMNILTTRGCKWSDRSMYLILQNPAYIGYSRFTVGGMKRNYKHPNTITAKGKWEPIIDMETWNLAKQKMDDHDKKWFKYKKHYTKNEFWLRGIVKCSDCGKSLVRCNVKGKPVPFFQCTGFTKGRCQDSHYIRQDQLVPAILEQIKKDYTYKLNIKITEGKDTPQYDQISIIKKNIEKLKTKRERIKEAYINEIDTLEEYKENKKKLDNEEKQLKEQLKELNYKEKQEVRKEKTYELCKTAYEILSDEETSFDLKDDVAHRLFDHITYNKKENTLEIVYK

SEQ ID NO: 6650 - protein, 487 aa, Unknown
  Description of Unknown: Integrase B6651 sequence
  IPR036162,PS51737,IPR011109,PTHR30461,PS00397, PF00239,G3DSA:1.10.10.2600,IPR006119,SSF53041,cd00338, SM00857,IPR025827,IPR038109,PS51736,IPR006118, PF13408,G3DSA:3.40.50.1390,PF07508,Coil
MTLKNACAYIRVSTDKQEELSPDAQKRLIIDYCKKNGYTITNENIFIENGISGKKADKRPEFKRMIALAKSKEHPFDVILVWKFSRFARNQEESIVYKSMLKKANVDVVSVSEPVIDGPFGSLIERIIEWMDEYYSIRLSGEVIRGMTEKALRGGYNAQPPLGYRKNSDTGIPEIYEPEAVIVRNIFSYISQGLSLIDTARSINNMGFHTRRGGMFEQRTIRYIIENPFYYGHVRWNRQNPSEHTIKDKSEWIIAPGTHPVLINKESWDFANDQLIKISRPYKERGTSGIKHWLSGIVKCSSCGSSLVSNSLWKGHSTSFQCSGYNKCKCKVSHYIKTERLEAGIYEGFLKVLSSKNVTYEKVSEHSYEEKIDTAALLKNIEDKERRIKQAYRDGIDTLEEYKDNKAILQKEREKVMEIISKQKPVQHDEDNETMLSQIKNAYEIIKNEELDKLTRANAIRSVVSKAVYDNEKDTLDIYFRLIEKSL

SEQ ID NO: 6651 - protein, 487 aa, Unknown
  Description of Unknown: Integrase B6652 sequence
  PTHR30461:SF3,IPR036162,PS51737,IPR011109,PTHR30461, PS00397,PF00239,G3DSA:1.10.10.2600,IPR006119,SSF53041, cd00338,SM00857,IPR025827,IPR038109,PS51736, IPR006118,PF13408,G3DSA:3.40.50.1390,PF07508,Coil
MKKIAAAYIRVSTHMQEELSPDAQLRCIRDWGNVHGYYIPDEYVFIDNGISGRKAKKRHDFLRMIGLAKTKPASPFEAILLWKFNRFARNQEESIVYKSMLRKKCNVDVISTTQQTTKDIYGDLIERIIEWTDEFYSIQLGEDVFRGMTENALRGNFQASPAFGYKVEKGLGLVIVEDQANIVRMIFNLYANTMMGFYEIARHLNRLGYKTKKGGAFETRTIRYIIQNPIYKGYLRWNYANGTTRVVNDESEWIIVKSPLVPIIVSEELWDRANERLKNEYRPKNGKPVSKHRHWLSGLVKCSSCGASLSTSVQYRHDRTYINFQCYKYLKGKCLVSHGISEKKLVPLVLNVLKEDMSKSYIECERIEKVVENQQDILDVQLKRLATREARIKEAYLNGIDSLAEYKANKEEIQKEREFLLQQSQDHNKTEKESNELPNKIRGVYDILVSDQCSKDEKQAAIRSIVKKIVFDKENKTLDFHYYIKED

SEQ ID NO: 6652 - protein, 487 aa, Unknown
  Description of Unknown: Integrase B6653 sequence
  PTHR30461:SF3,IPR036162,PS51737,IPR011109,PTHR30461, PS00397,PF00239,G3DSA:1.10.10.2600,IPR006119,SSF53041, cd00338,SM00857,IPR025827,IPR038109,PS51736, IPR006118,PF13408,G3DSA:3.40.50.1390,PF07508,Coil
MTPISDFRIAACYIRVSTDDQVELSPASQLVEIRKWAASHGYIVPDEYVFTDEGISGRKVTGRDEFRRMIGVAKTKPKPFDAILLWKFSRFARNRDDAVMYKALLRKQLGIDVISISEPMAEGKMGIITEALIEAMDEYYSINLAEEVKRGMSEKHRRGELQSTPSYGYCVKDHVLTPIEPEATYVKEIFRRYINGEGIYPIARWMNECGQRTHRGGRFENRTIEYILRNPVYIGKLRWNPSGKSRRDYSNPNIILSDGKHEPLISQEIFHEVKKRMDAWKAAHKYKGKPAEVQKDWMAGLVRCADCGGSLIFAKPHYWKCNNYVRGACRTSQHITDETLKTAILQKLRQDVAGSPSIQYEVVRASDGGASELAALQASLDAAVRMLDRLRDAYLSGADTIEEYKAGKEAVQEKIARLKDQISEEEKKNASAAGPDVLKKSIRTALNTLESSSATMAEKYTAAHSIIDRIVWDKAKNLLQIYYRLIL

SEQ ID NO: 6653 - protein, 487 aa, Unknown
  Description of Unknown: Integrase B6654 sequence
  PTHR30461:SF3,IPR036162,PS51737,IPR011109,PTHR30461, PS00397,PF00239,G3DSA:1.10.10.2600,IPR006119,SSF53041, cd00338,SM00857,IPR025827,IPR038109,PS51736, IPR006118,PF13408,G3DSA:3.40.50.1390,PF07508,Coil
MKKIAAAYIRVSTHMQEELSPDAQLRCIRDWGNVHGYYIPDEYVFIDNGISGRKAKKRHDFLRMIGLAKTKPASPFEAILLWKFNRFARNQEESIVYKSMLRKKCNVDVISTTQQTTKDIYGDLIERIIEWTDEFYSIQLGEDVFRGMTENALRGNFQSSPAFGYKVEKGQGLVIVEDQANIVRMIFNLYANTMMGFYEIARHLNRLGYKTKKGGAFETRTIRYIIQNPIYKGYLRWNYANGTTRVVNDESEWIIVKSQLVPIIVSEELWDRANERLKNEYRPKNGKPVSKHRHWLSGLVKCSSCGASLSTSVQYRHDRTYINFQCYKYLKGKCLVSHGISEKKLVPLVLNVLKEDMSKSYIECERIEKVVENQQDILDVQLKRLATREARIKEAYLNGIDSLAEYKANKEEIQKEREFLLQQSQDHNKTEKESNELPNKIRGVYDILVSDQCSKDEKQAAIRSIVKKIVFDKENKTLDFHYYIKED

SEQ ID NO: 6654 - protein, 487 aa, Unknown
  Description of Unknown: Integrase B6655 sequence
  PTHR30461:SF3,IPR036162,PS51737,IPR011109,PTHR30461, PS00397,PF00239,G3DSA:1.10.10.2600,IPR006119,SSF53041, cd00338,SM00857,IPR025827,IPR038109,PS51736, IPR006118,PF13408,G3DSA:3.40.50.1390,PF07508,Coil
MKKIAAAYIRVSTHMQEELSPDAQLRCIRDWGNVHGYYIPDEYVLIDNGISGRKAKKRHDFLRMIGLAKTKPASPFEAILLWKFNRFARNQEESIVYKSMLRKKCNVDVISTTQQTTKDIYGDLIERIIEWTDEFYSIQLGEDVFRGMTENALRGNFQASPAFGYKVEKGLGLVIVEDQANIVRMIFNLYANTRMGFYEIARHLNRLGYKTKKGGAFEARAIRYIIQNPIYKGYLRWNYANGTTRVVNDESEWIIVKSPLVPIIVSEELWDRANERLKNEYRPKNGKPVSKHRHWLSGLVKCSSCGASLSTSVQYRHDRTYINFQCYKYLKGKCLVSHGISEKKLVPLVLNVLKEDMSKSYIECERIEKVVENQQDILDVQLKRLATREARIKEAYLNGIDSLAEYKANKEEIQKEREFLLQQSQDHNKTEKESNELPNKIRGVYDILVSDQCSKDEKQAAIRSIVKKIVFDKENKTLDFHYYIKED

SEQ ID NO: 6655 - protein, 487 aa, Unknown
  Description of Unknown: Integrase B6656 sequence
  PTHR30461:SF3,IPR036162,PS51737,IPR011109,PTHR30461, PS00397,PF00239,G3DSA:1.10.10.2600,IPR006119,SSF53041, cd00338,SM00857,IPR025827,IPR038109,PS51736, IPR006118,PF13408,G3DSA:3.40.50.1390,PF07508,Coil
MKKIAAAYIRVSTHMQEELSPDAQLRCIRDWGNVHGYYIPDEYVFIDNGISGRKAKKRHDFLRMIGLAKTKPASPFEAILLWKFNRFARNQEESIVYKSMLRKKCNVDVISTTQQTTKDIYGDLIERIIEWTDEFYSIQLGEDVFRGMTENALRGNFQASPAFGYKVEKGLGLVIVEDQANIVRMIFNLYANTRMGFYEIARHLNRLGYKTKKGGAFEARAIRYIIQNPIYKGYLRWNYANGTTRVVNDESEWIIVKSPLVPIIVSEELWDRANERLKNEYRPKNGKPVTKHRHWLSGLVKCSSCGASLSTSVQYRHDRTYINFQCYKYLKGKCIVSHGISEKKLVPLVLNVLKEDMSKSYIECERIEKVVENQQDILDVQLKRLATRETRIKEAYLNGIDSLAEYKANKEEIQKEREFLLQQSQDHNKTENESNELPNKIRGVYDILVSDQCSKDEKQAAIRSIVKKIVFDKENKTLDFHYYIKED

SEQ ID NO: 6656 - protein, 487 aa, Unknown
  Description of Unknown: Integrase B6657 sequence
  PTHR30461:SF3,IPR036162,PS51737,IPR011109,PTHR30461, PS00397,PF00239,G3DSA:1.10.10.2600,IPR006119,SSF53041, cd00338,SM00857,IPR025827,IPR038109,PS51736, IPR006118,PF13408,G3DSA:3.40.50.1390,PF07508,Coil
MKKIAAAYIRVSTHMQEELSPDAQLRCIRVWGDAHGYYVPDEYVFIDNGISGRKAKKRHDFLRMIGLAKTKPASPFEAILLWKFNRFARNQEESIVYKSMLRKKCNVDVISTTQQTTKDIYGDLIERIIEWTDEFYSIQLGEDVFRGMTENALRGNFQASPAFGYKVEKGLGLVIVEDQANIVRMIFNLYANTRMGFYEIARHLNRLGYKTKKGGAFEARAIRYIIQNPIYKGYLRWNYANGTTRVVNDESEWIIVKSPLVPIIVSEELWDRANERLKNEYRPKNGKPVTKHRHWLSGLVKCSSCGASLSTSVQYRHDRTYINFQCYKYLKGKCMVSHGISEKKLVPLVLNVLKEDMSKSYIECERIEKVVENQQDILDVQLKRLATRETRIKEAYLNGIDSLAEYKANKEEIQKEREFLLQQSQDHNKTEKESNELPNKIRGVYDILVSDQCSKDEKQAAIRSIVKKIVFDKENKTLDFHYYIKED

SEQ ID NO: 6657 - protein, 487 aa, Unknown
  Description of Unknown: Integrase B6658 sequence
  PTHR30461:SF3,IPR036162,PS51737,IPR011109,PTHR30461, PS00397,PF00239,G3DSA:1.10.10.2600,IPR006119,SSF53041, cd00338,SM00857,IPR025827,IPR038109,PS51736, IPR006118,PF13408,G3DSA:3.40.50.1390,PF07508,Coil
MKKIAAAYIRVSTHMQEELSPDAQLRCIRDWGNVHGYYIPDEYVFIDNGISGRKAKKRHDFLRMIGLAKTKPASPFVAILLWKFNRFARNQEESIVYKSMLRKKCNVDVISTTQQTTKDIYGDLIERIIEWTDEFYSIQLGEDVFRGMTENALRGNFQASPAFGYKVEKGLGLVIVEDQANIVRMIFNLYANTRMGFYEIARHLNRLGYKTKKGGAFEARAIRYIIQNPIYKGYLRWNYANGTTRVVNDESEWIIVKSPLVPIIVSEELWDRANERLKNEYRPKNGKPVSKHRHWLSGLVKCSSCGASLSTSVQYRHDRTYINFQCYKYLKGKCLVSHGISEKKLVPLVLNVLKEDMSKSYIECERIEKVVENQQDILDVQLKRLATREARIKEAYLNGIDSLAEYKANKEEIQKEREFLLQQSQDHNKTEKESNELPNKIRGVYDILVSDQCSKDEKQAAIRSIVKKIVFDKENKTLDFHYYIKED

SEQ ID NO: 6658 - protein, 487 aa, Unknown
  Description of Unknown: Integrase B6659 sequence
  PTHR30461:SF3,cd00338,SM00857,G3DSA:1.10.10.2600,IPR036162, PF13408,PS51737,G3DSA:3.40.50.1390,IPR025827,IPR006119, IPR038109,PF07508,IPR011109,SSF53041,PTHR30461, PS51736,Coil,PF00239
MKRAVFYGRYSSDRQTEQSIEGQRRVCEEFAAGENIQIVREYIDRATSGTSTQHREQFQQMISDSKTGGWEYVLVYKLDRFARNRYDSAVYKRELKRNGVTVLSATERITDSPEGVLIEGLLESMDEYFSRELSRKAKRGMRESILKGHCITRLPYGYKRTGKTCAIDEDAADVIRWIFREYSSGKTIQEIVDTLNIRGFRTMTGKRFKRPTVSVILRNDKYTGTHYVSDFEEPERYPQIISQTMWDSVQSRLRESANRYRKHDDGFVYALTGKINCGYCGYAVNGITSNHKYHYYRCVSGKYNKHICDGCSVRADVVETAVVDALQEYFTAERVEEMGTHLYDLYRKSAPTERDDKRRLAEVDMQITGAVNALIACPESEALQNRLRDLEEQKREIEQSHVKHQYLEKSHFVEFFRNIVSALEHIDVRTRLFSTLIESVSLYRDHVVIIINLMDDSTDPPTPISLEKYFSSSVANGSALLCWSNNA

SEQ ID NO: 6659 - protein, 487 aa, Unknown
  Description of Unknown: Integrase B6660 sequence
  IPR036162,PS51737,IPR011109,PTHR30461,PS00397, PF00239,G3DSA:1.10.10.2600,IPR006119,SSF53041,cd00338, SM00857,IPR025827,IPR038109,PS51736,IPR006118, PF13408,G3DSA:3.40.50.1390,PF07508,Coil
MTLKNACAYIRVSTDKQEELSPDAQKRLIIDYCKKNGYTITNENIFIENGISGKKADKRPEFKRMIAIAKSKEHPFDVILVWKFSRFARNQEESIVYKSMLKKANVDVVSVSEPVIDGPFGSLIERIIEWMDEYYSIRLSGEVIRGMTEKALKGGYNAQPPLGYRKNSDTSIPEIYEPEAVIVRNIFSFISQGLSLIDTARSINNMGFHTRRGGMFEQRTIRYIIENPFYYGYVRWNRQNPSEHTIKDKSEWIIAPGAHPVLINKESWDFANEQLIKISRPYKERGTSGIKHWLSGIVKCSSCGSSLVSNSLWKGHSTSFQCSGYNKCKCKVSHYIKTERLEAGIYEGFLKVLSSKNVTYEKVSEHSYEEKVDTAALLKNIEDKERRIKQAYRDGIDTLEEYKDNKAILQKEREKVMEIISRQQPAVQDENNETMLRQIKNAYEIIKNVALDKLTRANAIRSVVSKAVYDNEKDTLDIYFRLIEKSP

SEQ ID NO: 6660 - protein, 487 aa, Unknown
  Description of Unknown: Integrase B6661 sequence
  PTHR30461:SF3,IPR036162,PS51737,IPR011109,PTHR30461, PS00397,PF00239,G3DSA:1.10.10.2600,IPR006119,SSF53041, cd00338,SM00857,IPR025827,IPR038109,PS51736, IPR006118,PF13408,G3DSA:3.40.50.1390,PF07508,Coil
MKKIAAAYIRVSTHMQEELSPDAQLRCIRDWGNVHGYYIPDEYVFIDNGISGRKAKKRHDFLRMIGLAKTKPASPFEAILLWKFNRFARNQEESIVYKSMLRKKCNVDVISTTQQTTKDIYGDLIERIIEWTDEFYSIQLGEDVFRGMTENALRGNFQSSPAFGYKVEKGQGLVIVEDQANIVRMIFNLYANTMMGFYEIARHLNRLGYKTKKGGAFETRTIRYIIQNPIYKGYLRWNYANGTTRVVNDESEWIIVKSPLVPIIVSEELWDRANERLKNEYRPKNGKPVSKHRHWLSGLVKCSSCGASLSTSVQYRHDRTYINFQCYKYLKGKCLVSHGISEKKLVPFVLNVLKEDMSKSYIECERIEKVVENQQDILDVQLKRLATREARIKEAYLNGIDSLAEYKANKEEIQKEREFLLQQSQDHNKTEKESNELPNKIRGVYDILVSDQCSKDEKQAAIRSIVKKIVFDKENKTLDFHYYIKED

SEQ ID NO: 6661 - protein, 487 aa, Unknown
  Description of Unknown: Integrase B6662 sequence
  PTHR30461:SF3,IPR036162,PS51737,IPR011109,PTHR30461, PS00397,PF00239,G3DSA:1.10.10.2600,IPR006119,SSF53041, cd00338,SM00857,IPR025827,IPR038109,PS51736, IPR006118,PF13408,G3DSA:3.40.50.1390,PF07508,Coil
MKKIAAAYIRVSTHMQEELSPDAQLRCIRVWGDAHGYYVPDEYVFIDNGISGRKAKKRHDFLRMIGLAKTKPASPFEAILLWKFNRFARNQEESIVYKSMLRKKCNVDVISTTQQTTKDIYGDLIERIIEWTDEFYSIQLGEDVFRGMTENALRGNFQASPAFGYKVEKGLGLVIVEDQANIVRMIFNLYANTRMGFYEIARHLNRLGYKTKKGGAFEARAIRYIIQNPIYKGYLRWNYANGTTRVVNDESEWIIVKSPLVPIIVSEELWDRANERLKNEYRPKNGKPVTKHRHWLSGLVKCSSCGASLSTSVQYRHDRTYINFQCYKYLKGKCLVSHGISEKKLVPLVLNVLKEDMSKSYIECERIEKVVENQQDILDVQLKRLATRETRIKEAYLNGIDSLAEYKANKEEIQKEREFLLQQSQDHNKTENESNELPNKIRGVYDILVSDQCSKDEKQAAIRSIVKKIVFDKENKTLDFHYYIKED

SEQ ID NO: 6662 - protein, 487 aa, Unknown
  Description of Unknown: Integrase B6663 sequence
  PTHR30461:SF3,IPR036162,PS51737,IPR011109,PTHR30461, PS00397,PF00239,G3DSA:1.10.10.2600,IPR006119,SSF53041, cd00338,SM00857,IPR025827,IPR038109,PS51736, IPR006118,PF13408,G3DSA:3.40.50.1390,PF07508,Coil
MTTPTTLEIGAAYVRVSTDDQTELSPDAQIRVIMDAAKADGFIIPKEYIFIEKKGISGRKADNRPEFQRMIAFAKSQRPAPFKRLYLWKFSRFARNQEESTFYKGILRKKCGVEIKSVSEPIMEGMFGRLIETIIEWFDEYYSINLSGEVIRGMTEKALREGYQSTPCLGYRAVGEGKPFIVDEKSYAIVEYIFQTYHSGKDMTATARATNSKGYRTRRGNRFDRRGINRILTNRFYIGEVVWNGYTFQGTHEIRTSITSIFDDVQKRLEKEYRPQKRREVSSNAHWLSGMLKCSVCGSSLGYNRSNDQKKRPDFFQCWKYAKGFHEGSCCLSVRLAEKAVIESLEEVLATNELEYEYIRKTNDTVNAEEVAIQEALAHLEVKERRIREAYENEIDTLEEYKQNKLRLKSEREELMADAERLHRQAEQAPDVVPSKEDVMRQVAHVHEIISDSNIDYETKGNALRKIVKDIVFDRKKGHLYIHFYIS

SEQ ID NO: 6663 - protein, 487 aa, Unknown
  Description of Unknown: Integrase B6664 sequence
  PTHR30461:SF3,IPR036162,PS51737,IPR011109,PTHR30461, PS00397,PF00239,G3DSA:1.10.10.2600,IPR006119,SSF53041, cd00338,SM00857,IPR025827,IPR038109,PS51736, IPR006118,PF13408,G3DSA:3.40.50.1390,PF07508,Coil
MKKIAAAYIRVSTHMQEELSPDAQLRCIRDWGNVHGYYIPDEYVFIDNGISGRKAKKRHDFLRMIGLAKTKPASPFEAILLWKFNRFARNQEESIVYKSMLRKKCNVDVISTTQQTTKDIYGDLIERIIEWTDEFYSIQLGEDVFRGMTENALRGNFQASPAFGYKVEKGLGLVIVEDQANIVRMIFNLYANTRMGFYEIARHLNRLGYKTKKGGAFEARAIRYIIQNPIYKGYLRWNYANGTTRVVNDESEWIIVKSPLVPIIVSEELWDRANERLKNEYRPKNGKPVTKHRHWLSGLVKCSSCGASLSTSVQYRHDRTYINFQCYKYLKGKCMVSHGISEKKLVPLVLNVLKEDMSKSYIECERIEKVVENQQDILDVQLKRLATRETRIKEAYLNGIDSLAEYKANKEEIQKEREFLLQQSQGHNKTENESNELPNKIRGVYDILVSDQCSKDEKQAAIRSIVKKIVFDKENKTLDFHYYIKED

SEQ ID NO: 6664 - protein, 487 aa, Unknown
  Description of Unknown: Integrase B6665 sequence
  PTHR30461:SF3,IPR036162,PS51737,IPR011109,PTHR30461, PS00397,PF00239,G3DSA:1.10.10.2600,IPR006119,SSF53041, cd00338,SM00857,IPR025827,IPR038109,PS51736, IPR006118,PF13408,G3DSA:3.40.50.1390,PF07508,Coil
MAKNILNMKIAAGYIRVSTDKQEELSPDAQKRLLIDYAKKNNISLPAENIYIDNGISGKKADKRPEFMKMIGMAKSKEHPFDVILVWKFSRFARNQEESIVYKSLLKKNNVEVVSVSEPLIDGPFGSLIERIIEWMDEYYSIRLSGEVLRGMTEKALRGGYQSSLPLGYKMNKDTGIPYIYEDEAIIVKKIYNDYISGHSYLEIARELNALGYTTKRGAAFEGRTVEYILSNPFYYGAIRWNRQKHDDHTIKDISEWIIVMGKHPAIIDKETWDEVQHLMALRSRPYKSRAAGHMKHWLGGIVKCSDCGASLIAGLNATRYQCGNYNKGKCSHSHFIKTAALEEAVYEAFDRVMQNPDELHYELKKASNEVNTNDRDMILNQISKLSDKEARIKQAYRDGIDTIDEYKENKQIIDNERKALEAQLSLKTSEADSSDEMLQNITSVLGIIKDTSKDTLTRANAIRSVVDHCVYDKENDKLEVYFFLQK

SEQ ID NO: 6665 - protein, 487 aa, Unknown
  Description of Unknown: Integrase B6666 sequence
  PTHR30461:SF3,IPR036162,PS51737,IPR011109,PTHR30461, PS00397,PF00239,G3DSA:1.10.10.2600,IPR006119,SSF53041, cd00338,SM00857,IPR025827,IPR038109,PS51736, IPR006118,PF13408,G3DSA:3.40.50.1390,PF07508,Coil
MKKIAAAYIRVSTHMQEELSPDAQLRCIRDWGNVHGYYIPDEYVFIDNGISGRKAKKRHDFLRMIGLAKTKPASPFEAILLWKFNRFARNQEESIVYKSMLRKKCNVDVISTTQQTTKDIYGDLIERIIEWTDEFYSIQLGEDVFRGMTENALRGNFQASPAFGYKVEKGLGLVIVEDQANIVRMIFNLYANTRMGFYEIARHLNRLGYKTKKGGAFEARAIRYIIQNPIYKGYLRWNYANGTTRVVNDESEWIIVKSPLVPIIVSEELWDRANERLKNEYRPKNGKPVSKHRHWLSGLVKCSSCGASLSTSVQYRHDRTYINFQCYKYLKGKCLVSHGISEKKLVPLVLNVLKEDMSKSYIECERIEKVVENQQDILDVQLKRLATREARIKEAYLNGIDSLAEYKANKEEIQKEREFLLQQSQDHNKTEKESNELPNKIRGVYDILVSDQCSKDEKQAAIRSIVKKIVFDKENKTLDFHYYIKED

SEQ ID NO: 6666 - protein, 487 aa, Unknown
  Description of Unknown: Integrase B6667 sequence
  PTHR30461:SF3,IPR036162,PS51737,IPR011109,PTHR30461, PS00397,PF00239,G3DSA:1.10.10.2600,IPR006119,SSF53041, cd00338,SM00857,IPR025827,IPR038109,PS51736, IPR006118,PF13408,G3DSA:3.40.50.1390,PF07508,Coil
MKKIAAAYIRVSTHMQEELSPDAQLRCIRVWGDAHGYYVPDEYVFIDNGISGRKAKKRHDFLRMIGLAKTKPASPFEAILLWKFNRFARNQEESIVYKSMLRKKCNVDVISTTQQTTKDIYGDLIERIIEWTDEFYSIQLGEDVFRGMTENALRGNFQASPAFGYKVEKGLGLVIVEDQANIVRMIFNLYANTRMGFYEIARHLNRLGYKTKKGGAFEARAIRYIIQNPIYKGYLRWNYANGTTRVVNDESEWIIVKSPLVPIIVSEELWDRANERLKNEYRPKNGKPVTKHRHWLSGLVKCSSCGASLSTSVQYRHDRTYINFQCYKYLKGKCLVSHGISEKKLVPLVLNVLKEDMSKSYIECERIEKVVENQQDILDVQLKRLATREARIKEAYLNGIDSLAEYKANKEEIQKEREFLLQQSQDHNKTEKESNELPNKIRGVYDILVSDQCSKDEKQAAIRSIVKKIVFDKENKTLDFHYYIKED

SEQ ID NO: 6667 - protein, 487 aa, Unknown
  Description of Unknown: Integrase B6668 sequence
  PTHR30461:SF3,IPR036162,PS51737,IPR011109,PTHR30461, PS00397,PF00239,G3DSA:1.10.10.2600,IPR006119,SSF53041, cd00338,SM00857,IPR025827,IPR038109,PS51736, IPR006118,PF13408,G3DSA:3.40.50.1390,PF07508,Coil
MKKIAAAYIRVSTHMQEELSPDAQLRCIRDWGNVHGYYIPDEYVFIDNGISGRKAKKRHDFLRMIGLAKTKPASPFEAILLWKFNRFARNQEESIVYKSMLRKKCNVDVISTTQQTTKDIYGDLIERIIEWTDEFYSIQLGEDVFRGMTENALRGNFQSSPAFGYKVEKGQGLVIVEDQANIVRMIFNLYANTMMGFYEIARHLNRLGYKTKKGGAFETRTIRYIIQNPIYKGYLRWNYANGTTRVVNDESEWIIVKSPLVPIIVSEELWDLANERLKNEYRPKNGKPVSKHRHWLSGLVKCSSCGASLSTSVQYRHDRTYINFQCYKYLKGKCLVSHGISEKKLVPLVLNVLKEDMSKSYIECERIEKVVENQQDILDVQLKRLATREARIKEAYLNGIDSLAEYKANKEEIQKEREFLLQQSQDHNKTEKESNELPNKIRGVYDILVSDQCSKDEKQAAIRSIVKKIVFDKENKTLDFHYYIKED

SEQ ID NO: 6668 - protein, 487 aa, Unknown
  Description of Unknown: Integrase B6669 sequence
  PTHR30461:SF3,IPR036162,PS51737,IPR011109,PTHR30461, PS00397,PF00239,G3DSA:1.10.10.2600,IPR006119,SSF53041, cd00338,SM00857,IPR025827,IPR038109,PS51736, IPR006118,PF13408,G3DSA:3.40.50.1390,PF07508,Coil
MTTPTTLEIGAAYVRVSTDDQTELSPDAQIRVILDAAKADGFIIPKEYIFIEKKGISGRKADNRPEFQRMIAFAKSQRPAPFKRLYLWKFSRFARNQEESTFYKGILRKKCGVEIKSVSEPIMEGMFGRLIETIIEWFDEYYSINLSGEVIRGMTEKALREGYQSTPCLGYRAVGEGKPFIVDEKSYAIVEYIFQTYHSGKDMTATARATNSKGYRTRRGNRFDRRGINRILTNRFYIGEVVWNGYTFQGTHEIRTSITSIFDDVQKRLEKEYRPQKRREVSSNAHWLSGMLKCSVCGSSLGYNRSNDQKKRPDFFQCWKYAKGFHEGSCCLSVRLAEKAVIESLEEVLATNELEYEYIRKTNDTVNAEEVAIQEALAHLEVKERRIREAYENEIDTLEEYKQNKLRLKSEREELMADAERLHRQAEQAPDVVPSKEDVMRQVAHVHEIISDSNIDYETKGNALRKIVKDIVFDRKKGHLYIHFYVS

SEQ ID NO: 6669 - protein, 487 aa, Unknown
  Description of Unknown: Integrase B6670 sequence
  PTHR30461:SF3,IPR036162,PS51737,IPR011109,PTHR30461, PS00397,PF00239,G3DSA:1.10.10.2600,IPR006119,SSF53041, cd00338,SM00857,IPR025827,IPR038109,PS51736, IPR006118,PF13408,G3DSA:3.40.50.1390,PF07508,Coil
MKKIAAAYIRVSTHMQEELSPDAQLRCIRDWGNVHGYYIPDEYVFIDNGISGRKAKKRHDFLRMIGLAKTKPASPFEAILLWKFNRFARNQEESIVYKSMLRKKCNVDVISTTQQTTKDIYGDLIERIIEWTDEFYSIQLGEDVFRGMTENALRGNFQASPAFGYKVEKGLGLVIVEDQANIVRMIFNLYANTRMGFYEIARHLNRLGYKTKKGGAFEARAIRYIIQNPIYKGYLRWNYANGTTHVVNDESEWIIVKSPLVPIIVSEELWDRANERLKNEYRPKNGKPVTKHRHWLSGLVKCSSCGASLSTSVQYRHDRTYINFQCYKYLKGKCMVSHGISEKKLVPLVLNVLKEDMSKSYIECERIEKVVENQQDILDVQLKRLATRETRIKEAYLNGIDSLAEYKANKEEIQKEREFLLQQSQGHNKTENESNELPNKIRGVYDILVSDQCSKDEKQAAIRSIVKKIVFDKENKTLDFHYYIKED

SEQ ID NO: 6670 - protein, 487 aa, Unknown
  Description of Unknown: Integrase B6671 sequence
  PTHR30461:SF3,cd00338,SM00857,IPR006118,G3DSA:1.10.10.2600, IPR036162,PS51737,G3DSA:3.40.50.1390,IPR006119,IPR038109, PF07508,IPR011109,SSF53041,PTHR30461,PS00397, PS51736,Coil,PF00239
MSRKGDFYFKKTGDYMKIAAAYVRVSTEDQTELSPTSQIKQIREYAKNHGYIVPDEFVFADEGISGKNTQKRPAFNRMIGLAKTKPKPFECILLWKYSRFARNREDSIVYKSMLRKQLGIDVISISENLGDDKMSILIEALIEAMDEYYSINLAEEVKRGMTERVSRGEAVSVPAYGYDIEEGKYIINEAEAEVVRQIFSDFNNGVGTVTIARNLNAIGIKTKRGKLWENRTVKYILHNPVYIGKIRWNPEEITGLNYDHEKIMLVDGIHEPLLTKDLWDSVQEKLSLMKKTRKPRERSNPTPDYMLYGLMRCGSCGGTLTQSRDGLQCHKYAHGTCDTSHYISLSKANTAVIDLIQHTLENGIFTLTPKKQDVSAQQVAMIDKQIQNEKNKLLRVKEAFEYGVDTLEEYKENKNKILQKISELESSKPVQQTNIDKKKFAQKYLGVMDTLKDDTVSEADKNHILRQFVEKIVLHRPSNEIEIFYHY

SEQ ID NO: 6671 - protein, 487 aa, Unknown
  Description of Unknown: Integrase B6672 sequence
  PTHR30461:SF3,IPR036162,PS51737,IPR011109,PTHR30461, PS00397,PF00239,G3DSA:1.10.10.2600,IPR006119,SSF53041, cd00338,SM00857,IPR025827,IPR038109,PS51736, IPR006118,PF13408,G3DSA:3.40.50.1390,PF07508,Coil
MKKIAAAYIRVSTHMQEELSPDAQLRCIRDWGNVHGYYIPDEYVFIDNGISGRKAKKRHDFLRMIGLAKTKPASPFEAILLWKFNRFARNQEESIVYKSMLRKKCNVDVISTTQQTTKDIYGDLIERIIEWTDEFYSIQLGEDVFRGMTENALRGNFQASPAFGYKVEKGLGLVIVEDQANIVRMIFNLYANTRMGFYEIARHLNRLGYKTKKGGAFEARAIRYIIQNPIYKGYLRWNYANGTTHVVNDESEWIIVKSPLVPIIVSEELWDRANERLKNEYRPKNGKPVTKHRHWLSGLVKCSSCGASLSTSVQYRHDRTYINFQCYKYLKGKCIVSHGISEKKLVPLVLNVLKEDMSKSYIECERIEKVVENQQDILDVQLKRLATRETRIKEAYLNGIDSLAEYKANKEDIQKEREFLLQQSQNHSDEENKSSDLPGKIRGVYDILISDQCSKDEKQAAIRSIVKKIVFDKENKTLDFYYYIKED

SEQ ID NO: 6672 - protein, 487 aa, Unknown
  Description of Unknown: Integrase B6673 sequence
  PTHR30461:SF3,IPR036162,PS51737,IPR011109,PTHR30461, PS00397,PF00239,G3DSA:1.10.10.2600,IPR006119,SSF53041, cd00338,SM00857,IPR025827,IPR038109,PS51736, IPR006118,PF13408,G3DSA:3.40.50.1390,PF07508,Coil
MKKIAAAYIRVSTHMQEELSPDAQLRCIRDWGNVHGYYIPDEYVFIDNGISGRKAKKRHDFLRMIGLAKTKPASPFEAILLWKFNRFARNQEESIVYKSMLRKKCNVDVISTTQQTTKDIYGDLIERIIEWTDEFYSIQLGEDVFRGMTENALRGNFQASPAFGYKVEKGLGLVIVEDQANIVRMIFNLYANTRMGFYEIARHLNRLGYKTKKGGAFEARAIRYIIQNPIYKGYLRWNYANGTTRVVNDESEWIIVKSPLVPIIVSEELWDRANERLKNEYRPKNGKPVTKHRHWLSGLVKCSSCGASLSTSVQYRHDRTYINFQCYKYLKGKCLVSHGISEKKLVPLVLNVLKEDMSKSYIECERIEKVVENQQDILDVQLKRLATRETRIKEAYLNGIDSLAEYKANKEEIQKEREFLLQQSQDHNKTENESNELPNKIRGVYDILVSDQCSKDEKQAAIRSIVKKIVFDKENKTLDFHYYIKED

SEQ ID NO: 6673 - protein, 487 aa, Unknown
  Description of Unknown: Integrase B6674 sequence
  PTHR30461:SF3,IPR036162,PS51737,IPR011109,PTHR30461, PS00397,PF00239,G3DSA:1.10.10.2600,IPR006119,SSF53041, cd00338,SM00857,IPR025827,IPR038109,PS51736, IPR006118,PF13408,G3DSA:3.40.50.1390,PF07508,Coil
MNAALYIRVSTDDQLEFSPDAQKRAMIEYAKRNDMLVSDEHIYIDEGISGKRAKNRPAFQRMIATAKSKQRPFDVILVHKFDRFARSREDSVVYKSLLKRECNVKVVSITEQLEDDKFSVILEAMLEAMAEYYSLNLSDEVMKGMTEKARRGQLQYASPFGYNIKNGNVTIIEHEANIVKLIFDKFVNEKMTYVEICHYLNEHGLRNRKGNMFQTRFMKYVLENPIYCGMVRWNYSTQKGGTRRLKKESEWIITNGNHEAIVDKEIFNKAQKQISHIKSLYSTPNIDRNQYGHWLGGLLRCSTCGGTLTISNAKLKFGGYYVCNRNRKGSCPTANRVRIDIIQEEIINALKHDLYMLEKVPGTPISIESKKINDSEITLLEAQLEKVKRKYAIAKNAYLAEIDSLEEYKANKNAIQEEENNLLDKLNKISKPQKDNSKYIKKKIKESLNLIDDSETELKVKNEMLKSFIKEIVVNKEADTIDIHYFS

SEQ ID NO: 6674 - protein, 487 aa, Unknown
  Description of Unknown: Integrase B6675 sequence
  PTHR30461:SF3,IPR036162,PS51737,IPR011109,PTHR30461, PS00397,PF00239,G3DSA:1.10.10.2600,IPR006119,SSF53041, cd00338,SM00857,IPR025827,IPR038109,PS51736, IPR006118,PF13408,G3DSA:3.40.50.1390,PF07508,Coil
MKKIAAAYIRVSTHMQEELSPDAQLRCIRDWGNVHGYYIPDEYVFIDNGISGRKAKKRHDFLRMIGLAKTKPASPFEAILLWKFNRFARNQEESIVYKSMLRKKCNVDVISTTQQTTKDIYGDLIERIIEWTDEFYSIQLGEDVFRGMTENALRGNFQASPAFGYKVEKGLGLVIVEDQANIVRMIFNLYANTRMGFYEIARHLNRLGYKTKKGGAFEARAIRYIIQNPIYKGYLRWNYANGTTRVVNDESEWIIVKSPLVPIIVSEELWDRANERLKNEYRPKNGKPVTKHRHWLSGLVKCSSCGASLSTSVQCRHDRTYINFQCYKYLKGKCMVSHGISEKKLVPLVLNVLKEDMSKSYIECERIEKVVENQQDILDVQLKRLATRETRIKEAYLNGIDSLAEYKANKEEIQKEREFLLQQSQDHNKTENESNELPNKIRGVYDILVSDQCSKDEKQAAIRSIVKKIVFDKENKTLDFHYYIKED

SEQ ID NO: 6675 - protein, 487 aa, Unknown
  Description of Unknown: Integrase B6676 sequence
  PTHR30461:SF3,IPR036162,PS51737,IPR011109,PTHR30461, PS00397,PF00239,G3DSA:1.10.10.2600,IPR006119,SSF53041, cd00338,SM00857,IPR025827,IPR038109,PS51736, IPR006118,PF13408,G3DSA:3.40.50.1390,PF07508,Coil
MKKIAAAYIRVSTHMQEELSPDAQLRCIRDWGNVHGYYIPDEYVFIDNGISGRKAKKRHDFLRMIGLAKTKPASPFEAILLWKFNRFARNQEESIVYKSMLRKKCNVDVISTTQQTTKDIYGDLIERIIEWTDEFYSIQLGEDVFRGMTENALRGNFQASPAFGYKVEKGLGLVIVEDQANIVRMIFNLYANTRMGFYEIARHLNRLGYKTKKGGAFEARAIRYIIQNPIYKGYLRWNYANGTTHVVNDESEWIIVKSPLVPIIVSEELWDRANERLKNEYRPKNGKPVTKHRHWLSGLVKCSSCGASLSTSVQYRHDRTYINFQCYKYLKGKCMVSHGISEKKLVPLILNVLKEDMNKSYIECERIEKVVENQQDILDVQLKRLDAREVRIKEAYLNGVDSLAEYKSNKEQIQQERELLLQQSQNHDKEEKGSNELPNKIRGVYDILVSDQCSKDEKQTAIRSIVKKIVFDKENKTLDFYYYIKED

SEQ ID NO: 6676 - protein, 487 aa, Unknown
  Description of Unknown: Integrase B6677 sequence
  IPR036162,PS51737,IPR011109,PTHR30461,PS00397, PF00239,G3DSA:1.10.10.2600,IPR006119,SSF53041,cd00338, SM00857,IPR025827,IPR038109,PS51736,IPR006118, PF13408,G3DSA:3.40.50.1390,PF07508,Coil
MTLKNACAYIRVSTDKQEELSPDAQKRLIIDYCKKNGYTITNENIFIENGISGKKADKRPEFKRMIALAKSKEHPFDVILVWKFSRFARNQEESIVYKSMLKKANVDVVSVSEPVIDGPFGSLIERIIEWMDEYYSIRLSGEVIRGMTEKALRGGYNAQPPLGYRKNSDTGVPEIYEPEAVIVRNIFSFISQGLSLIDTARSINNMGFHTRRGGMFEQRTIRYIIENPFYYGYVRWNRQNPSEHTIKDKSEWIIAPGAHPVLINKESWDFANEQLIKISRPYKERGTSGIKHWLSGIVKCSSCGSSLVSNSLWKGHSTSFQCSGYNKCKCKVSHYIKTERLEAGIYEGFLKVLSSKNVTYEKVSEHSYEEKVDTAALLKNIEDKERRIKQAYRDGIDTLEEYKDNKAILQKEREKVMEIISKQKPVQHDEDNEIMLSQIKNAYEIIKNEDLDKLTRANAIRSVVSKAVYDNEKDTLDIYFRLIEKSL

SEQ ID NO: 6677 - protein, 487 aa, Unknown
  Description of Unknown: Integrase B6678 sequence
  PTHR30461:SF3,IPR036162,PS51737,IPR011109,PTHR30461, PS00397,PF00239,G3DSA:1.10.10.2600,IPR006119,SSF53041, cd00338,SM00857,IPR025827,IPR038109,PS51736, IPR006118,PF13408,G3DSA:3.40.50.1390,PF07508,Coil
MKKIAAAYIRVSTHMQEELSPDAQLRCIRDWGNVHGYYIPDEYVFIDNGISGRKAKKRHDFLRMIGLAKTKPASPFEAILLWKFNRFARNQEESIVYKSMLRKKCNVDVISTTQQTTKDIYGDLIERIIEWTDEFYSIQLGEDVFRGMTENALRGNFQSSPAFGYKVEKGQGLVIVEDQANIVRMIFNLYANTRMGFYEIARHLNRLGYKTKKGGAFEARAIRYIIQNPIYKGYLRWNYANGTTRVVNDESEWIIVKSPLVPIIVSEELWDRANERLKNEYRPKNGKPVTKHRHWLSGLVKCSSCGASLSTSVQYRHDRTYINFQCYKYLKGKCMVSHGISEKKLVPLVLNVLKEDMSKSYIECERIEKVVENQQDILDVQLKRLATRETRIKEAYLNGIDSLAEYKANKEEIQKEREFLLQQSQDHNKTENESNELPNKIRGVYDILVSDQCSKDEKQAAIRSIVKKIVFDKENKTLDFHYYIKED

SEQ ID NO: 6678 - protein, 487 aa, Unknown
  Description of Unknown: Integrase B6679 sequence
  PTHR30461:SF3,IPR036162,PS51737,IPR011109,PTHR30461, PS00397,PF00239,G3DSA:1.10.10.2600,IPR006119,SSF53041, cd00338,SM00857,IPR025827,IPR038109,PS51736, IPR006118,PF13408,G3DSA:3.40.50.1390,PF07508,Coil
MKKIAAAYIRVSTHMQEELSPDAQLRCIRAWGDAHNYYVPDEFVFIDKGISGRKAKKRHDFLRMIGLAKTKPAAPFEAILLWKFNRFARNQEESIVYKSMLRKKCNVDVISTTQQTTNDIYGDLIERIIEWTDEFYSIQLGEDVFRGMTENALRGNFQSSPAFGYKVEKGLGLVIVEDQANIVRMIFNLYVNTRMGFYEIARHLNRLGYKTKKGGAFEARAIRYIIQNPIYKGYLRWNYANGTTRVVNDESEWIIVKSPLVPIIVSEELWDRANERLKNEYRPRNGKPVSRHRHWLSGLVKCSSCGASLSTSVQYRRDRTYINFQCYKYLKGKCMVSHGISEKKLVPLILNALKEDMNKSYIECERIEKTTENQQDILNVQLKRLDTRESRSKEAYLNGIDSLAEYKANKEDIRKEREFLLQQSQDHSDQENKSSDLPGKIRGVYDILVSDQCSKDEKQAAIRSIVKKIVFDKENKTLDFYYYIKED

SEQ ID NO: 6679 - protein, 487 aa, Unknown
  Description of Unknown: Integrase B6680 sequence
  PTHR30461:SF3,IPR036162,PS51737,IPR011109,PTHR30461, PS00397,PF00239,G3DSA:1.10.10.2600,IPR006119,SSF53041, cd00338,SM00857,IPR025827,IPR038109,PS51736, IPR006118,PF13408,G3DSA:3.40.50.1390,PF07508,Coil
MKKIAAAYIRVSTHMQEELSPDAQLRCIRDWGNVHGYYIPDEYVFIDNGISGRKAKKRHDFLRMIGLAKTKPASPFEAILLWKFNRFARNQEESIVYKSMLRKKCNVDVISTTQQTTKDIYGDLIERIIEWTDEFYSIQLGEDVFRGMTENALRGNFQASPAFGYKVEKGLGLVIVEDQANIVRMIFNLYANTRMGFYEIARHLNRLGYKTKKGGAFEARAIRYIIQNPIYKGYLRWNYANGTTRVVNDESEWIIVKSPLVPIIVSEELWDRANERLKNEYRPKNGKPVTKHRHWLSGLVKCSSCGASLSTSVQYRHDRTYINFQCYKYLKGKCMVSHGISEKKLVPLVLNVLKEDMSKSYIECERIEKVVENQQDILDVQLKRLATRETRIKEAYLNGIDSLAEYKANKEEIQKEREFLLQQSQDHNKTENESNELPNKIRGVYDILVSDQCSKDEKQAAIRSIVKKIVFDKENKTLDFHYYIKED

SEQ ID NO: 6680 - protein, 487 aa, Unknown
  Description of Unknown: Integrase B6681 sequence
  PTHR30461:SF3,IPR036162,PS51737,IPR011109,PTHR30461, PS00397,PF00239,G3DSA:1.10.10.2600,IPR006119,SSF53041, cd00338,SM00857,IPR025827,IPR038109,PS51736, IPR006118,PF13408,G3DSA:3.40.50.1390,PF07508,Coil
MKKIAAAYIRVSTHMQEELSPDAQLRCIRDWGNVHGYYIPDEYVFIDNGISGRKAKKRHDFLRMIGLAKTKPASPFEAILLWKFNRFARNQEESIVYKSMLRKKCNVDVISTTQQTTKDIYGDLIERIIEWTDEFYSIQLGEDVFRGMTENALRGNFQSSPAFGYKVEKGQGLVIVEDQANTVRMIFNLYANTMMGFYEIARHLNRLGYKTKKGGAFETRTIRYIIQNPIYKGYLRWNYANGTTRVVNDESEWIIVKSPLVPIIVSEELWDRANERLKNEYRPKNGKPVSKHRHWLSGLVKCSSCGASLSTSVQYRHDRTYINFQCYKYLKGKCLVSHGISEKKLVPLVLNVLKEDMSKSYIECERIEKVVENQQDILDVQLKRLATREARIKEAYLNGIDSLAEYKANKEEIQKEREFLLQQSQDHNKTEKESNELPNKIRGVYDILVSDQCSKDEKQAAIRSIVKKIVFDKENKTLDFHYYIKED

SEQ ID NO: 6681 - protein, 487 aa, Unknown
  Description of Unknown: Integrase B6682 sequence
  PTHR30461:SF3,IPR036162,PS51737,IPR011109,PTHR30461, PS00397,PF00239,G3DSA:1.10.10.2600,IPR006119,SSF53041, cd00338,SM00857,IPR025827,IPR038109,PS51736, IPR006118,PF13408,G3DSA:3.40.50.1390,PF07508,Coil
MKKIAAAYIRVSTHMQEELSPDAQLRCIRAWGDAHNYYVPDEFVFIDKGISGRKAKKRHDFLRMIGLAKTKPAAPFEAILLWKFNRFARNQEESIVYKSMLRKKCNVDVISTTQQTTNDIYGDLIERIIEWTDEFYSIQLGEDVFRGMTENALRGNFQASPAFGYKVEKGLGLVIVEDQANIVRMIFNLYANTRMGFYEIARHLNRLGYKTKKGGAFEARAVRYIIQNPIYKGYLRWNYANGTTRVVNDESEWIIVKSPLVPVIVSEELWDRANERLKSEYRPKNGKPVSKHRHWLSGLVKCSSCGASLSTSVQYRRDRTYINFQCYKYLKGKCMVSHGISEKKLVPLILNVLKEDMNKSYIECERIEKVVENQQDILNVQLKRLDARESRSKEAYLNGIDSLAEYKANKEDIQKEREFLLQQSQNHSDEENKSSDLPGKIRGVYDILVSDQCSKDEKQAAIRSIVKKIVFDKENKTLDFYYYVKED

SEQ ID NO: 6682 - protein, 487 aa, Unknown
  Description of Unknown: Integrase B6683 sequence
  PTHR30461:SF3,IPR036162,PS51737,IPR011109,PTHR30461, PS00397,PF00239,G3DSA:1.10.10.2600,IPR006119,SSF53041, cd00338,SM00857,IPR025827,IPR038109,PS51736, IPR006118,PF13408,G3DSA:3.40.50.1390,PF07508,Coil
MKKIAAAYIRVSTHMQEELSPDAQLRCIRDWGNVHGYYIPDEYIFIDNGISGRKAKKRHDFLRMIGLAKTKPASPFEAILLWKFNRFARNQEESIVYKSMLRKKCNVDVISTTQQTTKDIYGDLIERIIEWTDEFYSIQLGEDVFRGMTENALRGNFQASPAFGYKVEKGLGLVIVEDQANIVRMIFNLYANTRMGFYEIARHLNRLGYKTKKGGAFEARAIRYIIQNPIYKGYLRWNYANGTTHVVNDESEWIIVKSPLVPIIVSEELWDRANERLKNEYRPKNGKPVTKHRHWLSGLVKCSSCGASLSTSVQYRHDRTYINFQCYKYLKGKCMVSHGISEKKLVPLILNVLKEDMNKSYIECERIEKVVENQQDILDVQLKRLDAREVRIKEAYLNGVDSLAEYKSNKEQIQQERELLLQQSQNHDKEEKGSNELPNKIRGVYDILVSDQCSKDEKQTAIRSIVKKIVFDKENKTLDFYYYIKED

SEQ ID NO: 6683 - protein, 487 aa, Unknown
  Description of Unknown: Integrase B6684 sequence
  PTHR30461:SF3,IPR036162,PS51737,IPR011109,PTHR30461, PS00397,PF00239,G3DSA:1.10.10.2600,IPR006119,SSF53041, cd00338,SM00857,IPR025827,IPR038109,PS51736, IPR006118,PF13408,G3DSA:3.40.50.1390,PF07508,Coil
MKKIAAAYIRVSTHMQEELSPDAQLRCIRDWGNVHGYYIPDEYVFIDNGISGRKAKKRHDFLRMIGLAKTKPASPFEAILLWKFNRFARNQEESIVYKSMLRKKCNVDVISTTQQTTKDIYGDLIERIIEWTDEFYSIQLGEDVFRGMTENALRGNFQASPAFGYKVEKGLGLVIVEDQANIVRMIFNLYANTRMGFYEIARHLNRLGYKTKKGGAFEARTIRYIIQNPIYKGYLRWNYANGTTRVVNDESEWIIVKSPLVPIIVSEELWDRANERLKNEYRPKNGKPVTKHRHWLSGLVKCSSCGASLSTSVQYRHDRTYINFQCYKYLKGKCIVSHGISEKKLVPLVLNVLKEDMSKSYIECERIEKVVENQQDILDVQLKRLATRETRIKEAYLNGIDSLAEYKANKEEIQKEREFLLQQSQDHNKTENESNELPNKIRGVYDILVSDQCSKDEKQAAIRSIVKKIVFDKENKTLDFHYYIKED

SEQ ID NO: 6684 - protein, 487 aa, Unknown
  Description of Unknown: Integrase B6685 sequence
  PTHR30461:SF3,IPR036162,PS51737,IPR011109,PTHR30461, PS00397,PF00239,G3DSA:1.10.10.2600,IPR006119,SSF53041, cd00338,SM00857,IPR025827,IPR038109,PS51736, IPR006118,PF13408,G3DSA:3.40.50.1390,PF07508,Coil
MTLKNACAYIRVSTDKQEELSPDAQKRLIIDYCKKNGYTITNENIFIENGISGKKADKRPEFKRMIALAKSKEHPFDVILVWKFSRFARNQEESIVYKSMLKKANVDVVSVSEPVIDGPFGSLIERIIEWMDEYYSIRLSGEVIRGMTEKALRGGYNAQPPLGYRKNSDTGVPEIYEPEAVIVRNIFSFISQGLSLIDTARSINNMGFHTRRGGMFEQRTIRYIIENPFYYGYVRWNRQNPSEHTIKDKSEWIIAPGAHPVLINKESWDFANEQLIKISRPYKERGTSGIKHWLSGIVKCSSCGSSLVSNSLWKGHSTSFQCSGYNKCKCKVSHYIKTERLEAGIYEGFLKVLSSKNVTYEKVSEHSYEEKVDTAALLKNIEDKERRIKQAYRDGIDTLEEYKDNKAILQKEREKVMEIISRQQPTVQDEDNETMLRQIKNAYEIIKNEDLDKLTRANAIRSVVSKAVYDNEKDTLDIYFRLIEKSL

SEQ ID NO: 6685 - protein, 487 aa, Unknown
  Description of Unknown: Integrase B6686 sequence
  PTHR30461:SF3,IPR036162,PS51737,IPR011109,PTHR30461, PS00397,PF00239,G3DSA:1.10.10.2600,IPR006119,SSF53041, cd00338,SM00857,IPR025827,IPR038109,PS51736, IPR006118,PF13408,G3DSA:3.40.50.1390,PF07508,Coil
MKKIAAAYIRVSTHMQEELSPDAQLRCIRVWGDAHGYYVPDEYVFIDNGISGRKAKKRHDFLRMIGLAKTKPASPFEAILLWKFNRFARNQEESIVYKSMLRKKCNVDVISTTQQTTKDIYGDLIERIIEWTDEFYSIQLGEDVFRGMTENALRGNFQASPAFGYKVEKGLGLVIVEDQANIVRMIFNLYANTRMGFYEIARHLNRLGYKTKKGGAFEARAIRYIIQNPIYKGYLRWNYANGTTRVVNDESEWIIVKSPLVPIIVSEELWDRANERLKNEYRPKNGKPVTKHRHWLSGLVKCSSCGASLSTSVQYRHDRTYINFQCYKYLKGKCMVSHGISEKKLVPLVLNVLKEDMSKSYIECERIEKVVENQQDILDVQLKRLATRETRIKEAYLNGIDSLAEYKANKEEIQKEREFLLQQSQGHNKTENESNELPNKIRGVYDILVSDQCSKDEKQAAIRSIVKKIVFDKENKTLDFHYYIKED

SEQ ID NO: 6686 - protein, 487 aa, Unknown
  Description of Unknown: Integrase B6687 sequence
  PTHR30461:SF3,SM00857,IPR006118,G3DSA:1.10.10.2600,IPR036162, PF13408,IPR025827,G3DSA:3.40.50.1390,Coil,IPR006119, IPR038109,PF07508,IPR011109,SSF53041,PTHR30461, PS00397,cd00338,PF00239
MKKETEYLQIGAAYIRVSTDDQTELSPDAQLRVIRASAKEDGFFIPDEFVFIEKRGVSGRRADNREEFQRMIATAKSQTPAPFRRLYLWKFSRFARNQEESTFYKGILRKKCSVDIKSVSEPIAEGMFGRLIETIIEWFDEYYSFNLSGEVLRGMTEKALREGYQSTPCLGYQAVGGGRPFIINESEYTVAEYIHQSYHSGADMRAIARSANDRGYRTKRGNLFDKRAIEGILKNKFYVGIVTWNGFTFQGPHECRTSITAIFEDNQIRMQREYKPLNRRETSSCLHWASGLLKCGYCGASLGYNKSKNTGRNPSFFQCWKYAKGIHGESCSITVSKAEKSILKSLDMAVNDPHIKYEYIRQSVPDSDASISKLESALSRLAVKESRIRDAYENGIDTLEEYRDNRGRIKKEREELNAQLRELKDGPARNVEDDRKALQSRIQNTIDLLKNPEVCYEVKGNALRGIVKKIVYDKEHGKLKCYYYISI

SEQ ID NO: 6687 - protein, 487 aa, Unknown
  Description of Unknown: Integrase B6688 sequence
  PTHR30461:SF3,IPR036162,PS51737,IPR011109,PTHR30461, PS00397,PF00239,G3DSA:1.10.10.2600,IPR006119,SSF53041, cd00338,SM00857,IPR025827,IPR038109,PS51736, IPR006118,PF13408,G3DSA:3.40.50.1390,PF07508,Coil
MKKIAAAYIRVSTHMQEELSPDAQLRCIRDWGNVHGYYIPDEYVFIDNGISGRKAKKRHDFLRMIGLAKTKPASPFEAILLWKFNRFARNQEESIVYKSMLRKKCNVDVISTTQQTTKDIYGDLIERIIEWTDEFYSIQLGEDVFRGMTENALRGNFQASPAFGYKVEKGQGLVIVEDQANIVRMIFNLYANTMMGFYEIARHLNRLGYKTKKGGAFETRTIRYIIQNPIYKGYLRWNYANGTTRVVNDESEWIIVKSQLVPIIVSEELWDRANERLKNEYRPKNGKPVSKHRHWLSGLVKCSSCGASLSTSVQYRHDRTYINFQCYKYLKGKCLVSHGISEKKLVPLVLNVLKEDMSKSYIECERIEKVVENQQDILDVQLKRLATREARIKEAYLNGIDSLAEYKANKEEIQKEREFLLQQSQDHNKTENESNELPNKIRGVYDILVSDQCSKDEKQAAIRSIVKKIVFDKENKTLDFHYYIKED

SEQ ID NO: 6688 - protein, 487 aa, Unknown
  Description of Unknown: Integrase B6689 sequence
  PTHR30461:SF3,IPR036162,PS51737,IPR011109,PTHR30461, PS00397,PF00239,G3DSA:1.10.10.2600,IPR006119,SSF53041, cd00338,SM00857,IPR025827,IPR038109,PS51736, IPR006118,PF13408,G3DSA:3.40.50.1390,PF07508,Coil
MKKIAAAYIRVSTHMQEELSPDAQLRCIRDWGNVHGYYIPDEYIFIDNGISGRKAKKRHDFLRMIGLAKTKPASPFEAILLWKFNRFARNQEESIVYKSMLRKKCNVDVISTTQQTTKDIYGDLIERIIEWTDEFYSIQLGEDVFRGMTENALRGNFQASPAFGYKVEKGLGLVIVEDQANIVRMIFNLYANTRMGFYEIARHLNRLGYKTKKGGAFEARAIRYIIQNPIYKGYLRWNYANGTTHVVNDESEWIIVKSPLVPIIVSEELWDRANERLKNEYRPKNGKPVTKHRHWLSGLVKCSSCGASLSTSVQYRHDRTYINFQCYKYLKGKCIVSHGISEKKLVPLVLNVLKEDMSKSYIECERIEKVVENQQDILDVQLKRLATRETRIKEAYLNGIDSLAEYKANKEDIQKEREFLLQQSQNHSDEENKSSDLPGKIRGVYDILISDQCSKDEKQAAIRSIVKKIVFDKENKTLDFYYYIKED

SEQ ID NO: 6689 - protein, 487 aa, Unknown
  Description of Unknown: Integrase B6690 sequence
  PTHR30461:SF3,SM00857,IPR006118,G3DSA:1.10.10.2600,IPR036162, PS51737,G3DSA:3.40.50.1390,IPR006119,IPR038109,PF07508, SSF53041,IPR011109,PF00239,PTHR30461,PS00397, PS51736,Coil,cd00338
MSRKGDFYFKKTGDYMKIAAAYVRVSTEDQTELSPTSQIKQIREYAKNHGYIVPDEFVFADEGISGKNTQKRPAFNRMIGLAKTKPKPFECILLWKYSRFARNREDSIVYKSMLRKQLGIDVISISENLGDDKMSILIEALIEAMDEYYSINLAEEVKRGMTERVSRGEAVSVPAYGYDIEEGKYIINEAEAEVVRQIFSDFNSGVGTVTIARNLNAIGIKTKRGKLWENRTVKYILHNPVYIGKIRWNPEEITGLNYDHEKIMLVDGIHEPLLTKDLWDSVQEKLSLMKKTRKPRERSNPTPDYMLYGLMRCGSCGGTLTQSRDGLQCHKYAHGTCDTSHYISLSKANTAVIDLIQHTLENGIFTLTPKKQDVSTQQIAMIDKQIQSEKNKLIRVKEAFEYGVDTLEEYKENKNKILQKISELESSKPVQQTNIDKKKFAQKYLGVIDTLKDDTVSEADKNHILRQFVEKIVLHRPSNEIEIFYHY

SEQ ID NO: 6690 - protein, 487 aa, Unknown
  Description of Unknown: Integrase B6691 sequence
  PTHR30461:SF3,IPR036162,PS51737,IPR011109,PTHR30461, PS00397,PF00239,G3DSA:1.10.10.2600,IPR006119,SSF53041, cd00338,SM00857,IPR025827,IPR038109,PS51736, IPR006118,PF13408,G3DSA:3.40.50.1390,PF07508,Coil
MKKIAAAYIRVSTHMQEELSPDAQLRCIRDWGNVHGYYIPDEYVFIDNGISGRKAKKRHDFLRMIGLAKTKPASPFEAILLWKFNRFARNQEESIVYKSMLRKKCNVDVISTTQQTTKDIYGDLIERIIEWTDEFYSIQLGEDVFRGMTENALRGNFQSSPAFGYKVEKGQGLVIVEDQANIVRMIFNLYANTMMGFYEIARHLNRLGYKTKKGGAFETRTIRYIIQNPIYKGYLRWNYANGTTRVVNDESEWIIVKSPLVPIIVSEELWDRANERLKNEYRPKNGKPVSKHRHWLSGLVKCSSCGASLSTSVQYRHDRTYINFQCYKYLKGKCLVSHGISEKKLVPLVLNVLKEDMSKSYIECERIEKVVENQQDILDVQLKRLATREARIKEAYLNGIDSLAEYKANKEEIQKEREFLLQQSQDHNKTENESNELPNKIRGVYDILVSDQCSKDEKQAAIRSIVKKIVFDKENKTLDFHYYIKED

SEQ ID NO: 6691 - protein, 487 aa, Unknown
  Description of Unknown: Integrase B6692 sequence
  IPR036162,PS51737,IPR011109,PTHR30461,PS00397, PF00239,G3DSA:1.10.10.2600,IPR006119,SSF53041,cd00338, SM00857,IPR025827,IPR038109,PS51736,IPR006118, PF13408,G3DSA:3.40.50.1390,PF07508,Coil
MNAALRTAAAYIRVSTDDQIELSPESQMVELRKYAKQNNIVILNDHIYMEDKGISGRTAKRRPAFNDMIAHAKSEEHPFDCILVWKFSRFARNQEESIVYKSLLRKSNVDVISISEGIPDGFIGQLVERIFEWYDEYYLINLSGEVRRSMTLNAQEGAYQSRPPFGYDYVGKKITPTINTEQAKMVRTVFRSFLAGGTYSQIAIYLNNMGVHTQRGNPWEPRTIKYMLQNPFYCGKIRWGYYDRKNQTYNKGDDVIISQGKHEPIISQEDFDTVQERIARISRGFKKRDPYACKHWLSGVLLCSCCGASLTASMHNKYPYWQCWKHAKALCPADQSITVSRLEQQVIKGLHDIVEAAHLDYKVLDVADSDTQALLAELQHRLDRLAQKEKRIRDAYLNEIDTIDEYRDAKALVQKERDSLNAQIQALSAPIKKERNDDLMRDHIRSALSIIEDPESTFVDKGNAIREIVTKITYDKKSQTLDFSLFL

SEQ ID NO: 6692 - protein, 487 aa, Unknown
  Description of Unknown: Integrase B6693 sequence
  PTHR30461:SF3,SM00857,G3DSA:1.10.10.2600,IPR036162,PS51737, G3DSA:3.40.50.1390,IPR006119,IPR038109,PF07508,IPR011109, SSF53041,PF00239,PTHR30461,PS51736,Coil, cd00338
MPEYLQIKKRSGFKKMIQDALNGEVDLIITKEVARFARNTVDTLSYTRKLKSAGVGVIFTIDNIDTRDADGELRLTIMASIAQEESRKTSERVKWGQKRQMEKGVVFGRDLLGYTVQNGQLHINEEEVPIVQAIFHKYTNEGKGTWTIANELLVEGMRPKRIALWSNVVILRVLRNEKYVGDLCQKKTYTPDYLTHSKKYNRGEEEMVYLKEHHEPIIDRDLWNRTQEELKRRSPSEEQKSKHSNRYWCSGKIHCAECGCRYVSRTKKLMSGDVYKAWRCYAAANHGTKKQDADGNEIGCNNSSINDRSLKTCMNYCITLVQGERDSLKKEILKEISQLQKTTAKKLDSKKIKKKIDNLEMKKRKAIDLMLDGLISKEDLQSQTEWYNEELEKLNIQLSDALQKDKSDSRQVNHMEKYIKALDEIMELDGDSEDVYKEVLDHMEIHKGNIVDVWLKSIPIGIRLKVKATGKGEYFKTEILETSFIEK

SEQ ID NO: 6693 - protein, 487 aa, Unknown
  Description of Unknown: Integrase B6694 sequence
  cd03768,PTHR30461:SF3,SM00857,G3DSA:1.10.10.2600,IPR036162, PF13408,IPR025827,G3DSA:3.40.50.1390,PS51737,IPR006119, IPR038109,PF07508,IPR011109,SSF53041,PTHR30461, PS51736,Coil,PF00239
MKTDAVYARQSVEKKDSLSIAGQIDLCRRTAGGGELRIYKDAGYSGKNTERPAFQQLMKDIRADRIGTLYVYRLDRFSRSVADFGQLWEVLQEHHVEFVSVNENFDTKTPMGRAMLHIIMVFAQLERETTAERVRDNYYRRAALGAWPGGPAPYGFDNGRACGKDGREVPSLIPNDKAAVVQRIFQEYAAEGMSLGLLARKLTAEGIPAPKRATWDNVTLSRLLHNPAYAMADEQVRLHYLGQGVEVTSPPEAFDGVHGVLLVGKREANARKYTRTENHRASVLNSVGIVPSPLFLAVQAKLAHNRQVGNSGKGKHTWLSGLLKCAKCGYSLSVVVDKPYRYLVCSGRYNVNRCDAAIHVKLAELETVVQTEMEKLLAQCPREPVVPKPEDSYTRRLLELDRRAERLMDAFAESEDLPASYLQKALGKIEKERETLRQAQRREAGRVPLPEKLVFGELSFEEKKAVVAQFIRRIEVAEDSAEIIWAV

SEQ ID NO: 6694 - protein, 487 aa, Unknown
  Description of Unknown: Integrase B6695 sequence
  PTHR30461:SF3,IPR036162,PS51737,IPR011109,PTHR30461, PS00397,PF00239,G3DSA:1.10.10.2600,IPR006119,SSF53041, cd00338,SM00857,IPR025827,IPR038109,PS51736, IPR006118,PF13408,G3DSA:3.40.50.1390,PF07508,Coil
MTPKDYRIAAAYIRVSTDDQVELSPASQLVEIRKWASANGYIVPDEFVFVDEAKTGRKVTGRDDFRRLIGTAKQKPKPFDAILLWKFSRFARNRDDAVLYKSILRKQLHIEVISIKEPIAEGKLGIIMEAMIEAMDEYYSINLAEDVKRGMEEKHRRGELQSTPSFGYSAQDGVLVPKEPEASYVREMFSRFLSGQGFYSIARWLNDLGVKTHRGSAFENRTVEYILRNPVYIGKLRWNPAGRSRRNYNDPNILVVDGKHQPLVDTDTWNSVQDRISQVKAIHKYHGRPLGSNKDWISGVVRCATCGGTLIFAKPNYWKCNNYVRGRCKTSQHISGDALKESILARLQADAISSDALTYDVVRAGSKAADELSLLQQHKISLQKRLERLREAYLAGAESLEEYAAAKAATLQQIQDTDHRIADTENKSADSATPQLVRSAIRSAVETLTSSSSTLEQKCEALHSICDRIDWDKSQNTLTIHYRFIIP

SEQ ID NO: 6695 - protein, 487 aa, Unknown
  Description of Unknown: Integrase B6696 sequence
  PTHR30461:SF3,IPR036162,PS51737,IPR011109,PTHR30461, PS00397,PF00239,G3DSA:1.10.10.2600,IPR006119,SSF53041, cd00338,SM00857,IPR025827,IPR038109,PS51736, IPR006118,PF13408,G3DSA:3.40.50.1390,PF07508,Coil
MKNVKVGIYIRVSTQEQADEGYSIGEQEDRLKKYADLHNWIVYKVYSDPGVSGAKLDRPALKQLIKDVEKNKISKVLVYKLDRLSRRQKDTLYLIEDVFNANNVDFISMTEQLDTASPLGRAMIGILATFAQLEREQIKERMQIGMDARSKEGLYHGGGYDPVGYDYIDGKLVVNEYEALQVKKIYELYLDGWGITTIVNYLKKHGYTEKYGAWSDSAVRSVLFTDIYTGVITWKGNTYEGQHEALIDKETFEKVKAIKEARAKENSERYNPHPFKRTTLLGGLIWCGNCGARYFAKQNTVKRYKSTDPNKKPLKYYTCYSRGKTNSKLIKDPTCKNPTYNTEKLDKIILDEVRKLAVDEDYLNSILNDTEKNDPKEEIQIFQNRIDNIDQQIKKLIDLYQVSNIDFKLINEKIEKLSEEKYSIENEIDDLSELESKIDINDVKKLLITIPDILDNGDFEQIKSIVHSLIESIVIYEDAIKITWKFQ

SEQ ID NO: 6696 - protein, 486 aa, Unknown
  Description of Unknown: Integrase B6697 sequence
  PTHR30461:SF3,IPR036162,PS51737,IPR011109,PTHR30461, PS00397,PF00239,G3DSA:1.10.10.2600,IPR006119,SSF53041, cd00338,SM00857,IPR025827,IPR038109,PS51736, IPR006118,PF13408,G3DSA:3.40.50.1390,PF07508,Coil
MKTAIYIRVSTQEQAKEGYSIPHQKEKLFKYCQAMNWQVVEIYADEGISGSTIEKRPAAIKMLQDAKKRLFENILILRVDRLCRNTKDLLEIVETLKKYDVSLNAVDQQIDYKTSIGKMTLTILGTFAEFEHSTIHERTMEGRKQKAKQGIKSLGRRVPFGYNYINGCFVANSDAKIVKLIFEKVADGYGFNQTATFLRNNNIPTIDKLDWNRLHIKRIINNKIYMGHCVLKLNMTEVIDTIATNVEPIIDEKLFIQAQKTISYRTKGVFSKYAYDDFIFSDVLYCSCCGWKMSPKKTKRTDPKINEAKLEDRIYRYYKCIYNMSHPTKQTCLNTKILNADKFEKHFLLYMDYFIIELKKPLKLQKKITSSPTNKDFLEKQIKELTQKKSKLLDKYLAGIIDDSSYIAKNDELIEEIKSLENKLNFKEELLDKENKEINVDFLNGLKFVFSDLWSIMSNHEKRNFITQTFEKIEVNQGKIVKIILR

SEQ ID NO: 6697 - protein, 486 aa, Unknown
  Description of Unknown: Integrase B6698 sequence
  PTHR30461:SF3,IPR036162,PS51737,IPR011109,PTHR30461, PS00397,PF00239,G3DSA:1.10.10.2600,IPR006119,SSF53041, cd00338,SM00857,IPR025827,IPR038109,PS51736, IPR006118,PF13408,G3DSA:3.40.50.1390,PF07508,Coil
MKKIAAAYIRVSTHMQEELSPDAQLRCIKAWGDAHDYYVPDEFVFIDSGISGRKAKKRHDFLRMIGLAKMKPSPFEAILLWKFNRFARNQEESIFYKSMLRKKCKVDVISTTQQTTKDIYGDLIERIIEWTDEFFSIQLGEDVKRGMTENALRGNFQASPAFGYKVEKGLGLVIVEDQANIVRMIFNLYANTRMGFYEIARHLNRLGYKTKKGGAFEARAIRYIIQNPIYKGYLRWNYANGTTHAVNDESEWIIVKSPLVPIIVSEELWDRANERLKNEYRPKNGKPVSKHRHWLSGLVKCSSCGASLSTSVQYRRDRTYINFQCYKYLKGKCMVSHGISEKKLVPLILNVLEEDMDKSYIECERIEKTTENQQDILNVQLKRLDTRESRSKEAYLNGIDSLAEYKANKEDIQKEREFLLQQSQNHSDEENKSSDLPGKIRGVYDILVSDQCSKDEKQAAIRSIVKKIVFDKENKTLDFYYYVKED

SEQ ID NO: 6698 - protein, 486 aa, Unknown
  Description of Unknown: Integrase B6699 sequence
  IPR036162,PS51737,IPR011109,PTHR30461,PS00397, PF00239,G3DSA:1.10.10.2600,IPR006119,SSF53041,cd00338, SM00857,IPR025827,IPR038109,PS51736,IPR006118, PF13408,G3DSA:3.40.50.1390,PF07508,Coil
MTTIDLRIAAAYIRVSTDDQVELSPASQLVEIRKWASRNGYIVPDEFVFMDEGISGRGVKKRDEFRRMIGVAKTKPKPFDAILLWKFSRFARNRDDAVMYKSILRKQLGIDVISISEPVAEGGMGLITEALIEAMDEYYSINLAQEVKRGMEEKHRRGEVQSNPPYGYGIKDHVFVPKPPEDGFVKELFRRYLAGEGCFPLARWMNECGQRTHRGGRFENRTIEYILRNPVYIGKLRWNPAGRTRRDFANENVVLVDGKHEPLIDEETFNAVQRRIDEQKLLYPKYSRQSGTQKHWVSGLVHCAACGASLVVNTPEYMVCNNYIRGSCRVRQAVRRDALEAALISRLREDAARGSSLTFDVVRSSDGSASSLSAVEAARDSAVRMLDRLRDAYLTGADTVEEYKASKAAVQQRIADLDAQIAAMQKEDRAAADPKLLRSALRSVVKTLQSPDATVAEKNAAVRSVADNITWSKAANTLTIHYRLVL

SEQ ID NO: 6699 - protein, 486 aa, Unknown
  Description of Unknown: Integrase B6700 sequence
  PTHR30461:SF3,cd00338,SM00857,G3DSA:1.10.10.2600,IPR036162, PS51737,G3DSA:3.40.50.1390,IPR006119,IPR038109,PF07508, IPR011109,SSF53041,PTHR30461,PS51736,Coil, PF00239
MPKRAVIYARFSCNRQREASIEDQLRVCREWCAREGYEVAAEYCDRAVSGRTDDRPEFQRMIANAGESEIVLVYMMDRFSRGEYDAPIYKRELATHGVKLVSALEQIPDSPEGIIYEKLLEGLAACESRKTAIRTKRGMEGNALKCKTNGVRIFGYRRNGDDEYEVDEAQAAWVREAFALRLERMSMNAIAREFARRGLRTRKGNPCGQAMVQQMLRDRRYTGRYEWGGIVREGGMPAIVDEVTFMEVQGIKCRKQRSSENWGDFALAGAALCAECGRNLQGVSGRGRNNVKYEYYSCPGSCVRNIRREELEGSIASALRELLGDRGEALQIANMVAERADTAEVRARRRQAEDSLRAAERGLRNILNAIEQGVIAPGVNERIAELEEQQARARYDLEAITDERIDPERFADFLQCGTALDDATLLKAFVWQAVVSEDEILVTLNYDKKGEPARLDIQRVRAKLEWCPMLDSNQRPSAPEADALIP

SEQ ID NO: 6700 - protein, 486 aa, Unknown
  Description of Unknown: Integrase B6701 sequence
  SM00857,G3DSA:1.10.10.2600,IPR036162,PS51737,G3DSA:3.40.50.1390, IPR006119,IPR038109,PF07508,IPR011109,SSF53041, PTHR30461,Coil,mobidb-lite,cd00338,PF00239
MASAVIYARYSSSGQREESIEDQVRVCTEEAHRNGDRIVRVYADRATSGTTTNHRAAFAEMVADSARGWFEKVYVYKTDRFARNRYDSAIYKTKLKRNGVRVVSATERIEDGPDGILLEAVLEGMAEYYSANLAENVKRGLHGNALKCKHNGVMVYGFDRGEDGYYHVNEEQARVVRTMFEMYDAGSGFPEIEDALKPWRTSYGKPFTMKTISKMLRNEKYAGVYKYGGQRVEGGMPSIVPPELFERVQRRLALRTRKRRGTVEYLLSGKLFDIDGNRYQSSSGHGKSGRKYTYYRCPATGHIVPQEKLEHAVAEEVQAFLSSDHVAGIIADLVMEEQEVALSDDLDAMDALRKRLADNEREQARMVDLAAKTGATDAVAAKLDELVAERQAVADELAELEKGTPVFDRDHVEFWVHEVVGKKDPLEVIALFVKRVVLDREGERFHVEFIIDGGDDGGNETNPRPDAPDGGSCKSQLAEEEGFEPS

SEQ ID NO: 6701 - protein, 486 aa, Unknown
  Description of Unknown: Integrase B6702 sequence
  PTHR30461:SF3,IPR036162,PS51737,IPR011109,PTHR30461, PS00397,PF00239,G3DSA:1.10.10.2600,IPR006119,SSF53041, cd00338,SM00857,IPR025827,IPR038109, PS51736,IPR006118,PF13408,G3DSA:3.40.50.1390,PF07508,Coil
MPATPLEIGAAYVRVSTDDQTELSPDAQIRVIMDAAKADGFIIPKEYIFIEKKGISGRKAGNRPEFQRMIAIAKSQKPAPFKRLYLWKFSRFARNQEESTFYKGILRKKCDVEIKSVSEPIMEGMFGRLIETIIEWFDEYYSINLSGEVLRGMTEKALREGYQATPCLGYRAVGEGKPFAVEEKSYAIVEYIFQTYHSGKDMTATARAANARGYRTRRGNLFDRRGINRILANRFYIGEVIWNGYSFQGTHEVRSSVTSLFEDVQKRIEKEYRPQKRREVSNNVHWLSGLLKCSICGGSLGFNRSNDQKKRPDFFQCWKYAKGMHPGSCCLAVHLAEKAVIESLEEVLETNELEYEYIQKTDDAVNAEEIAIQEALARLEVKERRIREAYENEIDTLEEYKQNKLRLKAEREELMADAERLRRQAEQSPAAVPSKEDIMRQIAHVHEILADPNISYEIKGNALRKIVKEIVFDRGKGHLHIHFYIS

SEQ ID NO: 6702 - protein, 486 aa, Unknown
  Description of Unknown: Integrase B6703 sequence
  PTHR30461:SF3,IPR036162,PS51737,IPR011109,PTHR30461, PS00397,PF00239,G3DSA:1.10.10.2600,IPR006119,SSF53041, cd00338,SM00857,IPR025827,IPR038109,PS51736, IPR006118,PF13408,G3DSA:3.40.50.1390,PF07508,Coil
MKKIKVGIYIRVSTQEQAEAGYSIHEQEERLKKYAEINNWIVYKVYSDPGYSGAKLDRPALTEMIKDIEKGKIQKVLVYKLDRLSRRQRDTLYLIEDIFNVHKVDFVSMTEQIDTGSPLGRAMIGILATFAQLEREQIRERMQVGLDARAKEGLFHGGGYAPIGYDYIDGELIVNDYEALQVRKIYDLYLDGLPINAILNFMKKHGYTKKYADWSDSAIRSVLFSKIYTGVIEWKGQVYPGKHKPLISLEDFEKVQKLRKQRALATPKNNRNPFKRTTLLGGLIWCGNCGARYYAKQNTVKRGKTTDPNKKALQYYTCYSRAKSNKRMIKDPTCKNPSFNTQKLDAIILGEIRKLAIDKDYFNNIIEGSDIQDPEANITALKDRIKKIDQQINKLIDLYQLGNIDFNIINEKIEKLSKEKQTIEDEIDNFNDVTPNMNINEAKRIIASLPEILDNGDREQIKSVVHSLIESILIYDDAIEINWKFQ

SEQ ID NO: 6703 - protein, 486 aa, Unknown
  Description of Unknown: Integrase B6704 sequence
  PTHR30461:SF3,IPR036162,PS51737,IPR011109,PTHR30461, PS00397,PF00239,G3DSA:1.10.10.2600,IPR006119,SSF53041, cd00338,SM00857,IPR025827,IPR038109,PS51736, IPR006118,PF13408,G3DSA:3.40.50.1390,PF07508,Coil
MKTAIYIRVSTQEQAKEGYSIPHQKEKLFKYCQAMNWQVVEIYADEGISGSTIEKRPAAIKMLQDAKKKLFENILILRVDRLCRNTKDLLEIVETLKKYDVSLNAVDQQIDYKTSIGKMTLTILGTFAEFEHSTIHERTMEGRKQKAKQGIKSLGRRVPFGYNYINGCFVANSDAKIVKLIFEKVADGYGFNQTATFLRNNNIPTIDKLDWNRLHIKRIINNKIYMGHCVLKLNMTEVVDTIATNVEPIIDEKLFIQAQKTISYRTKGVFSKYAYDDFIFSDVLYCSCCGWKMSPKKTKRTDPKINEAKLEDRIYRYYKCIYNMSHPTKQTCLNTKILNAEKFEKHFLLYMDYFIIELKKPLKLQKKITSSPTNKDFLEKQIKELTQKKSKLLDKYLAGIIDDSSYIAKNDELIEEIKSLENKLNFKEELLDKENKEINVDFLNGLKFVFSDLWSIMSNHEKRNFITQTFEKIEVNQGKIVKIILR

SEQ ID NO: 6704 - protein, 486 aa, Unknown
  Description of Unknown: Integrase B6705 sequence
  PTHR30461:SF3,IPR036162,PS51737,IPR011109,PTHR30461, PS00397,PF00239,G3DSA:1.10.10.2600,IPR006119,SSF53041, cd00338,SM00857,IPR025827,IPR038109,PS51736, IPR006118,PF13408,G3DSA:3.40.50.1390,PF07508,Coil
MKKIAAAYIRVSTHMQEELSPDAQLRCIKAWGDAHDYYVPDEFVFIDKGISGRKAKKRHDFLRMIGLAKTKPAAPFEAILLWKFNRFARNQEESIVYKSMLRKKCNVDVISTTQQTTNDIYGDLIERIIEWTDEFYSIQLGEDVFRGMTENALRGNFQASPAFGYKVEKGLGLVIVEDQANIVRMIFNLYANTRMGFYEIARHLNRLGYKTKKGGAFEARAVRYIIQNPIYKGYLRWNYANAAHVINDESEWIIVKSPLVPVIVSEELWDRANERLKNEYRPKNGKPVSKHRHWLSGLVKCSSCGASLSTSVQHRHDRTYINFQCYKYLKGKCMVSHGISEKKLVPLILNALKEDMNKSYIECERIEKTTENQQDILNVQLKRLDTRESRSKEAYLNGIDSLAEYKANKEDIQKEREFLLQQSQNHSDEENKSSDLPGKIRGVYDILISDQCSKDEKQAAIRSVVKKIVFDKENKTLDFYYYIKED

SEQ ID NO: 6705 - protein, 486 aa, Unknown
  Description of Unknown: Integrase B6706 sequence
  PTHR30461:SF3,IPR036162,PS51737,IPR011109,PTHR30461, PS00397,PF00239,G3DSA:1.10.10.2600,IPR006119,SSF53041, cd00338,SM00857,IPR025827,IPR038109,PS51736, IPR006118,PF13408,G3DSA:3.40.50.1390,PF07508,Coil
MKKIAAAYVRVSTHMQEELSPDAQIRLIKEWANGHGYDLPEEFVFIDKGISGRKVKKRPAFLRMISMAKSKPSPFDAILVWKFSRFARNQEESIVYKAMLRNKHKIDVISISEPISDDVYGGLIERIIEWMDEFYSIRLAEDVKRGMTENALRGNFQASPAFGYKVDQKGQAPVVVEDQANIVRMIFNLYVTSGKSFYDISRHLNRLGYKTKKGGNFEARTIKYIIQNPIYKGFLRWNYADGTTHVINDESEWIVKKAPQIPVIVSEELWNQANDRLKHEYRPKNGKPVSQKRHWLSGVVKCSSCGASLATSVHTDKRYNRVYRNFQCYKFTKGKCLVSHAISEKKLVPLVLDVLKEDMNKAYIEYEHISTEPDNKQDILKVQLNRLELREKRIKEAYLNGVDTLEEYKDNKEQIKTERDMLLRQADESSEDQEKVDMPRKIRGVYDILRSDEYSKEEKHAAITSIVKKIVFDRENKTLDFYYYTK

SEQ ID NO: 6706 - protein, 486 aa, Unknown
  Description of Unknown: Integrase B6707 sequence
  PTHR30461:SF3,IPR036162,IPR011109,PTHR30461,PS00397, PF00239,G3DSA:1.10.10.2600,IPR006119,SSF53041,cd00338, SM00857,IPR025827,IPR038109,PS51736,IPR006118, PF13408,G3DSA:3.40.50.1390,PF07508,Coil
MPATPLEIGAAYVRVSTDDQTELSPDAQIRVIMDAAKADGFIIPKEYIFIEKKGISGRKADNRPEFQRMIAIAKSQKPAPFKRLYLWKFSRFARNQEESTFYKGILRKKCDVEIKSVSEPIMEGMFGRLIETIIEWFDEYYSINLSGEVLRGMTEKALREGYQATPCLGYRAVGEGKPFAVEEKSYAIVEYIFQTYHSGKDMTATARAANARGYRTRRGNLFDRRGINRILANRFYIGEVIWNGYSFQGTHEVRSSVTSLFDDVQKRIEKQYRPQKRREVSNNVHWLSGLLKCSICGGSLGYNRSNDQKKRPDFFQCWKYAKGMHPGSCCLAVHLAEKAVIESLEEVLETNELEYEYIQKTDDAVNAEEIAIQEALARLEVKERRIREAYENEIDTLEEYKQNKLRLKAEREELMADAERLRRQAEQSPAKVPSKEDIMRQIAHVHEILADPNISYEIKGNALRKIVKEIVFDRGKGHLHIHFYIS

SEQ ID NO: 6707 - protein, 486 aa, Unknown
  Description of Unknown: Integrase B6708 sequence
  PTHR30461:SF3,IPR036162,IPR011109,PTHR30461,PS00397, PF00239,G3DSA:1.10.10.2600,IPR006119,SSF53041,cd00338, SM00857,IPR025827,IPR038109,PS51736,IPR006118, PF13408,G3DSA:3.40.50.1390,PF07508,Coil
MPATPLEIGAAYVRVSTDDQTELSPDAQIRVIMDAAKADGFIIPKEYIFIEKKGISGRKADNRPEFQRMIAIAKSQKPAPFKRLYLWKFSRFARNQEESTFYKGILRKKCDVEIKSVSEPIMEGMFGRLIETIIEWFDEYYSINLSGEVLRGMTEKALREGYQATPCLGYRAVGEGKPFAVEEKSYAIVEYIFQTYHSGKDMTATARAANARGYRTRRGNLFDRRGINRILANRFYIGEVIWNGYSFQGTHEVRSSVTSLFDDVQKRIEKEYRPQKRREVSNNVHWLSGLLKCSICGGSLGFNRSNDQKKRPDFFQCWKYAKGMHPGSCCLAVHLAEKAVIESLEEVLETNELEYEYIQKTDDAVNAEEIVIQEALARLEVKERRIREAYENEIDTLEEYKQNKLRLKAEREELMADAERLRRQAEQSPAKVPSKEDIMRQIAHVHEILADPNISYEIKGNALRKIVKEIVFDRGKGHLHIHFYIS

SEQ ID NO: 6708 - protein, 486 aa, Unknown
  Description of Unknown: Integrase B6709 sequence
  PTHR30461:SF3,IPR036162,PS51737,IPR011109,PTHR30461, PS00397,PF00239,G3DSA:1.10.10.2600,IPR006119,SSF53041, cd00338,SM00857,IPR025827,IPR038109,PS51736, IPR006118,PF13408,G3DSA:3.40.50.1390,PF07508,Coil
MKTAIYIRVSTQEQAKEGYSIPHQKEKLFKYCQAMNWQVVEIYADEGISGSTIEKRPAAIKMLQDAKKRLFENILILRVDRLCRNTKDLLEIVETLKKYDVSLNAVDQQIDYKTSIGKMTLTILGTFAEFEHSTIHERTMEGRKQKAKQGIKSLGRRVPFGYNYINGCFVANSDAKIVKLIFEKVADGYGFNQTATFLRNNNIPTIDKLDWNRLHIKRIINNKIYMGHCVLKLNMTEVVDTIATNVEPIIDEKLFIQAQKTISYRTKGVFSKYAYDDFIFSDVLYCSCCGWKMSPKKTKRTDPKINEAKLEDRIYRYYKCIYNMSHPTKQTCLNTKILNAEKFEKHFLLYMDYFIIELKKPLKLQKKITSSPTNKDFLEKQIKELTQKKSKLLDKYLAGIIDDSSYIAKNDELIEEIKSLENKLNFKEELLDKENKEINVDFLNGLKFVFSDLWSIMSNHEKRNFITQTFEKIEVNQGKIVKIILR

SEQ ID NO: 6709 - protein, 486 aa, Unknown
  Description of Unknown: Integrase B6710 sequence
  cd00338,SM00857,G3DSA:1.10.10.2600,IPR036162,PS51737, G3DSA:3.40.50.1390,IPR006119,IPR038109,PF07508,IPR011109, SSF53041,PTHR30461,PS51736,Coil,PF00239
MIIKKVALYLRKSRKDEGNESREETLARHERMLRDYCKTHNLEIVKIYREVVSAENLEDRPQARQMLDDVADGLFDGVVVIELERLSRGNQIDQVEVSETFKSANTLIYTLQKVYDLSREDEIDEEFFEFGLFMSRREYKTIKRRLMRGRKQAQKEGYYIGAGLPYGFGKVRGDKGFVLVPNAETPIVQMIFNKFVYEDYSLADLRHYLNKNGIKPQKINEWNSVVLKNLLKNKCYLGYINYNSRSRRTQECYVGKHDAVIDDETFQKAQDKLAISSHKLKRGSELKNPLASLVKCSACGATMQKVNEYFRCLKPNCPTVLSYFDVVEKRIIDELKAELKNFNYFLENYGDEIEKQNKRKEHELALLRKEVAKKDSMINKACEMLELGVYSKDKYLSRVNIIEADKTALQGQISSLEASFSDEQAKAQKAIPILEKCLDAYWDLNAQEKNDLLKSFIEKIEYSKTKRNNRWNSNIDDMQLKIYLKI

SEQ ID NO: 6710 - protein, 486 aa, Unknown
  Description of Unknown: Integrase B6711 sequence
  PTHR30461:SF3,SM00857,IPR006118,G3DSA:1.10.10.2600,IPR036162, PS51737,G3DSA:3.40.50.1390,IPR006119,IPR038109,PF07508, IPR011109,SSF53041,PF00239,PTHR30461, PS00397,PS51736,Coil,cd00338
MIIAAAYVRVSTDEQTDYSPSAQLADIKEYARNNGYRIPEEFIFMDEGISGKRADKRPAFQAMIRQARKKSNHIQYIIVHKFDRFARNKEDSVLYKALLKKDGVKVISVKEPIPQDDKFAVIYESMLEAMAEYYSLNLAEEVNKTMIKKAQAGEWQATAPFGYKNENKSLAIVPEEAKMVRYIFEQYIAGTSMFALSRQMNQIGYRTHRGNVFENRTIQYILNNPVYKGYSRWTPGRMHNRDYSDPASIVSKGNWEPIVSEDVWEAAASRFHAEKKTHYKHKRPDTEGIHWLSSMVKCSSCGRSLIVGTKYKNGAVQFQCGGYNHGQCHDSHAVSSNRLIPAILSELEKIAAHPDTEGCRYTVRRELPASDELDVYVPLLAKAQQRLKKAKDAYLNDIDTLEEYRSNKMNIEKEIAELKEHIAEIEERQNMPFDQAAFSTKIASVIEILRDDSRQMEDKRKAFKSICDKIIFHKHDSSLELFLIDQ

SEQ ID NO: 6711 - protein, 486 aa, Unknown
  Description of Unknown: Integrase B6712 sequence
  PTHR30461:SF3,IPR036162,PS51737,IPR011109,PTHR30461, PS00397,PF00239,G3DSA:1.10.10.2600,IPR006119,SSF53041, cd00338,SM00857,IPR025827,IPR038109,PS51736, IPR006118,PF13408,G3DSA:3.40.50.1390,PF07508,Coil
MKKIAAAYIRVSTHMQEELSPDAQLRFIRTWADAQGYYVPDEFVFIDSGISGRKAKKRHDFLRMIGLAKMKPSPFEAILLWKFNRFARNQEESIFYKSMLRKKCKVDVISTTQQTTKDIYGDLIERIIEWTDEFFSIQLGEDVKRGMTENALRGNFQASPAFGYKVEKGLGLVVVEDQANIVRMIFNLYANTRMGFYEIARHLNRLGYKTKKGGAFEARAIRYIIQNPIYKGYLRWNYANGTTRVVNDESEWIIVKSPLVPVIVSEELWDRANERLKNEYRPKNGKPVSKHRHWLSGLVKCSSCGASLSTSVQYRRDRTYINFQCYKYLKGKCMVSHGISEKKLVPLILNVLKEDMNKSYIECERIEKVVENQQDILDVQLKRLDAREVRIKEAYLNGVDSLAEYKSNKEQIQQERELLLKQLQNHGEEEKGSNELPNKIRGVYDILVSDQCSKDEKQAAIRSIVKKIVFDKENKTLDFHYYIKED

SEQ ID NO: 6712 - protein, 486 aa, Unknown
  Description of Unknown: Integrase B6713 sequence
  PTHR30461:SF3,cd00338,SM00857,IPR006118,G3DSA:1.10.10.2600, IPR036162,PS51737,G3DSA:3.40.50.1390,IPR006119,IPR038109, PF07508,IPR011109,SSF53041,PTHR30461,PS00397, PS51736,Coil,PF00239
MIIAAAYVRVSTDEQTDYSPSAQLADIREYARQNGYHIPDEFVFMDEGISGKRADKRPAFQSMIRQARKKSNHIQYIIVHKFDRFARNKEDSVLYKALLKKDGVKVISVKEPIPQDDKFAVIYESMLEAMAEYYSLNLAEEVNKTMIKKAQAGEWQATAPFGYKNENKSLSVVPEEAKMIRYIFEQYIAGTSMFALSRQMNQMGYRTHRGNVFENRTIQYIINNPVYKGYSRWTPGRMHLRDYSDPASIISKGNWEPIVSEEIWEAAVTRFKAEKRTYYKHKRPETEGIHWLSSMVKCSACGRSLIVGTKYKNGAVQFQCGGYNHGQCHDSHAISSNRLIPALLSELEKIAAHPNTEGCRYTIRREFPASHELDVYVPLLAKAQQRLKKAKDAYLNDIDTLEEYRSNKTSIEKEIAELKEHIAEIEEQQKMPFDQAAFSTKIASVIEILRDESRSMEDRRKAFKSVCEKVIYNKHTNSLELFLIDG

SEQ ID NO: 6713 - protein, 486 aa, Unknown
  Description of Unknown: Integrase B6714 sequence
  PTHR30461:SF3,IPR036162,IPR011109,PTHR30461,PS00397, PF00239,G3DSA:1.10.10.2600,IPR006119,SSF53041,cd00338, SM00857,IPR025827,IPR038109,PS51736,IPR006118, PF13408,G3DSA:3.40.50.1390,PF07508,Coil
MPATPLEIGAAYVRVSTDDQTELSPDAQIRVIMDAAKADGFIIPKEYIFIEKKGISGRKADNRPEFQRMIAIAKSQKPAPFKRLYLWKFSRFARNQEESTFYKGILRKKCDVEIKSVSEPIMEGMFGRLIETIIEWFDEYYSINLSGEVLRGMTEKALREGYQATPCLGYRAVGEGKPFAVEEKSYAIVEYIFQTYHSGKDMTATARAANARGYRTRRGNLFDRRGINRILANRFYIGEVIWNGYSFRGTHEVRSSVTSLFDDVQKRIEKEYRPQKRREVSNNVHWLSGLLKCSICGGSLGYNRSNDQKKRPDFFQCWKYAKGMHPGSCCLAVHLAEKAVIESLEEVLETNELEYEYIQQTDDAVNAEEIAIQEALARLEVKERRIREAYENEIDTLEEYKQNKLRLRAEREELMADAERLRRQAEQSPAKVPSKEDIMRQIAHVHEILADPNISYEIKGNALRKIVKEIVFDRGKGHLHIHFYIS

SEQ ID NO: 6714 - protein, 486 aa, Unknown
  Description of Unknown: Integrase B6715 sequence
  PTHR30461:SF3,SM00857,IPR006118,G3DSA:1.10.10.2600,IPR036162, PS51737,G3DSA:3.40.50.1390,IPR006119,IPR038109,PF07508, IPR011109,SSF53041,PF00239,PTHR30461,PS00397, PS51736,Coil,cd00338
MIVAAAYVRVSTDEQTDYSPAAQLADIKEYATHNGYHIPEEFIFMDEGISGKRADKRPAFQAMIRQARKKSNHIQYIIVHKFDRFARNKEDSVLYKALLKKDGVKVISVKEPIPQDDKFAVIYESMLEAMAEYYSLNLAEEVNKTMIKKAQAGEWQATAPFGYKNENKSLTIVPEEAKMIRYIFEQYIAGTSMFALSRQMNQMGYRTHRGNVFEHRTIQYILNNPVYKGYLRWTPGKKINRNFNDSASIVAKGDWEPIVSKEIWDAAAARFKSEKRTYYKHKRPETEGIHWLSGMVKCSSCGRSLVVGAKYKSGAVQFQCGGYCHGQCHDSHAISSNRLIPAILSELEKIAAHPDTEGCRYTIRRELPASDELDVYMPLLTKAQQRLKKAKDAYLNDIDTLEEYRSNKMNIEKEIAELKERIAEIEEQQNVPFDQAAFSTKIASVIEILRDDSRQMEDKRKAFKSICDKIIFHKHDSSLELFLIDQ

SEQ ID NO: 6715 - protein, 486 aa, Unknown
  Description of Unknown: Integrase B6716 sequence
  PTHR30461:SF3,SM00857,IPR006118,G3DSA:1.10.10.2600,IPR036162, PS51737,G3DSA:3.40.50.1390,IPR006119,IPR038109,PF07508, IPR011109,SSF53041,PF00239,PTHR30461,PS00397, PS51736,Coil,cd00338
MIIAAAYVRVSTDEQTDYSPAAQLADIKEYATQNGYHIPEEFIFMDEGISGKRADKRPAFQAMIRQARKKSNHIQYIIVHKFDRFARNKEDSVLYKALLKKDGVKVISVKEPIPQDDKFAVIYESMLEAMAEYYSLNLAEEVNKTMIKKAQAGKWQATAPFGYKNENKSLTIVPEEAKMIRYIFEQYIAGTSMFALSRQMNQMGYRTHRGNVFEHRTIQYILNNPVYKGYLRWTPGKKINRNFNDSASIVAKGDWEPIVSKEIWDAAAARFKSEKRTYYKHKRPETEGIHWLSGMVKCSSCGRSLVVGAKYKSGAVQFQCGGYCHGQCHDSHAISSNRLIPAILSELEKIAAHPDTEGCRYTIRRELPASDELDVYMPLLTKAQQRLKKAKDAYLNDIDTLEEYRSNKMNIEKEIAELKERIAEIEEQQNVPFDQAAFSTKIASVIEILRDDSRQMEDKRKAFKSICDKIIFHKHDSSLELFLIDQ

SEQ ID NO: 6716 - protein, 486 aa, Unknown
  Description of Unknown: Integrase B6717 sequence
  PTHR30461:SF3,IPR036162,PS51737,IPR011109,PTHR30461, PS00397,PF00239,G3DSA:1.10.10.2600,IPR006119,SSF53041, cd00338,SM00857,IPR025827,IPR038109,PS51736, IPR006118,PF13408,G3DSA:3.40.50.1390,PF07508,Coil
MPATPLEIGAAYVRVSTDDQTELSPDAQIRVIMDAAKADGFIIPKEYIFIEKKGISGRKADNRPEFQRMIAIAKSQKPAPFKRLYLWKFSRFARNQEESTFYKGILRKKCDVEIKSVSEPIMEGMFGRLIETIIEWFDEYYSINLSGEVLRGMTEKALREGYQATPCLGYRAVGEGKPFVVEEKSYAIVEYIFQTYHSGKDMTATARAANARGYRTRRGNLFDRRGINRILANRFYIGEVIWNGYSFQGTHEVRSSVTSLFDDVQKRIEKEYRPQKRREVSNNVHWLSGLLKCSICGGSLGYNRSNDQKKRPDFFQCWKYAKGMHPGSCCLAVHLAEKAVIESLEEVLETNELEYEYIQKTDDAVNAEEVAIQEALARLEVKERRIREAYENEIDTLEEYKQNKLRLKAEREELMADAERLRRQAEQSPAKVPSKEDIMRQIAHVHEILADPNISYEIKGNALRKIVKEIVFDRSQGHLHIHFYIS

SEQ ID NO: 6717 - protein, 486 aa, Unknown
  Description of Unknown: Integrase B6718 sequence
  PTHR30461:SF3,SM00857,IPR006118,G3DSA:1.10.10.2600,IPR036162, PS51737,G3DSA:3.40.50.1390,IPR006119,IPR038109,PF07508, IPR011109,SSF53041,PF00239,PTHR30461,PS00397, PS51736,Coil,cd00338
MKTALYIRVSTQEQAKEGYSIPHQKERLFRYCEAMNWEITEIYADEGISGSTIEKRPAATQMLQDAKHKKFENILILRVDRLCRNTKDLLEIVEILKKYDVSLNAVDQQIDYKTSIGKMTLTILGTFAEFEHSTIHERTMEGRKQKATQGIKSLGRRVPFGYDYINGNFVANSDAQIVKLIFEKVADGYGYNQVATFLRKNNVPTIDKLDWNRLHIKRIINNKIYMGHCVLKLKMVEVVDTVATNVESIVNEDLFKQAQKTISYRTNGKTTKYAYDDFIFADVLYCACCGWKMSPKKVKRAEPKVNEIKLEDRYYRYYKCIYNMCHPNKQTCKNTKVLNAEKFEKHFLIYMDYYVIELKKPIKNNKKISTSSMNKETIEIQIKELTQKKAKLLDRYLEGIIDDDSYFAKNNELIEQIKILETKLSFNEELLKIEKKEINLDYLNGLKFIITDLWSIMTNHEKRNFITKTFEKIEVNQGKIVKIILR

SEQ ID NO: 6718 - protein, 486 aa, Unknown
  Description of Unknown: Integrase B6719 sequence
  PTHR30461:SF3,cd00338,SM00857,IPR006118,G3DSA:1.10.10.2600, IPR036162,PS51737,G3DSA:3.40.50.1390,IPR006119,IPR038109, PF07508,IPR011109,SSF53041,PTHR30461,PS00397, PS51736,Coil,PF00239
MIIAAAYVRVSTDEQTDYSPAAQLADIKEYATHNGYHIPEEFIFMDEGISGKRADKRPAFQAMIRQARKKSNHIQYIIVHKFDRFARNKEDSVLYKALLKKDGVKVVSVKEPIPHDDKFAVIYESMLEAMAEYYSLNLAEEVNKTMIKKAQAGEWQATAPFGYKNENKSLTIVPEEAKMVLYIFEQYIAGTSMFALSRQMNQMGYRTHRGNVFEHRTIQYILNNPVYKGYLRWTPGKKINRNFNDSASIVAKGDWEPIVSKEIWDAAAARFKSEKRTYYKHKRPETEGIHWLSGMVKCSSCGRSLVVGAKYKSGAVQFQCGGYCHGQCHDSHAVSSNRLIPAILSEFEKIAAHPDTEGCRYTIRRELPASDELDVYVPLLAKAQQRLKKAKDAYLNDIDTLEEYRSNKMNIEKEIAELKEHIAEIEERQNMPFDQAAFSTKIASVIEILRDDSRQMEDKRKAFKSICDKIIFHKHDSSLELFLIDQ

SEQ ID NO: 6719 - protein, 486 aa, Unknown
  Description of Unknown: Integrase B6720 sequence
  PTHR30461:SF3,IPR036162,IPR011109,PTHR30461,PS00397, PF00239,G3DSA:1.10.10.2600,IPR006119,SSF53041,cd00338, SM00857,IPR025827,IPR038109,PS51736,IPR006118, PF13408,G3DSA:3.40.50.1390,PF07508,Coil
MPATPLEIGAAYVRVSTDDQTELSPDAQIRVIMDAAKADGFIIPKEYIFIEKKGISGRKADNRPEFQRMIAIAKSQKPAPFKRLYLWKFSRFARNQEESTFYKGILRKKCDVEIKSVSEPIMEGMFGRLIETIIEWFDEYYSINLSGEVLRGMTEKALREGYQATPCLGYRAVGEGKPFAVEEKSYAIVEYIFQTYHSGKDMTATARAANARGYRTRRGNLFDRRGINRILANRFYIGEVIWNGYSFQGTHEVRSSVTSLFDDVQKRIEKEYRPQKRREVSNNVHWLSGLLKCSICGGSLGFNRSNDQKKRPDFFQCWKYAKGMHPGSCCLAVHLAEKAVIESLEEVLETNELEYEYIQKTDDAVNAEEVAIQEALARLEVKERRIREAYENEIDTLEEYKQNKLRLKAEREELMADAERLRRQAEQSPAKVPSKEDIMRQIAHVHEILADPNISYEIKGNALRKIVKEIVFDRGKGHLHIHFYIS

SEQ ID NO: 6720 - protein, 486 aa, Unknown
  Description of Unknown: Integrase B6721 sequence
  PTHR30461:SF3,SM00857,G3DSA:1.10.10.2600,IPR036162,PF13408, PS51737,G3DSA:3.40.50.1390,IPR025827,IPR006119,IPR038109, PF07508,IPR011109,SSF53041,PF00239,PTHR30461, PS51736,Coil,cd00338
MKAAAYARYSTDKQTENSIAYQMNAITKYCLDHDIDLISAFSDEAESGTNTDREGFQNLVRAAQNKEFEAVVIYDISRGSRDVADWFQFRKTMRALGVQVISTNQQLGDITNPNDFLIELINVGLGQHMVLDTRKKSMAGMLERAKKGLYCGGNCPLGYKIENGRYVIEEKEAEVVRQIFNRYAQGESYNQIIDGLNGAVGKFGRPIGKNSLHSILANERYTGVYIWNERNVRIMRKWAGGKKNPNPVIIEGIIPQIIDKTTWERVKKRMETRKNGTNKAKREYLLTGLIECAECGATYVGHCNVAHRKDGSVRENRYYECGNKYRTRTCHSKNLNADELELFVVTQIQDTLRNWDPSEVARKYIKEIQGATADCTEEKRELVDVEHQINNGVKAVLSGMRIPELDKEIDRLRQRKLDLENIIAEKSQQTNHSYSADEIEAALSDLIKNFDPKEAVKQLVQKIYANADGSCTVHIGVHKIGAGDRT

SEQ ID NO: 6721 - protein, 486 aa, Unknown
  Description of Unknown: Integrase B6722 sequence
  PTHR30461:SF3,cd00338,SM00857,IPR006118,G3DSA:1.10.10.2600, IPR036162,PS51737,G3DSA:3.40.50.1390,IPR006119,IPR038109, PF07508,IPR011109,SSF53041,PTHR30461,PS00397, PS51736,Coil,PF00239
MIIAAAYVRVSTDEQTDYSPAAQLADIKEYATHNGYHIPEEFIFMDEGISGKRADKRPAFQAMIRQARKKSNHIQYIIVHKFDRFARNKEDSVLYKALLKKDGVKVISVKEPIPQDDKFAVIYESMLEAMAEYYSLNLAEEVNKTMIKKAQAGEWQATAPFGYKNENKSLTIVPEEAKMIRYIFEQYIAGTSMFALSRQMNQMGYRTHRGNVFEHRTIQYILNNPVYKGYLRWTPGKKINRNFNDSASIVAKGDWEPIVSKEIWDAAAARFKSEKRTYYKHKRPETEGIHWLSGMVKCSSCGRSLVVGAKYKSGAAQFQCGGYCHGQCHDSHAVSSNRLIPAILSELEKIAAHPDTEGCRYTIRRELPASDELDVYVPLLAKAQQRLKKAKDAYLNDIDTLEEYRSNKMNIEKEIAELKEHIAEIEERQNMPFDQAAFSTKIASVIEILRDDSRQMEDKRKAFKSVCDKIIFHKHDSSLELFLIDQ

SEQ ID NO: 6722 - protein, 486 aa, Unknown
  Description of Unknown: Integrase B6723 sequence
  PTHR30461:SF3,IPR036162,PS51737,IPR011109,PTHR30461, PS00397,PF00239,G3DSA:1.10.10.2600,IPR006119,SSF53041, cd00338,SM00857,IPR025827,IPR038109,PS51736, IPR006118,PF13408,G3DSA:3.40.50.1390,PF07508,Coil
MRRVVIYVRVSTQEQATEGYSIGEQLERLRLYCQAHGWILVEEYVDPGYSGANLDRPAISKLISDIGSGTFDTVLVYKLDRLSRSQKDTMHLIEDVFMANNIDFISMSENFDTSTPLGRAMIGILSVFAQLERDQIKERMGMGKEARAKEGKWQGGSTVPVGYEYDVSTGELIVNEYEAMQVREVFNLVLSGMPYKTIANKLTAKGYTYNAISGHVGIWDANRIKYVLTNKLYIGYIRYKDTWFPGTHEPIIDTETFEKAQLLFKERSASNVMHIKKRQGQISYLGGLLYCKKCGARYARNSGRKWKNNEPPLYYSCYSRSHKVPKMIKDPNCKNKTWRMAELDNIVFAEIKKLALEPEYITTIKEREKTKQDTSNKADILRKEIRKIEEQVSRFLDLYGLGAFTIEQVTAKVQPLNQRKQDIEQELTELVTDETILSEDETREIVRNFEEVLERSDFNEIRMTIDSLVRYIELNDDTVYIHWKFT

SEQ ID NO: 6723 - protein, 486 aa, Unknown
  Description of Unknown: Integrase B6724 sequence
  PTHR30461:SF3,IPR036162,PS51737,IPR011109,PTHR30461, PS00397,PF00239,G3DSA:1.10.10.2600,IPR006119,SSF53041, cd00338,SM00857,IPR025827,IPR038109,PS51736, IPR006118,PF13408,G3DSA:3.40.50.1390,PF07508,Coil
MKKIAAAYVRVSTHMQEELSPDAQIRLIKEWASGHGYDLPEEFVFVDKGISGRKVKKRPAFLRMISMAKSKPSPFDAILVWKFSRFARNQEESIVYKAMLRNKHKIDVISISEPISDDVYGGLIERIIEWMDEFYSIRLAEDVKRGMTENALRGNFQASPAFGYKVEQKGQAPVVVEDQANIVRMIFNLYVTSGKSFYDISRHLNRLGYKTKKGGNFEARTIKYIIQNPIYKGFLRWNYADGTTHVINDESEWIVKKAPQIPVIVSEELWNQANDRLKHEYRPKNGKPVSQKRHWLSGVVKCSSCGASLATSVHTDKRYNRVYRNFQCYKFTKGKCLVSHAISEKKLVPLVLDVLKEDMNKAYIEYEHISTEQDNKQDILKVQLKRLESREKRIKEAYLNGVDSLEEYKENKEQINAERDMLLHQADESSEEQEKVDMPGKIRGVYDILRSDEYTKEEKHAAITSIVKKIVFDRENKTLDFYYYTK

SEQ ID NO: 6724 - protein, 486 aa, Unknown
  Description of Unknown: Integrase B6725 sequence
  PTHR30461:SF3,cd00338,SM00857,G3DSA:1.10.10.2600,IPR036162, PF13408,PS51737,G3DSA:3.40.50.1390,IPR025827,IPR006119, IPR038109,PF07508,IPR011109,SSF53041,PTHR30461, Coil,PF00239
MKNGFTIINEYCDRAISGKTDNRPSFQRLIKDSEKGQFEAVIMYTLDRFARNRYDSAIYKAKLKKNGVRVFYAKQPMPDTPEGIILESVLEGYAEYYSENLSRNIKRGMKENALQCIATGGAGLALGYTVGEDRKYQIDPVGAKIVQEIFQMYADGMSATQIINYCNEKGYKTSRGNAFNKNSLRTLLKNEKYIGTYKFMDVVVPNGMPAIVDKALFEKVQAMLSHNAKARARTKAHEDYLLTTKLFCGHCGSAMVGESGTSKSGKVHHYYKCIDRKRKHQCNKKVEKKDWIEELVVRFTVQHVLTDENIEKIATRAMEVFEKESADTTYLTGLQDQLKEVKKKIKNLMTAIEQGIITSTTKERLEELESEKNHIEGQIAKEEMKKPLLTKERIMFWLLSFKSGDVNDLEYQRRVVDTLVNSVYVYDDGDKGRRIVFTFNISGQNTATISCSDIACSAPPNSANPNTLFIVKHCFGFVLILEDVDA

SEQ ID NO: 6725 - protein, 486 aa, Unknown
  Description of Unknown: Integrase B6726 sequence
  PTHR30461:SF3,IPR036162,PS51737,IPR011109,PTHR30461, PS00397,PF00239,G3DSA:1.10.10.2600,IPR006119,SSF53041, cd00338,SM00857,IPR025827,IPR038109,PS51736, IPR006118,PF13408,G3DSA:3.40.50.1390,PF07508,Coil
MKKIAAAYIRVSTHMQEELSPDAQIRLIKEWANGHGYDLPEEFIFIDKGISGRKVRKRPSFLRMISMAKSKPSPFDAILVWKFSRFARNQEESIVYKAMLRNKHKIDVISISEPISDDVYGGLIERIIEWMDEFYSIRLAEDVKRGMTENALRGNFQSSPAFGYKVEKGQGLVIVEDQANIVRMIFNLYANSGMGFYDIARHLNRLGCTTKKGGAFETRTIKYIIQNPIYKGYLRWNYANGTTHVVNDETEWIIVKSPLVPVIVPEELWDRANERLKNEYHPKNGKPVSKHRHWLSGLVKCSSCGASLSTSVQYRRDRTYINFQCYKYLKGKCMVSHGISEKKLVPLILNVLKEDMNKSYIECERIEKVVENQQDILDVQLKRLDAREVRIKEAYLNGVDSLAEYKSNKEQIQQERELLLQQSQNHDKEEKGSNELPNKIRGVYDILVSDQCSKDEKQTAIRSIVKKIVFDKENKTLDFHYYIKED

SEQ ID NO: 6726 - protein, 486 aa, Unknown
  Description of Unknown: Integrase B6727 sequence
  PTHR30461:SF3,IPR036162,PS51737,IPR011109,PTHR30461, PS00397,PF00239,G3DSA:1.10.10.2600,IPR006119,SSF53041, cd00338,SM00857,IPR025827,IPR038109,IPR006118, PF13408,G3DSA:3.40.50.1390,PF07508,Coil
MKKIAAAYIRVSTHMQEELSPDAQLRCIRAWGDAQGYYVPDEFVFIDSGISGRKAKKRHDFLRMIGLAKMKPSPFEAILLWKFNRFARNQEESIFYKSMLRKKCKVDVISTTQQTTKDIYGDLIERIIEWTDEFFSIQLGEDVKRGMTENALRGNFQASPAFGYKVEKGLGLVIVEDQANIVRTIFNLYANSRMGFYEIARHLNRLGYKTKKGGAFEARAIRYIIQNPIYKGYLRWNYANGTTHAVNDESEWIIVKSPLVPVIVPEELWDRANERLKNEYHPKNGKPVSKHRHWLSGLVKCSSCGASLSTSVQYRRDRTYINFQCYKYLKGKCMVSHGISEKKLVPLILNVLKEDMNKSYIECERIEKVVENQQDILDVQLKRLDAREVRIKEAYLNGVDSLAEYKSNKEQIQQERELLLQQSQNHDKEEKGSNELPNKIRGVYDILVSDQCSKDEKQTAIRSIVKKIVFDKENKTLDFHYYIKED

SEQ ID NO: 6727 - protein, 486 aa, Unknown
  Description of Unknown: Integrase B6728 sequence
  PTHR30461:SF3,IPR036162,PS51737,IPR011109,PTHR30461, PS00397,PF00239,G3DSA:1.10.10.2600,IPR006119,SSF53041, cd00338,SM00857,IPR025827,IPR038109,PS51736, IPR006118,PF13408,G3DSA:3.40.50.1390,PF07508,Coil
MKKIAAAYVRVSTHMQEELSPDAQIRLIKEWANGHGYDLPEEFVFIDKGISGRKVKKRPAFLRMISMAKSKPSPFDAILVWKFSRFARNQEESIVYKAMLRNKHKIDVISISEPISDDVYGGLIERIIEWMDEFYSIRLAEDVKRGMTENALRGNFQASPAFGYKIEQKGQAPVVVEDQANIVRMIFNLYVTSGKSFYDISRHLNRLGYKTKKGGNFEARTVKYIIQNPIYKGFLRWNYADGTTHVINDESEWIVKKAPQIPVIVSEELWNQANDRLEHEYRPKNGKPVSQKRHWLSGVVKCSACGASLATSVHTDKRYNRVYRNFQCYKFTKGKCLVSHAISEKKLVPLVLDVLKEDMNKAYIEYEHISTEPDNKQDILKVQLNRLELREKRIKEAYLNGVDTLEEYKDNKEQIKTERDMLLRQADESSEDQEKFDMPGKIRGVYDILRSDEYSKEEKHAAITSIVKKIVFDRENKTLDFYYYTK

SEQ ID NO: 6728 - protein, 486 aa, Unknown
  Description of Unknown: Integrase B6729 sequence
  PTHR30461:SF3,IPR036162,IPR011109,PTHR30461,PS00397, PF00239,G3DSA:1.10.10.2600,IPR006119,SSF53041,cd00338, SM00857,IPR025827,IPR038109,PS51736,IPR006118, PF13408,G3DSA:3.40.50.1390,PF07508,Coil
MPATPLEIGAAYVRVSTDDQTELSPDAQIRVIMDAAKADGFIIPKEYIFIEKKGISGRKAGNRPEFQRMIAIAKSQKPAPFKRLYLWKFSRFARNQEESTFYKGILRKKCDVEIKSVSEPIMEGMFGRLIETIIEWFDEYYSINLSGEVLRGMTEKALREGYQTTPCLGYRAVGEGKPFAVEEKSYAIVEYIFQTYHSGKDMTATARAANARGYRTRRGNLFDRRGINRILANRFYIGEVIWNGYSFQGTHEVRSSVTSLFDDIQKRIEKEYRPQKRREVSNNVHWLSGLLKCSICGGSLGYNRSNDQKKRPDFFQCWKYAKGMHPGSCCLAVHLAEKAVIESLEEVLETNELEYEYIQKTDDAVNAEEIVIQEALARLEVKERRIREAYENEIDTLEEYKQNKLRLKAEREELMADAERLRRQAEQSPAKVPSKEDIMRQIAHVHEILADPNISYEIKGNALRKIVKEIVFDRGKGHLHIHFYIS

SEQ ID NO: 6729 - protein, 486 aa, Unknown
  Description of Unknown: Integrase B6730 sequence
  PTHR30461:SF3,cd00338,SM00857,IPR006118,G3DSA:1.10.10.2600, IPR036162,PS51737,G3DSA:3.40.50.1390,IPR006119,IPR038109, PF07508,SSF53041,IPR011109,PTHR30461,PS00397, PS51736,Coil,PF00239
MKTAIYIRVSTQEQAKEGYSIPHQKEKLFKYCQAMNWEIIEIYADEGISGSTIEKRPAATQMLQDAKQKKFENILILRVDRLCRNTKDLLEIVEILKKYDVSLNAVDQQIDYKTSIGKMTLTILGTFAEFEHSTIHERTMEGRKQKASQGIKSLGRRVPFGYDYINGNFVANSDAQIVKLIFEKVADGYGYNQVATFLRKNNVPTIDKLDWNRLHIKRIINNKIYMGHCVLKLKMVEVVDTVATNVESIVNEDLFKQAQKTISYRTNGKTTKYAYDDFVFADVLYCSCCSWKMSPKKVKRAEPKVNEIKLEDRYYRYYKCIYNMCHPNKQTCENTKVLNAEKFEKHFLIYMDYYVIELKKPIKNNKKISTSSMNKETIEIQIKELTQKKAKLLDRYLEGIIDDDSYFAKNNELIEQIKILETKLSFNEELLKIEKKEINLDYLNGLKFIITDLWSIMTNHEKRNFITKTFEKIEVSNGKIVKVSLR

SEQ ID NO: 6730 - protein, 486 aa, Unknown
  Description of Unknown: Integrase B6731 sequence
  PTHR30461:SF3,IPR036162,PS51737,IPR011109,PTHR30461, PS00397,PF00239,G3DSA:1.10.10.2600,IPR006119,SSF53041, cd00338,SM00857,IPR025827,IPR038109,PS51736, IPR006118,PF13408,G3DSA:3.40.50.1390,PF07508,Coil
MKKIAAAYVRVSTHMQEELSPDAQIRLIKEWANGHGYDLPEEFVFIDKGISGRKVKKRPAFLRMISMAKSKPSPFDAILVWKFSRFARNQEESIVYKAMLRNKHKIDVISISEPISDDVYGGLIERIIEWMDEFYSIRLAEDVKRGMTENALRGNFQASPAFGYKVEQKGQAPVVVEDQANIVRMIFNLYVTSGKSFYDISRHLNRLGYKTKKGGNFEARTIKYIIQNPIYKGFLRWNYADGTTHVINDESEWIVKKAPQIPVIVSEELWNQANDRLKHEYRPKNGKPVSQKRHWLSGVVKCSSCGASLATSVHTDKRYNRVYRNFQCYKFTKGKCLVSHAISEKKLVPLVLDVLKEDMNKAYIEYEHISTEQDNKQDILKVQLKRLESREKRIKEAYLNGVDSLEEYKENKEQINAERDMLLHQADESSEEQGKIDMPGKIRGVYDILRSDEYTKEEKHAAITSIVKKIVFDRENKTLDFYYYTK

SEQ ID NO: 6731 - protein, 486 aa, Unknown
  Description of Unknown: Integrase B6732 sequence
  PTHR30461:SF3,IPR036162,PS51737,IPR011109,PTHR30461, PS00397,PF00239,G3DSA:1.10.10.2600,IPR006119,SSF53041, cd00338,SM00857,IPR025827,IPR038109,PS51736, IPR006118,PF13408,G3DSA:3.40.50.1390,PF07508,Coil
MRRVVIYVRVSTQEQATEGYSIGEQLERLRLYCQAHGWILVEEYIDPGYSGANLDRPAISKLISDIGSGTFDTVLVYKLDRLSRSQKDTMHLIEDVFMANNIDFISMSENFDTSTPLGRAMIGILSVFAQLERDQIKERMGMGKEARAKEGKWQGGSTVPVGYEYDVSTGELIINEYEAMQVREVFNLVLSGMPYKTIANKLTAKGYTYNAISGHVGIWDAKRIKYVLTNKLYIGYIRYKDTWFPGTHEPIIDTETFEKAQLLFKERSASNVVCIKKRQGQTSYLGGLLYCKKCGARYARNSGKKWKNNEPPLYYSCYSRSHKVPKMIKDPNCKNKTWRMTDLDNIVLDEIKKLSLEPEYINTIKERETSKQATSNKADILKKEIRKIEEQVSRFLDLYGLGAFTIEQVTAKVQPLNQRKQDIEQELTELVTDETILSEDETREIVRNFDKVLERSDFNEIRMTIDSLVRYIELNDDTVYIHWKFT

SEQ ID NO: 6732 - protein, 486 aa, Unknown
  Description of Unknown: Integrase B6733 sequence
  IPR036162,PS51737,IPR011109,PTHR30461,PS00397, PF00239,G3DSA:1.10.10.2600,IPR006119,SSF53041,cd00338, SM00857,IPR025827,IPR038109,PS51736,IPR006118, PF13408,G3DSA:3.40.50.1390,PF07508,Coil
MTTIDLRIAAAYIRVSTDDQVELSPASQLVEIRKWASRNGYIVPDEFVFMDEGISGRGVKKRDEFRRMIGVAKTKPKPFDAILLWKFSRFARNRDDAVMYKSILRKQLGIDVISISEPVAEGGMGLITEALIEAMDEYYSINLAQEVKRGMEEKHRRGEVQSNPPYGYGIKDHVFVPKPPEDGFVKELFRRYLAGEGCFPLARWMNECGQRTHRGGRFENRTIEYILRNPVYIGKLRWNPAGRTRRDFSNENVVLVDGKHELLIDEETFNAVQRRIDEQKLLYPRYARASGTQKHWISGLVRCAACGGGLIVNTPDYMACNNYVRGSCRVRQTVRRDALEAALISRLREDAARGSSLTFDVVRSSDGSASSLSAVEAARDFAVRMLDRLRDAYLTGADTVEEYKASKAAVQKRIADLDAQIAAMQKEDQAAADPKLLRSALRAVVKTLESPDTTVAEKNAAVRSVADNITWNKAANTLTIHYRLVL

SEQ ID NO: 6733 - protein, 486 aa, Unknown
  Description of Unknown: Integrase B6734 sequence
  PTHR30461:SF3,cd00338,SM00857,G3DSA:1.10.10.2600,IPR036162, PF13408,IPR025827,G3DSA:3.40.50.1390,PS51737,IPR006119, IPR038109,PF07508,IPR011109,SSF53041,PTHR30461, Coil,PF00239
MKNGFTIINEYCDRAISGKTDNRPSFQRLIKDSEKGQFEAVIMYTLDRFARNRYDSAIYKAKLKKNGVRVFYAKQPMPDTPEGIILESVLEGYAEYYSENLSRNIKRGMKENALQCIATGGAGLALGYTVGEDRKYQIDPVGAKIVQEIFQMYADGMSATQIINYCNEKGYKTSRGNAFNKNSLRTLLKNEKYIGTYKFMDVVVPNGMPAIVDKALFEKVQAMLSHNAKARARTKAHEDYLLTTKLFCGHCGSAMVGESGTSKSGKAHHYYKCIDRKRKHQCIKKVEKKDWIEELVVRFTVQHVLTDENIEKIATRAMEVFEKESADTTYLTGLQDQLKEVKKKIKNLMTAIEQGIITSTTKERLEELESEKNHIEGQIAKEEMKKPLLTKERIMFWLLSFKSGDVNDLEYQRRVVDTLVNSVYVYDDGDKGRRIVFTFNISGQNTATISCSDIACSAPPNSANPNTLFIVKHCFGFVLILEDVDV

SEQ ID NO: 6734 - protein, 485 aa, Unknown
  Description of Unknown: Integrase B6735 sequence
  PTHR30461:SF3,SM00857,G3DSA:1.10.10.2600,IPR036162,PF13408, PS51737,IPR025827,G3DSA:3.40.50.1390,IPR006119,IPR038109, PF07508,SSF53041,IPR011109,PF00239,PTHR30461, PS51736,Coil,cd00338
MGETYGVVNRNAMRVALYPRVSTLEQAKDGYSINEQTERMIKYCEAKGWVVHKIYTDAGYSGADTDRPGLQSLIKDAESNKVNAVLVYKLDRLSRSQKDTLTLIEDVFLPNNVDFISMTENLDTSTPFGRAMIGILSVFAQLEREQIKERMEVGKIGRAKEGKWCGSRYVPIGYRVENDELVVHEYEAMQIREMFRLFNMRISQRRVAEMLQSKGYRTTYDGNWNRHNIRPLLENKHYIGMVSYKGEWYEGIHKPIIDKETFEKTQAILAERDEDANSRISRINAPLAGMIRCGHCGNKFFFRRAKTKNSAKLYCNCYKRSCRAGKWKDIPKEERCKNKIWKAEELEKEVFDEVRKLALHPGSFDVSSTESDENAMKIKVISKRVEEIDSQLDKLIDLYTLGTLDINVIKSRTDALLAEKEKLEVNMRSLENKEKMSKEEAVEIASSLCDVIDSGDIDEIKALVQELIKEIVVDEEDLHVYWKFA

SEQ ID NO: 6735 - protein, 485 aa, Unknown
  Description of Unknown: Integrase B6736 sequence
  PTHR30461:SF3,IPR036162,PS51737,IPR011109,PTHR30461, PS00397,PF00239,G3DSA:1.10.10.2600,IPR006119,SSF53041, cd00338,SM00857,IPR025827,IPR038109,PS51736, IPR006118,PF13408,G3DSA:3.40.50.1390,PF07508,Coil
MIQRGACYLRVSTNDQLEFSPDAQLRAIKTYAKNNNIIIDDDYIFIDEGISGRKASKRPAFQQMIKIAKSKPKKFDVILVHKFDRFARSREDSVVYKSLLRKECDIKVISITESIEDDKFSVILEAMLEAMAEYYSLNLADEVKKGMTEKAIRGQYQSSPPFGYKMENKKLVIIEDEAQVVRMIFDKFLNYDPSFLRLAKMVNALGYKTHRGGLFENRTIEYILNNPVYCGMARWTPTGKIRRNYSSSDSIVTKSEHTPIISEEVFNQCKEKLAKMKEINRRYYKGTNPQNLHWLNGLVRCKECGKTLVRSQKDYYQCSGYVKGACSTSQLIRIDKIESTILEQIKKDFDSKLKLNVKINSKSFSDNEAQIIYNQLEKLKEKESRIKEAYINGIDSIEEYKANKKDLQKQKEYLNNKLTESKNGLSIKSNDTIMKEQLRSYYEILSNPNVEVQRKYEISHLLIDRIEFSKTASTLDLLYKLYQME

SEQ ID NO: 6736 - protein, 485 aa, Unknown
  Description of Unknown: Integrase B6737 sequence
  SM00857,IPR006118,G3DSA:1.10.10.2600,IPR036162,PS51737, G3DSA:3.40.50.1390,Coil,IPR006119,IPR038109,PF07508, IPR011109,SSF53041,PS00397,PS51736,cd00338, PF00239
MKIAAAYVRVSTEEQTELSPDSQVKLIREYAKKNGYIVPKEFIFHDDGISGRSTAKRQGFNQMIGTAKLKPKPFDAILLWKFSRFARNREDSIVYKSMLRKLGIDVISISENVGDDKMSVLIEAMIEAMDEYYSINLAEEVKRGMTEKFGRGLKVSGPPLGYDMKNGEFVVNEQGAEVVRHIFDMYVNQDMGYLNIARELNAEGIRTLHGNDFETRTIAYIIQNPVYIGMQRWTPGGGGSKGHYRSAIADKVVITQAHHPAIIDKEIFEKAQQKAAKARRPYERSGSTKHEYMLRGLLKCSSCGSNLTMASVKSGTLQCYQYAHGRCKESHAITIGKIDKAVIEDIQGLVDGTATDYKLVDQSPTKPKKDTSKFETQLERERMKLERVKAAYADGIDTLEEYKRNKSEVLASIAELESKLRQAQPPKPQHTADRLPDLKVRAQEVLKVITSPNATPVEKNNALRTIVDKVVFDRKTSSIEMYYLC

SEQ ID NO: 6737 - protein, 485 aa, Unknown
  Description of Unknown: Integrase B6738 sequence
  PTHR30461:SF3,SM00857,IPR006118,G3DSA:1.10.10.2600,IPR036162, PS51737,G3DSA:3.40.50.1390,Coil,IPR006119,IPR038109, PF07508,SSF53041,IPR011109,PTHR30461,PS00397, PS51736,cd00338,PF00239
MKIAAAYVRVSTEEQTELSPDSQVKLIREYAKKNGYIVPKEFIFHDDGISGRSTAKRQGFNQMIGTAKLKPKPFDAILLWKFSRFARNREDSIVYKSMLRKLGIDVISISENVGDDKMSVLIEAMIEAMDEYYSINLAEEVKRGMTEKFGRGLKVSGPPLGYDMKNGEFVVNEQGAEIVRRIFDMYVNQDMGYLNIARELNAEGIRTLHGNDFETRTIAYVIKNPVYIGMQRWTPGGGGSKGHYRSAIADKVVITQAHHPAIIDKEIFEKAQQKAAKTRRPYERSGSTKHEYMLRGLLKCSSCGSNLTMASVKSSTLQCYQYAHGRCKESHAITIGKIDKAVTEDIQGLVDGTATDYKLVDQSPVKPKKDTSKFETQLERERMKLERVKAAYADGIDTLEEYKRNKSEVLASIAELESKLRQAQPSKPQPTADRLPDLKVRAQEVLNVITSPTATPKEKNNALRTIVDKVVFDRKTSSIEMYYLC

SEQ ID NO: 6738 - protein, 485 aa, Unknown
  Description of Unknown: Integrase B6739 sequence
  PTHR30461:SF3,SM00857,IPR006118,G3DSA:1.10.10.2600,IPR036162, PS51737,G3DSA:3.40.50.1390,Coil,IPR006119,IPR038109, PF07508,IPR011109,SSF53041,PTHR30461,PS00397, PS51736,cd00338,PF00239
MKIAAAYVRVSTEEQTELSPDSQVKLIREYAKKNGYIVPKEFIFHDDGISGRSTAKRQGFNQMIGTAKLKPKPFDAILLWKFSRFARNREDSIVYKSMLRKLGIDVISISENVGDDKMSVLIEAMIEAMDEYYSINLAEEVKRGMTEKFGRGLKVSGPPLGYDMKNGEFVVNEQGAEIVRRIFDLYVNQDMGYLNIARELNAEGIRTLHGNDFETRTIAYIIKNPVYIGMQRWTPGGGGSKGHYRSAVADKVVITQAHHPAIIDKEIFEKAQQKAAKARRPYERSGSTKHEYMLRGLLKCSSCGSNLTMGSVKSGTLQCYQYAHGRCKESHAITIGKIDKAVIEDIQGLVDGTATDYKLVDQSPAKPKKDTSKFETQLERERMKLERVKAAYADGIDTLEEYKRNKSEVLASIAELESKLRQAQPPKPQPTADRLPDLKVRAQEVLKVITSPNATPLEKNNALRTIVDKVVFDRKTSSIEMYYLC

SEQ ID NO: 6739 - protein, 485 aa, Unknown
  Description of Unknown: Integrase B6740 sequence
  PTHR30461:SF3,SM00857,IPR006118,G3DSA:1.10.10.2600,IPR036162, PS51737,G3DSA:3.40.50.1390,Coil,IPR006119,IPR038109, PF07508,SSF53041,IPR011109,PTHR30461,PS00397, PS51736,cd00338,PF00239
MKIAAAYVRVSTEEQTELSPDSQVKLIREYAKKNGYIVPKEFIFHDDGISGRSTAKRQGFNQMIGTAKLKPKPFDAILLWKFSRFARNREDSIVYKSMLRKLGIDVISISENVGDDKMSVLIEAMIEAMDEYYSINLAEEVKRGMTEKFGRGLKVSGPPLGYDMKNGEFVVNEQGAEIVRRIFDMYVNQDMGYLNIARELNAEGIRTLHGNDFETRTIAYIIKNPVYIGMQRWTPGGGGSKGHYRSAVAENVVVTQAHHPAIIDKKIFEKAQQKAAKARRPYERSGSTKHEYMLRGLLKCSSCGSNLTMGSVKSGTLQCYQYAHGRCKESHAITIGKIDKAVIEDIQGLVDGTATDYKLVDQSPAKPKKDTSKYETQLERERMKLERVKAAYADGIDTLEEYKHNKSEVLASIAELESKLRQAQPPKPQHTADRLPDLKVRAQEVLKVITSPNATPMEKNNALRSIVDKVVFVRKTSSIEMYYLC

SEQ ID NO: 6740 - protein, 485 aa, Unknown
  Description of Unknown: Integrase B6741 sequence
  PTHR30461:SF3,SM00857,IPR006118,G3DSA:1.10.10.2600,IPR036162, PS51737,G3DSA:3.40.50.1390,Coil,IPR006119,IPR038109, PF07508,SSF53041,IPR011109,PTHR30461,PS00397, PS51736,cd00338,PF00239
MKIAAAYVRVSTEEQTELSPDSQVKLIREYAKKNGYIVPKEFIFHDDGISGRSTAKRQGFNQMIGTAKLKPKPFDAILLWKFSRFARNREDSIVYKSMLRKLGIDVISISENVGDDKMSVLIEAMIEAMDEYYSINLAEEVKRGMTEKFGRGLKVSGPPRGYDMKNGEFVVNEQGAEIVRRIFDMYVNQDMGYLNIARELNAEGIRTLHGNDFETRTIAYIIKNPVYIGMQRWTPGGGGSKGHYRSAVAENVVVTQAHHPAIIDKEIFEKAQQKAAKARRPYERSGSTKHEYMLRGLLKCSSCGSNLTMASVKSGTLQCYQYAHGRCKESHAITIGKIDKAVIEDIQGLVDGTATDYKLVDQSPVKPKKDTSKFETQLERERMKLERVKAAYADGIDTLEEYKRNKSEVLASITELESKLRQAQPSKPQSTADRLPDLKVRAQEVLKVITSPNATPIEKNNALRTIVDKVVFDRKTSSIEMYYLC

SEQ ID NO: 6741 - protein, 485 aa, Unknown
  Description of Unknown: Integrase B6742 sequence
  PTHR30461:SF3,SM00857,IPR006118,G3DSA:1.10.10.2600,IPR036162, PS51737,G3DSA:3.40.50.1390,Coil,IPR006119,IPR038109, PF07508,SSF53041,IPR011109,PTHR30461,PS00397, PS51736,cd00338,PF00239
MKIAAAYVRVSTEEQTELSPDSQVKLIREYAKKNGYIVPKEFIFHDDGISGRSTAKRQGFNQMIGTAKLKPKPFDAILLWKFSRFARNREDSIVYKSMLRKLGIDVISISENVGDDKMSVLIEAMIEAMDEYYSINLAEEVKRGMTEKFGRGLKVSGPPLGYDMKNGEFVVNEQGAEIVHRIFDMYVNQDMGYLNIARELNAEGIRTLHGNDFETRTIAYIIKNPVYIGMQRWTPGGGGSKGHYRSAVAENVVVTQAHHPAIIDKELFEKAQQKAAKARRPYERSGSTKHEYMLRGLLKCSSCGSNLTMGSVKSGTLQCYQYAHGRCKESHAITIGKIDKAVIEDIQGLVDGTATDYKLVDQSPVKPKKDTSKYETQLERERMKLERVKAAYADGIDTLEEYKHNKSEVLASIAELESKLRQAQPPKPQHTADRLPDLKVRAQEVLKVITSPNATPMEKNNALRSIVDKVVFVRKTSSIEMYYLC

SEQ ID NO: 6742 - protein, 485 aa, Unknown
  Description of Unknown: Integrase B6743 sequence
  PTHR30461:SF3,SM00857,IPR006118,G3DSA:1.10.10.2600,IPR036162, PS51737,G3DSA:3.40.50.1390,Coil,IPR006119,IPR038109, PF07508,SSF53041,IPR011109,PTHR30461,PS00397, PS51736,cd00338,PF00239
MKIAAAYVRVSTEEQTELSPDSQVKLIREYAKKNGYIVPKEFIFHDDGISGRSTAKRQGFNQMIGTAKLKPKPFDAILLWKFSRFARNREDSIVYKSMLRKLGIDVISISENVGDDKMSVLIEAMIEAMDEYYSINLAEEVKRGMTEKFGRGLKVSGPPLGYDMKNGEFVVNEQGAEIVHRIFDMYVNQDMGYLNIARELNAEGIRTLHGNDFETRTIAYIIKNPVYIGMQRWTPGGGGSKGHYRSAAAENVVVTQAHHPAIIDKEIFEKAQQKAAKARRPYERSGFTKHEYMLRGLLKCSSCGSNLTMGSVKSGTLQCYQYAHGRCKESHAITIGKIDKAVIEDIQGLVDGTATDYKLVDQSPAKPKKDTSKFETQLERERMKLERVKAAYADGIDTLEEYKRNKSKVLASIAELESKLRQAQPPRAQPTADRLPDLKVRAQEVLKVITSPNATPVEKNNALRTIVDKVVFDRKTSSIEMYYLC

SEQ ID NO: 6743 - protein, 485 aa, Unknown
  Description of Unknown: Integrase B6744 sequence
  PTHR30461:SF3,SM00857,IPR006118,G3DSA:1.10.10.2600,IPR036162, PS51737,G3DSA:3.40.50.1390,Coil,IPR006119,IPR038109, PF07508,SSF53041,IPR011109,PTHR30461,PS00397, PS51736,cd00338,PF00239
MKIAAAYVRVSTEEQTELSPDSQVKLIREYAKKNGYIVPKEFIFHDDGISGRSTAKRQGFNQMIGTAKLKPKPFDAILLWKFSRFARNREDSIVYKSMLRKLGIDVISISENVGDDKMSVLIEAMIEAMDEYYSINLAEEVKRGMTEKFGRGLKVSGPPLGYDMKNGEFVVNEQGAEIVRRIFDMYVNQDMGYLNIARELNAEGIRTLHGNDFETRTIAYIIKNPVYIGMQRWTPGGGGSKGHYRSAVAENVVVTQAHHPAIIDKEIFEKAQQKAVKTRRPYERSGSTKHEYMLRGLLKCSSCGSNLTMASVKSGTLQCYQYAHGRCKESHAITIGKIDKAVIEDIQGLVDGTATDYKLVDQSHVKPKKDTSKFETQLERERMKLERVKAAYADGIDTLEEYKHNKSEVLASIAELESKLRQAQPPKPQHTADRLPDLKVRAQEVLKVITSPNATPMEKNNALRTIVDKVVFDRKTSSIEMYYLC

SEQ ID NO: 6744 - protein, 485 aa, Unknown
  Description of Unknown: Integrase B6745 sequence
  PTHR30461:SF3,cd00338,SM00857,IPR006118,G3DSA:1.10.10.2600, IPR036162,PS51737,G3DSA:3.40.50.1390,IPR006119,IPR038109, PF07508,IPR011109,SSF53041,PTHR30461,PS00397, PS51736,Coil,PF00239
MKLAACYIRVSTDDQLEYSPDSQLEKIKEYCARNGYILNQDNIFVEEEGVSGRKASRRQEFQHMIAKAKSKPKPFDVIIVWKFSRFARNREDSIVYKSMLKKIGIDVISVTENVGDDKMSVITEAIIEAMDEYYSLNLAEEVRRGMTERIKHGNHNSVAPFGYRIVDKQLVIFPEQAEIIREVYSRYLNGWGQKQIAAWLNTLGITTNRGGKIENRTVNYWLRNPVYHGYVRWNPAERASTKRYIDTPDTIIVKGHHEPIIDEETWEAVQKRCDEVRMRFSKHRRENIPKEYALSGVIKCSSCGASLSTTCGQKYLQCAKYAHGLCSTSHHVSYEMLWLMLLSTIEGDLTSGNFQLERISRPVVESDAAALRAQIERTEMKLRRIREAFEAGIDTLEEYKSGKARITAELESLRERAAEVNPTDREVTPEEKRAFAEKHLRTLVKLRDPEVGELEKNHLLKEFVKKATYRKADNSLSVIYMMVVL

SEQ ID NO: 6745 - protein, 485 aa, Unknown
  Description of Unknown: Integrase B6746 sequence
  PTHR30461:SF3,IPR036162,PS51737,IPR011109,PTHR30461, PS00397,PF00239,G3DSA:1.10.10.2600,IPR006119,SSF53041, cd00338,SM00857,IPR025827,IPR038109,PS51736, IPR006118,PF13408,G3DSA:3.40.50.1390,PF07508,Coil
MKKIAAAYIRVSTHMQEELSPDAQIRLIKEWANGHGYDLPEEFIFIDKGISGRKVRKRPSFLRMISMAKSKPSPFDAILVWKFSRFARNQEESIVYKAMLRNKHKIDVISISEPISDDVYGGLIERIIEWMDEFYSIRLAEDVKRGMTENALRGNFQSSPAFGYKVEKGQGLVIVEDQANIVRMIFNLYANSGMGFYDIARHLNRLGYTTKRGGAFETRTIKYIIQNPIYKGYLRWNYANGTTHVINDESEWIIVKSPLVPIIVSEELWDRANERFKNEYRPRGGKPLSQKRHWLSGLVKCSTCGASLSTSVQKDKRYGRTYIYFQCYRYRKGKCLVSHYISEKQLVPLVLNVLKEDMNKSYIEYEYVNDQSENMQDVLNVQLNRLDAREKRIKEAYLAGVDSLDEYKKNKADIEKERELLYQQSNDQEEYKKNIDMPGKIRGVYDILNSDEYSKDEKYNAITSIVKKIVFDRENKTLDFYYYTR

SEQ ID NO: 6746 - protein, 485 aa, Unknown
  Description of Unknown: Integrase B6747 sequence
  PTHR30461:SF3,SM00857,IPR006118,G3DSA:1.10.10.2600,IPR036162, PS51737,G3DSA:3.40.50.1390,Coil,IPR006119,IPR038109, PF07508,IPR011109,SSF53041,PTHR30461,PS00397, PS51736,cd00338,PF00239
MKIAAAYVRVSTEEQTELSPDSQVKLIREYAKKNGYIVPKEFIFHDDGISGRSTAKRQGFNQMIGTAKLKPKPFDAILLWKFSRFARNREDSIVYKSMLRKLGIDVISISENVGDDKMSVLIEAMIEAMDEYYSINLAEEVKRGMTEKFGRGLKVSGPPLGYDMKNGEFVVNEQGAEIVRRIFDMYVNQDMGYLNIARELNAEGIRTLHGNDFETRTIAYIIKNPVYIGMQRWTPGGGGSKGHYRSVAAENVVVTQAHHPAIIDKKIFEKAQQKAAKTRRPYERSGSTKHEYMLRGLLKCSSCGSNLTMGSVKSGTLQCYQYAHGRCKESHAITIGKIDKAVIEDIQGLVDGTATDYKLVDQSPVKPKKDTSKFETQLERERMKLERVKAAYADGIDTLEEYKRNKSEVLASIAELESKLRQAQPPKPQPTADRLPDLKVRAQEVLKVITSPNATPVEKNNALRSIVDKVVFDRKTSSIEMYYLC

SEQ ID NO: 6747 - protein, 485 aa, Unknown
  Description of Unknown: Integrase B6748 sequence
  PTHR30461:SF3,SM00857,IPR006118,G3DSA:1.10.10.2600,IPR036162, PS51737,G3DSA:3.40.50.1390,Coil,IPR006119,IPR038109, PF07508,SSF53041,IPR011109,PTHR30461,PS00397, PS51736,cd00338,PF00239
MKIAAAYVRVSTEEQTELSPDSQVKLIREYAKKNGYIVPKEFIFHDDGISGRSTAKRQGFNQMIGTAKLKPKPFDAILLWKFSRFARNREDSIVYKSMLRKLGIDVISISENVGDDKMSVLIEAMIEAMDEYYSINLAEEVKRGMTEKFGRGLKVSGPPLGYDMKNGEFVVNEQGAEIVRRIFDMYVNQDMGYLNIARELNAEGIRTLHGNDFETRTIAYIIRNPVYIGMQRWTPGGGGSKGHYRSAVAENVVVTQAHHPAIIDKEIFEKAQQKAAKTRRPYERSGSTKHEYMLRGLLKCSSCGSNLTMGSVKSGTLQCYQYAHGRCKESHAITIGKIDKAVIEDIQGLVDGIATDYKLVDQSPVKPKKDTSKFETQLERERMKLERVKAAYADGIDTLEEYKRNKSEVLASIAELESKLRQAKPPKPQPTADRLPDLKVRAQEVLKVITSPNATPMEKNNALRTIVDKVVFDRKTSSIEMYYLC

SEQ ID NO: 6748 - protein, 485 aa, Unknown
  Description of Unknown: Integrase B6749 sequence
  PTHR30461:SF3,IPR036162,PS51737,IPR011109,PTHR30461, PS00397,PF00239,G3DSA:1.10.10.2600,IPR006119,SSF53041, cd00338,SM00857,IPR025827,IPR038109,PS51736, IPR006118,PF13408,G3DSA:3.40.50.1390,PF07508,Coil
MKKIAAAYIRVSTHMQEELSPDAQIRLIKEWANGHGYDLPEEFIFIDKGISGRKVRKRPSFLRMISMAKSKPSPFDAILVWKFSRFARNQEESIVYKAMLRNKHKIDVISISEPISDDVYGGLIERIIEWMDEFYSIRLAEDVKRGMTENALRGNFQSSPAFGYKVEKGQGLVIVEYQANIVRMIFNLYANSGMGFYDIARHLNRLGYTTKKGGAFETRTIKYIIQNPIYKGYLRWNYANGTTHVVNDESEWIIVKSPLVPIIVSEELWNQANERFKNEYRPRGGKPLSQKRHWLSGLVKCSTCGASLSTSVQKDKRYGRTYIYFQCYRYRKGKCLVSHYISEKQLVPLVLNVLKEDMNKSYIEYEYVNDQSENMQDVLNVQLNRLDAREKRIKEAYLAGVDSLDEYKKNKADIEKERELLYQQSNNQEEYKKNIDMPGKIRGVYDILNSDEYSKDEKYNAITSIVKKIVFDRENKTLDFYYYTR

SEQ ID NO: 6749 - protein, 485 aa, Unknown
  Description of Unknown: Integrase B6750 sequence
  PTHR30461:SF3,IPR036162,PS51737,IPR011109,PTHR30461, PS00397,PF00239,G3DSA:1.10.10.2600,IPR006119,SSF53041, cd00338,SM00857,IPR025827,IPR038109,PS51736, IPR006118,PF13408,G3DSA:3.40.50.1390,PF07508,Coil
MKKIAAAYIRVSTHMQEELSPDAQIRLIKEWANGHGYDLPEEFIFIDKGISGRKVRKRPSFLRMISMAKSKPSPFDAILVWKFSRFARNQEESIVYKAMLRNKHKIDVISISEPISDDVYGGLIERIIEWMDEFYSIRLAEDVKRGMTENALRGNFQSSPAFGYKVEKGQGLVIVEDQANIVRMIFNLYANSGMGFYDIARHLNRLGYTTKKGGAFETRTIKYIIQNPIYKGYLRWNYANGTTHVVNDESEWIIVKSPLVPIIVSEELWNQANERFKNEYRPRGGKPLSQKRHWLSGLVKCSTCGASLSTSVQKDKRYGRTYIYFQCYRYRKGKCLVSHYISEKQLVPLVLNVLKEDMNKSYIEYEYVNDQSENMQDVLNVQLNRLDAREKRIKEAYLAGVDSLDEYKKNKADIEKERELLYQQSNNQEEYKKNIDMPGKIRGVYDILNSDEYSKDEKYNAITSIVKKIVFDRENKTLDFYYYTR

SEQ ID NO: 6750 - protein, 485 aa, Unknown
  Description of Unknown: Integrase B6751 sequence
  IPR036162,PS51737,IPR011109,PTHR30461,PS00397, PF00239,G3DSA:1.10.10.2600,IPR006119,SSF53041,cd00338, SM00857,IPR025827,IPR038109,PS51736,IPR006118, PF13408,G3DSA:3.40.50.1390,PF07508,Coil
MTDLKIAAAYIRVSTDDQVELSPASQLVEIRKWGVANGYLVPDEFVFVDEAKSGRKVTGRDEFRRLIATAKTKPKPFDAILLWKFSRFARNRDDAVYYKSILRKQLKIEVISIKEPIEDGKMGVIMESMIEAMDEYYSINLAEDVKRGMEEKHRRGELQATPSFGYTVLDNVLVPVPEEAVYVQEIFSRFVSGEGFYSIARWLNSMGVKTHRGSTFENRTVEYILRNPVYIGKLRWNPAGRSRRDYADPNIIVTDGKHEPLVSEETFQQAQTRIAQLKATMPYKARPLGSNKDWISGLVRCASCGSTLIFAKPHYWKCNNYVRGRCRASQHISSDLLKKAILDRLHMDAAASAPLSYEVLRVNGRDGDTTAALRTQRASLERRLERLREAFLAGVDTVEEYRQLKEDAQAQIQRIDQELSAAAAENRRAGDASIMRSAISDALAVIENEDASLEQRCNAARSIIDRITWDKAQNLLTIHYRLMLE

SEQ ID NO: 6751 - protein, 485 aa, Unknown
  Description of Unknown: Integrase B6752 sequence
  PTHR30461:SF3,SM00857,IPR006118,G3DSA:1.10.10.2600,IPR036162, PS51737,G3DSA:3.40.50.1390,Coil,IPR006119,IPR038109, PF07508,IPR011109,SSF53041,PTHR30461,PS00397, PS51736,cd00338,PF00239
MKIAAAYVRVSTEEQTELSPDSQVKLIREYAKKNGYIVPKEFIFHDDGISGRSTAKRQGFNQMIGTAKLKPKPFDAILLWKFSRFARNREDSIVYKSMLRKLGIDVISISENVGDDKMSVLIEAMIEAMDEYYSINLAEEVKRGMTEKFGRGLKVSGPPLGYDMKNGEFVVNEQGAEIVRRIFDMYINQDMGYLNIARELNAEGIRTLHGNDFETRTIAYIIRNPVYIGMQRWTPGGGGSKGHYRSAVAEKVVVTQAQHPAIIDKEIFEKAQQKAAKARRPYERSGSTKHEYMLRGLLKCSSCGSNLTMGSVKSGTLQCYQYAHGRCKESHAITIGKIDKAVTEDIQGLVDGTATDYKLVDQSPVKPKKDTSKFETQLERERMKLERVKAAYADGIDTLEEYKRNKSEVLASIAELESKLRQAQPPKPQPTADRLPDLKVRAQEVLKVITSPNATPVEKNNALRSIVDKVVFDRKTSSIEMYYLC

SEQ ID NO: 6752 - protein, 485 aa, Unknown
  Description of Unknown: Integrase B6753 sequence
  PTHR30461:SF3,SM00857,IPR006118,G3DSA:1.10.10.2600,IPR036162, PS51737,G3DSA:3.40.50.1390,Coil,IPR006119,IPR038109, PF07508,IPR011109,SSF53041,PTHR30461,PS00397, PS51736,cd00338,PF00239
MKIAAAYVRVSTEEQTELSPDSQVKLIREYAKKNGFIVPKEFIFHDDGISGRSTAKRQGFNQMIGTAKLKPKPFDAILLWKFSRFARNREDSIVYKSMLRKLGIDVISISENVGDDKMSVLIEAMIEAMDEYYSINLAEEVKRGMTEKFGRGLKVSGPPLGYDMKNGEFVVNEQGAEIVRRIFDMYVNQDMGYLNIARELNAEGIRTLHGNDFETRTIAYIIKNPVYIGMQRWTPGGGGSKGHYRSAVAENVVVTQAHHPAIIDKEIFEKAQQKAAKTRRPYERSGSTKHEYMLRGLLKCSSCGSNLTMGSVKNGTLQCYQYAHGRCKESHAITIGKIDKAVIEDIQGLVDGTATDYKLVDQSPVKPKKDTSKFETQLERERMKLERVKAAYADGIDTLEEYKRNKSEVLASIAELESKLRQAQPPKPQHTADRLPDLKVRAQEVLKVITSPNATPVEKNNALRTIVDKVVFDRKTSSIEMYYLC

SEQ ID NO: 6753 - protein, 485 aa, Unknown
  Description of Unknown: Integrase B6754 sequence
  cd03768,PTHR30461:SF3,SM00857,G3DSA:1.10.10.2600,IPR036162, PF13408,PS51737,IPR025827,G3DSA:3.40.50.1390,IPR006119, IPR038109,PF07508,IPR011109,SSF53041,PTHR30461, PS51736,Coil,PF00239
MSKKVAIYTRVSTTNQAEEGYSIDEQIDKLKMYCEAMDWKVSEIYTDAGFSGSKLTRPAMEKMITDIGLKKFDTVIVYKLDRLSRSVRDTLYLVKDVFTKNEIDFISLSESIDTSSAMGSLFLTILSAINEFERENIKERMTMGKIGRAKSGKSMMWAKTAFGYSHNQETGILEINPLEASIVEQIFNEYLKGTSITKLRDKLNEDGHIAKELPWSYRTIRQTLDNPVYCGYIKYKNNTFEGLHKPIISHETYLSVQKELEARQQQTYEKNNNPRPFQAKYLLSGIARCGYCGAPLRIVLGHRRKDGSRTMKYQCVNRFPRKTKGVTTYNDNKKCDSGAYDMQWIEDIVLKTLNGFQKSDKKLRKILNIKEESKVDTSGFQKQLKSINNKIQKNSDLYLNDFITMDDLKKRTEMLQGEKKLIQARINEVDKPSTSEVFDLVKSELGEIPISKISYEDKKKIVNNLISKVDVTADNIDIIFKFQLA

SEQ ID NO: 6754 - protein, 485 aa, Unknown
  Description of Unknown: Integrase B6755 sequence
  IPR036162,PS51737,IPR011109,PTHR30461,PS00397, PF00239,G3DSA:1.10.10.2600,IPR006119,SSF53041,cd00338, SM00857,IPR025827,IPR038109,PS51736,IPR006118, PF13408,G3DSA:3.40.50.1390,PF07508,Coil
MTDFKTAAAYIRVSTDDQVELSPASQLVEIRKWAAANDYLVPDEFVFVDEAKTGRKVTGRDEFRRLIATAKTKPKPFDAILLWKFSRFARNRDDAVYYKSILRKQLKIDVISIKEPIDEGKMGVIMESMIEAMDEYYSINLAEDVKRGMEEKHRRGELQSPPAFGYTVVDNVLTPVPEEAALVREMFRRYNAGEGCYSLARWLNAAGVRTHRGSPFENRTVEYILRNPVYIGKLRWNPTGRSHRNFDDPGIIVMDGKHEPLISEELFHRTQRRIAQSKAAMPYHGRPLGSNKDWISGLVRCAACGGTMVFAKPHWWKCNNYVRGRCTTSQHINGDLLKDAILRRLQADSSTAADLHYEVLRITDKVGDPVAALRAQRVSTERRLERLREAFLSGIDTMEEYRQAKEETQAQLQRIDEAICEAERENHRRGNPKLMRNAIRLALATITNENATLEQRCAAARSIIEHIDWDKAQNQLTIHYRLLLD

SEQ ID NO: 6755 - protein, 485 aa, Unknown
  Description of Unknown: Integrase B6756 sequence
  PTHR30461:SF3,IPR036162,PS51737,IPR011109,PTHR30461, PS00397,PF00239,G3DSA:1.10.10.2600,IPR006119,SSF53041, cd00338,SM00857,IPR025827,IPR038109,PS51736, IPR006118,PF13408,G3DSA:3.40.50.1390,PF07508,Coil
MGYVTKKAAQRFEEKKAAIYVRVSTQYQVDRASLPVQREELINYAKYALGISDYVIFEDAGYSAKNTDRPDYQQMMARMRTGEFSHLLVWKIDRISRNLLDFSVMYAELKELGVVFVSKNEQFDTSSAMGEAMLKIILIFAELERKTTSERVSAVFVSRANDGIWNGGKVPYGYSYDKEGKTFSIAEDEAKIVRLIYSLYESEKSIVRVARIMNERGLKSRAGSDWSPTTVHTILSSPFYSGTYRYNYRNESNRKRFREKGKDEWVLVENHHPAIVSPERQAAVGVILESKRYNKNATYQRKNVHVFAGLLTCGCCGSTMAATTDKVRADGWRPSMYICSRRRKSEDCTNKYVSDVSLGPFVLNFFANLIKASNSFGRTTSIETLEKKLLRGEALSRVDHIERPGLEELYNHLRSGFDEKRFESPTIAATESSADLSERDLLLSEKRRLERALNRLKTIYFTEMTRWQAKTSTSSVSASQKPSAR

SEQ ID NO: 6756 - protein, 485 aa, Unknown
  Description of Unknown: Integrase B6757 sequence
  PTHR30461:SF3,IPR036162,PS51737,IPR011109,PTHR30461, PS00397,PF00239,G3DSA:1.10.10.2600,IPR006119,SSF53041, cd00338,SM00857,IPR025827,IPR038109,PS51736, IPR006118,PF13408,G3DSA:3.40.50.1390,PF07508,Coil
MIKRGACYIRVSTNDQLEFSPDAQLKAIKKYAKDNDIIIDDDYVFIDEGISGRKASKRPAFQQMIKIAKSKPKKFDVILVHKFDRFARSREDSVVYKSLLRKECDIKVISITESIEDDKFSVILEAMLEAMAEYYSLNLADEVKKGMTEKAIRGQYQSSPPFGYKMENKKLVIIEDEAQVVRMIFDKFLNYDPSFLRLAKMVNALGYKTHRGGLFENRTIEYILNNPVYCGMARWTPTGKIRRNYSSSDSIVTKSEHTPIISEEVFNQCKEKLAKMKEINRRYYKGTNPQNLHWLNGLVRCKECGKTLVRSQKDYYQCSGYVKGACSTSQLIRIDKIESTILEQIKKDFDSKLKLNVKINSKSFSDNEAQIIYNQLEKLKEKESRIKEAYINGIDSIEEYKANKKDLQEQKEYLNNKLIESKNGLSIKSSDAIMKEQLRSYYEILSNPNVEVQRKYEISHLLIDRIEFSKTASTLDLQYKLYQME

SEQ ID NO: 6757 - protein, 485 aa, Unknown
  Description of Unknown: Integrase B6758 sequence
  PTHR30461:SF3,IPR036162,PS51737,IPR011109,PTHR30461, PS00397,PF00239,G3DSA:1.10.10.2600,IPR006119,SSF53041, cd00338,SM00857,IPR025827,IPR038109,PS51736, IPR006118,PF13408,G3DSA:3.40.50.1390,PF07508,Coil
MTDLKIAAAYIRVSTDDQVELSPASQLVEIRKWGAANGYLVPDEFVFVDEAKSGRKVTGRDEFRRLIATAKTKPKPFDAILLWKFSRFARNRDDAVYYKSILRKQLKIEVISIKEPIEDGKMGVIMESMIEAMDEYYSINLAEDVKRGMEEKHRRGELQATPSFGYTVLDNVLVPVPEEAVYVQEIFSRFVSGEGFYSIARWLNSMGVKTHRGSTFANRTVEYILRNPVYIGKLRWNPAGRSRRDYADPNIIVTDGKHEPLVSEETFQQAQTRIAQLKAAMPYKARPLGSNKDWISGLVRCASCGSTLIFAKPHYWKCNNYVRGRCRASQHISSDLLKKAILDRLHMDAAASAPLSYEVLRVNGRDGDTTAALRTQRASLERRLERLREAFLAGVDTVEEYRQLKEDAQAQIQRIDQELSAAAAENRRAGDVSIMRSAISDALAVIENEDASLEQRCNAARSIIDRITWDKAQNLLTIHYRLMLE

SEQ ID NO: 6758 - protein, 485 aa, Unknown
  Description of Unknown: Integrase B6759 sequence
  PTHR30461:SF3,IPR036162,PS51737,IPR011109,PTHR30461, PS00397,PF00239,G3DSA:1.10.10.2600,IPR006119,SSF53041, cd00338,SM00857,IPR025827,IPR038109,PS51736, IPR006118,PF13408,G3DSA:3.40.50.1390,PF07508,Coil
MTDLKIAAAYIRVSTDDQVELSPASQLVEIRKWGAANGYLVPDEFVFVDEAKSGRKVTGRDEFRRLIATAKTKPKPFDAILLWKFSRFARNRDDAVYYKSILRKQLKIEVISIKEPIEDGKMGVIMESMIEAMDEYYSINLAEDVKRGMEEKHRRGELQATPSFGYTVLDNVLVPVPEEAVYVQEIFSRFVSGEGFYSIARWLNSMGVKTHRGSTFANRTVEYILRNPVYIGKLRWNPAGRSRRDYADPNIIVTDGKHEPLVSEETFQQAQTRIAQLKAAMPYKARPLGSNKDWISGLVRCASCGSTLIFAKPHYWKCNNYVRGRCRSSQHISSDVLKEAILDRLHMDAAASAPLSYEVLRVNGRDGDTTAALRTQRASLERRLERLREAFLAGVDTVEEYRQLKEDAQAQIQRIDQELSAAAAENRRAGDVSIMRSAISDALAVIENEDASLEQRCNAARSIIDRITWDKAQNLLTIHYRLMLE

SEQ ID NO: 6759 - protein, 485 aa, Unknown
  Description of Unknown: Integrase B6760 sequence
  PTHR30461:SF3,SM00857,IPR006118,G3DSA:1.10.10.2600,IPR036162, PS51737,G3DSA:3.40.50.1390,PS00397,IPR006119,IPR038109, PF07508,IPR011109,SSF53041,PTHR30461,Coil, PS51736,cd00338,PF00239
MKIAAAYVRVSTEEQTELSPDSQVKLIREYAKKNGYIVPKEFIFHDDGISGRSTAKRQGFNQMIGTAKLKPKPFDAILLWKFSRFARNREDSIVYKSMLRKLGIDVISISENVGDDKMSVLIEAMIEAMDEYYSINLAEEVKRGMTEKFGRGLKVSGPPLGYDMKNGEFVVNEQGAEIVRRIFDMYVNQDMGYLNIARELNAEGIHTLHGNDFETRTIAYIIKNPVYIGMQRWTPGGGGSKGHYRSAASENVVVTQAQHPAIIDKEIFEKAQQKAAKARRPYERSGSTKHEYMLRGLLKCSSCGSNLTMGSVKSGTLQCYQYAHGRCKESHAITIGKIDKAVTEDIQGLVDGTATDYKLVDQSPVKPKKDTSKFETQLERERMKLERVKAAYADGIDTLEEYKRNKSEVLANIAELESKLRQAQPSKPQHTADRLPDLKVRAQEVLKVITSPNATPVEKNNALRTIVDKVVFDRKTSSIEMYYLC

SEQ ID NO: 6760 - protein, 485 aa, Unknown
  Description of Unknown: Integrase B6761 sequence
  PTHR30461:SF3,SM00857,IPR006118,G3DSA:1.10.10.2600,IPR036162, PS51737,PS00397,G3DSA:3.40.50.1390,IPR006119,IPR038109, PF07508,SSF53041,IPR011109,PTHR30461,Coil, PS51736,cd00338,PF00239
MKIAAAYVRVSTEEQTELSPDSQVKLIREYAKKNGYIVPKEFIFHDDGISGRSTAKRQGFNQMIGTAKLKPKPFDAILLWKFSRFARNREDSIVYKSMLRKLGIDVISISENVGDDKMSVLIEAMIEAMDEYYSINLAEEVKRGMTEKFGRGLKVSGPPLGYDMKNGEFVVNEQGAEIVRRIFDMYVNQDMGYLNIARELNAEGIRTLHGNDFETRTIAYIIKNPVYIGMQRWTPGGGGSKGHYRSAVAEKVVITQAHHPAIIDKELFEKAQQKAAKAHRPYERSGSTKHEYMLRGLLKCSSCGSNLTMASVKSGTLQCYQYAHGRCKESHAITIGKIDKAVIEDIQGLVDGTATDYKLVDQSPVKPKKDTSKFETQLERERMKLERVKAAYADGIDTLEEYKRNKSEVLASIAELESKLRQAQPPKPQRTADRLPDLKVRAQEVLKVITSPNATPVEKNNALRSIVDKVVFDRKTSSIEMYYLC

SEQ ID NO: 6761 - protein, 485 aa, Unknown
  Description of Unknown: Integrase B6762 sequence
  PTHR30461:SF3,SM00857,G3DSA:1.10.10.2600,IPR036162,PF13408, IPR025827,PS51737,G3DSA:3.40.50.1390,IPR006119,IPR038109, PF07508,SSF53041,IPR011109,PTHR30461,PS51736, cd00338,PF00239
MIPAVGYCRFSSENQADGFSIEAQKNAISGFASRMGYDILRFYVDEAKSGTTTEGRTAFLDMLSDSKKHEFQAVIVHKLDRFARSRIDSAVSKKVLKDNGVRLISVLEQLDDSPESIILESVLEGMNEYYSKNLSRETKKGMKVAGAKGRILGTIPYGYIADKDNKFQIVNKEAENVRFIYDCFNKGMTFKALREELKKNNIQTRAGNWFNDSNLRQMLTNPTYMGDYHFGTAVYSGVVPPIVSRDLFDSVQVIIQKHKRVVPKDKGTAYLLTGLIFHSCGEAMVGYKSIKKGKAYYYYRCRKKEPKGYVYKQAIEDAVLVAIQDFFTDEKVISAYVKECNKALKEIKKSSDVGALRKRANELKTQSSKLLDLYLNGTINQELYMEKKERIDIESRLVESQITTCVQAFDLSPDIIRCAFADYADKIKNSLDNPKDTQAVLSTLIKSIKLYEDRFEITFKFGDRQVAYNFSNAPRPTLSRLFSNF

SEQ ID NO: 6762 - protein, 485 aa, Unknown
  Description of Unknown: Integrase B6763 sequence
  IPR036162,PS51737,IPR011109,PTHR30461,PS00397, PF00239,G3DSA:1.10.10.2600,IPR006119,SSF53041,SM00857, IPR025827,IPR038109,PS51736,cd03768,IPR006118, PF13408,G3DSA:3.40.50.1390,PF07508,Coil
MVVLAYIRVSTDEQAEKGNSLTEQKERIEAYCKAMGWEEPIFFIEDGYSAKSTNRPELTIMLEKVKEYQNGRVITTKLDRLSRKLFDILSLNNYFVKHKFHYVSATEGFDTSTPAGMLVLQMLGMVAEFERERNSERVRENMLSIARNNTKKIITRPCFGYDIVDGKMAMNLDEALCIRRAAMKLLTGTPSRSVIGEWNAQGITTKEGNEWQDKTFRELFQRETLVGDFVYNKTTRQGDKVIKNDPSLWIREKNTHEAILDRDTFTKLQELFQGRKSVGKHMSNETYLLSGLVYCSHCGSKMNGKMNRSFSKRLNRENIHYQYLCDGYLKKGKCFHHYVQRDAIEELVISRIKEVAQAAPGTLKLVISKPQVKQVDKESIENKLAKLDKKMQKQIDAYNDDLITAEDLKAATLRVTKERDALKKILESSEEEQASRQQEELKRKARSATKAILSGDRITVKQSIRQLIERIEIKDGSQVSIVWLA

SEQ ID NO: 6763 - protein, 485 aa, Unknown
  Description of Unknown: Integrase B6764 sequence
  PTHR30461:SF3,IPR036162,PS51737,IPR011109,PTHR30461, PS00397,PF00239,G3DSA:1.10.10.2600,IPR006119,SSF53041, cd00338,SM00857,IPR025827,IPR038109,PS51736, IPR006118,PF13408,G3DSA:3.40.50.1390,PF07508,Coil
MKKIAAAYIRVSTHMQEELSPDAQIRLIKEWANGHGYDLPEEFIFIDKGISGRKVRKRPSFLRMISMAKSKPSPFDAILVWKFSRFARNQEESIVYKAMLRNKHKIDVISISEPISDDVYGGLIERIIEWMDEFYSIRLAEDVKRGMTENALRGNFQSSPAFGYKVEKGQGLVIVEDQANIVRMIFNLYANSGMGFYDIARHLNRLGYTTKKGGAFETRTIKYIIQNPIYKGYLRWNYANGTTHVVNDENEWIIVKSPLVPIIVSEELWNQANERFKNEYRPRGGKPLSQKRHWLSGLVKCSTCGASLSTSVQKDKRYGRTYIYFQCYRYRKGKCLVSHYISEKQLVPLVLNVLKEDMNKSYIEYEYVNDQSENMQDVLNVQLNRLDAREKRIKEAYLAGVDSLDEYKKNKADIEKERELLYQQSNDQEEYKKNIDMPGKIRGVYDILNSDEYSKDEKYNAITSIVKKIVFDRENKTLDFYYYTR

SEQ ID NO: 6764 - protein, 485 aa, Unknown
  Description of Unknown: Integrase B6765 sequence
  IPR036162,PS51737,IPR011109,PTHR30461,PS00397, PF00239,G3DSA:1.10.10.2600,IPR006119,SSF53041,cd00338, SM00857,IPR025827,IPR038109,PS51736,IPR006118, PF13408,G3DSA:3.40.50.1390,PF07508,Coil
MTDLKIAAAYIRVSTDDQVELSPASQLVEIRKWGAANGYLVPDEFVFVDEAKSGRKVTGRDEFRRLIATAKTKPKPFDAILLWKFSRFARNRDDAVYYKSILRKQLKIEVISIKEPIEDGKMGVIMESMIEAMDEYYSINLAEDVKRGMEEKHRRGELQATPSFGYTVLDNVLVPVPEEAVYVQEIFSRFVSGEGFYSIARWLNSMGVKTHRGSTFENRTVEYILRNPVYIGKLRWNPAGRSRRDYADPNIIVTDGKHEPLVSEETFQQAQTRIAQLKAAMPYKARPLGSNKDWISGLVRCASCGSTLIFAKPHYWKCNNYVRGRCRASQHISSDLLKKAILDRLHMDAAASAPLSYEVLRVNGRDGDTTAALRTQRASLERRLERLREAFLAGVDTVEEYRQLKEDAQAQIQRIDQELSAAAAENRRAGDVSIMRSAISDALAVIENEDASLEQRCNAARSIIDRITWDKAQNLLTIHYRLMLE

SEQ ID NO: 6765 - protein, 485 aa, Unknown
  Description of Unknown: Integrase B6766 sequence
  PTHR30461:SF3,IPR036162,PS51737,IPR011109,PTHR30461, PS00397,PF00239,G3DSA:1.10.10.2600,IPR006119,SSF53041, cd00338,SM00857,IPR025827,IPR038109,IPR006118, PF13408,G3DSA:3.40.50.1390,PF07508,Coil
MTLLSTLEIGAAYIRVSSDEQTELSPDAQVRVIKDAAKADGYYIPDEFIFMEERGISGRKAENRPAFQRMIAVAKSENPAPFKRLYLWKFSRFARNQEESTFYKGILRKKCGVEIKSVSEPIAEGMFGRLIETIIEWFDEYYSINLSGEVLRGMTEKALRNGYQTAPSMGYAAVGHGNPFVIDPERMKIVEQIHTLYHNGMDMTGIARELNRLGYLTQRGTAFERRTIYRILTNRFYIGTVTWNNISFHGTHELSPIVTAVFEDNQTRIKRESQTIRHRDVSSCKHWLSGLLRCGVCGSTLSYSRSNSPQKRSDAFQCWKYIKGMHPGSNSISVRKIEQAVIQSLQEVLVTGEISYEYIPPQDDETIDRKELLREAIEKVTVKERRIHDAYENGIDTLEEYKENKKRLLMERTELTEELEKLCSISPADEEAGKEELLKRIQTVCETLSNPDIDYETKGVAIRQVIKYIVYNRADSTLQFYYYLS

SEQ ID NO: 6766 - protein, 485 aa, Unknown
  Description of Unknown: Integrase B6767 sequence
  PTHR30461:SF3,IPR036162,PS51737,IPR011109,PTHR30461, PS00397,PF00239,G3DSA:1.10.10.2600,IPR006119,SSF53041, cd00338,SM00857,IPR025827,IPR038109,PS51736, IPR006118,PF13408,G3DSA:3.40.50.1390,PF07508,Coil
MKLAACYIRVSTDDQLEYSPDSQLEKIKEYCARNGYILNQDNIFVEEEGVSGRKASRRQEFQHMIARAKSKPKPFDAIIVWKFSRFARNREDSIVYKSMLKKIGIDVISVTENVGDDKMSVITEAIIEAMDEYYSLNLAEEVRRGMTERIKHGNHNSVAPFGYKIVDKELVVFPEQAEIIREVYSRYLNGWGQKQLATWLNTIGVTTNRGGKIENRTVNYWLRNPVYHGYVRWNPAERASTKRYINTPDTMIVKGHHEPIIDEETWEAVQKRCDEVRLKFSKHRRENIPKDYALSGIIKCSCCGASMSTAHKQKYLQCTKYAHGLCSTSHHVSYEMIWLMLLSTIECDLKSGNFQLERVSRPVVADDAEALNAQIERTEMKLRRIREAFEAGIDTLEEYKSGKARISAELEELRERAAQVSPTEVEITPEEKRAFAEKHLKTLAKLRNTEVGELEKNHLLKEFVKEATYRKADNSLSVIYMVVVL

SEQ ID NO: 6767 - protein, 485 aa, Unknown
  Description of Unknown: Integrase B6768 sequence
  PTHR30461:SF3,IPR036162,PS51737,IPR011109,PTHR30461, PS00397,PF00239,G3DSA:1.10.10.2600,IPR006119,SSF53041, cd00338,SM00857,IPR025827,IPR038109,PS51736, IPR006118,PF13408,G3DSA:3.40.50.1390,PF07508,Coil
MTLKNACAYIRVSTDKQEELSPDAQKRLIIDYCKKNGYTITNENIFFENGISGKKADKRPEFKRMIALAKSKEHPFDVILVWKFSRFARNQEESIVYKSMLKKANVDVVSVSEPVIDGPFGSLIERIIEWMDEYYSIRLSGEVIRGMTEKALRGGYNAQPPLGYRKNSDTSIPEIYEPEAVIVRNIFSFISQGLSLIDTARSINNMGFHTRRGGMFEQRTIRYIIENPFYYGYVRWNRQNPSEHTIKDKSEWIIAPGAHPVLINKESWDFANEQLIKISRPYKERGTSGIKHWLSGIVKCSSCGSSLVSNSLWKGHSTSFQCSGYNKCKCKVSHYIKTERLEAGIYEGFLKVLSSKNVTYEKVSEHSYEKKVDTAALLKNIEDKERRIKQTYRDGIDTLEEYKDNKAILQKEREKVMEIISKQKPVQHDENNEIMLSQIKNAYEIIKNEELDKLTRANAIRSVVSKAVYDNEKDTLDIYFRLIEK

SEQ ID NO: 6768 - protein, 485 aa, Unknown
  Description of Unknown: Integrase B6769 sequence
  PTHR30461:SF3,IPR036162,PS51737,IPR011109,PTHR30461, PS00397,PF00239,G3DSA:1.10.10.2600,IPR006119,SSF53041, cd00338,SM00857,IPR025827,IPR038109,PS51736, IPR006118,PF13408,G3DSA:3.40.50.1390,PF07508,Coil
MIKRGACYIRVSTNDQLEFSPDAQLKAIKKYAKDNDIIIDDDYVFIDEGISGRKASKRPAFQQMIKIAKSKPKKFDVILVHKFDRFARSREDSVVYKSLLRKECDIKVISITESIEDDKFSVILEAMLEAMAEYYSLNLADEVKKGMTEKAIRGQYQSSPPFGYKMENKKLVIIEDEAQVVRMIFDKFLNYDPSFLRLAKMVNALGYKTHRGGLFENRTIEYILNNPVYCGMARWTPTGKIRRNYSSSDSIVTKSEHTPIISEEVFNQCKEKLAKMKEINRKYYKGTNPQNLHWLNGLVRCKECGKTLVRSQKDYYQCSGYVKGACSTSQLIRIDKIESTILEQIKKDFDSKLKLNVKINSKSFSDNEVQIIYNQLEKLKEKESRIKEAYINGIDSIEEYKANKKDLQEQKEYLNNKLIESKNGLSTKSSDAIMKEQLRSYYEILSNPNIEVQRKYEISHLLIDRIEFSKTASTLDLQYKLYQME

SEQ ID NO: 6769 - protein, 485 aa, Unknown
  Description of Unknown: Integrase B6770 sequence
  PTHR30461:SF3,SM00857,G3DSA:1.10.10.2600,IPR036162,PF13408, PS51737,IPR025827,G3DSA:3.40.50.1390,IPR006119,IPR038109, PF07508,SSF53041,IPR011109,PTHR30461,Coil, PS51736,cd00338,PF00239
MVDEYIDRAISGKTDNRPSFQRLIKDSEKGHFDAVIMYTLDRFARNRYDSAIYKAKLKRNGVKIFYAKQPMPDTPEGIILESVLEGYAEYYSENLARSIKRGMKENALHGIAMGSPVLGYKIGNDRQYEIDPVGAKAVRTIFTMYAEGKSKTQIVNWLNEHGFKTSRGNAFNKNSLSRILRNDKYIGVYRYDDVVLEDAVPPIIDKTLFDKVQATFRHNYTARAKAKAIEDYLLTTKVFCGHCGEPMVGESGTSKTGKVHHYYKCVNRKRKHNCEKKVEKKEWLERTVVEFTVQQVLTDENIEKISTRAMELIEKELQDTSVLIGLQERLKETNKRIKNLMSAIEQGIITPTTKERLEELEEERRDLEGQIAREEMKKPLLTKERIMYWLESFKRGDIEDVEYQRRIIDTLVNSVYVYDDGDKGRKLVLTFNISGNNTLTISSSDIERTAPPEEEASNSSFTRMSLRLCIGWGTPDGVPFPFSLL

SEQ ID NO: 6770 - protein, 485 aa, Unknown
  Description of Unknown: Integrase B6771 sequence
  PTHR30461:SF3,SM00857,IPR006118,G3DSA:1.10.10.2600,IPR036162, PS51737,G3DSA:3.40.50.1390,Coil,IPR006119,IPR038109, PF07508,IPR011109,SSF53041,PTHR30461,PS00397, PS51736,cd00338,PF00239
MKIAAAYVRVSTEEQTELSPDSQVKLIREYAKKNGFIVPKEFIFHDDGISGRSTAKRQGFNQMIGTAKIKPKPFDAILLWKFSRFARNREDSIVYKSMLRKLGIDVISISENVGDDKMSVLIEAMIEAMDEYYSINLAEEVKRGMTEKFGRGLKVSGPPLGYDMKNGEFVVKEQGAEIVRRIFDMYVNQDMGYLNIARELNAEGIRTLHGNDFETRTIAYIIRNPVYIGMQRWTPGGGGSKGHYRSAVADKVVITQAHHPAIIDKEIFEKAQQKAAKTRRPYERSGSTKHEYMLRGLLKCSSCGSNLTMASVKSGTLQCYQYAHGRCKESHAITIGKIDKAVIEDIQGLVDGTATDYKLVDQSPAKPKKDTSKFETQLERERMKLERVKAAYADGIDTLEEYKRNKSEVLASIAELESKLRQAQPPKPQHTADRLPDLKVRAQEVLKVITSPNATPMEKNNALRSIVDKVIFDRKTSSIEMYYLC

SEQ ID NO: 6771 - protein, 485 aa, Unknown
  Description of Unknown: Integrase B6772 sequence
  PTHR30461:SF3,SM00857,IPR006118,G3DSA:1.10.10.2600,IPR036162, PS51737,G3DSA:3.40.50.1390,Coil,IPR006119,IPR038109, PF07508,SSF53041,IPR011109,PTHR30461,PS00397, PS51736,cd00338,PF00239
MKIAAAYVRVSTEEQTELSPDSQVKLIREYAKKNGYIVPKEFIFHDDGISGRSTAKRQGFNQMIGTAKLKPKPFDAILLWKFSRFARNREDSIVYKSMLRKLGIDVISISENVGDDKMSVLIEAMIEAMDEYYSINLAEEVKRGMTEKFGRGLKVSGPPLGYDMKNGEFVVNEQGAEVVRHIFDMYVNQDMGYLNIARELNAEGIRTLHGNDFETRTIAYIIQNPVYIGMQRWTPGGGGSKGHYRSAIADKVVITQAHHPAIIDKEIFEKAQQKAAKARRPYERSGSTKHEYMLRGLLKCSSCGSNLTMGSVKSGTLQCYQYAHGRCKESHAITIGKIDKAVIEDIQGLVDGTATDYKLVDQSPAKPKKDTSKYETQLERERMKLERVKAAYADGIDTLEEYKRNKSEVLASIAELESKLCQAQPLKPQLTADRLPDLKVRAQEVLKVITSPNATPVEKNNALRTIVDKVVFDRKTSSIEMYYLC

SEQ ID NO: 6772 - protein, 485 aa, Unknown
  Description of Unknown: Integrase B6773 sequence
  PTHR30461:SF3,SM00857,IPR006118,G3DSA:1.10.10.2600,IPR036162, PS51737,G3DSA:3.40.50.1390,Coil,IPR006119,IPR038109, PF07508,IPR011109,SSF53041,PTHR30461,PS00397, PS51736,cd00338,PF00239
MKIAAAYVRVSTEEQTELSPDSQVKLIREYAKKNGYIVPKEFIFHDDGISGRSTAKRQGFNQMIGTAKLKPKPFDAILLWKFSRFARNREDSIVYKSMLRKLGIDVISISENVGDDKMSVLIEAMIEAMDEYYSINLAEEVKRGMTEKFGRGLKVSGPPLGYDMKNGEFVVNEQGAEIIRRIFDMYVNQDMGYLNIARELNAEGIRTLHGNDFETRTIAYIIKNPVYIGMQRWTPGGGGSKGHYRSAIADKVVITQAHHPAIIDKEIFEKAQQKAAKTHRPYERSGSTKHEYMLRGLLKCSSCGSNLTMASVKSGTLQCYQYAHGRCKESHAITIGKIDKAVIEDIQGLVDGTATDYKLVDQSPVKPKKDTSKFETQLERERMKLERVKAAYADGIDTLEEYKRNKSEVLASIAELESKLRQAQPPKPQPTADRLPDLKVRAQEVLKVITSPNATPMEKNNALRSIVDKVVFDRKTSSIEMYYLC

SEQ ID NO: 6773 - protein, 485 aa, Unknown
  Description of Unknown: Integrase B6774 sequence
  PTHR30461:SF3,SM00857,G3DSA:1.10.10.2600,IPR036162,PF13408, PS51737,G3DSA:3.40.50.1390,IPR025827,IPR006119,IPR038109, PF07508,SSF53041,IPR011109,PF00239,PTHR30461, PS51736,Coil,cd00338
MGETYGVVNRNAMRVALYPRVSTLEQAKDGYSINEQTERMIKYCEAKGWVVHKIYTDAGYSGADTDRPGLQSLIKDAESNKVNAVLVYKLDRLSRSQKDTLTLIEDVFLPNNVDFISMTENLDTSTPFGRAMIGILSVFAQLEREQIKERMEVGKIGRAKEGKWCGSRYVPIGYRVENDELVVHEYEAMQIREMFRLFNMRISQRRVAEMLQSKGYRTTYDGNWNRHNIRPLLENKHYIGMVSYKGEWYEGIHKPIIDKETFEKTQAILAERDEDANSRISRINAPLAGMIRCGHCGNKFFFRRAKTKNSAKLYCNCYKRSCRAGKWKDIPKEERCKNKIWKAEELEKEVFDEVRKLALHPESFDIGSTESDENAMKIKVISKRIEEIDSQLDKLIDLYTLGTLDINVIKSRTDALLAEKEKLEVNMRSLENKEKMSKEEAVEIASSLCDVIDSGDIDEIKALVQELIKEIVVDEEDLHVYWKFA

SEQ ID NO: 6774 - protein, 485 aa, Unknown
  Description of Unknown: Integrase B6775 sequence
  IPR036162,PS51737,IPR011109,PTHR30461,PS00397, PF00239,G3DSA:1.10.10.2600,IPR006119,SSF53041,cd00338, SM00857,IPR025827,IPR038109,PS51736,IPR006118, PF13408,G3DSA:3.40.50.1390,PF07508,Coil
MTDFKTAAAYIRVSTDDQVELSPASQLVEIRKWAAANNYLVPDEFVFVDEAKTGRKVTGRDEFRRLIATAKTKPKPFDAILLWKFSRFARNRDDAVYYKSILRKQLKIDVISIKEPIDEGKMGVIMESMIEAMDEYYSINLAEDVKRGMEEKHRRGELQSPPAFGYTVVENVLTPVPEEAALVREMFRRYNAGEGCYSLARWLNAAGVRTHRGSPFENRTVEYILRNPVYIGKLRWNPTGRSHRNFDDPGIIVMDGKHEPLIGEELFHRTQRRIAQSKAAMPYHGRPLGSNKDWISGLVRCAACGGTMVFAKPHWWKCNNYVRGRCTTSQHINGDLLKDAILRRLQADSSTAADLHYEVLRITDKVGDPVAALRAQRVSTERRLERLREAFLSGIDTMEEYRQAKEETQAQLQRIDEAIYEAERENHRRGDPKLMRNAIRLALATITNENATLEQRCAAARSIIEHIDWDKAQNQLTIHYRLLLD

SEQ ID NO: 6775 - protein, 484 aa, Unknown
  Description of Unknown: Integrase B6776 sequence
  PTHR30461:SF3,IPR036162,PS51737,IPR011109,PTHR30461, PS00397,PF00239,G3DSA:1.10.10.2600,IPR006119,SSF53041, cd00338,SM00857,IPR025827,IPR038109,PS51736, IPR006118,PF13408,G3DSA:3.40.50.1390,PF07508,Coil
MKTGALYVRVSTDDQVEYSPDAQIRLGLEYAKKNNIIIPKQFIFQDDGISGRKATNRPAFQELIAMAKSDEHPIDVILVWKFSRFARNQEEAIVYKNLLKKADVDVVSVSEPIPDGFIGELVQRIFEWMDEYYSINLSGEVMRGMTERASRGGYNAAPPLGYKMQDGIPVIVPEQAEIVKKIFTWYVDDKMSFFDIAVKLNTLGYRTKRNGKFQNRTVAYIIRNEFYNGKIIWNRLEHATRNVKDKSEWIVTDGGHDTFISNELFTAAQDRDKATKRPGKKVRPASTYKHWLSGLLVCSACGGRIVRAGKSKSGNTYFQCTAYNHASCNESHLTNENALKPAILEALQKVLDSGTVEYVVHSTNQEEKSESELIENKLNRIGMKKERIKEAYRDGIDTLEEYKANKEILQREREQLTAMLEQYSKKPEDENESILLNKIRSAYDIIKSDNSTDRQKHDALTSVVEKIVYDKKGGVLLMFFYING

SEQ ID NO: 6776 - protein, 484 aa, Unknown
  Description of Unknown: Integrase B6777 sequence
  PTHR30461:SF3,IPR036162,PS51737,IPR011109,PTHR30461, PS00397,PF00239,G3DSA:1.10.10.2600,IPR006119,SSF53041, cd00338,SM00857,IPR025827,IPR038109,PS51736, IPR006118,PF13408,G3DSA:3.40.50.1390,PF07508,Coil
MKTGALYVRVSTDDQVEYSPDAQIRLGLEYAKKNNIIIPKQFIFQDDGISGRKATNRPAFQELIAMAKSDEHPIDVILVWKFSRFARNQEEAIVYKNLLKKADVDVVSVSEPIPDGFIGELVQRIFEWMDEYYSINLSGEVMRGMTERASRGGYNAAPPLGYKMQDGIPVIVPEQAEIVKKIFTWYVDDKMSFFDIAVKLNTLGYRTKRNGKFQNRTVAYIIRNEFYNGKIIWNRLEHATRNVKDKSEWIVTDGGHDTFISNELFTAAQDRDKATKRPGKKVRPASTYKHWLSGLLVCSACGGRIVRAGKSKSGNTYFQCTAYNHASCNESHLTNENALKPAILEALQKVLDSGTVEYVVHSTNQEEKSESELIENKLSRISMKEERIKEAYRDGIDTLEEYKANKEILQREREQLTAMLEQYSKKPEDENESILLNKIRSAYDIIKSDNSTDRQKHDALTSVVDKIVYDKKGGALLMYFYIND

SEQ ID NO: 6777 - protein, 484 aa, Unknown
  Description of Unknown: Integrase B6778 sequence
  PTHR30461:SF3,IPR036162,PS51737,IPR011109,PTHR30461, PS00397,PF00239,G3DSA:1.10.10.2600,IPR006119,SSF53041, SM00857,IPR025827,IPR038109,PS51736,cd03768, IPR006118,PF13408,G3DSA:3.40.50.1390,PF07508,Coil
MKKEKVIPIDSLDLVDLYIRVSTTEQALEGYSVAEQEHRLRQYCAAMGHRIHKVHIDAGFSGASLDRPGIKETIKDVQKHLVRRVIVWKLDRLSRSQKDTLIMLEDVFLENGCDFISMMESFDTSTSFGRAIVGILAAFAQLERENIKERTMMGRQARLAKGHYNGSRPPLGYSFIPGSNDLQVDPYQAAIVREIFKLFLSGISINAIARKMEEKYPTVRTWNNTMIRRTLKNPVYIGKVNDNGILRDGIHEPLISEIDFQMANAILVHNSKIKKQSCRSRSLLTGLLYCGDCGARMHPRQIARGYPLRRYVCYSVSRTSKSMIKSDHCTNRLHPYTQEELEQIIIDEIKKLAADEDYISEVIRNSSAEVPADDTELFQERIEELNRQTDKLLNLYQIGAIELDQIQERLAALKQERESLTAALKELQTKTDINMDHLKIMSYASAFQIALESGDPEYTNSIIRLLIDKIVVLNEDIEIHWTFC

SEQ ID NO: 6778 - protein, 484 aa, Unknown
  Description of Unknown: Integrase B6779 sequence
  PTHR30461:SF3,IPR036162,PS51737,IPR011109,PTHR30461, PS00397,PF00239,G3DSA:1.10.10.2600,IPR006119,SSF53041, SM00857,IPR025827,IPR038109,PS51736,cd03768, IPR006118,PF13408,G3DSA:3.40.50.1390,PF07508,Coil
MKKEKVIPIDSLDLVDLYIRVSTTEQALEGYSVAEQEHRLRQYCAAMGHRIHKVHIDAGFSGASLDRPGIKETIKDVQKHLIRRVIVWKLDRLSRSQKDTLIMLEDVFLENGCDFISMMESFDTSTSFGRAIVGILAAFAQLERENIKERTMMGRQARLAKGHYNGSRPPLGYSFIPGSNDLQVDPYQAAIVREIFKLFLSGISINAIARKMEEKYPTVRTWNNTMIRRTLKNPVYIGKVNDNGILRDGIHEPLISEIDFQMANAILVHNSKIKKQSCRSRSLLTGLLYCGDCGARMHPRRIARGYPLRRYVCYSVSRTSKSMIKSDHCTNRLHPYTQEELEQIIIDEIKKLAADEDYISEVIRNSSAEAPVDDTELFQERIEELNRQTDKLLNLYQIGAIELDQIQERLAGLKQERESLTAALKESQTKTDINMDHLKIMSYASAFQVALESGDPEYTNSIIRLLIDKIVVLNEDIEIHWTFC

SEQ ID NO: 6779 - protein, 484 aa, Unknown
  Description of Unknown: Integrase B6780 sequence
  PTHR30461:SF3,IPR036162,PS51737,IPR011109,PTHR30461, PS00397,PF00239,G3DSA:1.10.10.2600,IPR006119,SSF53041, SM00857,IPR025827,IPR038109,PS51736,cd03768, IPR006118,PF13408,G3DSA:3.40.50.1390,PF07508,Coil
MQKEKVIPIDSLDLVDLYIRVSTTEQALEGYSVAEQEHRLRQYCAAMGHRIHKVHIDAGFSGASLDRPGIKETIKDVQKHLVRRVVVWKLDRLSRSQKDTLIMLEDVFLENGCDFISMMESFDTSTSFGRAIVGILAAFAQLERENIKERTMMGRQARLAKGHYNGSRPPLGYSFIPGSNDLQVDPYQAAIVREIFKLFLSGISINAIARKMEEKYPTVRTWNNTIIRRTLKNPVYIGKVKDKDVLRDGIHEPLISEIDFQMANAILVHNSKIKKQSCRSRSLLTGLLYCGDCGARMHPRRIARGYPLRRYVCYSVSRTSKSMIKSDHCTNRLHPYTQEELEQIIIDEIKKLAADEDYISEVIRSSSAEAPADDTELFQERIEELNRQTDKLLNLYQIGAIELDQIQERLAGLKQERESLTAALKESQTKTDINMDHLKIMSYASAFQIALESGDPEYTNSIIRLLIDKIVVLNEDIEIHWTFC

SEQ ID NO: 6780 - protein, 484 aa, Unknown
  Description of Unknown: Integrase B6781 sequence
  PTHR30461:SF3,cd00338,G3DSA:1.10.10.2600,IPR036162,PF13408, PS51737,IPR025827,G3DSA:3.40.50.1390,IPR006119,IPR038109, PF07508,IPR011109,SSF53041,PTHR30461,Coil, PF00239
MINDAKNNPEFKAVLVHKTDRFSRNLSDSIQYKKILEEYGVQVIFVNERFEDNPESHLLYHIMGSVNQFYNENLAREVMKGLKENAYQCKFTGGRPPLGYDVDKDLKLVINEKEAEAVRLIFEMSAEGYGYGETIDKLNILGYKTKKGLPFVKNSLYEILRNEKYKGTYIFNRSCSANALNKRNNHRRKPEEEIIRIENGCPAIVSSGLWHRANAVKKATRSSFTNAKNTYLLTGLIHCGECGGKFHGNIRYNKNNTNLVYRCSAKKNKRKCESKEIRCEYLDSFVIDKFVEFFFNDDNIKVITKKLNEQYSKSCISDLEYNEAKSTLKILEKSRNNLVEAIAKTGINDIMSDKIKEYEEQIKKTSEFIHKYEKQKIDRVITEDEVREQINHLKDYFYNPKNIIRTKFVLSQYIDRIDISNENVQVHFKVSMSPSGNTDGDYFCVHTETIKRKYLFDYVCEKVDFEQWNIEKLNKSESEHRKGA

SEQ ID NO: 6781 - protein, 484 aa, Unknown
  Description of Unknown: Integrase B6782 sequence
  PTHR30461:SF3,IPR036162,PS51737,IPR011109,PTHR30461, PS00397,PF00239,G3DSA:1.10.10.2600,IPR006119,SSF53041, SM00857,IPR025827,IPR038109,PS51736,cd03768, IPR006118,PF13408,G3DSA:3.40.50.1390,PF07508,Coil
MKKEKVIPIDSLDLVDLYIRVSTTEQALEGYSVAEQEHRLRQYCAAMGHRIHKVHIDAGFSGASLDRPGIKETIKDVQKHLVRRVIVWKLDRLSRSQKDTLIMLEDVFLENGCDFISMMESFDTSTSFGRAIVGILAAFAQLERENIKERTMMGRQARLAKGHYNGSRPPLGYSFIPGSNDLQVDPYQAAIVREIFKLFLSGISINAIARKMEEKYPTVRTWNNTMIRRTLKNPVYIGKVNDNGILRDGIHEPLISEIDFQMANAILVHNSKIKKQSCRSRSLLTGLLYCGDCGARMHPRRIARGYPLRRYVCYSVSRTSKSMIKSDHCTNRLHPYTQEELEQIIIDEIKKLAADEDYISEVIRNSSAEAPVDDTELFQERIEELNRQTDKLLNLYQIGAIELDQIQERLAALKQERESLTAAMKESQIKTDINMDHLKIMSYASAFQVALESGDPEYTNSIIRLLIDKIVVLNEDIEIHWTFC

SEQ ID NO: 6782 - protein, 484 aa, Unknown
  Description of Unknown: Integrase B6783 sequence
  PTHR30461:SF3,IPR036162,PS51737,IPR011109,PTHR30461, PS00397,PF00239,G3DSA:1.10.10.2600,IPR006119,SSF53041, SM00857,IPR025827,IPR038109,PS51736,cd03768, IPR006118,PF13408,G3DSA:3.40.50.1390,PF07508,Coil
MKKEKVIPIDSLDLVDLYIRVSTTEQALEGYSVAEQEHRLRQYCAAMGHRIHKVHIDAGFSGASLDRPGIKETIKDVQKHLVRRVIVWKLDRLSRSQKDTLIMLEDVFLENGCDFISMMESFDTSTSFGRAIVGILAAFAQLERENIKERTMMGRQARLAKGHYNGSRPPLGYSFIPGSNDLQVDPYQAAIVREIFKLFLSGISINAIARKMEEKYPTVRTWNNTMIRRTLKNPVYIGKVNDNGILRDGIHEPLISEIDFQMANAILVHNSKIKKQSCRSRSLLTGLLYCGDCGARMHPRRIARGYPLRRYVCYSVSRTSKSMIKSDHCTNRLHPYTQEELEQIIIDEIKKLAADEDYISEVIRNSSAEAPVDDTELFQERIEELNRQTDKLLNLYQIGAIELDQIQERLAALKQERESLTAAMKESQTKTDINMDHLKIMSYASAFQVALESGDPEYTNSIIRLLIDKIVVLNEDIEIHWTFC

SEQ ID NO: 6783 - protein, 484 aa, Unknown
  Description of Unknown: Integrase B6784 sequence
  PTHR30461:SF3,SM00857,G3DSA:1.10.10.2600,IPR036162,PF13408, IPR025827,G3DSA:3.40.50.1390,PS51737,IPR006119,IPR038109, PF07508,IPR011109,SSF53041,PTHR30461,Coil, PS51736,cd00338,PF00239
MNAVIYARYSCDRQTEQSIEGQLRECKAFAASEGINIIGEYIDRAISGTTANRPEFQRMIADSRYKTFQAVIVYKLDRFARNRYDSAMYKSKLKANGVKVLSAKEHITDSPEGIILEGLLEAMNEYYSAELSQKIKRGMRENAIKGKTTGGNVALGYRIGADKQMEIDPAGASLVRRIFTGYDSGMTFTEICDDLNHAGYTTSRGKQFRIDTISRILANQRYTGTFQCAGEDAHCPPIIEPELFRSVQERLTESRHKHRHTQSPHEYVLTGKAICGTCGRRLTGRDGTSKTDKRYYYYCCPNKCCGWLPAAELEHAVLDAIAQYTTPEACEQIANATYALYQQSTHENADLTAAQRRLQETEKKLENAVNAVLNGITSAALQATMQQLEQQKAALETEVRLLQTDAPELKLEHFQYFAHRLLEVQAEGTEKILQLLVNQVIVYKEQITVLVNLTDKTKTPPLEQVTAALRESSCSIACAKERLF

SEQ ID NO: 6784 - protein, 484 aa, Unknown
  Description of Unknown: Integrase B6785 sequence
  PTHR30461:SF3,IPR036162,PS51737,IPR011109,PTHR30461, PS00397,PF00239,G3DSA:1.10.10.2600,IPR006119,SSF53041, SM00857,IPR025827,IPR038109,PS51736,cd03768, IPR006118,PF13408,G3DSA:3.40.50.1390,PF07508,Coil
MKKEKVIPIDSLDLVDLYIRVSTTEQALEGYSVAEQEHRLRQYCAAMGHRIHKVHIDAGFSGASLDRPGIKETIKDVQKHLVRRVIVWKLDRLSRSQKDTLIMLEDVFLENGCDFISMMESFDTSTSFGRAIVGILAAFAQLERENIKERTMMGRQARLAKGHYNGSRPPLGYSFIPGSNDLQVDPYQAAIVREIFKLFLSGISINAIARKMEEKYPTVRTWNNTMIRRTLKNPVYIGKVNDNGILRDGIHEPLISEIDFQMANAILVHNSKIKKQSCRSRSLLTGLLYCGDCGARMHPRRIARGYPLRRYVCYSVSRTSKSMIKSDHCTNRLHPYTQEELEQIIIDEIKKLAADEDYISEVIRNSSAEAPADDTELFQERIEELNRQTDKLLNLYQIGAIELDQIQERLAALKQERESLTAALKELQTKTDINMDHLKIMSYASAFQIALESGDPEYTNSIIRLLIDKIVVLNEDIEIHWTFC

SEQ ID NO: 6785 - protein, 484 aa, Unknown
  Description of Unknown: Integrase B6786 sequence
  PTHR30461:SF3,IPR036162,PS51737,IPR011109,PTHR30461, PS00397,PF00239,G3DSA:1.10.10.2600,IPR006119,SSF53041, cd00338,SM00857,IPR025827,IPR038109,PS51736, IPR006118,PF13408,G3DSA:3.40.50.1390,PF07508,Coil
MKTGALYVRVSTDDQVEYSPDAQIRLGLEYAKKNNIIIPKQFIFQDDGISGRKATNRPAFQELIAMAKSDEHPIDVILVWKFSRFARNQEEAIVYKNLLKKADVDVVSVSEPIPDGFIGELVQRIFEWMDEYYSINLSGEVMRGMTERASRGGYNAAPPLGYKMQDGIPVIVPEQAEIVKKIFTWYVDDKMSFFDIAVKLNTLGYRTKRNGKFQNRTVAYIIRNEFYNGKIIWNRLEHATRNVKDKSEWIVTDGGHDTFISNELFTAAQDRDKATKRPGKKVRPASTYKHWLSGLLVCSACGGRIVRAGKSKSGNTYFQCTAYNHASCNESHLTNENALKPAILEALQKVLDSGTVEYVVHSTNQEEKSESELIENKLNRIGMKEERIKEAYRDGIDTLEEYKANKEILQREREQLTAMLEQYSKKPEDENESILLNKIRSAYDIIKSDNSTDRQKHDALTSVVDKIVYDKKGGALLMFFYING

SEQ ID NO: 6786 - protein, 484 aa, Unknown
  Description of Unknown: Integrase B6787 sequence
  PTHR30461:SF3,IPR036162,PS51737,IPR011109,PTHR30461, PS00397,PF00239,G3DSA:1.10.10.2600,IPR006119,SSF53041, cd00338,SM00857,IPR025827,IPR038109,PS51736, IPR006118,PF13408,G3DSA:3.40.50.1390,PF07508,Coil
MKTGALYVRVSTDDQVEYSPDAQIRLGLEYAKKNNIIIPKQFIFQDDGISGRKANNRPAFQELIAMAKSDEHPIDVILVWKFSRFARNQEEAIVYKNLLKKADVDVVSVSEPIPDGFIGELVQRIFEWMDEYYSINLSGEVMRGMTERASRGGYNAAPPLGYKMQDGIPVIVPEQAEIVKKIFTWYVDDKMSFFDIAVKLNTLGYRTKRNGKFQNRTVAYIIRNEFYNGKIIWNRLEHATRNVKDKSEWIVTDGGHDTFISNELFTAAQDRDKVTKRPGKKVRPASTYKHWLSGLLVCSACGGRLVRAGKSKSGNTYFQCTAYNHASCNESHLTNENALKPAILEALQKVLDSGTVEYVVHSTNQEEKSESELIENKLNRIGMKEERIKEAYRDGIDTLEEYKANKEILQREREQLTAMLEQYSKKPEDENESILLNKIRSAYDIIKSDNSTDRQKHDALTSVVDKIVYDKKGGALLMYFYIND

SEQ ID NO: 6787 - protein, 484 aa, Unknown
  Description of Unknown: Integrase B6788 sequence
  SM00857,G3DSA:1.10.10.2600,IPR036162,PS51737,G3DSA:3.40.50.1390, IPR006119,IPR038109,PF07508,IPR011109,SSF53041, PTHR30461,Coil,PS51736,cd00338,PF00239
MKSSSVALYLRKSREEETETREATLARHERMLTDYCRNNGLKIVKTFKEVVSGESLDSRPQARAMLAEVADGHFDGVAVIELERLSRGNQIDQVEILETFKKSNTKIYTLNKVYDLAGDNEFDEEFFEFGLFMSRREYKIIKRRLIRGKKQAQKEGYYIGSSLPYGFGKVRGDKGYILTPNDETPIVQLIFQKFVYDDFSLADLRHYLDNNGIKPHRATAWSSAVLKKILKNKCYIGYINYNSRSTRTQECYKGKHDAVIDDETFERAQAKLAQSSHKLKKGTELKNPLASLVKCSECGSTLQRCNEYMRCLTPNCPTVLSYFDDVEKRLIDEITTELKGFKYYIANYGEEIERQRITRDKELAILQKEIDKRNGMLNKACEMLEIGVYSNERYIERVNILESEIKAITGQMTALSAISTDESEKAKKAIPILEKCLSAYWSLSAQDKNDMLKCIIDRVEYSKLQRSNRWHKVDSLELKIFLKL

SEQ ID NO: 6788 - protein, 484 aa, Unknown
  Description of Unknown: Integrase B6789 sequence
  IPR036162,PS51737,IPR011109,PTHR30461, PS00397,PF00239,G3DSA:1.10.10.2600,IPR006119, SSF53041,cd00338,SM00857,IPR025827,IPR038109,PS51736 ,IPR006118,PF13408,G3DSA:3.40.50.1390,PF07508,Coil
MDNTMRYGALYIRVSTDKQEELSPDAQKRLLLDYAKAHNIFISPEYIFVENGISGRKADKRPEFQKMISIAKTDEPPFSVILVWKFSRFARNQEESIVYKSMLKKQHGVDVVSITEPLIDGPFGGLIERIIEWMDEYYSINLSQEVKRGMTEKAMRGGYQATPSLGYASPAPGQPFVVVPSEAEIVKYVFDQYANHHKDPTSIARKLNEKKLLTKRGNRFEKRNINIILRNRFYIGKVVWNGIERDGVHETFINKELFQAANDRLDATYRPKNRRELGGCVHWLSGLVKCSICGASLAYNRSSKYPYFCCWKYAKGMHEGANTINEHQLEDGVLEYFEQLLDGADFSFSYRAPKSMSDLPDEKAVFEKELEKIDQRKIRIREAYEAGIDSLEEYRENRRRLEEEAARIIDLIRESEVKKVDSDPGRHKAEMLEKIRTVYDIVKSDSIDYETKGNFMRSIVEKIVWDRKSNTLTFYLYCSDSREG

SEQ ID NO: 6789 - protein, 484 aa, Unknown
  Description of Unknown: Integrase B6790 sequence
  IPR036162,PS51737,IPR011109,PTHR30461,PS00397, PF00239,G3DSA:1.10.10.2600,IPR006119,SSF53041,cd00338, SM00857,IPR025827,IPR038109,PS51736,IPR006118, PF13408,G3DSA:3.40.50.1390,PF07508,Coil
MAQNLRIGAAYIRVSTDDQAELSPDAQLRVILEDAKKDGFIIPPEYIFEEKKGISGRKAGNRPEFQKMIAVAKSQSPAPFERLYLWKFSRFARNQEESTFYKGVLRKKCGVEIKSVSEPIADGMFGRLIESIIEWFDEYYSYNLSGEVLRGMTEKALRNGYQVVPSLGYKAVGDGKPFVIDEEKYPIVEYIFQAYVSGLDMTGIARKCNERGWTSKRGTPFERRTVSRILHNKFYAGTVEWNGYSFQGTHEVRPSVTDCFESAQERLNQEYRPANRRDVSSCKHWLSGLLHCSICGASLSFNRAGRVKKRGDTFVCWKYAKGVHKGPASISANKAEAAVMASLHSVIESGTVEFEHIRKQPSEGTDEISILDAALARVAVKESRIRDAYESGIDTLEEYKDNKLRIANERQELLAEIERLKGIAASTPDNVPSEEEVLARIKDVYSLLSDPDVSYDVKGSAVRSIISDIVVDQAQKEIHFHYYA

SEQ ID NO: 6790 - protein, 484 aa, Unknown
  Description of Unknown: Integrase B6791 sequence
  IPR036162,PS51737,IPR011109,PTHR30461,PS00397, PF00239,G3DSA:1.10.10.2600,IPR006119,SSF53041,cd00338, SM00857,IPR025827,IPR038109,PS51736,IPR006118, PF13408,G3DSA:3.40.50.1390,PF07508,Coil
MAQNLRIGAAYIRVSTDDQAELSPDAQLRVILDEAKKDGFIIPPEYIFEEKKGISGRKAGNRPQFQKMIAVAKSQNPAPFERLYLWKFSRFARNQEESTFYKGILRKKCGVEIKSISEPIADGMFGRLIETIIEWFDEYYSYNLSGEVLRGMTEKALRNGYQMVPSLGYKAVGDGKPFVIDEDRYPIVEYIFQAYDSGMDMTGIARKCNERGWTGRRGTSFDRRAISRILHNKFYIGTVTWNGYSFQGTHETRPSVTDHFSAVQERMEREYHPQNRRETSSCKHWLSGLLHCSICGASLSLNRAGKRKSRGDTFVCWKYTKGMHNGPASISSRKAESAVLASLHSVIEAGTVEFEHIRKQPSEGTDEISILDAALARVAVKESRIRDAYESGIDTLEEYKDNKLRIANERQELLAEIERLKGIAASTPDDVPSEEEVLNRIKDVYGLLSDPDVSYDVKGAAVRSIISDIVVDQAQKEIHFHYYA

SEQ ID NO: 6791 - protein, 484 aa, Unknown
  Description of Unknown: Integrase B6792 sequence
  PTHR30461:SF3,IPR036162,PS51737,IPR011109,PTHR30461, PS00397,PF00239,G3DSA:1.10.10.2600,IPR006119,SSF53041, cd00338,SM00857,IPR025827,IPR038109,PS51736, IPR006118,PF13408,G3DSA:3.40.50.1390,PF07508,Coil
MKTGALYVRVSTDDQVEYSPDAQIRLGLEYAKKNNIIIPKQFIFQDDGISGRKATNRPAFQELIAMAKSDEHPIDVILVWKFSRFARNQEEAIVYKNLLKKADVDVVSVSEPIPDGFIGELVQRIFEWMDEYYSINLSGEVMRGMTERASRGGYNAAPPLGYKMQDGIPVIVPEQAEIVKKIFTWYVDDKMSFFDIAVKLNTLGYRTKRNGKFQNRTVAYIIRNEFYNGKIIWNRLEHATRNVKDKSEWIVTDGGHDTFISNELFTAAQDRDKVTKRPGKKVRPASTYKHWLSGLLVCSACGGRLVRAGKSKSGNTYFQCTAYNHASCNESHLTNENALKPAILEALQKVLDSGTVEYVVHSTNQEEKSESELIENKLNRIGMKEERIKEAYRDGIDTLEEYKANKEILQREREQLTAMLEQYSKKPEDENESILLNKIRSAYDIIKSDNSTDRQKHDALTSVVDKIVYDKKGGALLMYFYIND

SEQ ID NO: 6792 - protein, 484 aa, Unknown
  Description of Unknown: Integrase B6793 sequence
  cd00338,SM00857,IPR006118,G3DSA:1.10.10.2600,IPR036162, PF13408,PS51737,IPR025827,G3DSA:3.40.50.1390,IPR006119, IPR038109,PF07508,SSF53041,IPR011109,PTHR30461, PS00397,Coil,PF00239
MAQNLRIGAAYIRVSTDDQAELSPDAQLRVIMDEAKKDGFLIPSEYIFEEKRGISGRKADNRPEFQRMISIAKSQVPAPFERLYLWKFSRFARNQEESTFYKGILRKKCGVEIKSISEPIADGMFGRLIETIIEWFDEYYSYNLSGEVLRGMTEKALRNGYQAVPSLGYKAVGGGKPFVIDEERYPMVEYIFQAYHDGLDMTKIARNCNDRGWKTRRNSPFERRTILRILQNKFYVGIVEWNGYSFTGTHETRPSVTDYFEEAQERIKREYRPANRREISTCKHWLSGLLRCSVCGASLSFTRSENLKKRGDTFMCWKYAKGLHKGSTSISAKKAEAALMDSLKTIIGSRTLKFEHIKKENSETSNELSILDSALSRVAQKESRIRDAYEAGVDTLEEYKENKRRLENEQQDLLAEINRLKELTAASQDDVPSAEEVLNRVEEVYALLSDPNVSYEIKGTAVRSILSEIVVDRQNREIHFHYYA

SEQ ID NO: 6793 - protein, 484 aa, Unknown
  Description of Unknown: Integrase B6794 sequence
  PTHR30461:SF3,IPR036162,PS51737,IPR011109,PTHR30461, PS00397,PF00239,G3DSA:1.10.10.2600,IPR006119,SSF53041, SM00857,IPR025827,IPR038109,PS51736,cd03768, IPR006118,PF13408,G3DSA:3.40.50.1390,PF07508,Coil
MKNKRKEILPGLSDMVDLYIRVSTTEQAMEGYSVAEQEKRLRQYSEAMGYRIYRVHIDAGYSGASLDRPAIREVIRDVKAGMVGKVIVWKLDRLSRSQKDVLIMLEDVFLANGCDFISMMESFDTTTAFGRAIVGILAAFSQLERENIKERTTMGKQARLAQGHYNGCRPPLGYEFLPGCNDLRVVPYEAAIVREIFSLFLSGTTAHAIAGKMAQKYPTLRTWEYNTVRRILQNYTYAGKVQDVDVVRDGIHESIISEADFSTAQTILQRNKEQRKQGRVSFGLLTGLIYCGDCGARMQIRRVSKTPNTRRKYICYSVSRVAKNMIRSDHCTNRKHPYSQEDLEGIVINEIKKLSFDSKYLDSLLHAEPETKTDTSDLYLDRLAEIEKQTDKLLNLYQIGVVEFPQIEERLSDLRKERDALKASMESQTPAAPPMESSQILDYIESFQEALDSGDKESVRNIIQLLIDKIVVLNENVEIHWTFC

SEQ ID NO: 6794 - protein, 484 aa, Unknown
  Description of Unknown: Integrase B6795 sequence
  PTHR30461:SF3,IPR036162,PS51737,IPR011109,PTHR30461, PS00397,PF00239,G3DSA:1.10.10.2600,IPR006119,SSF53041, cd00338,SM00857,IPR025827,IPR038109,PS51736, IPR006118,PF13408,G3DSA:3.40.50.1390,PF07508,Coil
MKTGALYVRVSTDDQVEYSPDAQIRLGLEYAKKNNIIIPKQFIFQDDGISGRKATNRPAFQELIAMAKSDEHPIDVILVWKFSRFARNQEEAIVYKNLLKKADVDVVSVSEPIPDGFIGELVQRIFEWMDEYYSINLSGEVMRGMTERASRGGYNAAPPLGYKMQDGIPVIVPEQAEIVKKIFTWYVDDKMSFFDIAVKLNTLGYRTKRNGKFQNRTVAYIIRNEFYNGKIIWNKLEHSTRNVKDKSEWIITDGEHKTFISDELFRAAQERDQATIRPGRKSRPASTYKHWLSGILVCSACGGRLVRAGKSKSGNTYFQCTAYNHASCNESHLTNENALKPAILEALQKVLDSGTVEYVVHSTNQEEKSESELIENKLNRIGMKEERIKEAYRDGIDTLEEYKANKEILQREREQLTAMLEQYSKKPEDENESILLNKIRSAYDIIKSDNSTDRQKHDALTSVVDKIVYDKKGGALLMYFYIND

SEQ ID NO: 6795 - protein, 484 aa, Unknown
  Description of Unknown: Integrase B6796 sequence
  cd03768,PTHR30461:SF3,SM00857,G3DSA:1.10.10.2600,IPR036162, PS51737,G3DSA:3.40.50.1390,IPR006119,IPR038109,PF07508, IPR011109,SSF53041,PTHR30461,PS51736,Coil, PF00239
MRVAIYSRKSKLTDKGESIENQIKIIKSYFHNNKDVEFEVFEEEGFSGKNTKRPAFTRMMKKVDLNYFDIVAVYRLDRIARNVIDFAKIYEKFESKDVKFLSVTEQFDTSTPMGRMMMYIIATFAEIERDNLISRVIDNKKELAKLGQWSGGTPPVGYKAIKKICNGKKVPYLELDKDMMHIPKLAFKWCLEGYSLEGISKKFLIDLHYKLARQNISRLLSNPVYVCNDEIIRDYYKSMNINVYNEIDGKSLIRNIFQDETIIASSKHEPIISSENFIKVQILLKDKAIDPKPRISSKTFLAQRVKCGYCNTSYRIDVAHSKDIVRKQCKCGRNIEVKNMEQLVLEYLQSVVDGDIKIKEYDNTDLITSKKTLEKNIEKNKAILNGLLEKVALAETSIAEIMLKKASSIQSEIRELEIFIKDIEFKIEESYKNNNIKTVRNLWINFNNCTSIAEKQRIFKMMVDSILWYPEPGSRKNGVIKIKF

SEQ ID NO: 6796 - protein, 484 aa, Unknown
  Description of Unknown: Integrase B6797 sequence
  IPR036162,PS51737,IPR011109,PTHR30461,PS00397, PF00239,G3DSA:1.10.10.2600,IPR006119,SSF53041,cd00338, SM00857,IPR025827,IPR038109,PS51736,IPR006118, PF13408,G3DSA:3.40.50.1390,PF07508,Coil
MSNNTPSSLPDLRTGALYIRVSTHEQDDLSPDAQTRLGLDYAKSNNIIVPKDYIFVESVSGRKAKNRHEFQRMIGLAKSPEHPIDAIIVWKFSRFARNQEESIVYKSMLKKDNVDVISISEPLVDGPFGSLIERIIEWMDEYYSIRLSGEVLRGMNEKALRNGYQLSPPLGYSAVGGGNPYIINEDEYKMVSYIFEQYDVYDKDWTAIARSMNQKGWKTKRGSAFDIRSVERVLKNPFYYGLVVWNDTSFMGTHEVRLTKEQYDKRIEKMQKRYRPIKRRNPSTCLHWLSGVLKCGHCGAGLVYNSANRCPNFQCWRYAKGLHKGSHCISEKRVVAAVYEYFEQILDGNPFTYTYRAPIQPETDDARKSLLDELEKLKIKEQRIKLAYENEIDTLEEYKENKLRLKAAREKIESELEEIAAEEAQNKPTGPTKEEALAKVKTVYDIISNPDVDYTTKGNVLRSLVESITYYKEDEKLEFVFYIS

SEQ ID NO: 6797 - protein, 484 aa, Unknown
  Description of Unknown: Integrase B6798 sequence
  IPR036162,PS51737,IPR011109,PTHR30461,PS00397, PF00239,G3DSA:1.10.10.2600,IPR006119,SSF53041,cd00338, SM00857,IPR025827,IPR038109,PS51736,IPR006118, PF13408,G3DSA:3.40.50.1390,PF07508,Coil
MAQNLRIGAAYIRVSTDDQAELSPDAQLRVILDEAKKDGFIIPPEYIFEEKKGISGRKAGNRPEFQKMIAVAKSQSPAPFERLYLWKFSRFARNQEESTFYKGVLRKKCGVEIKSVSEPIADGMFGRLIESIIEWFDEYYSYNLSGEVLRGMTEKALRNGYQMVPSLGYKAVGDGKPFVIDEEKYPIVEYIFQAYVSGLDMTGIARKCNERGWTSKRGTPFERRTVSRILHNKFYAGTVEWNGYSFQGTHEVRPSVTDCFESAQERLNQEYRPANRRDVSSCKHWLSGLLHCSICGASLSFNRAGRVKKRGDTFVCWKYAKGVHKGPASISANKAEAAVMASLHSVIESGTVEFEHIRKQPSEGTDEISILDAALARVAVKESRIRDAYESGIDTLEEYKDNKLRIANERQELLAEIERLKGIAASAPNDVPSEEEVLNRIKDVYSLLSDPDVSYDVKGAAVRSIISDIVVDQTQKEIHFHYYA

SEQ ID NO: 6798 - protein, 484 aa, Unknown
  Description of Unknown: Integrase B6799 sequence
  PTHR30461:SF3,IPR036162,PS51737,IPR011109,PTHR30461, PS00397,PF00239,G3DSA:1.10.10.2600,IPR006119,SSF53041, cd00338,SM00857,IPR025827,IPR038109,PS51736, IPR006118,PF13408,G3DSA:3.40.50.1390,PF07508,Coil
MKTGALYVRVSTDDQVEYSPDAQIRLGLEYAKKNNIIIPKQFIFQDDGISGRKATNRPAFQELIAMAKSDEHPIDVILVWKFSRFARNQEEAIVYKNLLKKADVDVVSVSEPIPDGFIGELVQRIFEWMDEYYSINLSGEVMRGMTERASRGGYNAAPPLGYKMQDGIPVIVPDQAEIVKKIFTWYVDDKMSFFDIAVKLNTLGYRTKRNGKFQNRTVAYIIRNEFYNGKIIWNRLEHATRNVKDKSEWIVTDGGHDTFISNELFTAAQDRDKATKRPGKKVRPASTYKHWLSGLLVCSACGGRIVRAGKSKSGNTYFQCTAYNHASCNESHLTNENALKPAILEALQKVLDSGTVEYVVHSTNQEEKSESELIENKLNRIGMKEERIKEAYRDGIDTLEEYKANKEILQREREQLTAMLEQYSKKPEDENESILLNKIRSAYDIIKSDNSTDRQKHDALTSVVDKIVYDKKGGALLMYFYIND

SEQ ID NO: 6799 - protein, 484 aa, Unknown
  Description of Unknown: Integrase B6800 sequence
  PTHR30461:SF3,IPR036162,PS51737,IPR011109,PTHR30461, PS00397,PF00239,G3DSA:1.10.10.2600,IPR006119,SSF53041, cd00338,SM00857,IPR025827,IPR038109,PS51736, IPR006118,PF13408,G3DSA:3.40.50.1390,PF07508,Coil
MKTGALYVRVSTDDQVEYSPDAQIRLGLEYAKKNNIIIPKQFIFQDDGISGRKATNRPAFQELIAMAKSDEHPIDVILVWKFSRFARNQEEAIVYKNLLKKADVDVVSVSEPIPDGFIGELVQRIFEWMDEYYSINLSGEVMRGMTERASRGGYNSDPPLGYAMQNGIPVIVPEQAAIVEKIFSWYVNDKMAFFDIAKRLNALGYKTKRGGKFQNRTVAYIIRNEFYNGKIIWNKLEHSTRNVKDKSEWIIADGEHDTFISDELFRAAQERDQATIRPGRKSRPASTYKHWLSGILVCSACGGRLVRCGQSKSGNTYFQCTAYNHASCNESHLTNENALKPAILKALQDVLDSGTVEYVVHSTNQEEKSESELIENKLNRIGMKEERIKEAYRDGIDTLEEYKANKEILQREREQLTAMLEQYSKKPADENESILLNKIRSAYDIIKSDNSTDRQKHDALTSVVEKIVYDKKGGVLLMFFYING

SEQ ID NO: 6800 - protein, 484 aa, Unknown
  Description of Unknown: Integrase B6801 sequence
  PTHR30461:SF3,IPR036162,PS51737,IPR011109,PTHR30461, PS00397,PF00239,G3DSA:1.10.10.2600,IPR006119,SSF53041, cd00338,SM00857,IPR025827,IPR038109,PS51736, IPR006118,PF13408,G3DSA:3.40.50.1390,PF07508,Coil
MKTGALYVRVSTDDQVEYSPDAQIRLGLEYAKKNNIIIPKQFIFQDDGISGRKATNRPAFQELIAMAKSDEHPIDVILVWKFSRFARNQEEAIVYKNLLKKADVDVVSVSEPIPDGFIGELVQRIFEWMDEYYSINLSGEVMRGMTERASRGGYNAAPPLGYKMQDGIPVIVPEQAEIVKKIFTWYVDDKMSFFDIAVKLNTLGYRTKRNGKFQNRTVAYIIRNEFYNGKIIWNRLEHATRNVKDKSEWIVTDGGHDTFISNELFTAAQDRDKATKRPGKKVRPASTYKHWLSGLLVCSACGGRIVRAGKSKSGNTYFQCTAYNHASCNESHLTNENALKPAILEALQKVLDSGTVEYVVHSTNQEEKSESELIENKLNRIGMKEERIKEAYRDGIDTLEEYKANKEILQREREQLTAMLEQYSKKPEDENESILLNKIRSAYDIIKSDNSTDRQKHDALTSVVEKIVYDKKGGALLMFFYIND

SEQ ID NO: 6801 - protein, 484 aa, Unknown
  Description of Unknown: Integrase B6802 sequence
  PTHR30461:SF3,IPR036162,PS51737,IPR011109,PTHR30461, PS00397,PF00239,G3DSA:1.10.10.2600,IPR006119,SSF53041, cd00338,SM00857,IPR025827,IPR038109,PS51736, IPR006118,PF13408,G3DSA:3.40.50.1390,PF07508,Coil
MKTGALYVRVSTDDQVEYSPDAQIRLGLEYAKKNNIIIPKQFIFQDDGISGRKATNRPAFQELIAMAKSDEHPIDVILVWKFSRFARNQEEAIVYKNLLKKADVDVVSVSEPIPDGFIGELVQRIFEWMDEYYSINLSGEVMRGMTERASRGGYNAAPPLGYKMQDGIPVIVPEQAEIVKKIFTWYVDDKMSFFDIAVKLNTLGYRTKRNGKFQNRTVAYIIRNEFYNGKIIWNRLEHATRNVKDKSEWIVTDGGHDTFISNELFTAAQDRDKATKRPGKKVRPASTYKHWLSGLLVCSACGGRIVRAGKSKSGNTYFQCTAYNHASCNESHLTNENALKPAILEALQKVLDSGTVEYVVHSTNQEEKSESELIENKLNRIGMKEERIKEAYRDGIDTLEEYKANKEILQREREQLTAMLEQYSKKPEDENESILLNKIRSAYDIIKSDNSTDRQKHDALTSVVDKIVYDKKGGALLMYFYIND

SEQ ID NO: 6802 - protein, 484 aa, Unknown
  Description of Unknown: Integrase B6803 sequence
  IPR036162,PS51737,IPR011109,PTHR30461,PS00397, PF00239,G3DSA:1.10.10.2600,IPR006119,SSF53041,cd00338, SM00857,IPR025827,IPR038109,PS51736,IPR006118, PF13408,G3DSA:3.40.50.1390,PF07508,Coil
MAQNLRIGAAYIRVSTDDQAELSPDAQLRVILDEAKKDGFIIPPEYIFEEKKGISGRKAGNRPEFQKMIAVAKSQSPAPFERLYLWKFSRFARNQEESTFYKGVLRKKCGVEIKSVSEPIADGMFGRLIESIIEWFDEYYSYNLSGEVLRGMTEKALRNGYQMVPSLGYKAVGDGKPFVIDEEKYPIVEYIFQAYVSGLDMTGIARKCNERGWTSKRGTPFERRTVSRILHNKFYAGTVEWNGYSFQGTHEVRPSVTDCFESAQERLNQEYRPANRRDVSSCKHWLSGLLHCSICGASLSFNRAGRVKKRGDTFVCWKYAKGVHKGPASISANKAEAAVMASLHSVIESGTVEFEHIRKQPSEGTDEISILDAALARVAVKESRIRDAYESGIDTLEEYKDNKLRIANERQELLAEIERLKGIAASAPDDVPSEEEVLNRIKDVYSLLSDPDVSYDVKGAAVRSIISDIVVDQTQKEIHFHYYA

SEQ ID NO: 6803 - protein, 484 aa, Unknown
  Description of Unknown: Integrase B6804 sequence
  IPR036162,PS51737,IPR011109,PTHR30461,PS00397, PF00239,G3DSA:1.10.10.2600,IPR006119,SSF53041,cd00338, SM00857,IPR025827,IPR038109,PS51736,IPR006118, PF13408,G3DSA:3.40.50.1390,PF07508,Coil
MAQNLRIGAAYIRVSTDDQAELSPDAQLRVILDEAKKDGFIIPPEYIFEEKKGISGRKAGNRPQFQKMIAVAKSQNPAPFERLYLWKFSRFARNQEESTFYKGILRKKCGVEIKSISEPIADGMFGRLIETIIEWFDEYYSYNLSGEVLRGMTEKALRNGYQMVPSLGYKAVGDGKPFVIDEDRYPIVEYIFQAYDSGMDMTGIARKCNERGWTGRRGTSFDRRAISRILHNKFYIGTVTWNGYSFQGTHETRPSVTDHFSAVQERMEREYHPQNRRETSSCKHWLSGLLHCSICGASLSLNRAGKRKSRGDTFVCWKYTKGMHNGPASISSRKAESAVLASLHSVIEAGTVEFEHIRKQPSDGTDEISILDAALARVAVKESRIREAYESGIDTLEEYRDNKLRIANERQELLAEIERLKGLAASTPDDVPSEEEVLNRIKDVYSLLSDPDVSYDVKGAAVRSIISDIVVDQTKKEIHFHYYA

SEQ ID NO: 6804 - protein, 484 aa, Unknown
  Description of Unknown: Integrase B6805 sequence
  PTHR30461:SF3,IPR036162,PS51737,IPR011109,PTHR30461, PS00397,PF00239,G3DSA:1.10.10.2600,IPR006119,SSF53041, cd00338,SM00857,IPR025827,IPR038109,PS51736, IPR006118,PF13408,G3DSA:3.40.50.1390,PF07508,Coil
MKTGALYVRVSTDDQVEYSPDAQIRLGLEYAKKNNIIIPKQFIFQDDGISGRKATNRPAFQELIAMAKSDEHPIDVILVWKFSRFARNQEEAIVYKNLLKKADVDVVSVSEPIPDGFIGELVQRIFEWMDEYYSINLSGEVMRGMTERASRGGYNAAPPLGYKMQDGIPVIVPEQAEIVKKIFTWYVDDKMSFFDIAVKLNTLGYRTKRNGKFQNRTVAYIIRNEFYNGKIIWNRLEHATRNVKDKSEWIVTDGGHDTFISNELFTAAQERDQATIRPGRKSRPASTYKHWLSGILVCSACGGRLVRCGQSKSGNTYFQCTAYNHASCNESHLTNENALKPAILKALQDVLDSGTVEYVVHSTNQEEKSESELIQNKLNRIGMKEERIKEAYRDGIDTLEEYKANKEILQREREELTAMLEQYSKEPADENESILLNKIRSAYDIIKSDNSTDRQKHDALTSVVEKIVYDKKGGVLLMFFYING

SEQ ID NO: 6805 - protein, 484 aa, Unknown
  Description of Unknown: Integrase B6806 sequence
  PTHR30461:SF3,IPR036162,PS51737,IPR011109,PTHR30461, PS00397,PF00239,G3DSA:1.10.10.2600,IPR006119,SSF53041, SM00857,IPR025827,IPR038109,PS51736,cd03768, IPR006118,PF13408,G3DSA:3.40.50.1390,PF07508,Coil
MKKEKVIPIDSLDLVDLYIRVSTTEQALEGYSVAEQEHRLRQYCAAMGHRIHKVHIDAGFSGASLDRPGIKETIKDVQKHLVRRVIVWKLDRLSRSQKDTLIMLEDVFLENGCDFISMMESFDTSTSFGRAIVGILAAFAQLERENIKERTMMGRQARLAKGHYNGSRPPLGYSFIPGSNDLQVDPYQAAIVREIFKLFLSGISINAIARKMEEKYPTVRTWNNTMIRRTLKNPVYIGKVNDNGILRDGIHEPLISEIDFQMANAILVHNSKIKKQSCRSRSLLTGLLYCGDCGARMHPRRIARGYPLRRYVCYSVSRTSKSMIKSDHCTNRLHPYTQEELEQIIIDEIKKLAADEDYISEVIRNSSAEVPADDTELFQERIEELNRQTDKLLNLYQIGAIELDQIQERLAALKQERESLTAALKELQTKTDINMDHLKIMSYASAFQIALESGDPEYTNSIIRLLIDKIVVLNEDIEIHWTFC

SEQ ID NO: 6806 - protein, 484 aa, Unknown
  Description of Unknown: Integrase B6807 sequence
  cd00338,SM00857,IPR006118,G3DSA:1.10.10.2600,IPR036162, PF13408,PS51737,IPR025827,G3DSA:3.40.50.1390,IPR006119, IPR038109,PF07508,SSF53041,IPR011109,PTHR30461, PS00397,Coil,PF00239
MAQNLRIGAAYIRVSTDDQAELSPDAQLRVILDEAKKDGFIIPPEYIFEEKKGISGRKAGNRPEFQRMIAVAKSQSPAPFERLYLWKFSRFARNQEESTFYKGVLRKKCGVEIKSVSEPIADGMFGRLIESIIEWFDEYYSYNLSGEVLRGMTEKALRNGYQVVPSLGYKAVGDGKPFVIDEEKYPIVEYIFQAYVSGLDMTGIARKCNERGWTSKRGTPFERRTVSRILHNKFYAGTVEWNGYSFQGTHEVRPSVTDCFESAQERLNQEYRPANRRDVSSCKHWLSGLLHCSICGASLSFNRAGRVKKRGDTFVCWKYAKGVHKGPASISANKAEAAVMASLHSVIESGTVEFEHIRKQPSEGTDEISILDAALARVAVKESRIRDAYESGIDTLEEYKDNKLRLANERQELLAEIERLKGIAASTPDDVPSEEEVLNRIKDVYSLLSDPDVSYDVKGAAVRSIISDIVVDQTKKEIHFHYYA

SEQ ID NO: 6807 - protein, 484 aa, Unknown
  Description of Unknown: Integrase B6808 sequence
  PTHR30461:SF3,IPR036162,PS51737,IPR011109,PTHR30461, PS00397,PF00239,G3DSA:1.10.10.2600,IPR006119,SSF53041, cd00338,SM00857,IPR025827,IPR038109,PS51736, IPR006118,PF13408,G3DSA:3.40.50.1390,PF07508,Coil
MKTGALYVRVSTDDQVEYSPDAQIRLGLEYAKKNNIIIPKQFIFQDDGISGRKATNRPAFQELIAMAKSDEHPIDVILVWKFSRFARNQEEAIVYKNLLKKADVDVVSVSEPIPDGFIGELVQRIFEWMDEYYSINLSGEVMRGMTERASRGGYNAAPPLGYKMQDGIPVIVPEQAEIVKKIFTWYVDDKMSFFDIAVKLNTLGYRTKRNGKFQNRTVAYIIRNEFYNGKIIWNRLEHATRNAKDKSEWIVTDGGHDTFISNELFTAAQDRDKATIRPGRKSRPASTYKHWLSGILVCSACGGRLVRCGQSKSGNTYFQCTAYNHASCNESHLTNENALKPAILEALQKVLDSGTVEYVVHSTNQEEKSESELIENKLNRIGMKEERIKEAYRDGIDTLEEYKANKEILQMEREQLTAMLEQYSKKPEDENESILLNKIRSAYDIIKSDNSTDRQKHDALTSVVDKIVYDKKGGALLMYFYIND

SEQ ID NO: 6808 - protein, 484 aa, Unknown
  Description of Unknown: Integrase B6809 sequence
  PTHR30461:SF3,IPR036162,PS51737,IPR011109,PTHR30461, PS00397,PF00239,G3DSA:1.10.10.2600,IPR006119,SSF53041, cd00338,SM00857,IPR025827,IPR038109,PS51736, IPR006118,PF13408,G3DSA:3.40.50.1390,PF07508,Coil
MKTGALYVRVSTDDQVEYSPDAQIRLGLEYAKKNNIIIPKQFIFQDDGISGRKATNRPAFQELIAMAKSDEHPIDVILVWKFSRFARNQEEAIVYKNLLKKADVDVVSVSEPIPDGFIGELVQRIFEWMDEYYSINLSGEVMRGMTERASRGGYNAAPPLGYKMQDGIPVIVPEQAEIVKKIFTWYVDDKMSFFDIAVKLNTLGYRTKRNGKFQNRTVAYIIRNEFYNGKIIWNRLEHATRNVKDKSEWIVTDGGHDTFISNELFTAAQDRDKVTKRPGKKVRPASTYKHWLSGLLVCSACGGRLVRCGQSKSGNTYFQCTAYNHASCNESHLTNENALKPAILEALQKVLDSGTVEYVVHSTNQEEKSESELIENKLSRISMKEERIKEAYRDGIDTLEEYKANKEILQREREQLTAMLEQYSKKPEDENESFLLNKIRSAYDIIKSDNSTDRQKHDALTSVVDKIVYDKKCGALLMYFYIND

SEQ ID NO: 6809 - protein, 484 aa, Unknown
  Description of Unknown: Integrase B6810 sequence
  PTHR30461:SF3,SM00857,G3DSA:1.10.10.2600,IPR036162,PF13408, PS51737,G3DSA:3.40.50.1390,IPR025827,IPR006119,IPR038109, PF07508,IPR011109,SSF53041,PTHR30461,Coil, PS51736,cd00338,PF00239
MNAVIYARYSCDRQTEQSIEGQLRECKAFAASEGIHIIGEYIDRAISGTTANRPEFQRMIADSRYKTFQAVIVYKLDRFARNRYDSAMYKSKLKANGVRVLSAKEHITDSPEGIILEGLLEAMNEYYSAELSQKIKRGMRENAIKGKTTGGNVALGYRIGADKQMEIDPAGAALVRRIFTSYDNGRTFTEICDDLNHAGYTTSRGKQFRIDTISRILANQRYTGTFQCAGEDAHCPPIIEPELFRSVQERLTESRHKHRHTQSPHEYVLTGKAICGTCGRRLTGRAGTSKTDKRYYYYCCPNKCCGWLPAAELEHAVLDAIAQYTTPEACEQIANATYALYQQSTHENADLTAAQRRLQETEKKLENAVNAVLNGITSAALQATMQQLEQQKAALETEVRLLQTDAPELKLEHFQYFAHRLLEVQAEGTEKILQLLVNQVIVYKEQITVLVNLTDKTKTPPLEQVTAALRESSCSVACGGGDEN

SEQ ID NO: 6810 - protein, 484 aa, Unknown
  Description of Unknown: Integrase B6811 sequence
  IPR036162,PS51737,IPR011109,PTHR30461,PS00397, PF00239,G3DSA:1.10.10.2600,IPR006119,SSF53041,cd00338, SM00857,IPR025827,IPR038109,PS51736,IPR006118, PF13408,G3DSA:3.40.50.1390,PF07508,Coil
MSNNTPSSLPDLRTGALYIRVSTHEQDDLSPDAQTRLGLDYAKSNNIIVPKDYIFVESVSGRKAKNRHEFQRMIGLAKSPEHPIDVIIVWKFSRFARNQEESIVYKSMLKKDNVDVISISEPLVDGPFGSLIERIIEWMDEYYSIRLSGEVLRGMNEKALRNGYQLSPPLGYSAVGGGNPYIINEDEYKMVSYIFEQYDVYDKDWTAIARSMNQKGWKTKRGSAFDIRSVERVLKNPFYYGLVVWNDTSFMGTHEVRLTKEQYDKRIEKMQKRYRPIKRRNPSTCLHWLSGVLKCGHCGAGLVYNSANRCPNFQCWRYAKGLHMGSHCISEKRVVAAVYEYFEQILDGNPFTYTYRAPIRPETDDAKKSLLDELEKLKIKEQRIKFAYENEVDTLEEYKENKLRLKAAREKIESELEEIAAEEAQNEPTGPTKEEALAKVKTVYDIISNPDVDYTTKGNVLRSLVESITYYKEDEKLEFVFYIS

SEQ ID NO: 6811 - protein, 484 aa, Unknown
  Description of Unknown: Integrase B6812 sequence
  PTHR30461:SF3,IPR036162,PS51737,IPR011109,PTHR30461, PS00397,PF00239,G3DSA:1.10.10.2600,IPR006119,SSF53041, cd00338,SM00857,IPR025827,IPR038109,PS51736, IPR006118,PF13408,G3DSA:3.40.50.1390,PF07508,Coil
MKTGALYVRVSTDDQVEYSPDAQIRLGLEYAKKNNIIIPKQFIFQDDGISGRKATNRPAFQELIAMAKSDEHPIDVILVWKFSRFARNQEEAIVYKNLLKKADVDVVSVSEPIPDGFIGELVQRIFEWMDEYYSINLSGEVMRGMTERASRGGYNAAPPLGYKMQDGIPVIVPEQAEIVKKIFTWYVDDKMSFFDIAVKLNTLGYRTKRNGKFQNRTVAYIIRNEFYNGKIIWNRLEHATRNVKDKSEWIVTDGGHDTFISNELFTAAQDRDKATKRPGKKVRPASTYKHWLSGLLVCSACGGRIVRAGKSKSGNTYFQCTAYNHASCNESHLTNENALKPAILEALQKVLDSGTVEYVVHSTNQEEKSESELIENKLNRIGMKEERIKEAYRDGIDTLEEYKANKEILQREREQLTAMLEQYSKKPEDENESILLNKIRSAYDIIKSDNSTDRQKHDALTSVVDKIVYDKKGGALLMYFYING

SEQ ID NO: 6812 - protein, 484 aa, Unknown
  Description of Unknown: Integrase B6813 sequence
  PTHR30461:SF3,IPR036162,PS51737,IPR011109,PTHR30461, PS00397,PF00239,G3DSA:1.10.10.2600,IPR006119,SSF53041, cd00338,SM00857,IPR025827,IPR038109,PS51736, IPR006118,PF13408,G3DSA:3.40.50.1390,PF07508,Coil
MANTDLTVAAAYIRVSTEDQTDLSPESQLEKVKEYAAKNNMLLPSEFIFHDDGISGRAANKRPGFQRMIAAAKDPVHPFSVIIVWKYSRFARNQEESIFYKSILRSKCNVDVISVSEPLIAGPFGSLIERIIEWMDEFYSVRLSEEVKRSMTVNAKNGVLQSTASFGYKVENGVLVPVPEEAELIKEIFHRFLSGEGFYPIAQDLNSRGIKTHRGSRFENRTVEYIIRNPVYIGKLRWNPAGRTRRDFHNENIICAKGAHEPLIDEETWEAAQLRVEQLKSQWAYHGRPSSDRKHWLCGIVRCASCGATLIWSQPHFLKCNNYARGSCKTSQHIAVELIEESFIQQLRHDFSFSSEISYQIIDVPKPQDTRAGQLRRNRDRMLSRLARSRDAYMNGIDSLEDYAAIKASIQKEIDQIDAELSTLESASGASTEVSMKDSIKRTLETLESDAPISKKYDAVKRIIDTCTFDKQNMLLSIVYRYEI

SEQ ID NO: 6813 - protein, 484 aa, Unknown
  Description of Unknown: Integrase B6814 sequence
  IPR036162,PS51737,IPR011109,PTHR30461,PS00397, PF00239,G3DSA:1.10.10.2600,IPR006119,SSF53041,cd00338, SM00857,IPR025827,IPR038109,PS51736,IPR006118, PF13408,G3DSA:3.40.50.1390,PF07508,Coil
MSQTLRIGAAYIRVSTDDQAELSPDAQLRVILEDAKKDGFIIPPEYIFEEKKGISGRKAGNRPEFQKMIAVAKSQSPAPFERLYLWKFSRFARNQEESTFYKGVLRKKCGVEIKSVSEPIADGMFGRLIESIIEWFDEYYSYNLSGEVLRGMTEKALRNGYQVVPSLGYKAVGDGKPFVIDEEKYPIVEYIFQAYVSGLDMTGIARKCNERGWTSKRGTPFERRTVSRILHNKFYAGTVEWNGYSFQGTHEVRPSVTDCFESAQERLNQEYRPANRRDVSSCKHWLSGLLHCSICGASLSFNRAGRVKKRGDTFVCWKYAKGVHKGPASISANKAEAAVMASLHSVIESGTVEFEHIRKQPSEGTDEISILDAALARVAVKESRIRDAYESGIDTLEEYKDNKLRLANERQELLAEIERLKGIAASTPDDVPSDEEVLNRIKDVYGLLSDPDVSYDVKGVAVRSIISDIVVDQTQKEIHFHYYA

SEQ ID NO: 6814 - protein, 484 aa, Unknown
  Description of Unknown: Integrase B6815 sequence
  PTHR30461:SF3,IPR036162,PS51737,IPR011109,PTHR30461, PS00397,PF00239,G3DSA:1.10.10.2600,IPR006119,SSF53041, cd00338,SM00857,IPR025827,IPR038109,PS51736, IPR006118,PF13408,G3DSA:3.40.50.1390,PF07508,Coil
MKTGALYVRVSTDDQVEYSPDAQIRLGLEYAKKNNIIIPKQFIFQDDGISGRKATNRPAFQELIAMAKSDEHPIDVILVWKFSRFARNQEEAIVYKNLLKKADVDVVSVSEPIPDGFIGELVQRIFEWMDEYYSINLSGEVMRGMTERASRGGYNAAPPLGYKMQDGIPVIVPEQAEIVKKIFIWYVDDKMSFFDIAVKLNTLGYRTKRNGKFQNRTVAYIIRNEFYNGKIIWNRLEHTTRNVKDKSEWIVTDGGHDTFISNELFTAAQDRDKVTKRPGKKVRPASTYKHWLSGLLVCSACGGRLVRAGKSKSGNTYFQCTAYNHASCNESHLTNENALKPAILEALQKVLDSGTVEYVVHSTNQEEKSESELIENKLNRIGMKEERIKEAYRDGIDTLEEYKANKEILQREREQLTAMLEQYSKKHEDENESILLNKIRSAYDIIKSDNSTDRQKHDALTSVVDKIVYDKKGGALLMYFYIND

SEQ ID NO: 6815 - protein, 484 aa, Unknown
  Description of Unknown: Integrase B6816 sequence
  PTHR30461:SF3,IPR036162,PS51737,IPR011109,PTHR30461, PS00397,PF00239,G3DSA:1.10.10.2600,IPR006119,SSF53041, cd00338,SM00857,IPR025827,IPR038109,PS51736, IPR006118,PF13408,G3DSA:3.40.50.1390,PF07508,Coil
MKTGALYVRVSTDDQVEYSPDAQIRLGLEYAKKNNIIIPKQFIFQDDGISGRKATNRPAFQELIAMAKSDEHPIDVILVWKFSRFARNQEEAIVYKNLLKKADVDVVSVSEPIPDGFIGELVQRIFEWMDEYYSINLSGEVMRGMTERASRGGYNAAPPLGYKMQDGIPVIVPEQAEIVKKIFTWYVDDKMSFFDIAVKLNTLGYRTKRNGKFQNRTVAYIIRNEFYNGKIIWNRLEHATRNVKDKSEWIVTDGGHDTFISNELFTAAQDRDKATKRPGKKVRPASTYKHWLSGLLVCSACGGRIVRAGKSKSGNTYFQCTAYNHASCNESHLTNENALKPAILEALQKVLDSGTVEYVVHSTNQEEKSESELIENKLNRIGMKEERIKEAYRDGIDTLEEYKANKEILQREREELTAMLEQYSKEPADENESILLNKIHSAYDIIKSDNSTDRQKHDALTSVVDKIVYDKKGGALLMYFYING

SEQ ID NO: 6816 - protein, 484 aa, Unknown
  Description of Unknown: Integrase B6817 sequence
  PTHR30461:SF3,IPR036162,PS51737,IPR011109,PTHR30461, PS00397,PF00239,G3DSA:1.10.10.2600,IPR006119,SSF53041, cd00338,SM00857,IPR025827,IPR038109,PS51736, IPR006118,PF13408,G3DSA:3.40.50.1390,PF07508,Coil
MKTGALYVRVSTDDQVEYSPDAQIRLGLEYAKKNNIIIPKQFIFQDDGISGRKATNRPAFQELIAMAKSDEHPIDVILVWKFSRFARNQEEAIVYKNLLKKADVDVVSVSEPIPDGFIGELVQRIFEWMDEYYSINLSGEVMRGMTERASRGGYNAAPPLGYKMQDGIPVIVPEQAEIVKKIFTWYVDDKMSFFDIAVKLNTLGYRTKRNGKFQNRTVAYIIRNEFYNGKIIWNRLEHATRNVKDKSEWIVTDGGHDTFISNELFTAAQDRYKATKIPGKKVRPASTYKHWLSGLLVCSACGGRIVRAGKSKSGNTYFQCTAYNHASCNESHLTNENALKPAILEALQKVLDSGTVEYVVHSTNQEEKSESELIENKLNRIGMKEERIKEAYRDGIDTLEEYKANKEILQREREQLTAMLEQYSKKPEDENESILLNKIRSAYDIIKSDNSTDRQKHDALTSVVDKIVYDKKGGALLMYFYIND

SEQ ID NO: 6817 - protein, 484 aa, Unknown
  Description of Unknown: Integrase B6818 sequence
  PTHR30461:SF3,IPR036162,PS51737,IPR011109,PTHR30461, PS00397,PF00239,G3DSA:1.10.10.2600,IPR006119,SSF53041, cd00338,SM00857,IPR025827,IPR038109,PS51736, IPR006118,PF13408,G3DSA:3.40.50.1390,PF07508,Coil
MKTGALYVRVSTDDQVEYSPDAQIRLGLEYAKKNNIIIPKQFIFQDDGISGRKANNRPAFQELIAMAKSDEHPIDIILVWKFSRFARNQEEAIVYKNLLKKADVDVVSVSEPIPDGFIGELVQRIFEWMDEYYSINLSGEVMRGMTERASRGGYNAAPPLGYKMQDGIPVIVPEQAEIVKKIFTWYVDDKMSFFDIAVKLNALGYRTKRNGKFQNRTVAYIIRNEFYNGKIIWNRLEHATRNVKDKSEWIVTDGGHDTFISNELFTAAQERDKATNRPGKKVRPASTYKHWLSGLLVCSACGGRLVRAGKSKSGNTYFQCTAYNHASCNESHLTNENALKPAILEALQKVLDSGTVEYVVHSTNQEEKSESELIENKLNRIGMKEERIKEAYRDGIDTLEEYKANKEILQREREQLTAMLEQYSKKPEDENESILLNKIRSAYDIIKSDNSTDRQKHDALTSVVDKIVYDKKGGALLMYFYIND

SEQ ID NO: 6818 - protein, 484 aa, Unknown
  Description of Unknown: Integrase B6819 sequence
  PTHR30461:SF3,IPR036162,PS51737,IPR011109,PTHR30461, PS00397,PF00239,G3DSA:1.10.10.2600,IPR006119,SSF53041, cd00338,SM00857,IPR025827,IPR038109,PS51736, IPR006118,PF13408,G3DSA:3.40.50.1390,PF07508,Coil
MKTGALYVRVSTDDQVEYSPDAQIRLGLEYAKKNNIIIPKQFIFQDDGISGRKANNRPAFQELIAMAKSDEHPIDIILVWKFSRFARNQEEAIVYKNLLKKADVDVVSVSEPIPDGFIGELVQRIFEWMDEYYSINLSGEVMRGMTERASRGGYNAAPPLGYKMQDGIPVIVPEQAEIVKKIFTWYVDDKMSFFDIAVKLNTLGYRTKRNGKFQNRTVAYIIRNEFYNGKIIWNRLEHATRNVKDKSEWIVTDGGHDTFISNELFTAAQDRDKATKRPGKKVRPASTYKHWLSGLLVCSACGGRIVRAGKSKSGNTYFQCTAYNHASCNESHLTNENALKPAILEALQKVLDSGTVEYVVHSTNQEEKSESELIENKLNRIGMKEERIKEAYRDGIDTLEEYKANKEILQREREQLTAMLEQYSKKPEDENESILLNKIRSAYDIIKSDNSTDRQKHDALTSVVDKIVYDKKGGALLMYFYIND

SEQ ID NO: 6819 - protein, 484 aa, Unknown
  Description of Unknown: Integrase B6820 sequence
  PTHR30461:SF3,IPR036162,PS51737,IPR011109,PTHR30461, PS00397,PF00239,G3DSA:1.10.10.2600,IPR006119,SSF53041, cd00338,SM00857,IPR025827,IPR038109,PS51736, IPR006118,PF13408,G3DSA:3.40.50.1390,PF07508,Coil
MKTGALYVRVSTDDQVEYSPDAQIRLGLEYAKKNNIIIPKQFIFQDDGISGRKATNRPAFQELIAMAKSDEHPIDVILVWKFSRFARNQEEAIVYKNLLKKADVDVVSVSEPIPDGFIGELVQRIFEWMDEYYSINLSGEVMRGMTERASRGGYNAAPPLGYKMQDGIPVIVPEQAEIVKKIFTWYVDDKMSFFDIAVKLNTLGYRTKRNGKFQNRTVAYIIRNEFYNGKIIWNRLEHATRNVKDKSEWIVTDGGHDTFISNELFTAAQDRDKATKRPGKKVRPASTYKHWLSGLLVCSACGGRLVRAGKSKSGNTYFQCTAYNHASCNESHLTNENALKPAILEALQDVLDSGTVEYVVHSTNQEEKSESELIENKLNRIGMKEERIKEAYRDGIDTLEEYKANKEILQREREQLTAMLEQYSKKPEDENESILLNKIRSAYDIIKSDNSTDRQKHDALTSVVEKIVYDKKGGVLLMFFYING

SEQ ID NO: 6820 - protein, 484 aa, Unknown
  Description of Unknown: Integrase B6821 sequence
  PTHR30461:SF3,IPR036162,PS51737,IPR011109,PTHR30461, PS00397,PF00239,G3DSA:1.10.10.2600,IPR006119,SSF53041, SM00857,IPR025827,IPR038109,PS51736,cd03768, IPR006118,PF13408,G3DSA:3.40.50.1390,PF07508,Coil
MCTKNVGIYIRVSTQEQANEGYSIDAQRDRLTAYCRSRAWNIYNIYIDGGFSGSNMSRPALSQLLDDIKAKRINCVLVYKLDRLSRSQKDTLYIIEDVFLKNGIDFVSLNENFDTSSPFGRAMIGILSVFAQLEREQIKERSMMGRVERAKNGLWHGGGHEPFGYNYIDGQLIINDYESAIVKDIFELFNDKIPIYQIQQIISNKYGKDFHESVIRSTLSMVLYTGKISYGGETYDGQHDAIISTDTFKRAQDLLEIRKKKYHNRPFKSKTLLGGLLYCAHCGARYLAKGNYSGRGANRSYRPYYTCYSRAKSNKKYIIDPNCKNPSYAVPVLDGIILNEIRKLFTCHDYFESILQSSTPPPAPNNDLEIELLSKQIISIQGQISRLLDLYQLDGIAIDDIHDRINSLQEEKVKLQETITKLSTPILPETNKKLSPSDVLSLKDSFESIVSSDDMSAKQNLVHTLIQKILVNEEENSFEIIWNF

SEQ ID NO: 6821 - protein, 484 aa, Unknown
  Description of Unknown: Integrase B6822 sequence
  IPR036162,PS51737,IPR011109,PTHR30461,PS00397, PF00239,G3DSA:1.10.10.2600,IPR006119,SSF53041,cd00338, SM00857,IPR025827,IPR038109,PS51736,IPR006118, PF13408,G3DSA:3.40.50.1390,PF07508,Coil
MAQNLRIGAAYIRVSTDDQAELSPDAQLRVILDEAKKDGFIIPPEYIFEEKKGISGRKAGNRPEFQKMIAVAKSQNPAPFERLYLWKFSRFARNQEESTFYKGVLRKKCGVEIKSVSEPIADGMFGRLIESIIEWFDEYYSYNLSGEVLRGMTEKALRNGYQVVPSLGYKAVGDGKPFVIDEEKYPIVEYIFQAYVSGLDMTGIARKCNERGWTSKRGTPFERRTVSRILHNKFYAGTVEWNGYSFQGTHEVRSSVTDCFESAQERLNQEYRPANRRDVSSCKHWLSGLLHCSICGASLSFNRAGRVKKRGDTFVCWKYAKGIHKGPASISVRKAEAALMASLHSVIESGTVEFEHIRKQPSEGTDELSILDAALSRVAVKESRIRDAYESGIDTLEEYKDNKLRIANERQELLAEIERLKELAASTPDDVPSEEEVLNRIKDVYSLLSDPDVSYDVKGAAVRSIISDIVVDQAQKEIHFHYYA

SEQ ID NO: 6822 - protein, 484 aa, Unknown
  Description of Unknown: Integrase B6823 sequence
  PTHR30461:SF3,IPR036162,PS51737,IPR011109,PTHR30461, PS00397,PF00239,G3DSA:1.10.10.2600,IPR006119,SSF53041, SM00857,IPR025827,IPR038109,PS51736,cd03768, IPR006118,PF13408,G3DSA:3.40.50.1390,PF07508,Coil
MLSTNVGIYIRVSTQEQANEGYSIDAQRDRLTAYCRSRAWNIYNIYIDGGFSGSNMSRPALSQLLDDIKDKRVNCVLVYKLDRLSRSQKDTLYIIEDVFLKNGIDFVSLNENFDTSSPFGRAMIGILSVFAQLEREQIKERSMMGRIERAKNGLWHGGGHEPFGYNYIDGQLIINDYESAIVKDIFELFNNKIPIYQIQQIISNKYGKDFHESVIRSTLSMVLYTGKISYGGETYDGQHDAIISTDTFKCAQDLLEIRKKKYHNRPFKSKTLLGGLLYCAHCGARYLAKGNYSGRGANRSYRPYYTCYSRAKSNKKYIIDPNCKNPSYAVPVLDDIILNEIRKLFTCHDYFESIVQSSTPQPVPNNDLEIELLSKQIISIQGQISRLLDLYQLDGIGIDDIHDRINSLQEEKVKLQETITKLSTPRLPETEKKLSPNDVLSLKDSFESIILSNDVSAKQNLVHTLIQKIIVNEEDNSFEIIWNF

SEQ ID NO: 6823 - protein, 484 aa, Unknown
  Description of Unknown: Integrase B6824 sequence
  SM00857,IPR006118,G3DSA:1.10.10.2600,IPR036162,PF13408, PS51737,IPR025827,G3DSA:3.40.50.1390,Coil,IPR006119, IPR038109,PF07508,IPR011109,SSF53041,PTHR30461, PS00397,cd00338,PF00239
MAQNLRIGAAYIRVSTDDQAELSPDAQLRVIMDEAKKDGFLIPAEYIFEEKRGISGRKADNRPEFQRMISIAKSQVPAPFERLYLWKFSRFARNQEESTFYKGILRKKCGVEIKSISEPIADGMFGRLIETIIEWFDEYYSYNLSGEVLRGMTEKALRNGYQAVPSLGYKAVGGGKPFVIDEERYPMVEYIFQAYHDGLDMTKIARNCNDRGWKTRRNSPFERRTILRILQNKFYVGIVEWNGYSFTGTHETRPSVTDYFEEAQERIKREYRPANRREISTCKHWLSGLLRCSVCGASLSFTRSENLKKRGDTFMCWKYAKGLHKGSTSISAKKAEAALMDSLKTIIGSRTLKFEHIKKENSETSNELSILDSALSRVAQKESRIRDAYEAGVDTLEEYKENKRRLENERQDLLAEINRLKELAAASQDDAPSTEEVLNRVEDVYALLSDPNVSYEIKGTAVRSILSEIVVDRQNREIHFHYYA

SEQ ID NO: 6824 - protein, 484 aa, Unknown
  Description of Unknown: Integrase B6825 sequence
  PTHR30461:SF3,IPR036162,PS51737,IPR011109,PTHR30461, PS00397,PF00239,G3DSA:1.10.10.2600,IPR006119,SSF53041, cd00338,SM00857,IPR025827,IPR038109,PS51736, IPR006118,PF13408,G3DSA:3.40.50.1390,PF07508,Coil
MKTGALYVRVSTDDQVEYSPDAQIRLGLEYAKKNNIIIPKQFIFQDDGISGRKANNRPAFQELIAMAKSDEHPIDIILVWKFSRFARNQEEAIVYKNLLKKADVEVVSVSEPIPEGFIGELVQRIFEWMDEYYSINLSGEVMRGMTERASRGGYNSDPPLGYAMQNGIPVIVPEQAAIVEKIFSWYVNDKMSFFDIAKRLNALGYKTKRGGKFQNRTVAYIIRNEFYNGKIVWNKLERSTRKFKDKSEWIITDGEHKTFISDELFRAAQERDQATIRPGRKSRPASTYKHWLSGILVCSACGGRLVRCGQSKSGNTYFQCTAYNHASCNESHLTNENALKPAILKALQDVLDSGTVEYVVHSTNQEEKSESELIQNKLNRIGMKEERIKEAYRDGIDTLEEYKANKEILQREREELTAMLEQYSKEPADENESILLNKIRSAYDIIKSDNSTDRQKHDALTSVVEKIVYDKKGGVLLMFFYING

SEQ ID NO: 6825 - protein, 484 aa, Unknown
  Description of Unknown: Integrase B6826 sequence
  PTHR30461:SF3,SM00857,G3DSA:1.10.10.2600,IPR036162,PF13408, IPR025827,PS51737,G3DSA:3.40.50.1390,IPR006119,IPR038109, PF07508,IPR011109,SSF53041,PF00239,PTHR30461, PS51736,Coil,cd00338
MINAVGYTRFSTDRQTENSTKFQMEAISRYAKANDINLLRYYSDEGFSGTNTERPAFQDMCAAADMKLFDAVLIYDITRASRDVVDWMEFRKIMRSLDIQVISVTQHLGDALDPESYLVELINAGIGQHHVLQTRQKSIAGTTAKAKEGVFLGGFAPLGYRIESGKYIIEETEAKYIRMIFDMYAAGKSYNEIIDALGGLKGRRGAVIGKTQLKSILQNERYIGTYTWNKKQYKVMNKWAGGKPNPNIVKIEGIIPPLVDMDTWERVRVRMADKKRNATNKAKREYLLSGLITCDCCGGQFVGHTSTNTRGYQTVYYTCGTKYRNHTCNSKNINAFRLEEFVINQLKNYIRQMDFEQEADAIMEQLSKASPSVSAEKKELKEIIKKINNGVTAILNGLVMPELQDEIDRLRVRKSELEDIISNAEAHTGKIDKNSLIAYMKKAAEELENNPAAAIKELVKIYAHADGSCTVNIGVHLSHCGDRI

SEQ ID NO: 6826 - protein, 484 aa, Unknown
  Description of Unknown: Integrase B6827 sequence
  PTHR30461:SF3,IPR036162,PS51737,IPR011109,PTHR30461, PS00397,PF00239,G3DSA:1.10.10.2600,IPR006119,SSF53041, cd00338,SM00857,IPR025827,IPR038109,PS51736, IPR006118,PF13408,G3DSA:3.40.50.1390,PF07508,Coil
MKTGALYVRVSTDDQVEYSPDAQIRLGLEYAKKNNIIIPKQFIFQDDGISGRKATNRPAFQELIAMAKSDEHPIDVILVWKFSRFARNQEEAIVYKNLLKKADVDVVSVSEPIPDGFIGELVQRIFEWMDEYYSINLSGEVMRGMTERASRGGYNAAPPLGYKMQDGIPIIVPEQAEIVKKIFTWYVDDKMSFFDIAVKLNTLGYRTKRNGKFQNRTVAYIIRNEFYNGKIIWNRLEHATRNVKDKSEWIVTDGGHDTFISNELFTAAQDRDKATKRPGKKVRPASTYKHWLSGLLVCSACGGRIVRAGKSKSGNTYFQCTAYNHASCNESHLTNENALKPAILEALQKVLDSGTVEYVVHSTNQEEKSESELIENKLNRIGMKEERIKEAYRDGIDTLEEYKVNKEILQREREQLTAMLEQYSKKPEDENESILLNKIRSAYDIIKSDNSTDRQKHDALTSVVDKIVYDKKGGALLMYFYIND

SEQ ID NO: 6827 - protein, 484 aa, Unknown
  Description of Unknown: Integrase B6828 sequence
  PTHR30461:SF3,IPR036162,PS51737,IPR011109,PTHR30461, PS00397,PF00239,G3DSA:1.10.10.2600,IPR006119,SSF53041, SM00857,IPR025827,IPR038109,PS51736,cd03768, IPR006118,PF13408,G3DSA:3.40.50.1390,PF07508,Coil
MQKEKVIPIDSLDLVDLYIRVSTTEQALEGYSVAEQEHRLRQYCAAMGHRIHKVHIDAGFSGASLDRPGIKETIKDVQKHLVRRVIVWKLDRLSRSQKDTLIMLEDVFLENGCDFISMMESFDTSTSFGRAIVGILAAFAQLERENIKERTMMGRQARLAKGHYNGSRPPLGYSFIPGSNDLQVDPYQAAIVREIFKLFLSGISINAIARKMEEKYPTVRTWNNTMIRRTLKNPVYIGKVNDNGILRDGIHEPLISEIDFQMANAILVHNSKIKKQSCRSRSLLTGLLYCGDCGARMHPRRIAKGYPLRRYVCYSVSRTSKSMIKSDHCTNRLHPYTQEELEQIIIDEIKKLAADEDYISEVIRNSSAEAPVDDTELFQERIEELNRQTDKLLNLYQIGAIELDQIQERLAALKQERESLTAALKESRTKTDINMDHLKIMSYASAFQVALESGDPEYTNSIIRLLIDKIVVLNEDIEIHWTFC

SEQ ID NO: 6828 - protein, 484 aa, Unknown
  Description of Unknown: Integrase B6829 sequence
  cd00338,SM00857,G3DSA:1.10.10.2600,IPR036162,PS51737, G3DSA:3.40.50.1390,IPR006119,IPR038109,PF07508,IPR011109, SSF53041,PTHR30461,PS51736,Coil,PF00239
MKSSSVALYLRKSREEETETREATLARHERMLLDYCAHNGLTVAETYREVVSGESLDARPEARAMLEAVAEGKFGGVAVIELERLSRGNQIDQVEIMETFKKSGTKIYTLNKVYDLAGENEFDEEFFEFGLFMSRREYKIIKRRLIRGKKQAQKEGYYIGSSLPYGFGKVRGDKGYILTPNEETPIVQLIFQKFVYEDYSLADLRHYLDANGIKPHRAASWGSVVLKKILKNRCYIGYINYNSRSSLTQECYKGKHDAIIDIETFERAQEKLALSSHKMKKGVELKNPLASLVKCSKCGSTMQRHGDYFRCLTPKCPTVLSYFDDVETRLMDEITAELKGFKYYIANYGEEIERQRVTREKEIAILQKEIDKRNAMLNKACEMLEIGVYSREKYLERAQILETEKRAAEGQISALRAISTDESEKAKRAIPILENCLAAYWSLSAQDKNDMLKCIIDRVEYSKTQRNNRWHKSGDLSLKIFLKI

SEQ ID NO: 6829 - protein, 484 aa, Unknown
  Description of Unknown: Integrase B6830 sequence
  cd00338,SM00857,IPR006118,G3DSA:1.10.10.2600, IPR036162,PF13408,PS51737,G3DSA:3.40.50.1390, IPR025827,IPR006119,IPR038109,PF07508, SSF53041,IPR011109,PTHR30461,PS00397,Coil,PF00239
MAQNLRIGAAYIRVSTDDQAELSPDAQLRVILDEAKKDGFIIPPEYIFEEKKGISGRKAVNRPEFQRMIAVAKSQSPAPFERLYLWKFSRFARNQEESTFYKGVLRKKCGVEIKSVSEPIADGMFGRLIESIIEWFDEYYSYNLSGEVLRGMTEKALRNGYQVVPSLGYKAVGDGKPFVIDEEKYPIVEYIFQAYVSGLDMTGIARKCNEQGWTSKRGTPFERRTVSRILHNKFYAGTVEWNGYSFQGTHEVRPSVTDCFESAQERLNQEYRPANRRDVSSCKHWLSGLLHCSICGASLSFNRAGRVKKRGDTFVCWKYAKGIHKGPASISVRKAESALMASLHSVIESGTVEFEHIRKQPSEGTDEISILDAALSRVAVKESRIREAYESGIDTLEEYKDNKLRIANERQELLAEIDRLKGLIASAPDDVPSEEEVLNRIKDVYSLLSDPDVSYDVKGAAVRSIISDIVVDQAQKEIHFHYYA

SEQ ID NO: 6830 - protein, 484 aa, Unknown
  Description of Unknown: Integrase B6831 sequence
  IPR036162,PS51737,IPR011109,PTHR30461,PS00397, PF00239,G3DSA:1.10.10.2600,IPR006119,SSF53041,cd00338, SM00857,IPR025827,IPR038109,PS51736,IPR006118, PF13408,G3DSA:3.40.50.1390,PF07508,Coil
MAQNLRIGAAYIRVSTDDQAELSPDAQLRVILDEAKKDGFIIPPEYIFEEKKGISGRKAGNRPEFQKMIAVAKSQSPAPFERLYLWKFSRFARNQEESTFYKGVLRKKCGVEIKSVSEPIADGMFGRLIESIIEWFDEYYSYNLSGEVLRGMTEKALRNGYQMVPSLGYKAVGDGKPFVIDEEKYPIVEYIFQAYVRGLDMTGIARKCNERGWTSKRGTPFERRTVSRILHNKFYAGTVEWNGYSFQGTHEVRPSVTDCFESAQERLNQEYRPANRRDVSSCKHWLSGLLHCSICGASLSFNRAGRVKKRGDTFVCWKYAKGVHKGPASISANKAEAAVMASLHSVIESGTVEFEHIRKQPSEGTDEISILDAALARVAVKESRIREAYESGIDTLEEYKDNKLRIANERQELLAEIERLKGIAASAPDDVPSEEEVLNRIKDVYGLLSDPDVSYDVKGAAVRSIISDIVVDQTQKEIHFHYYA

SEQ ID NO: 6831 - protein, 484 aa, Unknown
  Description of Unknown: Integrase B6832 sequence
  PTHR30461:SF3,IPR036162,PS51737,IPR011109,PTHR30461, PS00397,PF00239,G3DSA:1.10.10.2600,IPR006119,SSF53041, cd00338,SM00857,IPR025827,IPR038109,PS51736, IPR006118,PF13408,G3DSA:3.40.50.1390,PF07508,Coil
MKTGALYVRVSTDDQVEYSPDAQIRLGLEYAKKNNIIIPKQFIFQDDGISGRKANNRPAFQELIAMAKSDEHPIDVILVWKFSRFARNQEEAIVYKNLLKKADVDVVSVSEPIPDGFIGELVQRIFEWMDEYYSINLSGEVMRGMTERASRGGYNSDPPLGYAMQNGIPVIVPEQAAIVEKIFSWYVNDKMSFFDIAKRLNALGYKTKRGGKFQNRTVAYIIRNEFYNGKIIWNRLEHATRNVKDKSEWIVTDGGHDTFISNELFTAAQDRDKVTKRPGKKVRPASTYKHWLSGLLVCSACGGRLVRAGKSKSGNTYFQCTAYNHASCNESHLTNENALKPAILKALQDVLDSGTVEYVVHSTNQEEKSESELIQNKLNRIGMKEERIKEAYRDGIDTLEEYKANKEILQREREELTAMLEQYSKEPADENESILLNKIRSAYDIIKSDNSTDRQKHDALTSVVEKIVYDKKGGALLMYFYIND

SEQ ID NO: 6832 - protein, 484 aa, Unknown
  Description of Unknown: Integrase B6833 sequence
  PTHR30461:SF3,IPR036162,PS51737,IPR011109,PTHR30461, PS00397,PF00239,G3DSA:1.10.10.2600,IPR006119,SSF53041, cd00338,SM00857,IPR025827,IPR038109,PS51736, IPR006118,PF13408,G3DSA:3.40.50.1390,PF07508,Coil
MKTGALYVRVSTDDQVEYSPDAQIRLGLEYAKKNNIIIPKQFIFQDDGISGRKATNRPAFQELIAMAKSDEHPIDVILVWKFSRFARNQEEAIVYKNLLKKADVDVVSVSEPIPDGFIGELVQRIFEWMDEYYSINLSGEVMRGMTERASRGGYNAAPPLGYKMQNGIPVIVPEQAEIVKKIFTWYVDDKMSFFDIAVKLNTLGYRTKRNGKFQNRTVAYIIRNEFYNGKIIWNRLEHATRNVKDKSEWIVTDGGHDTFISNELFTAAQDRDKATKRPGKKVRPASTYKHWLSGLLVCSACGGRIVRAGKSKSGNTYFQCTAYNHASCNESHLTNENALKPAILEALQKVLDSGTVEYVVHSTNQEEKSESELIENKLSRISMKEERIKEAYRDGIDTLEEYKANKEILQREREQLTAMLEQYSKKPEDENESILLNKIRSAYDIIKSDNSTDRQKHDALTSVVDKIVYDKKGGALLMYFYIND

SEQ ID NO: 6833 - protein, 484 aa, Unknown
  Description of Unknown: Integrase B6834 sequence
  PTHR30461:SF3,IPR036162,PS51737,IPR011109,PTHR30461, PS00397,PF00239,G3DSA:1.10.10.2600,IPR006119,SSF53041, cd00338,SM00857,IPR025827,IPR038109,PS51736, IPR006118,PF13408,G3DSA:3.40.50.1390,PF07508,Coil
MKTGALYVRVSTDDQVEYSPDAQIRLGLEYAKKNNIIIPKQFIFQDDGISGRKATNRPAFQELIAMAKSDEHPIDVILVWKFSRFARNQEEAIVYKNLLKKADVDVVSVSEPIPDGFIGELVQRIFEWMDEYYSINLSGEVMRGMTERASRGGYNSDPPLGYAMQNGIPVIVPEQAAIVEKIFSWYVNDKMSFFDIAKRLNALGYKTKRGGKFQNRTVAYIIRNEFYNGKIVWNKLERSTRKFKDKSEWIITDGEHKTFISDELFRAAQERDQATIRPGRKSRPASTYKHWLSGILVCSACGGRLVRCGQSKSGNTYFQCTAYNHASCNESHLTNENALKPAILKALQDVLDSGTVEYVVHSTNQEEKSESELIQNKLNRIGMKEERIKEAYRDGIDTLEEYKANKEILQREREELTAMLEQYSKEPADENESILLNKIRSAYDIIKSDNSTDRQKHDALTSVVEKIVYDKKGGVLLMFFYING

SEQ ID NO: 6834 - protein, 484 aa, Unknown
  Description of Unknown: Integrase B6835 sequence
  PTHR30461:SF3,IPR036162,PS51737,IPR011109,PTHR30461, PS00397,PF00239,G3DSA:1.10.10.2600,IPR006119,SSF53041, cd00338,SM00857,IPR025827,IPR038109,PS51736, IPR006118,PF13408,G3DSA:3.40.50.1390,PF07508,Coil
MKTGALYVRVSTDDQVEYSPDAQIRLGLEYAKKNNIIIPKQFIFQDDGISGRKATNRPAFQELIAMAKSDEHPIDVILVWKFSRFARNQEEAIVYKNLLKKADVDVVSVSEPIPDGFIGELVQRIFEWMDEYYSINLSGEVMRGMTERASRGGYNAAPPLGYKMQDGIPVIVPEQAEIVKKIFTWYVDDKMSFFDIAVKLNTLGYRTKRNGKFQNRTVAYIIRNEFYNGKIIWNKLEHSTRNVKDKSEWIIADGEHDTFISDELFRAAQERDQATIRPGRKSRPASTYKHWLSGILVCSACGGRLVRCGQSKSGNTYFQCTAYNHASCNESHLTNENALKPAILKALQDVLDSGTVEYVVHSTNQEEKSESELIQSKLNRIGMKEERIKEAYRDGIDTLEEYKANKEILQREREQLTAMLEQYSKKPEDENESILLNKIRSAYDIIKSDNSTDRQKHDALTSVVDKIVYDKKGGALLMFFYIND

SEQ ID NO: 6835 - protein, 484 aa, Unknown
  Description of Unknown: Integrase B6836 sequence
  cd00338,SM00857,IPR006118,G3DSA:1.10.10.2600,IPR036162, PF13408,IPR025827,G3DSA:3.40.50.1390,PS51737,IPR006119, IPR038109,PF07508,SSF53041,IPR011109,PTHR30461, PS00397,Coil,PF00239
MAQNLRIGAAYIRVSTDDQAELSPDAQLRVIMDEAKKDGFLIPSEYIFEEKRGISGRKADNRPEFQRMISIAKSQVPAPFERLYLWKFSRFARNQEESTFYKGILRKKCGVEIKSISEPIADGMFGRLIETIIEWFDEYYSYNLSGEVLRGMTEKALRNGYQAVPSLGYKAVGGGKPFVIDEERYPTVEYIFQAYHNGLDMTKIARNCNDRGWKTRRNSPFERRTILRILQNKFYVGIVEWNGYSFTGTHETRPSVTDYFEEAQERIKREYHPANRREISTCKHWLSGLLRCSVCGASLSFTRSENLKKRGDTFMCWKYAKGLHKGSTSISAKKAEAALMDSLKTIIGSRTLKFEHIKKENSETSNELSILDSALSRVAQKESRIRDAYEAGVDTLEEYKENKRRLENERQDLIAEINRLKELTAASQDDAPSAEEVLNRVEDVYALLSDPNVSYEIKGTAVRSILSEIVVDRQNREIHFHYYA

SEQ ID NO: 6836 - protein, 483 aa, Unknown
  Description of Unknown: Integrase B6837 sequence
  IPR036162,PS51737,IPR011109,PTHR30461,PS00397, PF00239,G3DSA:1.10.10.2600,IPR006119,SSF53041,cd00338, SM00857,IPR025827,IPR038109,PS51736,IPR006118, PF13408,G3DSA:3.40.50.1390,PF07508,Coil
MNKTLKSVCAYIRVSTDDQVELSPDSQRQKIKEYCQKNGYILSDVFEDLGISGKSADKRPGFRQMIAMCKAKEHPFDAIIVWKFSRFARNQEESIVYKSMLRKIGVEVISISEPISEGIGGKLTEAILEIMDEYYSINLSQEVMRGMTEGARRGKIMSVAPFGYTAKNHQYYPDENANTVRAIFDMFVNQGYGLMSIAYRLNQQGVKTRRGSTWENRSIKYIIQNPVYIGKIRWNYATHNGKPGTVSINDEADWIIVDGTHEPIIDDDTFKKAQEKIAQFKKQTTRRVAQKHWLSGVLVCCKCGAGMAYHREDEKKHTAPYFVCPNRTRGRCPGQSTKAEWIERDFFNGLVESIESDNYHRTERESVVIDVSFEIKRQLSENDKKLERVKEAYRNGIDTLDEYKANKQLIENERLLLLSRLDKCSSKPRELTKDELLLRARSTIAILQSDECDVQQKADALRAMVDKVVYSKESGIMDFYFLN

SEQ ID NO: 6837 - protein, 483 aa, Unknown
  Description of Unknown: Integrase B6838 sequence
  cd03768,PTHR30461:SF3,SM00857,G3DSA:1.10.10.2600,IPR036162, PS51737,G3DSA:3.40.50.1390,IPR006119,IPR038109,PF07508, IPR011109,SSF53041,PTHR30461,PS51736,Coil, PF00239
MRIDAIYARQSIEKRDSISIESQIEMCKRAADPDVAIYRDSGYSGKNTQRPAFTQLMADVRAGKIKRVFCYRLDRISRSVLDFSLLWQTFDANHVDFVSVTESFDTNSPMGRAMIMIIITFAQLERETIVSRYTTNRYARSNAGIWAGGRAPYGFEIQKVDWNGKRQSVLKPIPEKLQIVQDLFTKYTSGTASLYSLSKELNLNSTERWDAITVRRILKNPVYACADVDIYSFYYNNAEIINDVHDFDGSHAAYLTVKGGKSSAGHRTLSLAYHQGVVPSSVFIAAQNMLSQNKQLKNGHRSSFTWLSGLLKCHKCGGRINVFQNKGLTYFQCYKRFHQAGSCDAKIHGNSLRYESYVEDAIQNRIDTIVKNNSTEDVPNQQLNDMKIQLLENERQINNLVEALKIGGAVAMRSIQNELQALEAEHERITNEITAMQPVHQVPNGLAVIDFAKLDYDSKRDVARMMIDKILVGDDSPIQIIWK

SEQ ID NO: 6838 - protein, 483 aa, Unknown
  Description of Unknown: Integrase B6839 sequence
  IPR036162,PS51737,IPR011109,PTHR30461,PS00397, PF00239,G3DSA:1.10.10.2600,IPR006119,SSF53041,cd00338, SM00857,IPR025827,IPR038109,PS51736,IPR006118, PF13408,G3DSA:3.40.50.1390,PF07508,Coil
MSHTFKSVCAYIRVSTDDQVELSPDSQRQKIKEYCQKNGYILSDVFDDLGISGKSADKRPGFRQMIAMCKAKEHPFDAIIVWKFSRFARNQEESIVYKSMLRKIGVEVISISEPISEGIGGKLTEAILEIMDEYYSINLSQEVMRGMTEGARRGKIMSVAPFGYSAKNHQYYPDDNANTVRAIFDMFVNQGYGLMSIAYNLNRQGIKTRRGSKWENRTIKYILQNPVYIGKIRWNYATHNGKPGTVSINDEADWIIVDGTHEPIIDDETFKKAQEKIAQFRRQTTRRVAQKHWLSGVLVCSKCGAGMAYHRENKKTHTAPYFLCQNRTRGKCSGQSTKAEWIERDFFNGFTESIEGENFHMTTRENVVIDASSEIKRQLSENDKKLERVKEAYRNGIDTLDEYKANKKLIESERLLLLSRLDKCSDKPHQMTKEELLIKAHSTIAILKSDDFDVQQKADSLRDIVDKVIYSKESNTMDFYFFN

SEQ ID NO: 6839 - protein, 483 aa, Unknown
  Description of Unknown: Integrase B6840 sequence
  PTHR30461:SF3,SM00857,G3DSA:1.10.10.2600,IPR036162,PF13408, PS51737,G3DSA:3.40.50.1390,IPR025827,IPR006119,IPR038109, PF07508,SSF53041,IPR011109,PTHR30461,Coil, PS51736,cd00338,PF00239
MNAVIYARYSCDRQTEQSIEGQLRECKAFAASEGINIIGEYIDRAISGTTANRPEFQRMIADSRYKTFQAVIVYKLDCFARNRYDSAMYKSKLKANGVRVLSAKEHITDSPEGIILEGLLEAMNEYYSAELSQKIKRGMRENAIKGKTTGGNVALGYRIGADKQMEIEPAGASLVRRIFTSYDNGRTFTEICDDLNHAGYTTSRGKQFRIDTISRILANQRYTGTFQCAGEDAHCPPIIEPELFRSVQERLTESRHKHRHTQSPHEYVLTGKAICGTCGRRLTGRAGTSKTDKRYYYYCCPNKCCGWLPAAELERAVLDAIAQYTTPEACEQIANATYALYQRSTHENADLTAAQRRLQETEKKLENAVNAVLNGITSAALQATMQQLEQQKAALETEVRLLQTDAPELKLEHFQYFAHRLLEVQAEGTEKILQLLVNQVIVYKDRITVLVNLTDKTKTPPLEQVTAALRESSCSVACGGGDA

SEQ ID NO: 6840 - protein, 483 aa, Unknown
  Description of Unknown: Integrase B6841 sequence
  PTHR30461:SF3,IPR036162,PS51737,IPR011109,PTHR30461, PS00397,PF00239,G3DSA:1.10.10.2600,IPR006119,SSF53041, SM00857,IPR025827,IPR038109,PS51736,cd03768, IPR006118,PF13408,G3DSA:3.40.50.1390,PF07508,Coil
MKQKIAAPPADPVVDLVDLYIRVSTTEQALEGYSVAEQESRLRRYSEAMGFRIHKVHIDAGFSGASLDRPAIKEVIRDIQSHLVSKVIVWKLDRLSRSQKDMLVMLEDVFLANDCDFISMMESFDTSTAFGRAIVGILAAFAQLERENIKERTTMGRRARLAKGHYNGSRPPLGYRFLEGSNDLKVEPYEANMVHEIFSSFLAGQSINAIAATMQRKYPTTRTWNNTMIRRTLKNPVYMGKVKDVDVIRDGIHEPLISESEFVMANAVLSHNREIKKQSCRSNSLLTGLLYCGDCGARMQPRQIARGYPLRRYVCYSVSRTNKSMIRSDHCTNRLHPYTLEELDDIIIGEIKKLAADEDYLRAIIREDAGPILDESELLKDRLSEIDKQTDKLLNLFQIGVVDLSQIEQRLADLKQEREALKERLERTAPVVQMDIQKIQSYADAFQEALDSGDAECQSSIIRLLIDKIVVLNEDIEIHWTFC

SEQ ID NO: 6841 - protein, 483 aa, Unknown
  Description of Unknown: Integrase B6842 sequence
  IPR036162,PS51737,IPR011109,PTHR30461,PS00397, PF00239,G3DSA:1.10.10.2600,IPR006119,SSF53041,cd00338, SM00857,IPR025827,IPR038109,PS51736,IPR006118, PF13408,G3DSA:3.40.50.1390,PF07508,Coil
MKTGALYIRVSTDDQTEYSPDAQIRLGLDYAKKNGIVIPKKFIYQDDGISGRKAKNRPAFQELIATAKSEEHPFDVILVWKFSRFARNQEEAIVYKNLLKKAGVDVVSVSEPIPDGFIGELVQRIFEWMDEYYSINLSGEVMRGMTERASRGGYNSDPPIGYKMQDGVPVINPDTAPIVEKIFDWYVNKQMSFWEIANALNLLGYKTKRGGKFQNRTVAYIIRNEFYNGKIIWNKMDHATRRIKDKSEWVITEGTHETFISEELFNAAQERDKSTYHAKGKRPTSTYKHWLSGILVCSACGQRLVRCSTSKKGNTYFQCTGYNHAACTVSHATNEFALKPAIFEALDKVIATGEVTYEIHSSNNDDNNEKKLIEDKLSRLVMKEERIKEAYRDGIDTLEEYKANKEILANERTNLNAMLEQCSAATPDDIQNKLIEKIRSAKEIIECETSTDVQKHDALASVVEKIVYNKKEDSISMFFYIND

SEQ ID NO: 6842 - protein, 483 aa, Unknown
  Description of Unknown: Integrase B6843 sequence
  PTHR30461:SF3,SM00857,IPR006118,IPR036162,PF13408, PS51737,G3DSA:3.40.50.1390,Coil,IPR025827,IPR006119, IPR011109,SSF53041,PTHR30461,PS00397,PS51736, cd00338,PF00239
METLSGYIDGKETINMRIERVAAYIRVSTQEQKLHGISLEAQIEKLTEYAEAHNMKIVKWYKDEGISGRKLIKKRPALQEMIQDAEKGQFERIIFIKLDRFFRSVAEYHECMKRLATGGVIWTATEEKYDLSTPSGEAFVNMKLTMAQFEADQAGERIRMVNEYKIKSGQPLFGAQCLPFCYTVSQPEDGERHKYIAKHDEDIMRDAIAHVMQNHSVRAALIYINNKYNRVFGYNVLIKALKNEMICGEYKGNPNYCEPYITREEFNLLQTYIKRNPRTSPDEHSYLFTGLVRCPDCGCRLNGAVVYNGQQKKSGKKKYKYFGYRCQKHNASKLCSFNKIVFENRLETEMLSAVERILKQKMLNVIEIRNGIERVSKHDTAALQQELDRLNYSWQKGRIKSVEEYDRRYDELIAKIEEAHEEQAELSSEPNYEKIQRILSEDWKEIYSKLDAEHKRSFWRSFIEGIQVEWTNDTKRVIDITFL

SEQ ID NO: 6843 - protein, 483 aa, Unknown
  Description of Unknown: Integrase B6844 sequence
  IPR036162,PS51737,IPR011109,PTHR30461,PS00397, PF00239,G3DSA:1.10.10.2600,IPR006119,SSF53041,cd00338, SM00857,IPR025827,IPR038109,PS51736,IPR006118, PF13408,G3DSA:3.40.50.1390,PF07508,Coil
MDEMRYGALYIRVSTDKQEELSPDAQKRLLLDYAKAHNIFISPEYIFVENGISGRKADKRPEFQKMISIAKADEPPFSLILVWKFSRFARNQEESIVYKSMLKKQHGIDVVSITEPLIDGPFGGLIERIIEWMDEYYSINLSQEVKRGMTEKAMRGGYQATPSLGYASPAPGQPFVVVPSEAEIVKYVFDQYANHHKDPTSIARKLNEKKLLTKRGNRFEKRNINIILRNRFYIGKVVWNGIERDGVHETFINKELFQAANDRLDATYRPKNRRELGGCVHWLSGLVKCSICGASLAYNRSSKYPYFCCWKYAKGMHEGANTINEHQLEDGVFEYFEQLLDGADFSFSYRAPKSMSDLPDEKAVFEKELEKIDQRKIRIREAYEAGIDSLEEYRENRRRLEEEAARITDLIRESEVKKVDSDPGRHKAEMLEKIRTVYDIIKSDSIDYETKGNFMRSIVEKIVWDRKSNTLTFYLYCSDSREG

SEQ ID NO: 6844 - protein, 483 aa, Unknown
  Description of Unknown: Integrase B6845 sequence
  PTHR30461:SF3,cd00338,SM00857,G3DSA:1.10.10.2600,IPR036162, PF13408,IPR025827,G3DSA:3.40.50.1390,PS51737,IPR006119, IPR038109,PF07508,IPR011109,SSF53041,PTHR30461, PS51736,Coil,PF00239
MRMAAYCRVSTEKEEQLSSLENQREFFEQYADKEGDTLVKIYADEGISGKSMNKREAFAQLLEDSKTGAFDYVAVKDISRFARNTSDFLYGIRTLRSNGVDVRFLSNNQTVIGESEFVLTVFAALAQEESSNLSKRVIFGKRQNAKKGRVPNVVYGYNKIDTYTLEINEQESYIVQLMFKWYIEGEGTRRIAIKLNEMAIPTKKQAKWIPKTIRRILQNPIYIGKIINNKSVTKDFLSGTREAIPPEEWYIHERPELRIISDDDFELVQHKIKERQEQYKNNNPGNRFSNRHLFSNLIKCGECGKSFTAKVYQWKNRYVRYRCCVHNNNGNAHCTNSVTVDEQELLNEVKAYLLTAIEDKKAFADKLMKQYQAQTTNVDVSKLTDTRQSLEKRRSKFKEMFAADIITMDELKKEMSAIDEGMRSVDAELKIYDEIQKKATHIDDIHKDIEQILMQNEYTNDDMRRIIEKIVVYPDKSVEIFMK

SEQ ID NO: 6845 - protein, 483 aa, Unknown
  Description of Unknown: Integrase B6846 sequence
  PTHR30461:SF3,IPR036162,PS51737,IPR011109,PTHR30461, PS00397,PF00239,G3DSA:1.10.10.2600,IPR006119,SSF53041, cd00338,SM00857,IPR025827,IPR038109,PS51736, IPR006118,PF13408,G3DSA:3.40.50.1390,PF07508,Coil
MTFGAAYIRVSTDHQDEYSPDAQRRCILDYAKKNDIVINKEHIFADIGISGTKADKREAFQKMIALAKSKEHPIDTILVWKFSRFARNQEESILYKSLLSRSNVSVISVSEPINEGPFGKLIERILEWMDEYYSIRLSGEVKRGMMQKALSGGYNSKIPYGYKMDENKIPVIVPEQAKVVQMIFDQYVNQHESISNITLMLNETGYRTARGNKFERRVIHYILQNPFYIGQIRWNYAPRARGKKKDGDIIIRDGKHKPLISVEMFEQAQELIKTAYETYHGTVRRVPSAAAKHWLSGVLKCSTCGSSLSFCKGQIPHFKCWKYNKGTCSTSNYLNAKKAEQYVLEGLKNLLLADKIDYEKIPANTLEANTKLLQDELRDLDKKMERIKMAYIDGIDSLDEYKSNKKIIDRKRREIEKQLVPKKAMKDKQQLKHTILDSIKIVIDTLESDCEPAKKSEAIRSICHKIEYNKENDTLYFDLYMVE

SEQ ID NO: 6846 - protein, 483 aa, Unknown
  Description of Unknown: Integrase B6847 sequence
  PTHR30461:SF3,IPR036162,PS51737,IPR011109,PTHR30461, PS00397,PF00239,G3DSA:1.10.10.2600,IPR006119,SSF53041, cd00338,SM00857,IPR025827,IPR038109,PS51736, IPR006118,PF13408,G3DSA:3.40.50.1390,PF07508,Coil
MEQKKIGAAYIRVSTDDQLDYSPESQIKLIQDYAKKNNIVVPEEFIFRDDGISGRSAKKRPGFLRMIAAAKEKPRPFEVILVWKFSRFARNQEESVVYKSLLKKENGIDVVSISEPLIEGPFGGLIERIIEWFDAFYSVNLGTEVRRGMTERVRQGGAVSTAPIGYTYKDRKLVVEPQEAEVVRMIYRDFLSGSAVMAITKKLNSLGIKTKRGGAWENRTVRYVLTNPVYIGRVRWSPEGTNDYHKTDGWNDKTMLVAGAHEAILSEADFYAAQEAVETYVRRYKGNADRAQRESAGMMLQGLVKCSTCGGTLSRTGNGGMNCVRYTHGKCTESHYITVGKLEEIVLTGIELQLNNLQAEIIRREMPGAEDQAAVLRQQLKREETILQKCKAAYLAGADTLEEYKENKAACKERIKRIQELLAEQEKEKPVDVQAFAERTRPVLSQLRDAAVPPEKKNQLLRSFVDRIIFDNKTKTVTIVYYE

SEQ ID NO: 6847 - protein, 483 aa, Unknown
  Description of Unknown: Integrase B6848 sequence
  SM00857,IPR006118,G3DSA:1.10.10.2600,IPR036162,PF13408, IPR025827,PS51737,G3DSA:3.40.50.1390,PS00397,IPR006119, IPR038109,PF07508,SSF53041,IPR011109,PTHR30461, Coil,cd00338,PF00239
MTNLDIGAAYIRVSTDEQTELSPDAQLRVILEQAKKDGVTIPPEFIFIEKKGISGRRAENRPEFQRMIAIAKNQNESPFKRLYLWKFSRFARNQEESTFYKGILRKKCHVEIISVSEPIMEGMFGRLIETIIEWFDEYYSINLSGEVLRGMKEKALRNGYQLRPCLGYAAVGDGKPYQINESEYAVVEQIFHFYHSGLDMTGTARKLNALGYRTKSGNLFDRRAVYRILTNRFYIGEVSWNGIAFQGEHPIRESVSSIFDSVQERLQAEYRPRGRRESSANAHWLSGLLRCHICKATLGFNRTNNSKRRPDFFQCWKYGKGIHPESCSIAARRAEAAVLESLKQVISSGQVDYEYIRPQEPGVKTEETLIQESLDRLRMKEQRVREAYESGIDTLAEYRSNKLRLQAERRELTESMERLKKQAESPLQRPDQKEVVNRIKNVYDLLIDENTDYSTKANALRSVVKYIEYDRKNDRMDVHYYIS

SEQ ID NO: 6848 - protein, 483 aa, Unknown
  Description of Unknown: Integrase B6849 sequence
  PTHR30461:SF3,SM00857,G3DSA:1.10.10.2600,IPR036162,PF13408, PS51737,IPR025827,G3DSA:3.40.50.1390,IPR006119,IPR038109, PF07508,IPR011109,SSF53041,PF00239,PTHR30461, PS51736,Coil,cd00338
MRMAAYCRVSTEKEEQLSSLENQREFFEQYADKEDDTLVKIYADEGISGKSMNKREAFTQLLEDSKTGAFDYVAVKDISRFARNTSDFLYGIRTLRSNGVDVRFLSNNQTVIGESEFVLTVFAALAQEESSNLSKRVIFGKRQNAKKGRVPNVVYGYNKIDTYTLEINEQESYIVQLMFKWYIEGEGTRRIAIKLNEMAIPTKKQAKWVPKTIRRILQNPIYIGKIINNKSVTKDFLSGTREAIPPEEWYIHERPELRIISDDDFELVQQKIKERQEQYKNDNPGNRFSNRHLFSNLIKCGECGKSFTAKVYQWKNRYVRYRCCVHNNNGNAHCTNSVTVDEQELLNEVKAYLLTAIEDKKAFADKLMKQYQAQTTNVDVSKLTDTRQSLEKRRSKFKEMFAADIITMDELKKEMSAIDEGMRSIDEELKAYDEIQKKATHIDDIHKDIEQILMQNEYTNDDMRRIIEKIVVYPDKSVEIFMK

SEQ ID NO: 6849 - protein, 483 aa, Unknown
  Description of Unknown: Integrase B6850 sequence
  PTHR30461:SF3,SM00857,G3DSA:1.10.10.2600,IPR036162,PF13408, IPR025827,G3DSA:3.40.50.1390,PS51737,IPR006119,IPR038109, PF07508,IPR011109,SSF53041,PF00239,PTHR30461, PS51736,Coil,cd00338
MRMAAYCRVSTEKEEQLSSLENQREFFEQYADKEGDTLVKIYADEGISGKSMNKREAFTQLLEDSQTGAFDYVAVKDISRFARNTSDFLYGIRTLRSNGVDVRFLSNNQTVIGESEFVLTVFAALAQEESSNLSKRVIFGKRQNAKKGRVPNVVYGYNKIDTYTLEINEQESYIVQLMFKWYIEGEGTRRIAIKLNEMAIPTKKQAKWVPKTIRRILQNPIYIGKIINNKSVTKDFLSGTRESIPPEEWYIHERPELRIISDDDFELVHHKIKERQEQYKNDNPGNRFSNRHLFSNLIKCGECGKSFTAKVYQWKNRYVRYRCCVHNNNGNAHCTNSVTVDEQELLNEVKAYLLTAIEDKKAFADKLMKQYQAQTTNVDVSKLTDTRQSLEKRRSKFKEMFAADIITMDELKQEMSAIDEGMRSIDEELKAYDEIQKKATHIDDIHKDIEQILMQNEYTNDDMRRIIEKIVVYPDKSVEIFMK

SEQ ID NO: 6850 - protein, 483 aa, Unknown
  Description of Unknown: Integrase B6851 sequence
  PTHR30461:SF3,IPR036162,PS51737,IPR011109,PTHR30461, PS00397,PF00239,G3DSA:1.10.10.2600,IPR006119,SSF53041, cd00338,SM00857,IPR025827,IPR038109,PS51736, IPR006118,PF13408,G3DSA:3.40.50.1390,PF07508,Coil
MQAQTQRVAAAYIRVSTDDQTDLSPESQFEKIREYAAKNNLILLSEYIFRDDGISGRAAEKRPGFQRMIAAAKDAAHPFDVVIVWKYSRFARNQEESIFYKSVLRSKCNVDVVSVSEPLVAGPFGSLIERIIEWMDEFYSIRLSEEVKRSMTVNAQKGRLQATPSFGYCVKDHMLEIVPEEAEIVQEIFRRFVAGDAMYGIAMDVNARGVRTHRGNPFENRTVDYILNNPTYIGKLRWTPTGKTRRNFKNQDSVIADGAHTPIIDMQMWEAAQERIAELKRTYKRYSKPAGDRKHWLCGIVRCPGCGGTLVYTAPHYMQCNNRLKGRCASSQHIAVELLEEAFLQQLQHDFTFAEAMAYTANYTHNDHVAAALAQKRSKITSRMARLREAYLDGIESLPEYKASLQKFQEQLSEIDEEIKKAAETPEGVSTESMREAIASVLRTLRAPDATVAQKYAAAQAIIDKCYFDKSKMLLTISYNFSV

SEQ ID NO: 6851 - protein, 483 aa, Unknown
  Description of Unknown: Integrase B6852 sequence
  PTHR30461:SF3,IPR036162,PS51737,IPR011109,PTHR30461, PS00397,PF00239,G3DSA:1.10.10.2600,IPR006119,SSF53041, cd00338,SM00857,IPR025827,IPR038109,PS51736, IPR006118,PF13408,G3DSA:3.40.50.1390,PF07508,Coil
MTFGAAYIRVSTDHQDEYSPDAQRRCILDYAKKNGIVINKEHIFADIGISGTKADKREAFQKMIALAKSKEHPIDTILVWKFSRFARNQEESILYKSLLSRSNVSVISVSEPINEGPFGKLIERILEWMDEYYSIRLSGEVKRGMMQKALAGGYNSKIPYGYAMNENKIPTIVPEQAKVVQIIFDQYVNQHESISNIALMLNKTGYRTARGNKFERRVIHYILQNPFYIGQIRWNYAPRARGKKKDGDIIIRDGKHEPLISVEMFEKAQELIKIAYETYHGTVRRVPSAAAKHWLSGVLKCPTCGSSLSFCRGQIPHFKCWKYNKGTCSTSNYLNAKKAEQYVLEGLKNLLLADKIDYEKIPANTLETNTKLLQDELRDLDKKMERIKMAYIDGIDSLDEYKSSKKIIDRKRREIEKQLVPKKAMKDKQQPKHTILDSIKIVIDTLESDCEPAKKSEAIRSICHKIEYNKENDTLYFDLYMVE

SEQ ID NO: 6852 - protein, 483 aa, Unknown
  Description of Unknown: Integrase B6853 sequence
  PTHR30461:SF3,IPR036162,PS51737,IPR011109,PTHR30461, PS00397,PF00239,G3DSA:1.10.10.2600,IPR006119,SSF53041, cd00338,SM00857,IPR025827,IPR038109,PS51736, IPR006118,PF13408,G3DSA:3.40.50.1390,PF07508,Coil
MTFGAAYIRVSTEHQDEYSPDAQRRCILDYAKKNGIVINKEHIFADIGISGTKADKREAFQKMIALAKSKEHPIDTILVWKFSRFARNQEESILYKSLLSRSNVSVVSVSEPIHEGPFGQLIERILEWMDEYYSIRLSGEVKRGMMQKALSGGYNSKIPYGYKMDENKIPVIVPEQAKVVQMIFDQYVNQHESISNIALMLNKTGYRTARGNKFERRVIHYILQNPFYIGQIRWNYAPRARGKKKDGDIIIREGKHEPLISVEMFEKAQELIKIAFETYHGTVRRVPSAAAKHWLSGVLKCSTCGSSLSFCKGQIPHFKCWKYNKGTCSTSNYLNAKKAEQYVLAGLKNLLLADKIDYEKIPANTLETNTKLLQDELRDLDKKMERIKMAYIDGIDSLDEYKSNKKIIDRKRREIEKQLVPKKAMKDKQQPKHTILDSIKIVIDTLESDCEPAKKSEAIRSICHKIEYNKENDTLYFDLYMVE

SEQ ID NO: 6853 - protein, 483 aa, Unknown
  Description of Unknown: Integrase B6854 sequence
  PTHR30461:SF3,cd00338,SM00857,IPR006118,G3DSA:1.10.10.2600, IPR036162,PF13408,IPR025827,G3DSA:3.40.50.1390,IPR006119, IPR038109,PF07508,IPR011109,SSF53041,PTHR30461, PS00397,Coil,PF00239
MTTQSTVEIGAAYIRVSTNDQTELSPDAQLRVILESAKADGYVIPKEFVYIEKKGVSGRRADNRQEFQRMVATAKTQPCPFKRLYLWKFSRFARNQDESVFYKSVLRKKCGVEIKSVSEPIADGMFGRLIESIIEWFDEYYSFNLSGEVMRGMTEKALREGYQCSPSLGYAAVGEGKPFIIIEKEYVIVEFIHQSFHKGKDMTAIAREANDMGFRTKRGNRFDRRGIYRILVNEFYNGIVVWNGIKFQGAHETRPSITDIFESNQQRIKEEYRPKSRRETSSCQHWLSGILKCSVCGASLSYNRSNDQKKRPDFFQCWKYGKGVHRESCSVSVKKAEEAVLTSLRQVMADQSVQYEYIRKPDQKVISEESRLSEALEKVAMKEMRVKDAYESGIDSLEEYKANKLRLQDERTHILDELEQLKETPDEPEGPDMQEILKRITTVYDLLMDPDIDNVTKGNAVRRIIKKIVFDRQMNEFHFYYYA

SEQ ID NO: 6854 - protein, 483 aa, Unknown
  Description of Unknown: Integrase B6855 sequence
  PTHR30461:SF3,IPR036162,PS51737,IPR011109,PTHR30461, PS00397,PF00239,G3DSA:1.10.10.2600,IPR006119,SSF53041, cd00338,SM00857,IPR025827,IPR038109,PS51736, IPR006118,PF13408,G3DSA:3.40.50.1390,PF07508,Coil
MRIAAAYIRVSTDDQLEYSPDSQLAQIHRYAKTNDFVLPQEYIFIEEEGRSGRNSTKRPEFLRMISTAKKKPKPFDAILVWKYSRFARNRQDSIVYKSMLRKELGIEVISVSEYLGDDKMSIITEAIIEAMDEFYSVNLAEEVTRGMTEKAHRGQPLTYAPFGYRIENKKYFPDPDTAPLVKMIYADFLSGMGYREIARKLNNMNVRTRFGNPMENRNIEYILRNPVYIGKIHWNPIGKVRRAPLPDTAILTDGEHEALIQPEDWDAVQQRIEQIKALYHRKAKTVVKPGREFALRGLVRCSNCGSTLVNNNSGHLQCYSYAHGRCQISHSIKRDYLTQWVFSTIQADMENGTFLLNIRQPVQTVDPANLLHGQIEREQMKLVRVREAYEAGIDTLEEYRHNKEKLTATIQQLQEELKSILPRTDSDPLKDGRLRLTDKVRALLPELTSQNTPEDEKNRLMRSFIEKIVFDRKENSIEIFYYL

SEQ ID NO: 6855 - protein, 483 aa, Unknown
  Description of Unknown: Integrase B6856 sequence
  PTHR30461:SF3,SM00857,IPR006118,G3DSA:1.10.10.2600,IPR036162, PF13408,IPR025827,G3DSA:3.40.50.1390,IPR006119,IPR038109, PF07508,IPR011109,SSF53041,PF00239,PTHR30461, PS00397,Coil,cd00338
MTTQSTVEIGAAYIRVSTNDQTELSPDAQLRVILESAKADGYVIPKEFVYIEKKGVSGRRADNRQEFQRMVATAKTQPCPFKRLYLWKFSRFARNQDESVFYKSVLRKKCGVEIKSVSEPIADGMFGRLIESIIEWFDEYYSFNLSGEVMRGMTEKALREGYQCSPSLGYAAVGEGKPFIIVEKEYAIVEFIHQSFHKGKDMTAIAREANDMGFRTKRGNRFDRRGIYRILVNEFYNGIVVWNGIKFQGAHETRSSVTDIFESNQQRIKKEYRPRSRRETSSCQHWLSGILKCSVCGASLSYNRSNDQKKRPDFFQCWKYGKGVHRESCSVSVKKAEEAVLTSLRQVMADQSVQYEYIRKPDQKVISEESRLSEALEKVAMKEMRVKDAYESGIDSLEEYKANKLRLQDERNHILEELEQLKETPGEPEGPDMQEVLKRITTVYDLLMDPDIDNVTKGNAVRRIIKKIVFDRQMNEFHFYYYA

SEQ ID NO: 6856 - protein, 483 aa, Unknown
  Description of Unknown: Integrase B6857 sequence
  IPR036162,PS51737,IPR011109,PTHR30461,PS00397, PF00239,G3DSA:1.10.10.2600,IPR006119,SSF53041,cd00338, SM00857,IPR025827,IPR038109,PS51736,IPR006118, PF13408,G3DSA:3.40.50.1390,PF07508,Coil
MDEMRYGALYIRVSTDKQEELSPDAQKRLLLDYAKAHNIFISPEYIFVENGISGRKADKRPEFQKMISIAKADEPPFSLILVWKFSRFARNQEESIVYKSMLKKQHGIDVVSITEPLIDGPFGGLIERIIEWMDEYYSINLSQEVKRGMTEKAMRGGYQATPSLGYASPAPGQPFVVVPEEAEIVKYIFDQYVNHNKSMGAIARKLNEKKLLTKRGNRFERRNVNIILRNRFYVGKVVWSGIERDGVHETFISQELFKGANDRLDATYRPKNRRELSGCVHWLSGLVRCSICGASLAYSRSQKYPYFNCWRYAKGMHDGSNTINERQLENGVLEYFEQLLGGADFSFSYRVPENISDLPGEKSVYEKELEKIDQRQHRIREAYEAGIDSLDEYRENKRRLEAEAARIADLIRESEAKKVDSDPEQHKAEMLEKIRTVYDIIKSDSIDYETKGNFMRSIVEKIVWDRKSNTLTFYLYCSDSREG

SEQ ID NO: 6857 - protein, 483 aa, Unknown
  Description of Unknown: Integrase B6858 sequence
  PTHR30461:SF3,IPR036162,PS51737,IPR011109,PTHR30461, PS00397,PF00239,G3DSA:1.10.10.2600,IPR006119,SSF53041, cd00338,SM00857,IPR025827,IPR038109,PS51736, IPR006118,PF13408,G3DSA:3.40.50.1390,PF07508,Coil
MIFGAAYIRVSTEHQDEYSPDAQRRCILDYAKKNGIVINKEHIFADIGISGTKADKREAFQKMIALAKSKEHPIDTIVVWKFSRFARNQEESILYKSLLSRSNVSVISVSEPINEGPFGKLIERILEWMDEYYSIRLSGEVKRGMMQKALAGGYNSKIPYGYAMNENKIPTIVPEQAKVVQIIFDQYVNQHESISNIALMLNKTGYRTARGNKFERRVIHYILQNPFYIGQIRWNYAPRARGKKKDGDIIIRDGKHEPLISVEMFEQAQELIKTAYETYHGTVRRVPSAAAKHWLSGVLKCSTCGSSLSFCKGQIPHFKCWKYNKGTCSTSNYLNAKKAEQYVLEGLKNLLLADKIDYEKIPANTLETNTKLLQDELRDLDKKMERIKIAYIDGIDSLDEYKSNKKIIDRKRREIEKQLVPKKAMKDKQQPKHTILDNIKIVIDTLESDCEPAKKSEAIRSICHKIEYNKENDTLYFDLYMVE

SEQ ID NO: 6858 - protein, 483 aa, Unknown
  Description of Unknown: Integrase B6859 sequence
  cd03768,PTHR30461:SF3,SM00857,G3DSA:1.10.10.2600,IPR036162, PS51737,G3DSA:3.40.50.1390,IPR006119,IPR038109,PF07508, SSF53041,IPR011109,PTHR30461,PS51736,Coil, PF00239
MRIDAIYARQSIEKRDSISIESQIEMCKRAADPDAAIYRDSGYSGKNTQRPAFTQLMADVRAGKIKRVFCYRLDRISRSVLDFSLLWQTFDANHVDFVSVTESFDTNSPMGRAMIMIIITFAQLERETIVSRYTTNRYARSNAGIWAGGRAPYGFEIQKVDWNGKRQSVLKPIPEKLQIVQDLFTKYTSGTASLYSLSKELNLNSTERWDAITVRRILKNPVYACADVDVYSFYYGNAEIINDVHEFDGSHAAYLVVKGGKSSAGHRTLSLAYHQGVVPSSVFIAAQNMLSQNKQLKNGHRSSFTWLSGLLKCHKCGGRINVFQNKGLTYFQCYKRFHQAGSCDAKIHGNSLRYESYVEDAIQNRIDTIVKNNSTEDVPNQQLNDMKIQLLENERQINNLVEALKIGGAVAMRSIQNELQALEAEHERITNEITAMQPVHQVPNGLAVIDFAKLDYDSKRDVARMMIDKILVGDDSPIQIIWK

SEQ ID NO: 6859 - protein, 483 aa, Unknown
  Description of Unknown: Integrase B6860 sequence
  PTHR30461:SF3,cd00338,SM00857,IPR006118,G3DSA:1.10.10.2600, IPR036162,PF13408,IPR025827,G3DSA:3.40.50.1390,IPR006119, IPR038109,PF07508,IPR011109,SSF53041,PTHR30461, PS00397,Coil,PF00239
MTTQSTVEIGAAYIRVSTNDQTELSPDAQLRVILESAKADGYVIPKEFVYIEKKGVSGRRADNRQEFQRMVATAKTQPCPFKRLYLWKFSRFARNQDESVFYKSVLRKKCGVEIKSVSEPIADGMFGRLIESIIEWFDEYYSFNLSGEVMRGMTEKALREGYQCSPSLGYAAVGEGKPFIIVEKEYVIVEFIHQSFHKGKDMTTIAREANDMGFRTKRGNRFDRRGIYRILVNEFYNGIVVWNGIKFQGAHETRPSITDIFESNQQRIKEEYRPRSRRETSSCQHWLSGILKCSVCGASLSYNRSNDQKKRPDFFQCWKYGKGVHRESCSVSVKKAEEAVLTSLRQVMEDQSVQYEYIRKPDQKVISEESRLSEALEKVAMKEMRVKDAYESGIDSLEEYKANKLRLQDERTHILDELEQLKETPDEPEGPDMQEVLKRITTVYDLLMDPDIDNVTKGNAVRRIIKKIVFDRQMNEFHFYYYA

SEQ ID NO: 6860 - protein, 483 aa, Unknown
  Description of Unknown: Integrase B6861 sequence
  PTHR30461:SF3,cd00338,SM00857,IPR006118,G3DSA:1.10.10.2600, IPR036162,PF13408,IPR025827,G3DSA:3.40.50.1390,IPR006119, IPR038109,PF07508,IPR011109,SSF53041,PTHR30461, PS00397,Coil,PF00239
MTTQSTVEIGAAYIRVSTNDQTELSPDAQLRVILESAKADGYVIPKEFVYIEKKGVSGRRADNRQEFQRMVATAKTQPCPFKRLYLWKFSRFARNQDESVFYKSVLRKKCGVEIKSVSEPIADGMFGRLIESIIEWFDEYYSFNLSGEVMRGMTEKALREGYQCSPSLGYAAVGEGKPFIIIEKEYAIVEFIHQSFHKGKDMTAIAREANDMGFRTKRGNRFDRRGIYRILVNEFYNGIVVWNGIKFQGAHETRSSVTDIFESNQQRIKKEYRPRSRRETSSCQHWLSGILKCSVCGASLSYNRSNDQKKRPDFFQCWKYGKGVHRESCSVSVKKAEEAVLTSLRQVMADQSVQYEYIRKPDQKVISEESRLSEALEKVAMKEMRVKDAYESGIDSLEEYKANKLRLQDERNHILEELEQLKETPGEPEGPDMQEVLKRITTVYDLLMDPDIDNVTKGNAVRRIIKKIVFDRQMNEFHFYYYA

SEQ ID NO: 6861 - protein, 483 aa, Unknown
  Description of Unknown: Integrase B6862 sequence
  PTHR30461:SF3,IPR036162,PS51737,IPR011109,PTHR30461, PS00397,PF00239,G3DSA:1.10.10.2600,IPR006119,SSF53041, cd00338,SM00857,IPR025827,IPR038109,PS51736, IPR006118,PF13408,G3DSA:3.40.50.1390,PF07508
MQAQAQRVAAAYIRVSTDDQTDLSPESQLEKIREYAAKNNLILLSEYIFRDDGISGRAAEKRPGFQQMIAAAKDAAHPFDVVIVWKYSRFARNQEESIFYKSVLRSKCNVDVVSVSEPLVAGPFGSLIERIIEWMDEFYSIRLSEEVKRSMTVNAQKGRLQATPSFGYCVKDHVLEIVPEEAEIVREIFRRFVAGDAMYGIAMDVNARGVRTHRGNPFENRTVDYILNNPTYIGKLRWTPTGKTRRNFKNQDSVIADGAHAPIIDMQTWEAAQDRIAELKRTYKRYSKPAGDRKHWLCGIVRCPDCGGTLVYTAPHYMQCNNRLKGRCASSQHIAVELLEEAFLQQLQHDFTFAEAMAYKALHTHNDHASAALAQKRAKITGRMARLREAYLDGIESLPDYKASLQKFQDQLCEIDEEIKKAAETPESVSTESMREAIASVLRTLRAPDATVAQKYAAAQAIIDKCYFDKSKMLLTVSYNFSV

SEQ ID NO: 6862 - protein, 483 aa, Unknown
  Description of Unknown: Integrase B6863 sequence
  PTHR30461:SF3,SM00857,G3DSA:1.10.10.2600,IPR036162,PF13408, PS51737,IPR025827,G3DSA:3.40.50.1390,IPR006119,IPR038109, PF07508,SSF53041,IPR011109,PF00239,PTHR30461, PS51736,Coil,cd00338
MKMAAYCRVSTEKEEQLSSLENQREFFEQYADKEGDTLVKIYADEGISGKSMNKREAFTQLLEDSQTGAFDYVAVKDISRFARNTSDFLYGIRTLRSNGVDVRFLSNNQTVIGESEFVLTVFAALAQEESSNLSKRVIFGKRQNAKKGRVPNVVYGYNKIDTYTLEINEKESYIVQLMFKWYIEGEGTRRIAIKLNEMAIPTKKQAKWVPKTIRRILQNPIYIGKIINNKSVTKDFLSGTREAIPPEEWYIHERPELRIISDDDFELVQQKFKERQEQYKNDNPGNRFSNRHLFSNLIKCGECGKSFTAKVYQWKNRYVRYRCCVHNNNGNAHCTNSVTVDEQELLNEVKAYLLTAIEDKKAFADKLMKQYQAQTTNVDVSKLTDTRQSLEKRRSKFKEMFAADIITMDELKKEMSAIDEGMRSIDEELKVYDEIQKKATHIDDIHKDIEQILMQNEYTNDDMRRIIENIVVYPDKSVEIFMK

SEQ ID NO: 6863 - protein, 483 aa, Unknown
  Description of Unknown: Integrase B6864 sequence
  PTHR30461:SF3,IPR036162,PS51737,IPR011109,PTHR30461, PS00397,PF00239,G3DSA:1.10.10.2600,IPR006119,SSF53041, cd00338,SM00857,IPR025827,IPR038109,PS51736, IPR006118,PF13408,G3DSA:3.40.50.1390,PF07508,Coil
MTFGAAYIRVSTDHQDEYSPDAQRRCILDYAKKNGIVINKEHIFADIGISGTKADKREAFQKIIALAKSKEHPIDTILVWKFSRFARNQEESILYKSLLSRSNVSVISVSEPINEGPFGKLIERILEWMDEYYSIRLSGEVKRGMMQKALAGGYNSKIPYGYAMNENKIPTIVPEQAKVVQIIFDQYVNQHESISNIALMLNKTGYRTARGNKFERRVIHYILQNPFYIGQIRWNYAPRARGKKKDGDIIIRDGKHEPLISVEMFEKAQELIKIAYETYHGTVRRVPSAAAKHWLSGVLKCPTCGSSLSFCRGQIPHFKCWKYNKGTCSTSNYLNAKKAEQYVLEGLKNLLLADKIDYEKIPANTLETNTKLLQDELRDLDKKMERIKMAYIDGIDSLDEYKSSKKIIDRKRREIEKQLVPKKAMKDKQQPKHTILDSIKIVIDTLESDCEPAKKSEAIRSICHKIEYNKENDTLYFDLYMVE

SEQ ID NO: 6864 - protein, 483 aa, Unknown
  Description of Unknown: Integrase B6865 sequence
  cd00338,SM00857,G3DSA:1.10.10.2600,IPR036162,PF13408, IPR025827,G3DSA:3.40.50.1390,PS51737,IPR006119,IPR038109, PF07508,IPR011109,SSF53041,PTHR30461,PS51736, Coil,PF00239
MQAAAYARYSTEHQTDSSIAYQMRKIEEYCDAHGITVSARYADEAMSGTNTQRPAFQSLCRDAAQRKFDAVVIYDISRGSRDVSDWFSFRKQMALLHIQVISVEDHIGDILNPADYLTELITVGLGQHHVLTSRQKSMDSIATKAKTGQFLGGTPNFGYVIDENGRYVIQPAEAEIVRTIYQMYAAGKSYGEILDTIGEVRGRRGKVMGKNSLHYLLRNERYIGVYSWCKYHHKIMGKYAGNIPNENAVRIEDSIPAIIDKDTWEAVQMRMNDKKQRACNKAKRNYLLSGLIECTECGASYVGHTSTNKRGYSTRYYCCGNKYRNHTCHAKNINADELEAFVVQNLKHYLANVDFSQMAQQIADEINGATADLKAERKELADIIFQLNNGTKAILKGIDYPELQEEMFRLRVRKSELEDMIQRGAEHNPVSVEKLVQLFQNAMERLDTDTKQVCKSMVKIYAHSNGDCDLEVGVHINGCGSQI

SEQ ID NO: 6865 - protein, 483 aa, Unknown
  Description of Unknown: Integrase B6866 sequence
  cd00338,SM00857,G3DSA:1.10.10.2600,IPR036162,PF13408, IPR025827,G3DSA:3.40.50.1390,PS51737,IPR006119,IPR038109, PF07508,IPR011109,SSF53041,PTHR30461,PS51736, Coil,PF00239
MQAAAYARYSTEHQTDSSIAYQMRKIEEYCDAHGITVSARYADEAMSGTNTQRPAFQSLCRDAAQRKFDAVVIYDISRGSRDVSDWFSFRKQMALLHIQVISVEDHIGDILNPADYLTELITVGLGQHHVLTSRQKSMDSIATKAKTGQFLGGTPNFGYTIDENGRYVIQPAEAKIVRTIYQMYAAGKSYGEILDTIGEVRGRRGKVMGKNSLHYLLRSERYIGVYSWCKYHHKIMGKYAGNIPNENAVRIEDSIPAIIDKDTWEAVQMRMNDKKQRACNKAKRNYLLSGLIECTECGASYVGHTSTNKRGYSTRYYCCGNKYRNHTCHAKNINAEELEKFVVQNLKHYLANVDFSQMAQQIADEINGATADLKAERKELADIIFQLNNGTKAILKGIDYPELQEEMFRLRVRKSDLEDIIQRGTEHNPVSVEKLVQLFQNAMERLDTDTKQVCKSMVKIYAHSNGDCDLEVGVHINGCGSQI

SEQ ID NO: 6866 - protein, 483 aa, Unknown
  Description of Unknown: Integrase B6867 sequence
  PTHR30461:SF3,IPR036162,PS51737,IPR011109,PTHR30461, PS00397,PF00239,G3DSA:1.10.10.2600,IPR006119,SSF53041, cd00338,SM00857,IPR025827,IPR038109,PS51736, IPR006118,PF13408,G3DSA:3.40.50.1390,PF07508,Coil
MEQKKIGAAYIRVSTDDQLDYSPESQIKLIQDYAKKNNIVIPEEFIFRDDGISGRSAKKRPGFLRMIAAAKEKPRPFEVILVWKFSRFARNQEESVVYKSLLKKEAGIDVVSISEPLIEGPFGGLIERIIEWFDAFYSVNLGTEVRRGMTERVRQGGAVSTAPIGYTYKDRKLVVEPQEAEVVRMIYRDFLSGSAVMAITKKLNSLGIKTKRGGAWENRTVRYVLTNPVYIGRVRWSPEGTNDYHKTDGWNDKTMLVDGAHEAILSEADFYAAQEAVETYVRRYKGNADRAQRESAGMMLQGLVKCSTCGGTLSRTGNGGMNCVRYTHGKCTESHYITVGKLEEIVLTGIELQLNNLQAEIIRREMPGAEDQAAVLRQQLKREETILQKCKAAYLAGADTLEEYKENKAACKERIKRIQELLAEQEKEKPVDVQAFAERTRPVLAQLRDAAVPPEKKNQLLRSFVDRIIFDNKTKTVTIVYYE

SEQ ID NO: 6867 - protein, 483 aa, Unknown
  Description of Unknown: Integrase B6868 sequence
  PTHR30461:SF3,IPR036162,PS51737,IPR011109,PTHR30461, PS00397,PF00239,G3DSA:1.10.10.2600,IPR006119,SSF53041, cd00338,SM00857,IPR025827,IPR038109,PS51736, IPR006118,PF13408,G3DSA:3.40.50.1390,PF07508,Coil
MTFGAAYIRVSTDHQDEYSPDAQRRCILDYAKKNGIVINKEHIFADIGISGTKADKREAFQKMIALAKSKEHPIDTILVWKFSRFARNQEESILYKSLLSRSNVSVISVSEPINEGPFGKLIERILEWMDEYYSIRLSGEVKRGMMQKALAGGYNSKIPYGYAMNENKIPTIVPEQAKVVQIIFDQYVNQHESISNIALMLNKTGYRTARGNKFERRVIHYILQNPFYIGQIRWNYAPRARGKKKDGDIIIRDGKHEPLISVEMFEKAQELIKIAYETYHGTVRRVPSAAAKHWLSGVLKCSTCGSSLSFCKGQIPHFKCWKYNKGTCSTSNYLNAKKAEQYVLEGLKNLLLADKIDYEKIPANTLETNTKLLQDELRDLDKKMERIKMAYIDGIDSLDEYKSNKKIIDRKRREIEKQLVPKKAMKDKQQPKHTILDSIKIVIDTLESDCEPAKKSEAIRSICHKIEYNKENDTLYFDLYMVE

SEQ ID NO: 6868 - protein, 483 aa, Unknown
  Description of Unknown: Integrase B6869 sequence
  PTHR30461:SF3,IPR036162,PS51737,IPR011109,PTHR30461, PS00397,PF00239,G3DSA:1.10.10.2600,IPR006119,SSF53041, SM00857,IPR025827,IPR038109,PS51736,cd03768, IPR006118,PF13408,G3DSA:3.40.50.1390,PF07508,Coil
MKQKIAAPPADPVADLVDLYIRVSTTEQALEGYSVAEQESRLRRYSEAMGFRIHKVHIDAGFSGASLDRPAIKEVIRDIQSHLVSKVIVWKLDRLSRSQKDMLVMLEDVFLANDCDFISMMESFDTSTAFGRAIVGILAAFAQLERENIKERTTMGRRARLAKGHYNGSRPPLGYRFLEGSNDLKVEPYEANMVHEIFSSFLAGQSINAIAATMQRKYPTTRTWNNTMIRRTLKNPVYMGKVKDVDVIRDGIHEPLISESEFVMASAVLSHNREIKKQSCRSNSLLTGLLYCGDCGARMQPRQIARGYPLRRYVCYSVSRTNKSMIRSDHCTNRLHPYTLEELDDIIIGEIRKLAADEDYLRAIIREDAGPILDESELLKDRLSEIDKQTDKLLNLFQIGVVDLSQIEQRLADLKQEREALKERLERTAPVVQMDIQKIQSYADAFQAALDSGDAEYQSSIIRLLIDKIVVLNEDIEIHWTFC

SEQ ID NO: 6869 - protein, 483 aa, Unknown
  Description of Unknown: Integrase B6870 sequence
  IPR036162,PS51737,IPR011109,PTHR30461,PS00397, PF00239,G3DSA:1.10.10.2600,IPR006119,SSF53041,cd00338, SM00857,IPR025827,IPR038109,PS51736,IPR006118, PF13408,G3DSA:3.40.50.1390,PF07508,Coil
MKTGALYIRVSTDDQTEYSPDAQIRLGLDYAKKNGIVIPKKFIYQDDGISGRKAKNRPAFQELIATAKSEEHPFDVILVWKFSRFARNQEEAIVYKNLLKKAGVDVVSVSEPIPDGFIGELVQRIFEWMDEYYSINLSGEVMRGMTERASRGGYNSDPPIGYKMQDGVPVINPDTAPIVEKIFDWYVNKQMSFWEIANALNLLGYKTKRGGKFQNRTVAYIIRNDFYNGKIIWNKMDHATRRIKDKSEWVITEGTHETFISEELFNAAQERDKSTYHAKGKRPTSTYKHWLSGILVCSACGQRLVRCSTSKKGNTYFQCTGYNHAACTVSHATNEFALKPAIFEALDKVIATGEVTYEIHSSNNDDNNEKKLIEDKLSRLVMKEERIKEAYRDGIDTLEEYKANKEILANERTNLNAMLEQCSAATPDDIQNKLIEKIRSAKEIIECDKSTDVQKHNALASVVEKIVYNKKEDSISMFFYIND

SEQ ID NO: 6870 - protein, 483 aa, Unknown
  Description of Unknown: Integrase B6871 sequence
  PTHR30461:SF3,cd00338,SM00857,IPR006118,G3DSA:1.10.10.2600, IPR036162,PF13408,IPR025827,G3DSA:3.40.50.1390,IPR006119, IPR038109,PF07508,IPR011109,SSF53041,PTHR30461, PS00397,Coil,PF00239
MTTQSTVEIGAAYIRVSTNDQTELSPDAQLRVILESAKADGYVIPKEFVYIEKKGVSGRRADNRQEFQRMVATAKTQPCPFKRLYLWKFSRFARNQDESVFYKSVLRKKCGVEIKSVSEPIADGMFGRLIESIIEWFDEYYSFNLSGEVMRGMTEKALREGYQCSPSLGYAAVGEGKPFIIIEKEYVIVEFIHQSFHKGKDMTAIAREANDMGFRTKRGNRFDRRGIYRILVNEFYNGIVVWNGIKFQGAHETRPSITDIFESNQQRIKEEYRPRSRRETSSCQHWLSGILKCSVCGASLSYNRSNDQKKRPDFFQCWKYGKGVHRESCSVSVKKAEEAVLTSLRQVMADQSVQYEYIRKPDQKVISEESRLSEALEKVAMKEMRVKDAYESGIDSLEEYKANKLRLQDERTHILDELEQLKETPDEPEGPDMQEILKRITTVYDLLMDPDIDNVTKGNAVRRIIKKIVFDRQMNEFHFYYYA

SEQ ID NO: 6871 - protein, 483 aa, Unknown
  Description of Unknown: Integrase B6872 sequence
  PTHR30461:SF3,IPR036162,PS51737,IPR011109,PTHR30461, PS00397,PF00239,G3DSA:1.10.10.2600,IPR006119,SSF53041, SM00857,IPR025827,IPR038109,PS51736,cd03768, IPR006118,PF13408,G3DSA:3.40.50.1390,PF07508,Coil
MKQKITAPPADPVVDLVDLYIRVSTTEQALEGYSVAEQESRLRRYSEAMGFRIHKVHIDAGFSGASLDRPAIKEVIRDIQSHLVSKVIVWKLDRLSRSQKDMLVMLEDVFLANDCDFISMMESFDTSTAFGRAIVGILAAFAQLERENIKERTTMGRRARLAKGHYNGSRPPLGYRFLEGSNDLKVEPYEANMVHEIFSSFLAGQSINAIAATMQRKYPTTRTWNNTMIRRTLKNPVYMGKVKDVDVIRDGIHEPLISESEFVMANAVLSHNREIKKQSCRSNSLLTGLLYCGDCGARMQPRQIARGYPLRRYVCYSVSRTNKSMIRSDHCTNRLHPYTLEELDDIIIGEIRKLAADEDYLRAIIREDAGPILDESELLKDRLSEIDKQTDKLLNLFQIGVVDLSQIEQRLADLKQEREALKERLERTAPVVQMDIQKIQSYADAFQEALDSGDAECQSSIIRLLIDKIVVLNEDIEIHWTFC

SEQ ID NO: 6872 - protein, 483 aa, Unknown
  Description of Unknown: Integrase B6873 sequence
  PTHR30461:SF3,IPR036162,PS51737,IPR011109,PTHR30461, PS00397,PF00239,G3DSA:1.10.10.2600,IPR006119,SSF53041, cd00338,SM00857,IPR025827,IPR038109,PS51736, IPR006118,PF13408,G3DSA:3.40.50.1390,PF07508,Coil
MTFGAAYIRVSTEHQDEYSPDAQRRCILDYAKKNGIVINKEHIFADIGISGTKADKREAFQKMIALAKSKEHPIDTILVWKFSRFARNQEESILYKSLLSRSNVSVVSVSEPIHEGPFGQLIERILEWMDEYYSIRLSGEVKRGMMQKALAGGYNSKIPYGYKMDENKIPVIVPEQAKVVQMIFDQYVNQHESISNITLMLNETGYRTARGNKFERRVIHYILQNPFYIGQIRWNYAPRARGKKKDGDIIIRDGKHKPLVSVEMFEQAQELIKTAYETYHGTVRRVPSAAAKHWLSGVLKCSTCGSSLSFCRGQISHFKCWKYNKGTCSTSNYLNAKKAEQYVLEGLKNLLLTDKIDYEKIPANTLETNTKLLQDELRNLDKKMERIKTAYIDGIDSLDEYKSNKKIIDRKRREIEKQLVPKKAMRDKQQPKHTILDNIKIVIDTLESDCEPAKKSEAIRSICHKIEYNKENDTLYFDLYMIE

SEQ ID NO: 6873 - protein, 483 aa, Unknown
  Description of Unknown: Integrase B6874 sequence
  PTHR30461:SF3,cd00338,SM00857,G3DSA:1.10.10.2600,IPR036162, PF13408,PS51737,G3DSA:3.40.50.1390,IPR025827,IPR006119, IPR038109,PF07508,IPR011109,SSF53041,PTHR30461, PS51736,Coil,PF00239
MRMAAYCRVSTEKEEQLSSLENQREFFEQYADKEGDTLVKIYADEGISGKSMNKREAFTQLLEDSKTGAFDYVAVKDISRFARNTSDFLYGIRTLRSNGVDVRFLSNNQTVIGESEFVLTVFAALAQEESSNLSKRVIFGKRQNAKKGRVPNVVYGYNKIDTYTLEINEQESYIVQLMFKWYIEGEGTRRIAIKLNEMAIPTKKQAKWVPKTIRRILQNPIYIGKIINNKSVTKDFLSGTREAIPPEEWYIHERPELRIISDDDFELVQHKIKERQEQYKNDNPGNRFSNRHLFSNLIKCGECGKSFTAKVYQWKNRYVRYRCCVHNNNGNAHCTNSVTVDEQELLNEVKSYLLTAIEDKKAFADKLMKQYQAQTTNVDVSKLTDTRQSLEKRRSKFKEMFAADIITMDELKKEMSAIDEGMRSIDEELKVYDEIQKKATHIDDIHKDIEQILMQNEYTNDDMRRIIEKIVVYPDKSVEIFMK

SEQ ID NO: 6874 - protein, 483 aa, Unknown
  Description of Unknown: Integrase B6875 sequence
  PTHR30461:SF3,IPR036162,PS51737,IPR011109,PTHR30461, PS00397,PF00239,G3DSA:1.10.10.2600,IPR006119,SSF53041, cd00338,SM00857,IPR025827,IPR038109,PS51736, IPR006118,PF13408,G3DSA:3.40.50.1390,PF07508,Coil
MTFGAAYIRVSTDHQDEYSPDAQRRCILDYAKKNDIIINKEHIFADIGISGTKADKREAFQKMIALAKSKEHPIDTILVWKFSRFARNQEESILYKSLLSRSNVSVVSVSEPINEGPFGKLIERILEWMDEYYSIRLSGEVKRGMMQKALAGGYNSKIPYGYTMNENKIPTIVPEQAKVVQIIFDQYVNQHESISNIALMLNKTGYRTARGNKFERRVIHYILQNPFYIGQIRWNYAPRARGKKKDGDIIIRDGKHEPLISVEMFEKAQELIKIAYETYHGTVRRVPSAAAKHWLSGVLKCSTCGSSLSFCKGQIPHFKCWKYNKGTCSTSNYLNAKKAEQYVLEGLKNLLLADKIDYEKISANTLETNTKLLQDELRDLDKKMERIKMAYIDGIDSLDEYKSNKKIIDRKRREIEKQLVPKKAMKDKQQPKHTILDSIKIVIDTLESDCEPAKKSEAIRSICHKIEYNKENDTLYFDLYMVE

SEQ ID NO: 6875 - protein, 483 aa, Unknown
  Description of Unknown: Integrase B6876 sequence
  PTHR30461:SF3,IPR036162,PS51737,IPR011109,PTHR30461, PS00397,PF00239,G3DSA:1.10.10.2600,IPR006119,SSF53041, cd00338,SM00857,IPR025827,IPR038109,PS51736, IPR006118,PF13408,G3DSA:3.40.50.1390,PF07508,Coil
MKTGALYVRVSTDDQVEYSPDAQIRLGLEYAKKNNIIIPKQFIFQDDGISGRKANNRPAFQNLIAIAKSDEHPIDVILVWKFSRFARNQEEAIVYKNLLKKANVDVISVSEPIPDGFIGELVQRIFEWMDEYYSINLSGEVMRGMTERASRGGYNSDPPLGYRMQDGVPVIVPEQSEIVKKIFNWYVNKHMSFFDIATKLNALGYKTKRNGKFQNRTVAYIIRNEFYKGKIVWNKSDHSTRKIKDKSEWIITDGEHETFISDELFNAAQEIDKATRRPFKARAQSTYKHWLSGILVCSACGGRLVRSGKSKSGNTYFQCTAYNHASCNESHLTNENALKPAILDALKKVLDSGTVNYVVHSTNKEEKTESELINRKLNRIAMKEERIKEAYRDGIDTIEEYKANKEILNKERQELIALLEQYSNEPSNENENRLMQKIRSSYDIISSDKSTDIQKHKALTSVVEKIVYDKKNHSLLMFFYIND

SEQ ID NO: 6876 - protein, 483 aa, Unknown
  Description of Unknown: Integrase B6877 sequence
  PTHR30461:SF3,IPR036162,PS51737,IPR011109,PTHR30461, PS00397,PF00239,G3DSA:1.10.10.2600,IPR006119,SSF53041, cd00338,SM00857,IPR025827,IPR038109,PS51736, IPR006118,PF13408,G3DSA:3.40.50.1390,PF07508,Coil
MTFGAAYIRVSTDHQDEYSPDAQRRCILDYAKKNDIIINKEHIFADIGISGTKADKREAFQKMIALAKSKEHPIDTILVWKFSRFARNQEESILYKSLLSRSNVSVVSVSEPINEGPFGKLIERILEWMDEYYSIRLSGEVKRGMMQKALAGGYNSKIPYGYTMNENKIPTIVPEQAKVVQIIFDQYVNQHESISNIALMLNKTGYRTARGNKFERRVIHYILQNPFYIGQIRWNYAPRARGKKKDGDIIIREGKHEPLISVEMFEKAQELIKIAYETYHGTVRRVPSAAAKHWLSGVLKCSTCGSSLSFCKGQIPHFKCWKYNKGTCSTSNYLNAKKAEQYVLEGLKNLLLADKIDYEKISANTLETNTKLLQDELRDLDKKMERIKMAYIDGIDSLDEYKSNKKIIDRKRREIEKQLVPKKAMKDKQQPKHTILDSIKIVIDTLESDCEPAKKSEAIRSICHKIEYNKENDTLYFDLYMVE

SEQ ID NO: 6877 - protein, 482 aa, Unknown
  Description of Unknown: Integrase B6878 sequence
  cd00338,SM00857,G3DSA:1.10.10.2600,IPR036162,PF13408, PS51737,IPR025827,G3DSA:3.40.50.1390,IPR006119,IPR038109, PF07508,IPR011109,SSF53041,PTHR30461,PS51736, Coil,PF00239
MQAAAYARYSTEHQTDSSIAYQMRKIEEYCAENGITISARYADEAMSGTNTQRPAFQSLCRDAAQRKFDAVVIYDISRGSRDVADWFGFRKQMAILGVQVISVEDHIGDILNPADYLTELITVGLGQHHVLTSRQKSMDSIATKAKTGQFLGGTPNFGYDIVDGKYVINPAESKIVQTIFQMYAAGKSYGEILGEIGEVRGKRGKIMGKNSLYYILRNERYAGVYSWCKYHSKIMGKYAGRTPNENAVRIEDCIPAIIDKDTWEAVQMRMEDKKHRACNKAKRSYLLSGLIECTECGASYVGHTSTNSRGYSTRYYCCGNKYRNHTCHSQNINAEELEVFVVQNLRQYLVNLDYEQMAQQIAGQINGATADLKAERKELADIIFQLENGTKAILKGIDYPELQEEMLRLRVRKSELEDIIQRGKEKNPVSVEKLVQLFRDAMERLDTNTKQVCKAMVKVYAHSNGDCDLEVGVHMDGKEPNL

SEQ ID NO: 6878 - protein, 482 aa, Unknown
  Description of Unknown: Integrase B6879 sequence
  PTHR30461:SF3,IPR036162,PS51737,IPR011109,PTHR30461, PS00397,PF00239,G3DSA:1.10.10.2600,IPR006119,SSF53041, cd00338,SM00857,IPR025827,IPR038109,PS51736, IPR006118,PF13408,G3DSA:3.40.50.1390,PF07508,Coil
MKVAAAYIRVSTDDQLEYSPDSQLSQIRRYAKNNDFVLPEEYIFVEEEGRSGRNSAKRPEFMRMIATAKKNPKPFDAILVWKFSRFARNRQDSIVYKSMLRKELGIDVISVSEYIGDDKMSIITEAIIEAMDEYYSVNLAEEVTRGMTEKAHRGEPLTYAPFGYRIENKQYLPDPDTAALVQMIYSDFLGGMGYMEIARKLNDLGVRTRFGNRMENRNIEYILKNPVYIGKIHWNPSGKVRRSTPPKTQILSDGQHPPLISQEDFEAAQQRIAQIKQLYHQKAKSRVKPANEYALRGLVRCSSCGSTLVISSPNQPSAYLQCNRYAKGSCATSHAINLVKITDWVMAAIQTDLENETFELHIRQTAVQADTSSVLQAQLEREKSKLERIREAYEAGIDTLEEYRRNKEKLTANIEKLTLQLPQLPDVRASRKAFADKVRSLLPSLLSADTPPSEKNRLLRSFIEKIVFDRQADSIEIYYYIQ

SEQ ID NO: 6879 - protein, 482 aa, Unknown
  Description of Unknown: Integrase B6880 sequence
  cd00338,SM00857,G3DSA:1.10.10.2600,IPR036162,PS51737, G3DSA:3.40.50.1390,IPR006119,IPR038109,PF07508,IPR011109, SSF53041,PTHR30461,PS51736,Coil,PF00239
MPGTNSIPGTAAAYIRVSDDKQDEYSPDSQLKLIRDYAKRNGYYVPDEFVFYDDGISAKTAAKRPKFIEMIGIAKQKNPPFDKILVWKFSRFARNQEESIVYKSLLRKNGVEVISISEPLIDGAFGSLIERIIEWMDEYYLVRLSGEVKRGMKEKASRGEAMSGRVFGYLPKDGTLIPHPEEAPLVRMIFDDYLKNGKGARQIAIKLQQLGVKTIRGNDPDNRFVDYVLHNPVYCGKVRWSTDGCAASKRDYNNENIMLVNGSFEPIISEQTFNAAQNKIADQKKRYPKYQRNEAPTEYMLRGLVRCDSCGATLTLQKASKALQCHNYARGSCKVSHSISIAKANKTIIEALQYAVDHLDFNILPAEEKHTPEDYSKPLAALRKKLARTKEAYINGVDTLEEYKENKQRITEDIAKLEKKQAANTALPEVDKEAFAAKVRGVIAVINSPDTTEQAKNEALRSVLAKIIYHKPAQSLELYFYA

SEQ ID NO: 6880 - protein, 482 aa, Unknown
  Description of Unknown: Integrase B6881 sequence
  PTHR30461:SF3,SM00857,G3DSA:1.10.10.2600,IPR036162,PF13408, IPR025827,G3DSA:3.40.50.1390,PS51737,IPR006119,IPR038109, PF07508,SSF53041,IPR011109,PTHR30461, PS51736,cd00338,PF00239
MQAAAYARYSTEHQTESSIAYQMRKIEEYCNDHSITVIARYTDEAKSGTNTQRPAFQQLCKDAAQRKFDAVVIYDISRGSRDVSDWFGFRKQMAILGIQVISVEDRIGDILNPSDYLTELITVGLGQHHVLTSRQKSMDSIATKAKTGQFLGGTPNFGYNVVNGRYVINPAEAEIVQKIYRMYAAGKSYGEILAEIGEVRGKRGRVIGKNSLHYLLRNERYIGVYSWCKYHHKIMGKYAGNIPNENAVRIEDSIPAIIDKDTWEAVQIRMNDKKQRACNKAKRSYLLSGLIECTECGANYVGHTSTNKKGYSTRYYCCGNKYRNHTCHAKNLNAEELEIFVVQNLKQYLSDLDFSQMAQQVADEINGASVDLKAERKELADIIFQLNNGTKAILKGIDYPELQEEMFRLRVRKSELEDIIRRGEEKKPVSAEKLEQLFQHAVKQLDTDTKQICKSMVKIYAHPNGDCDLEVGVHISGCGSQI

SEQ ID NO: 6881 - protein, 482 aa, Unknown
  Description of Unknown: Integrase B6882 sequence
  SM00857,IPR006118,G3DSA:1.10.10.2600,IPR036162,PF13408, IPR025827,G3DSA:3.40.50.1390,Coil,PS51737,IPR006119, IPR038109,PF07508,SSF53041,IPR011109,PTHR30461, PS00397,cd00338,PF00239
MNEKNLEIGAAYIRVSTDDQTELSPDAQLRVILEAAKKDGIVIPQEFVFMEDRGRSGRRADNRPEFQRMISTARQNPSPFRYLYLWKFSRFARNQEESAFYKGILRKKCGVTIKSVSEPIMEGMFGRLVEMIIEWSDEFYSVNLSGEVLRGMTQKALEHGYQLTPCLGYDAVGHGRPYVINEEQYQIVEFIHRSFFDGKDMTWIAREANRRGYHTRRGNPFDTRAVRIILANSFYVGLVKWNDVTFQGTHECRESVTSVFSANQERLNRIHRPRGRRQASSCKHWLSGLLKCSICGASLGYNQTKDLTKRGHAFQCWKYTKGIHPGSCSVSSLKAEAAVLESLRMILETGEVEYTYEQREKHLDDNKLTLIQKSLERLDTKELRIREAYESGIDTMEEFKANKARLQRERDQLMEELEELRSQEEPEDVPGKEILIERIQNVYDLLQSPDVDNDDKGNAVRSIIKKIVYIKESKTFCFYYYV

SEQ ID NO: 6882 - protein, 482 aa, Unknown
  Description of Unknown: Integrase B6883 sequence
  PTHR30461:SF3,SM00857,IPR006118,G3DSA:1.10.10.2600,IPR036162, PS51737,G3DSA:3.40.50.1390,IPR006119,IPR038109,PF07508, SSF53041,IPR011109,PF00239,PTHR30461,PS00397, PS51736,Coil,cd00338
MQTAAAYIRVSTDDQVEFSPDSQMKAIQKYAKDHDMILPQDLIFADEGISGRHAENRPAFQRMIGLAKTKPKPFDVILLWKFSRFARNREDSIVYKSMLRKQCGIDVVSISEQVGEDKTSILIEALLEAMDEYYSINLAEEVRRGMQEKFSRGGVVSQPPYGYRMGDNVFVIQPDEAEIVRKIYHDFLSGAGRREIAVELNALGVVTRKGRPFDNRRVEYILSNPVYTGMLRRSKNGRQSSGDPFNQREDMQVIPGNHEPIIDRETFDAVQKRLKEAKRLYVKHAHTEGRPFMLKGVVRCSNCGSTLVMAMRNTSLQCHLYAKGQCDVSHAISIAKANTAVLERIKEDLRLGAVGVNVENQHKKKKPTVDATSMLLQKEKQKLERIKEAYAAGVDTLQEYREQKQKITARIEELSKSATVEYHTPEQVSREIVKRIQASLEMLEDAAVSEELKNQAMRALVEKIIFNRKKNLFEIVYRDPFA

SEQ ID NO: 6883 - protein, 482 aa, Unknown
  Description of Unknown: Integrase B6884 sequence
  PTHR30461:SF3,IPR036162,PS51737,IPR011109,PTHR30461, PS00397,PF00239,G3DSA:1.10.10.2600,IPR006119,SSF53041, SM00857,IPR025827,IPR038109,PS51736,cd03768, IPR006118,PF13408,G3DSA:3.40.50.1390,PF07508,Coil
MKAAIYVRVSTMEQAEEGYSLDEQVDKLKKYCEIKGWNIYKIYRDGGFSGANTDRPGLSEMINDAKLRAFDTVLVYKLDRLSRSQKDTLYLIEDILAANDIAFVSLNENFDTSTAFGKAMIGILAVFAQLEREQIRDRLLMGKIGRAKSGKAMAWGVPPFGYVLPESNREKYEIVPVEAEIVKKIYHDYIAGKLVAKICDELNAEGHIGKREPWVHANMKRTLTNPVYAGFIRYRGEVFEANHEPIVSKETFDLVQEQIELRQTRAYQKFNNPRPFQAKYLLSGLIKCGICGARFEVIQYKPRADGSRIRYYKCVSYSPKNHAPSMWKNSDGCTSPKYYLDDLEKELLSELEKLRDDPSLITSYVSKTNQIDVSGLKKRLKTLNNQLKKLVTLFIDNDFPKDVIESKKKIIMDEKKLILDKINEAESIKPEVSTNEVIDELGQIKISMFDLDYEEQKRIARKLIKEIILYPDKMEIHWAFAI

SEQ ID NO: 6884 - protein, 482 aa, Unknown
  Description of Unknown: Integrase B6885 sequence
  PTHR30461:SF3,SM00857,G3DSA:1.10.10.2600,IPR036162,PF13408, PS51737,G3DSA:3.40.50.1390,IPR025827,IPR006119,IPR038109, PF07508,IPR011109,SSF53041,PTHR30461,Coil, PS51736,cd00338,PF00239
MQAAAYARYSTEHQTESSIAYQMRKIEEYCNDHSITVIARYTDEAKSGTNTQRPAFQQLCKDAAQRKFDAVVIYDISRGSRDVSDWFGFRKQMAILGIQVISVEDRIGDILNPSDYLTELITVGLGQHHVLTSRQKSMDSIATKAKTGQFLGGTPNFGYNVVNGRYVINPAEAEIVQKIYRMYAAGKSYGEILAEIGEVRGKRGRVIGKNSLHYLLRNERYIGVYSWCKYHHKIMGKYAGNIPNENAVRIEDSIPAIIDKDTWEAVQIRMNDKKQRACNKAKRSYLLSGLIECTECGANYVGHTSTNKKGYSTRYYCCGNKYRNHTCYAKNLNAEELEVFVVQNLKQYLSDLDFSQMAQQVADEINGASVDLKAERKELADIIFQLNNGTKAILKGIDYPELQEEMFRLRVRKSELEDIIRRGEEKKPVSVEKLEQLFQNAVKQLDTDTKQICKSMVKIYAHPNGDCDLEVGVHISGCGSQI

SEQ ID NO: 6885 - protein, 482 aa, Unknown
  Description of Unknown: Integrase B6886 sequence
  PTHR30461:SF3,IPR036162,PS51737,IPR011109,PTHR30461, PS00397,PF00239,G3DSA:1.10.10.2600,IPR006119,SSF53041, SM00857,IPR025827,IPR038109,PS51736,cd03768, IPR006118,PF13408,G3DSA:3.40.50.1390,PF07508,Coil
MMNTINKVAIYVRVSTNMQAEEGYSIDEQIDKLKSYCQVKDWTVYDIYKDGGFSGGNINRPALEKMIVDAKKKRFDTVLVYKLDRLSRSQKDTLFLIEDVFSKNDISFLSLQENFDTSTPFGKAMVGLLSVFAQLEREQIKERMQLGMIGRAKSGKPMMFTNVSFGYTYSPKTQQLTINQAEAVIVKQIFNEFLGGMSPLRLMAYLNENNILRNGKEWNYQGIQRILRNPVYIGKIKYNNVIYPGLHEPIIDEESYYKAQKLLDARQDEMRVKGKNRQFKAKYMLSGTAKCGYCGAPLRIKIGNKRLDGTRLRVYQCCNRYPRKYAVVTYNDNKKCNSGNYQKEDLEQYVIAEIRKLQLKPEKIDKLFNKVSKIDTVQINKQIASIDNKINRLNDLYLNDMIDIDKLKADAEKFKEQKRVLEKELDKDLKIQEQEKNKEDFKKTIGFKDVTKLDYEEQSFIVKSLIDKILVKKGFIKILWKI

SEQ ID NO: 6886 - protein, 482 aa, Unknown
  Description of Unknown: Integrase B6887 sequence
  cd03768,PTHR30461:SF3,SM00857,G3DSA:1.10.10.2600,IPR036162, PF13408,PS51737,G3DSA:3.40.50.1390,IPR025827,IPR006119, IPR038109,PF07508,IPR011109,SSF53041,PTHR30461, PS51736,PF00239
MDAIYARQSIDKKGSLSIEGQIELCRKFTVDDALVFSDKGFSGKNTKRPAFGELMEAVEAGRVKKIVVYRLDRFSRSLADFSQIWELLRKNDVEFLSVNEQFDTSSPMGRAMLNIVMTFAQLERETTAERVRDNYHHRVSLGAWPGGPAPYGYALSKAELDGRKVSSLIADENAKTVLRIFEEYVRSETSLRALAKTLTEQGIHGPKREAWDNVTLSRILRNPVYAQADEAVYCYYLAQGIQIRQMPEVFDGVHGCLLIGKRDRSRGKYTKKDEQMLSLSTHEGIIPSSLWLRAQDKLSGQMQLSRANAGKYSWLTGLLKCSKCGYAVKVNYIKSEQRCKLVCSGRSNFGSCDESIDVDLRELETHIANELQHILDACPAELPSVSEDHAQAKAVLEIEQKIDRLVNALAESSDVAVVYISKMIEKLHAEREQLLHTVPHSAPQIRRLDFSHSVFDEKKLIAAEFIERIELDGNHVNIIWKA

SEQ ID NO: 6887 - protein, 482 aa, Unknown
  Description of Unknown: Integrase B6888 sequence
  cd03768,PTHR30461:SF3,SM00857,IPR036162,PF13408, IPR025827,G3DSA:3.40.50.1390,PS51737,IPR006119,PF07508, SSF53041,IPR011109,PTHR30461,PS51736,PF00239
MDAIYARQSIDKKGSLSIEGQIELCRKFTADDALVFSDKGFSGKNTKRPAFGELMEAVEAGRVKKIVVYRLDRFSRSLADFSQIWELLRKNDVEFLSVNEQFDTSSPMGRAMLNIVMTFAQLERETTAERVRDNYHHRVSLGAWPGGPAPYGYALSKAELDGRKVSSLIADENAKTVLHIFEEYVRSETSLRALAKTLTEQGIHGPKREAWDNVTLSRILRNPVYVQADEAVYCYYLAQGIQIRQMPEVFDGVHGCLLIGKRDRSRGKYTKKDEQMLSLSTHEGIIPSSLWLRVQDKLSGQMQLPRANAGKYSWLTGLLKCGKCGYAVKVNYIKSEQRCKLVCSGRSNFGSCDESIDVDLRELETHIANELQHILDACPAEFPSVNEDHVQAKAVLEIEQKIDRLVNALAESSDVAVVYISKMIEKLHAEREQLLHTAPHSAPQIRRLDFSRSAFDEKKLIAAEFIERIELDGNHVNIIWKA

SEQ ID NO: 6888 - protein, 482 aa, Unknown
  Description of Unknown: Integrase B6889 sequence
  cd00338,SM00857,G3DSA:1.10.10.2600,IPR036162, PF13408,PS51737,G3DSA:3.40.50.1390,IPR025827, IPR006119,IPR038109,PF07508,IPR011109, SSF53041,PTHR30461,Coil,PF00239
MDIAVYTRVSTEKESQVSSYENQLSYFKNKIEKEGNVLYQFYGDPGLSGVNLKREQFIKMLYDAGIDTLNINTQQVFVLSKRNPKFDIIYTKSTSRLARTTDILNVIKLLKQKGITIYFEDINKSTNDIDAELLINLMILLDAQFSKDLSNKTRFGKRESNKKNLYKMRLLGYDKIDDKVVIIQEEAELVKKIFDMYVNQNLGTHIIAKKINEQGYRSIKGRKFNGTSIYGILHNEKYIGTYVANKRYTDSVNNIHRKNEEKDWIIRENAFEAIINKDLFNKAQEKLSSTAIGNPPTANNRYGTHLKCGICGGNTQIRARKNRSNRYVCSTKRKKGPSVCNGPYVLEETIDKFVNSVLRRIDYWYNGEIFWGIRALEKKKGNLKEDKDIEERRNKLVDLYLDNLIDKKLYEKRIKELDELNKTNEIIDKINNKIQQLKELRDIQLPTTPQELLSISTLYINEDKSLSIKFNIRKEIEEIVNS

SEQ ID NO: 6889 - protein, 482 aa, Unknown
  Description of Unknown: Integrase B6890 sequence
  cd03768,PTHR30461:SF3,SM00857,IPR036162,PF13408, IPR025827,G3DSA:3.40.50.1390,PS51737,IPR006119,PF07508, SSF53041,IPR011109,PTHR30461,PS51736,PF00239
MDAIYARQSIDKKGSLSIEGQIELCRKFTVDDALVFSDKGFSGKNTKRPAFGELMEAVEAGRVKKIVVYRLDRFSRSLADFSQIWELLRKNDVEFLSVNEQFDTSSPMGRAMLNIVMTFAQLERETTAERVRDNYHHRVSLGAWPGGPAPYGYALSKAELDGRKVSSLIADENAKTVLHIFEEYVRSETSLRALAKTLTEQGIHGPKREAWDNVTLSRILRNPVYVQADEAVYCYYLAQGIQIRQMPEVFDGVHGCLLIGKRDRSRGKYTKKDEQMLSLSTHEGIIPSSLWLRVQDKLSGQMQLPRANAGKYSWLTGLLKCGKCGYAVKVNYIKSEQRCKLVCSGRSNFGNCDESIDVDLRELEAHIANELQHILDACPAELPTVGEERAQAEAVLEIEQKIDRLVNALAESSDVAVVYISKMIEKLHAEREQLLHTAPHSASQIRRLDFSRSAFDEEKLIAAEFIERIELDGNHVNIIWKA

SEQ ID NO: 6890 - protein, 482 aa, Unknown
  Description of Unknown: Integrase B6891 sequence
  PTHR30461:SF3,SM00857,G3DSA:1.10.10.2600,IPR036162,PF13408, PS51737,IPR025827,G3DSA:3.40.50.1390,IPR006119,IPR038109, PF07508,SSF53041,IPR011109,PTHR30461, Coil,PS51736,cd00338,PF00239
MSKMKGVIYARYSPGPDQTERSIEGQVADCQAYADRNDIEIIKVYADRHVSGRSLKGRMEFQKMIKDAEKGLFDCVVTWKIDRFGRDRYDIANNKMKLKRTGVKLLYSKEAIPEGPEGIILESVLEGLAEYYSADLAQKVSRGHRENAKKGVWTFPLPLGYTRDDQKHIVPDPVVAPVVRRCFEMYAAGAKEKELIEYMRSQGITGQRGKPISTGVIYRMLRNRRYLGEFELQGVTYEGVEPIVPTDLFEKVQTMFPTSRNNAAGRAKMNYLLSCKCYCGKCGTMMSGECGTGKSGTVYAYYKCGNRKRGGACDLKPVKRELLEEAVLRHTMDDMLTDEVIDRLVAKIMEIQDRDDGQAVVTSLRSRLDGTKKKIENVLDAIENGGGASLVERLSALEEERDALDAELSKAQIKTPRLTADAVRAWLCSFRNGDISDEGFCRRLIDTFVDRVEVREGEALIIYNATKEGAASRCSSTAQLVE

SEQ ID NO: 6891 - protein, 482 aa, Unknown
  Description of Unknown: Integrase B6892 sequence
  PTHR30461:SF3,SM00857,IPR006118,G3DSA:1.10.10.2600,IPR036162, PS51737,PS00397,G3DSA:3.40.50.1390,IPR006119,IPR038109, PF07508,SSF53041,IPR011109,PTHR30461,Coil, PS51736,cd00338,PF00239
MQTAAAYIRVSTDDQVEFSPDSQMKAIQKYAKDHDMILPQDLIFADEGISGRHAENRPAFQRMIGLAKTKPKPFDVILLWKFSRFARNREDSIVYKSMLRKQCGIDVVSISEQVGEDKTSILIEALLEAMDEYYSINLAEEVRRGMQEKFSRGGVVSQPPYGYRMGDNVFVIQPDEAEIVRKIYHDFLSGAGRREIAVELNALGVVTRKGRPFDNRRVEYILSNPVYTGMLRRSKNGRQSSGDPFNQREDMQVIPGNHEPIIGRETFDATQKRLKEAKRLYVKHAHTEGRPFMLKGVVRCSNCGSTLVMAMRNTSLQCHLYAKGQCDVSHAISIAKANTAVLERIKEDLRLGAVGVNVENQHKKKKPTVDATSMLLQKEKQKLERIKEAYAAGVDTLQEYREQKQKITARIEELSKSATVEYHTPEQVSREIVKRIQASLEMLEDAAVSEELKNQAMRALVEKIIFNRKKNLFEIVYRDPFA

SEQ ID NO: 6892 - protein, 482 aa, Unknown
  Description of Unknown: Integrase B6893 sequence
  PTHR30461:SF3,IPR036162,PS51737,IPR011109,PTHR30461, PS00397,PF00239,G3DSA:1.10.10.2600,IPR006119,SSF53041, cd00338,SM00857,IPR025827,IPR038109,PS51736, IPR006118,PF13408,G3DSA:3.40.50.1390,PF07508,Coil
MRQGAVYIRVSTDDQTEYSPDAQLKRIKEYAQNHDILISQEYIYIENGVSGRTVAKREQFKKMIQKAKEKPKPFDIVLIHAYDRFARNVKESRIYKELLRDDLGIELISITEDFGSGKNSFLMEGIKDILNEYYSLNLRDEVLKGMYEKVSRGEVCGKAVLGYNLINKKLIINEEEAKTIKLIFNKYAYDNLGLLDIAKLVNQMGLKTKTGNKFENRTIKYILRNPVYIGKLRYSKKGKVDYHTYAVIKEEELYDGIHERIIDEETWNTVQKRLDKNILFSIPHKIDTINADYWLKGIVRCPYCNCTMIRHQKVNLRCNGYGKGKCHNKNTINLKFLEKLVLNQMKQDFDGKKISLNTIKIKSNECNERDIIIRQINNTEAKFARIKEAYVDGIDTLEEYKKNKEIISREISILKERLDKIEKPKEVPKDNLKLKIKDIYDLLTNEKVEMSVKKNAVHMLINKIVIDEKNMKILLTYNESPF

SEQ ID NO: 6893 - protein, 482 aa, Unknown
  Description of Unknown: Integrase B6894 sequence
  PTHR30461:SF3,SM00857,G3DSA:1.10.10.2600,IPR036162,PF13408, IPR025827,PS51737,G3DSA:3.40.50.1390,IPR006119,IPR038109, PF07508,SSF53041,IPR011109,PF00239,PTHR30461, PS51736,Coil,cd00338
MQAAAYARYSTEHQTSSSIAYQMRKIEEYCDSHGITVSARYADEAMSGTNTQRPAFQSLCQDAALRKFDAVVIYDISRGSRDVSDWFGFRKQMAVLGVQVISVEDHIGDILNPADYLTELITVGLGQHHVLTSRQKSMDSIATKAKTGQFLGGTPNYGYDIVDGRYVINPAEAEIVRKIYRMYAAGKSYGEILSAIGEVRGRRGKVMGKNSLYYLLRNERYIGVYSWCKYHHKIMGKYAGNLPNENAVRIEDSIPAIIDKDTWEAVQMRMDDKKHRACNKAKRSYLLSGLIECTECGASYVGHTSTNSRGYSTRYYCCGNKYRNHTCHSQNINAEELEVFVVQNLRQYLANLDYEQMAQQIASQINGATADLKEERKELADIIFQLENGTKAILKGIDYPELQEEMLRLRVRKSELEDIIRRGREKNPVSVEKLVQLFRDAMERLDTDTKQVCKAMVKVYAHSNGDCDLEVGVHMNGCGSQI

SEQ ID NO: 6894 - protein, 482 aa, Unknown
  Description of Unknown: Integrase B6895 sequence
  SM00857,IPR006118,G3DSA:1.10.10.2600,IPR036162,PF13408, PS51737,IPR025827,Coil,G3DSA:3.40.50.1390,IPR006119, IPR038109,PF07508,SSF53041,IPR011109,PTHR30461, PS00397,cd00338,PF00239
MNEKNLEIGAAYIRVSTDDQTELSPDAQLRVILEAAKKDGIVIPQEFVFMEDRGRSGRRADNRPEFQRMISTARQNPSPFRYLYLWKFSRFARNQEESAFYKGILRKKCGVTIKSVSEPIMEGMFGRLVEMIIEWSDEFYSVNLSGEVLRGMTQKALEHGYQLTPCLGYDAVGHGRPYIINEEQYQIVEFIHRSFFDGKDMTWIAREANRRGYHTRRGNPFDTRAVRIILTNSFYVGLVKWNDVTFQGAHECRESVTSVFSANQERLSRIHRPRGRRQASSCKHWLSGLLKCSICGASLGYNQTKDLTKRGHAFQCWKYTKGIHPGSCSVSSLKAEAAVLESLRMILETGEVEYTYEQREKHLDDNKLTLIQKSLERLDTKELRIREAYESGIDTLDEFKANKARLQREREQLMEELEELRSQEEPKRLPGKEVLIERIRNVYDLLQSPDVDNDDKGNAVRSIIKKIVYIKESKTFCFYYYV

SEQ ID NO: 6895 - protein, 482 aa, Unknown
  Description of Unknown: Integrase B6896 sequence
  cd03768,PTHR30461:SF3,SM00857,G3DSA:1.10.10.2600,IPR036162, PF13408,IPR025827,G3DSA:3.40.50.1390,PS51737,IPR006119, IPR038109,PF07508,SSF53041,IPR011109,PTHR30461, PS51736,PF00239
MDAIYARQSIDKKGSLSIEGQIELCRKFTADDALVFSDKGFSGKNTKRPAFGELMEAVEAGRVKKIVVYRLDRFSRSLADFSQIWELLRKNDVEFLSVNEQFDTSSPMGRAMLNIVMTFAQLERETTAERVRDNYHHRVSLGAWPGGPAPYGYALSKAELDGRKVSSLIADENAETVLRIFEEYVRSETSLRALAKTLTEQGIHGPKREAWDNVTLSRILRNPVYAQADEAVYCYYLAQGIQIRQMPEVFDGVHGCLLIGKRDRSRGKYTKKDEQMLSLSTHEGIIPSSLWLRVQDKLSGQMQLPRANAGKYSWLTGLLKCSKCGYAVKVNYIKSEQRCKLVCSGRSNFGSCDESIDVDLRELETHIANELQRILDACPAELPSVSEDHAQAKAVLEIEQKIDRLVNALAESSDVAVVYISKMIEKLHAEREQLLHTAPHSASQIRRLDFSRSAFDEKKLIAAEFIERIELDGNHVNIIWKA

SEQ ID NO: 6896 - protein, 482 aa, Unknown
  Description of Unknown: Integrase B6897 sequence
  cd03768,PTHR30461:SF3,SM00857,G3DSA:1.10.10.2600,IPR036162, PF13408,IPR025827,G3DSA:3.40.50.1390,PS51737,IPR006119, IPR038109,PF07508,IPR011109,SSF53041,PTHR30461, PS51736,PF00239
MDAIYARQSIDKKGSLSIEGQIELCRKFTVDDALVFSDKGFSGKNTKRPAFGELMEAVEAGCVKKIVVYRLDRFSRSLADFSQIWELLRKNDVEFLSVNEQFDTSSPMGRAMLNIVMTFAQLERETTAERVRDNYHHRVSLGAWPGGPAPYGYALSKAELDGRKVSSLIADENAKTVLHIFEEYVRSETSLRALAKALTEQGIHGPKREAWDNVTLSRILRNPVYAQADEAVYCYYLAQGIQIRQMPEVFDGVHGCLLIGKRDRSRGKYTKKDEQMLSLSTHEGIIPSSLWLRAQDKLSGQMQLPRANAGKYSWLTGLLKCSKCGYAVKVNYIKSEQRCKLVCSGRSNFGSCDESIDVDLRELETHIANELQHILDACPAEFPSVNEDHVQAKAVLEIEQKIDRLVNALAESSDVAVVYISKMIEKLHAEREQLLHTAPHSASQSRRLDFSHSVFDEKKLIAAEFIERIELDGNHVNIIWKA

SEQ ID NO: 6897 - protein, 482 aa, Unknown
  Description of Unknown: Integrase B6898 sequence
  PTHR30461:SF3,SM00857,G3DSA:1.10.10.2600,IPR036162,PF13408, PS51737,G3DSA:3.40.50.1390,IPR025827,IPR006119,IPR038109, PF07508,IPR011109,SSF53041,PTHR30461,Coil, cd00338,PF00239
MTGRNDNRDEFQQMLSDCAKKQFQVVIVWKVDRIGRNREEITFNKYRMKRHGVRVEYVAENIPDSPEAVILESVLEGMAEYYSLQLSQNIRRGYRENAKKCKYAGGRVPLGYKLAEDKSFEIDPATAPVVKDIFNRYAAGQTITEIITDLNAQGLRTATGSEFTKNSLRALLKNEKYIGIFDFKNGEIRIEDGVPAITDKSTFDKVQKLLVTNQRAPAHKWSKAEYLLTDKLFCGSCGGLMVGESGTSKTGAKYSYYLCTNHKRKRGCAQKAIRADWLEKYVLDMAKSIILDDKTIEFIADGTWEYYQQHERRREKVEALKGQLAEVDKALTNIMRAIESGLPFTETTKARVEELDGQKTALTSAIAEAELAYDSGLTRDHILFFLKQFQEFDYSQPQYQKRLIDTFINSIYVYPDEMTFNFNFGNESKTIKFEEMEAAKGGEVFVRCAPCSTIKLNQKRYQREKPRSFNDFRAFLRPFLEA

SEQ ID NO: 6898 - protein, 482 aa, Unknown
  Description of Unknown: Integrase B6899 sequence
  PTHR30461:SF3,IPR036162,PS51737,IPR011109,PTHR30461, PS00397,PF00239,G3DSA:1.10.10.2600,IPR006119,SSF53041, cd00338,SM00857,IPR025827,IPR038109,PS51736, IPR006118,PF13408,G3DSA:3.40.50.1390,PF07508,Coil
MKIAAAYIRVSTDDQEEYSPDSQLRIIREYAKAHGYILPGEYIFQDDGISAATARKRPAFNRMIALAKGTEKPFDVILVLMFSRFARNREESVLYKGLLRKQGIAVVSIKEPAVDGPFGTLIESIIEWFDEYYLINLSSEVRRGMSEKFRRGEAMGSAPFGYRIDSASKAFVADPARAEIVRQVFRDYADGAGCREIALKLGAMGIATKRGNVPDNRFVEYMLHNPVYLGKIRWTAEHKNDYRRTEAADDTEIVDGKHPPIITQELWDAVQQRAAQVKATYGKYQRQTPAAYMLRGMLRCSNCGATLVLAGRKGTAPHFQCHRYARGQCPVSHALSLRKANAAVIDGLRDAVDNLSFALVPRRTDPAGKQGPDYARLIEQERRKLARCKDAYQAGVDTLEEYRANKARLTDSIQSLQEQAAKAAGGDAETFDRAAYARKVAGVVKYLEGDADEAAKNEALRSVVDHITYDKANQRLVIYFYS

SEQ ID NO: 6899 - protein, 482 aa, Unknown
  Description of Unknown: Integrase B6900 sequence
  IPR036162,PS51737,IPR011109,PTHR30461,PS00397, PF00239,G3DSA:1.10.10.2600,IPR006119,SSF53041,cd00338, SM00857,IPR025827,IPR038109,PS51736,IPR006118, PF13408,G3DSA:3.40.50.1390,PF07508,Coil
MAIFYKTEVIFMSSKVACLYIRVSTEDQTELSPDAQKRLLLDYAQKNDMIVSGDFIFTESVSGRHAQKRPEFQKMIALAKQPSHPIDVILVWKFSRFARNQEESIVYKSMLKKDNVDVISVSEPLIEGPFGSLIERIIEWMDEYYSIRLSGEVLRGMKEKALQKGYQTSPCLGYTAVGHGKPYVINEAEYAIVSYIMDLYDNQNLDETAIARRCNDLGYRTKRGKLFERRSVDRILGNPFYCGTVVWNGVEFEGNHEVRLSRERYEKRQKLITSRKRPVKARNVSACKHWLSGLLKCSVCGATLSYTGNNKCPYFQCWKYAKGFHKTSVALSVKKAEDAVITYFEQILDGAEFTYVCKKKKTDHSLQIDQLQREISKLTMRESRIKEAYEAGVDTLEEYKNNKDRLVSDRLELTAALSQLLQEEQADQPDTEEILKEIRSVADVLKNPDVGYEEKGNLIRSVVEQIIYDKESGKMSFDIIIS

SEQ ID NO: 6900 - protein, 482 aa, Unknown
  Description of Unknown: Integrase B6901 sequence
  PTHR30461:SF3,IPR036162,PS51737,IPR011109,PTHR30461, PS00397,PF00239,G3DSA:1.10.10.2600,IPR006119,SSF53041, cd00338,SM00857,IPR025827,IPR038109,IPR006118, PF13408,G3DSA:3.40.50.1390,PF07508,Coil
MNEKNLEIGAAYIRVSTDDQTELSPDAQLRVILEAAKKDGIIIPQEFVFMEDRGRSGRRADNRPEFQRMISTARQNPSPFRYLYLWKFSRFARNQEESAFYKGILRKKCGVTIKSVSEPIMEGMFGRLVEMIIEWSDEFYSVNLSGEVLRGMTQKALEHGYQLTPCLGYDAVGHGRPYVINEEQYQIVEFIHRSFFDGKDMTWIAREANRRGYHTRRGNPFDTRAVRIILTNSFYVGLVKWNDVTFQGTHECRESVTSVFSANQERLNRIHRPRGRRQASSCKHWLSGLLKCSICGASLGYNQTKDLTKRGHAFQCWKYTKGIHPGSCSVSSLKAEAAVLESLQMILETGEVEYTYEQREKHLDDNKLTLIQKSLERLDTKELRIREAYESGIDTLDEFKTNKARLQRERDQLMEELEELHSQEEPEDVPGKEILIERIQNVYDLLQSPDVDNDDKGNAVRSIIKKIVYIKESKTFCFYYYV

SEQ ID NO: 6901 - protein, 482 aa, Unknown
  Description of Unknown: Integrase B6902 sequence
  IPR036162,PS51737,IPR011109,PTHR30461,PS00397, PF00239,G3DSA:1.10.10.2600,IPR006119,SSF53041,cd00338, SM00857,IPR025827,IPR038109,PS51736,IPR006118, PF13408,G3DSA:3.40.50.1390,PF07508,Coil
MAIFYKTEVIFMSSKVACLYIRVSTEDQTELSPDAQKRLLLDYAQKNDMIVSGDFIFTESVSGRHAQKRPEFQKMIALAKQPSHPIDVILVWKFSRFARNQEESIVYKSMLKKDNVDVISVSEPLIKGPFGSLIERIIEWMDEYYSIRLSGEVLRGMKEKALQKGYQTSPCLGYTAVGHGKPYIINEAEYAIVSYIMDLYDNQNLDETAIARRCNDLGYRTKRGKLFERRSVDRILGNPFYCGTVVWNGVEFEGNHEVRLSRERYEKRQKLITSRKRPVKARNVSACKHWLSGLLKCSVCGATLSYTGNNKCPYFQCWKYAKGFHKTSVALSVKKAEEAVISYFDQILDGAEFTYVCKKKKTDHSLQIDQLQREISKLAMREGRIKEAYEAGVDTLAEYKNNKDRLVSDRLELTAALSQLLQEEQSEQPNTEEVLKEIRSVADVLKNPDVGYEEKGNLIRSVVEQIIYDKESGKMSFDIIIS

SEQ ID NO: 6902 - protein, 482 aa, Unknown
  Description of Unknown: Integrase B6903 sequence
  PTHR30461:SF3,cd00338,SM00857,IPR006118,IPR036162, PF13408,PS51737,IPR025827,G3DSA:3.40.50.1390,IPR006119, SSF53041,IPR011109,PTHR30461,PS00397,PS51736, Coil,PF00239
MTNQTGTGQYVGGTNYIEEVAAYIRVSTQEQKLHGISLEAQVEKLTEYAENHGMKIVKFYKDEGVSGRKLIKKRPALQEMIQDAEKGKFKRIIFIKLDRFFRSVAEYHECMKRLSAGGVIWTATEEKYDLSTPSGEAFVNMKLTMAQFEADQAGERIRMVNEYKIKSGQPLFGAQCLPLGYTVTQPEDGERHKYVAKDAEMEAATNDLIEYALTHGTIRGAMSYINNKYDLHIGYNACAKTLKNEMICGEYRGNPNYCEPYIDRETFDRLQKLISRTPRSTGEKRTYYFTGLICCPKCGRRLVAGIFRSNTKWRKYTYKVYRCSAHFKEKNCEFSSVVLEQTLEDVLLEKLGSIVERKSIEAEDVAAADEKVGKYNIAELQAELDRLNYSWQKNRIKSAEEYDRKYDAIMEQIEAAQAEKEEMGNVDFDRIRDILQSDWRELYKALDDDHKRSFWRSFIEEIELDWGKGRYGKKDIKDITFF

SEQ ID NO: 6903 - protein, 482 aa, Unknown
  Description of Unknown: Integrase B6904 sequence
  cd03768,PTHR30461:SF3,SM00857,IPR036162,PF13408, PS51737,G3DSA:3.40.50.1390,IPR025827,IPR006119,PF07508, IPR011109,SSF53041,PTHR30461,PS51736,PF00239
MDAIYARQSIDKKGSLSIEGQIELCRKFTVDDALVFSDKGFSGKNTKRPAFGELMEAVEAGCVKKIVVYRLDRFSRSLADFSQIWELLRKNDVEFLSVNEQFDTSSPMGRAMLNIVMTFAQLERETTAERVRDNYHHRVSLGAWPGGPAPYGYALSKAELDGRKVSSLIADENAKTVLHIFEEYVRSETSLRALAKALTEQGIHGPKREAWDNVTLSRILRNPVYAQADEAVYCYYLAQGIQIRQMPEVFDGVHGCLLIGKRDRSRGKYTKKDEQMLSLSTHGGIIPSSLWLRAQDKLSGQMQLPRANAGKYSWLTGLLKCSKCGYAVKVNYIKSEQRCKLVCSGRSNFGSCDESIDVDLRELETHIANELQHILDACPAELPSVSEDHAQAKAVLEIEQKIDRLVNALAESSDVAVVYISKMIEKLHAEREQLLHTAPHSASQIRRLDFSHSVFDEKKLIAAEFIERIELDGNHVNIIWKA

SEQ ID NO: 6904 - protein, 482 aa, Unknown
  Description of Unknown: Integrase B6905 sequence
  cd03768,PTHR30461:SF3,SM00857,G3DSA:1.10.10.2600, IPR036162,PF13408,PS51737,G3DSA:3.40.50.1390, IPR025827,IPR006119,IPR038109,PF07508, IPR011109,SSF53041,PTHR30461,PS51736,PF00239
MDAIYARQSIDKKGSLSIEGQIELCRKFTADDALVFSDKGFSGKNTKRPAFGELMEAVEAGRVKKIVVYRLDRFSRSLADFSQIWELLRKNDVEFLSVNEQFDTSSPMGRAMLNIVMTFAQLERETTAERVRDNYHHRVSLGAWPGGPAPYGYALSKAELDGRKVSSLIADENAKTVLHIFEEYVWSETSLRALAKALTEQGIHGPKREAWDNVTLSRILRNPVYAQADEAVYCYYLAQGIQIRQMPEVFDGVHGCLLIGKRDRSRGKYTKKDEQMLSLSTHEGIIPSSLWLRVQDKLSGQMQLPRANAGKYSWLTGLLKCSKCGYAVKVNYIKSEQRCKLVCSGRSNFGSCDESIDVDLRELETHIANELQRILDACPAELPSVSEDHAQAKAVLEIEQKIDRLVNALAESSDVAVVYISKMIEKLHAEREQLLHTAPHSASQIRRLDFSRSAFDEKKLIAAEFIERIELDGNHVNIIWKA

SEQ ID NO: 6905 - protein, 482 aa, Unknown
  Description of Unknown: Integrase B6906 sequence
  PTHR30461:SF3,SM00857,G3DSA:1.10.10.2600,IPR036162,PF13408, IPR025827,G3DSA:3.40.50.1390,PS51737,IPR006119,IPR038109, PF07508,IPR011109,SSF53041,PF00239,PTHR30461, PS51736,Coil,cd00338
MQAAAYARYSTEHQTSSSIAYQMRKIEEYCDSHGITVSARYADEAMSGTNTQRPAFQSLCQDAALRKFDAVVIYDISRGSRDVSDWFGFRKQMAVLGVQVISVEDHIGDILNPADYLTELITVGLGQHHVLTSRQKSMDSIATKAKTGQFLGGTPNFGYDIVNGRYVINPAEAKIVRKIYRMYAAGKSYGEILSAIGEVRGRRGKVMGKNSLYYLLRNERYIGVYSWCKYHHKIMGKYAGNLPNENAVRIEDSIPAIIDKDTWEAVQMRMDDKKHRACNKAKRSYLLSGLIECTECGASYVGHTSTNSRGYSTRYYCCGNKYRNHTCHSQNINAEELEVFVVQNLRQYLANLDYEQMAQQIASQINGATADLKEERKELADIIFQLENGTKAILKGIDYPELQEEMLRLRVRKSELEDIIQRGKEKNPVSVEKLVQLFRNAMERLDTDTKQVCKAMVKVYAHSNGDCDLEVGVHMNGNARHK

SEQ ID NO: 6906 - protein, 482 aa, Unknown
  Description of Unknown: Integrase B6907 sequence
  PTHR30461:SF3,SM00857,G3DSA:1.10.10.2600,IPR036162,PF13408, IPR025827,G3DSA:3.40.50.1390,PS51737,IPR006119,IPR038109, PF07508,SSF53041,IPR011109,PTHR30461,PS51736, cd00338,PF00239
MQAAAYARYSTEHQTESSIAYQMRKIEEYCNDHSITVIARYTDEAKSGTNTQRPAFQQLCKDAAQRKFDAVVIYDISRGSRDVSDWFGFRKQMAILGIQVISVEDRIGDILNPSDYLTELITVGLGQHHVLTSRQKSMDSIATKAKTGQFLGGTPNFGYNVVNGRYVINPAEAEIVQKIYRMYAAGKSYGEILAEIGEVRGKRGRVIGKNSLHYLLRNERYIGIYSWCKYHHKIMGKYAGNIPNENAVRIEDSIPAIIDKDTWEAVQIRMNDKKQRACNKAKRSYLLSGLIECTECGANYVGHTSTNKKGYSTRYYCCGNKYRNHTCHAKNLNAEELEIFVVQNLKQYLSDLDFSQMAQQVADEINGASVDLKAERKELADIIFQLNNGTKAILKGIDYPELQEEMFRLRVRKSELEDIIRRGEEKKPVSAVKLEQLFQHAVKQLDTDTKQICKSMVKIYAHPNGDCDLEVGVHISGCGSQI

SEQ ID NO: 6907 - protein, 482 aa, Unknown
  Description of Unknown: Integrase B6908 sequence
  PTHR30461:SF3,SM00857,IPR006118,G3DSA:1.10.10.2600,IPR036162, PF13408,IPR025827,G3DSA:3.40.50.1390,PS00397,IPR006119, IPR038109,PF07508,SSF53041,IPR011109,PTHR30461, Coil,cd00338,PF00239
MDEKKIEIGAAYIRVSTDDQTELSPDAQLRVILEAAKKDGIVIPQEFVFMEDRGRSGRRADNRPEFQRMISTARQNPSPFRYLYLWKFSRFARNQEESAFYKGILRRKCGVTIKSVSEPIMEGMFGRLVEMIIEWSDEFYSVNLSGEVLRGMTQKALEHGYQLRPCLGYDAVGHGRPYVINEEQYKIVEFIHKAFYDGKDMIWIAREANNRGYRTRFGNLFDVRSVRIIITNSFYVGLVKWNDITFQGTHECRESVTALFPANQERMNREHRPHGRRQAAACKHWLSGLLKCSICGASLGYNQTKDLTKRGHAFQCWKYSKGIHPGSCSVSSLKAEAAVMESLRSVLETGEVEYSYEQREKKLDTDKFDLIQKSMDRLEVKELRIREAYESGIDTIDEFKANKTRLQREREQLMEELEELRSQEEPEDVPGKEVLIERIRNVYDLLQSPDVDNDDKGNAVRSIIKKIVYIKESKTFCFYYYV

SEQ ID NO: 6908 - protein, 482 aa, Unknown
  Description of Unknown: Integrase B6909 sequence
  PTHR30461:SF3,IPR036162,PS51737,IPR011109,PTHR30461, PS00397,PF00239,G3DSA:1.10.10.2600,IPR006119,SSF53041, cd00338,SM00857,IPR025827,IPR038109,PS51736, IPR006118,PF13408,G3DSA:3.40.50.1390,PF07508,Coil
MKIAAAYIRVSTDDQTEYSPAVQLDDILEFAKKNDYHIPKEFIFTDEGISGRTAEKRPAFQSMIRAARKKTNHIDAILVHKYDRFSRNKDDAVLYKALLKKDGVKVISIKEPIPQDDKFAVIYESMLEAMAEYYSLNLSEEVKKTMRKKAENGDYQARAPFGYRNDKKSLVIHPEEAEMVRYVFESYANGVSIFALTRELNQRGFRTIRGNQWEFRTVRYLLNNVTYHGYARWTPSGKTDWGYDIPAAIVAKGSWEPIIDDDLWERVQERYTQQQRRHYPHKRPDTEGIHWLSGKVKCSSCGRSLVISRQYVRGGFEMQCGGYNHGQCHVSHSVSSNRLIPAILDTLRQIADSPDTQAVNFSIRTNNTNSGEIDAISAMIHRTQQKIIKAKEAYLAGIDTIDEYRETKRTSEKEISELQERLSALSEEQTFDADAFSKKVRNVLLTISGDSSMDDKKSAFSEIVEKVVYDKAANSIRLFLID

SEQ ID NO: 6909 - protein, 482 aa, Unknown
  Description of Unknown: Integrase B6910 sequence
  cd03768,PTHR30461:SF3,SM00857,IPR036162,PF13408, IPR025827,G3DSA:3.40.50.1390,PS51737,IPR006119,PF07508, IPR011109,SSF53041,PTHR30461,PS51736,PF00239
MDAIYARQSIDKKGSLSIEGQIELCRKFTVDDALVFSDKGFSGKNTKRPAFGELMEAVEAGRVKKIVVYRLDRFSRSLADFSQIWELLRKNDVEFLSVNEQFDTSSPMGRAMLNIVMTFAQLERETTAERVRDNYHHRVSLGAWPGGPAPYGYALSKVELDGRKVSSLIADENAKTVLHIFEEYVRSETSLRALAKTLTEQGIHGPKREAWDNVTLSRILRNPVYVQADEAVYCYYLAQGIQIRQMPEVFDGVHGCLLIGKRDRSRGKYTKKDEQMLSLSTHEGIIPSSLWLRAQDKLSGQMQLPRANAGKYSWLTGLLKCGKCGYAVKVNYIKSEQRCKLVCSGRSNFGNCDESIDVDLRELETHIANELQHILDACPAELPSVSEDHAQAKAVLEIEQKIDRLVNALAESSDVAVVYISKMIEKLHAEREQLLHTAPHSASQIRRLDFSHSVFDEKKLIAAEFIERIELDGNHVNIIWKA

SEQ ID NO: 6910 - protein, 482 aa, Unknown
  Description of Unknown: Integrase B6911 sequence
  PTHR30461:SF3,cd00338,SM00857,G3DSA:1.10.10.2600,IPR036162, PF13408,IPR025827,G3DSA:3.40.50.1390,PS51737,IPR006119, IPR038109,PF07508,IPR011109,SSF53041, PTHR30461,PS51736,Coil,PF00239
MQAAAYARYSTEHQTSSSIAYQMRKIEEYCDSHGITVSARYADEAMSGTNTQRPAFQSLCQDAALRKFDAVVIYDISRGSRDVSDWFGFRKQMAVLGVQVISVEDHIGDILNPADYLTELITVGLGQHHVLTSRQKSMDSIATKAKTGQFLGGTPNFGYDIVNGRYVINPAEAKIVRKIYRMYAAGKSYGEILSAIGEVRGRRGKVMGKNSLYYLLRNERYIGVYSWCKYHHKIMGKYAGNLPNENAVRIEDSIPAIIDKDTWEAVQMRMDDKKHRACNKAKRSYLLSGLIECTECGASYVGHTSTNSRGYSTRYYCCGNKYRNHTCHSQNINAEELEVFVVQNLRQYLANLDYEQMAQQIASQINGATADLKEERKELADIIFQLENGTKAILKGIDYPELQEEMLRLRVRKSELEDIIQRGKEKNPVSVEKLVQLFRNAMERLDTDTKQVCKAMVKVYAHSNGDCDLEVGVHMNGCGSQI

SEQ ID NO: 6911 - protein, 482 aa, Unknown
  Description of Unknown: Integrase B6912 sequence
  cd00338,SM00857,G3DSA:1.10.10.2600,IPR036162,PF13408, IPR025827,PS51737,G3DSA:3.40.50.1390,IPR006119,IPR038109, PF07508,IPR011109,SSF53041,PTHR30461,PS51736, Coil,PF00239
MQAAAYARYSTEHQTDSSIAYQMRKIEEYCAENGITISARYADEAMSGTNTQRPAFQSLCRDAAQRKFDAVVIYDISRGSRDVSDWFSFRKQMALLHIQVISVEDHIGDILNPADYLTELITVGLGQHHVLTSRQKSMDSIATKAKTGQFLGGTPNFGYDIVGGKYVVNPAESKIVQTIFQMYAAGKSYGEILDTIGEVRGKRGKIMGKNSLYYILRNERYAGVYSWCKYHSKIMGKYAGRTPNENAVRIEDSIPAIIDKDTWEAVQMRMEDKKHRACNKAKRSYLLSGLIECTECGASYVGHTSTNKRGYSTRYYCCGNKYRNHTCHSQNINAEELEVFVVQNLRQYLVNLDYEQMAQQIAGQINGATADLKAERKELANIIFQLENGTKAILKGIDYPELQEEMLRLRVRKSELEDIIQRGKEKNPVSVEKLVQLFRDAMERLDTDTKQVCKAMVKVYAHSNGDCDLEVGVHMDGKEPNL

SEQ ID NO: 6912 - protein, 482 aa, Unknown
  Description of Unknown: Integrase B6913 sequence
  PTHR30461:SF3,IPR036162,PS51737,IPR011109,PTHR30461, PS00397,PF00239,G3DSA:1.10.10.2600,IPR006119,SSF53041, SM00857,IPR025827,IPR038109,PS51736,cd03768, IPR006118,PF13408,G3DSA:3.40.50.1390,PF07508,Coil
MKAAIYVRVSTMEQAEEGYSLDEQVDKLKKYCEIKGWNIYKIYRDGGFSGANTDRPGLSEMINDAKLRAFDTVLVYKLDRLSRSQKDTLYLIEDILAANDIAFVSLNENFDTSTAFGKAMIGILAVFAQLEREQIRDRLLMGKIGRAKSGKAMAWGIPPLGYVLPESNREKYEIVPVEAEIVKKIYHDYIAGKLVAKICDELNAEGHIGKREPWVHANMKRTLTNPVYAGFIRYRGEVFEANHEPIVSKETFDLVQEQIELRQTRAYQKFNNPRPFQAKYLLSGLIKCGICGARFEVIQYKPRADGSRIRYYKCVSYSPKNHAPSMWKNSDGCTSPKYYLDDLEKELLSELEKLRDDPSLITSYVSKTNQIDVSGLKKRLKTLNNQLKKLVTLFIDNDFPKDVIESKKKIIMDEKKLILDKINEAESIKPEVSTNEVIDELGQIKISMFDLDYEEQKRIARKLIKEIILYPDKMEIHWAFAI

SEQ ID NO: 6913 - protein, 482 aa, Unknown
  Description of Unknown: Integrase B6914 sequence
  PTHR30461:SF3,IPR036162,PS51737,IPR011109,PTHR30461, PS00397,PF00239,G3DSA:1.10.10.2600,IPR006119,SSF53041, cd00338,SM00857,IPR025827,IPR038109,PS51736, IPR006118,PF13408,G3DSA:3.40.50.1390,PF07508,Coil
MRQGAVYIRVSTDDQTEYSPDAQLKRIKEYAQNHDILISQEYIYIENGVSGRTVAKREQFKKMIQKAKEKPKPFDVVLIHAYDRFARNVKESRIYKELLRDDLGIELISITEDFGSGKNSFLMEGIKDILNEYYSLNLRDEVLKGMYEKVSRGEVCGKAVLGYNLINKKLIINEEEAKTIKLIFDRYAYDNLGLLDIAKLVNQMGLRTKTGNKFENRTIKYILRNPIYIGKLRYSKKGRVDYHTYSVIKEEDLYDGIHERIIDEETWNTVQKRLDKNILFSVPHKIDTVNADYWLKGIVRCPYCNNTMIRHQKINLRCNGYGKGKCHNKTTINLKFLEKLVLNQMKQDFDGKKISLNTIKIKSNESNERDIIIRQINNTEAKFARIKEAYVDGIDTLEEYKKNKEIISREINILKEILDKIEKPKEVPKDNLKLKIKDIYDLLTNEKVEMSVKKNAAHMLINKIVVDEKNMKILLTYNESPF

SEQ ID NO: 6914 - protein, 482 aa, Unknown
  Description of Unknown: Integrase B6915 sequence
  PTHR30461:SF3,IPR036162,PS51737,IPR011109,PTHR30461, PS00397,PF00239,G3DSA:1.10.10.2600,IPR006119,SSF53041, cd00338,SM00857,IPR025827,IPR038109,PS51736, IPR006118,PF13408,G3DSA:3.40.50.1390,PF07508,Coil
MAQLAAAYIRVSTEDQTEYSPAAQLAALQRYADDNGYILDPAHIYRDEGISGRSASKRPGFQRMIAAAKRKDHPFDVILVHKLDRFARSREDSVVYKSMLLRECGVRVISITEPLSDDKTSILIEPLLEAMAEYYSVNLGEEVKKGMTQKAKQGGLQSTPPFGYTVQNHTLVPDPETADYVRQIFRRYVDGDAVFALARWLNGLGVRTRRGNPIENRTVEYILRNPVYVGFLRWNPSGKTRRKFDNPNIITAKGPHEPLIDQALFDAAQARLDEQKRTHPYKGKPVGVQRKHWLCGIVRCANCGATLILSGAQYGSYFKCNYAVRGSCSTTQHISAERLEAAVVQQLEADAEDGSSLRFEQAQRRAAAARDDTQRSIAALRRRVDRLRDAYLAGVETLEDYSHGKAALTAQIAALEAEQAAVADDPEDLSAGLRQDIRRVLATLRDDSVSTEDKHTAAAGLLQSVIFDRENNLLRVYYHAAQ

SEQ ID NO: 6915 - protein, 482 aa, Unknown
  Description of Unknown: Integrase B6916 sequence
  PTHR30461:SF3,cd00338,SM00857,IPR006118,IPR036162, PF13408,PS51737,IPR025827,G3DSA:3.40.50.1390,IPR006119, SSF53041,IPR011109,PTHR30461,PS00397,PS51736, Coil,PF00239
MTNQTETGQYVGGTNYIEEVAAYIRVSTQEQKLHGISLEAQVEKLTEYAENHGMKIVKFYKDEGVSGRKLIKKRPALQEMIQDAEKGKFKRIIFIKLDRFFRSVAEYHECMKRLSAGGVIWTATEEKYDLSTPSGEAFVNMKLTMAQFEADQAGERIRMVNEYKIKSGQPLFGAQCLPLGYTVTQPEDGERHKYVAKDAEMEAATNDLIEYALTHGTIRGAMSYINNKYDLHIGYNACAKTLKNEMICGEYRGNPNYCEPYIDRETFDRLQKLISRTPRSTGEKRTYYFTGLICCPKCGRRLVAGIFRSNTKWRKYTYKVYRCSAHFKEKNCEFSSVVLEQTLEDVLLEKLGSIVERKSIEAEDVAAADEKVGKYNIAELQAELDRLNYSWQKNRIKSAEEYDRKYDAIMEQIEAAQAEKEEMGNVDFDRIRDILQSDWRELYKALDDDHKRSFWRSFIEEIELDWGKGRYGKKDIKDITFF

SEQ ID NO: 6916 - protein, 482 aa, Unknown
  Description of Unknown: Integrase B6917 sequence
  PTHR30461:SF3,SM00857,IPR006118,G3DSA:1.10.10.2600,IPR036162, PS51737,G3DSA:3.40.50.1390,Coil,IPR006119,IPR038109, PF07508,SSF53041,IPR011109,PTHR30461,PS00397, PS51736,cd00338,PF00239
MQTAAAYIRVSTDDQVEFSPDSQMKAIQKYAKDHDMILPQDLIFADEGISGRHAENRPAFQRMIGLAKTKPKPFDVILLWKFSRFARNREDSIVYKSMLRKQCGIDVVSISEQVGEDKTSILIEALLEAMDEYYSINLAEEVRRGMQEKFSRGGVVSQPPYGYRMGDNVFVIQPDEAEIVRKIYHDFLSGAGRREIAVELNALGVVTRKGRPFDNRRVEYILSNPVYTGMLRRSKNGRQSSGDPFNQREDMQVIPGNHEPIIDRETFDATQKRLKEAKRLYVKHAHTEGRPFMLKGVVRCSNCGSTLVMAMRNTSLQCHLYAKGQCDVSHAISIAKANTAVLERIKEDLRLGAVGVNVENQHKKKKPTVDATSMLLQKEKQKLERIKEAYAAGVDTLQEYREQKQKITARIEELSKSATVEYHTPEQVSREIVKRIQASLEMLEDAAVSEELKNQAMRVLVEKIIFNRKKNLFEIVYRDPFA

SEQ ID NO: 6917 - protein, 482 aa, Unknown
  Description of Unknown: Integrase B6918 sequence
  cd03768,PTHR30461:SF3,SM00857,G3DSA:1.10.10.2600,IPR036162, PF13408,PS51737,G3DSA:3.40.50.1390,IPR025827,IPR006119, IPR038109,PF07508,IPR011109,SSF53041,PTHR30461, PS51736,PF00239
MDAIYARQSIDKKGSLSIEGQIELCRKFTVDDALVFSDKGFSGKNTKRPAFGELMEAVEAGRVKKIVVYRLDRFSRSLADFSQIWELLRKNDVEFLSVNEQFDTSSPMGRAMLNIVMTFAQLERETTAERVRDNYHHRVSLGAWPGGPAPYGYALSKAELDGRKVSSLIADENAKTVLHIFEEYVRSETSLRALAKTLTEQGIHGPKREAWDNVTLSRILRNPVYAQADEAVYCYYLAQGIQIRQMPEVFDGVHGCLLIGKRDRSRGKYTKKDEQMLSLSTHEGIIPSSLWLRVQDKLSGQMQLPRANAGKYSWLTGLLKCGKCGYAVKVNYIKSEQRCKLVCSGRSNFGSCDESIDVDLRELETHIANELQHILDACPAELPSVSEDHAQAKAVLEIDQKIDRLVNALAESSDVAVVYISKMIEKLHAEREQLLHTAPHSASQIRRLDFSHSVFDEKKLIAAEFIGRIELDGNHVNIIWKA

SEQ ID NO: 6918 - protein, 482 aa, Unknown
  Description of Unknown: Integrase B6919 sequence
  PTHR30461:SF3,IPR036162,PS51737,IPR011109,PTHR30461, PS00397,PF00239,G3DSA:1.10.10.2600,IPR006119,SSF53041, cd00338,SM00857,IPR025827,IPR038109,PS51736, IPR006118,PF13408,G3DSA:3.40.50.1390,PF07508,Coil
MRQGAVYIRVSTDDQTEYSPDAQLKRIKEYAQNHDILISQEYIYIENGVSGRTVAKREQFKKMIQKAKEKPKPFDVVLIHAYDRFARNVKESRIYKELLRDDLGIELISITEDFGSGKNSFLMEGIKDILNEYYSLNLRDEVLKGMYEKVSRGEVCGKAVLGYNLINKKLIINEEEAKTIKLIFDRYAYDNLGLLDIAKLVNQMGLRTKTGNKFENRTIKYILRNPIYIGKLRYSKKGRVDYHTYSVIKEEDLYDGIHERIIDEETWNTVQKRLDKNILFSVPHKIDTVNADYWLKGIVRCPYCNNTMIRHQKINLRCNGYGKGKCHNKTTINLKFLEKLVLNQMKQDFDGKKISLNTIKIKSNESNERDIIIRQINNTEAKFARIKEAYVDGIDTLEEYKKNKEIISREINILKEILDKIEKPKEVPKDNLKLKIKDIYDLLTNGKVEMSVKKNAAHMLINKIVVDEKNMKILLTYNESPF

SEQ ID NO: 6919 - protein, 482 aa, Unknown
  Description of Unknown: Integrase B6920 sequence
  PTHR30461:SF3,cd00338,SM00857,IPR006118,IPR036162, PF13408,PS51737,IPR025827,G3DSA:3.40.50.1390,IPR006119, SSF53041,IPR011109,PTHR30461,PS00397,PS51736, Coil,PF00239
MTNQTGTWQYVGGTNYIEEVAAYIRVSTQEQKLHGISLEAQVEKLTEYAENHGMKIVKFYKDEGVSGRKLIKKRPALQEMIQDAEKGKFKRIIFIKLDRFFRSVAEYHECMKRLSAGGVIWTATEEKYDLSTPSGEAFVNMKLTMAQFEADQAGERIRMVNEYKIKSGQPLFGAQCLPIGYTVTQPEDGERHKYVSKDAEMEAATSDLIEYALTHGTIRGAMSYINNKYDLHIGYNACAKTLKNEMICGEYRGNPNYCEPYIDRETFDRLQKLISRTPRSTGEKRTYYFTGLICCPKCGRRLVAGIFRSNTKWRKYTYKVYRCSAHFKEKNCEFSSVVLEQTLEDVLLEKLGSIVERKSIEAEDVAAADEKVGKYNIAELQAELDRLNYSWQKNRIKSAEEYDRKYDAIMEQIEAAHAEKEEMGNVDFDRIRDILQSDWRELYKALDDDHKRSFWRSFIEEIELDWGKGRYGKKDIKDITFF

SEQ ID NO: 6920 - protein, 482 aa, Unknown
  Description of Unknown: Integrase B6921 sequence
  PTHR30461:SF3,SM00857,G3DSA:1.10.10.2600,IPR036162,PF13408, IPR025827,G3DSA:3.40.50.1390,PS51737,IPR006119,IPR038109, PF07508,IPR011109,SSF53041,PF00239,PTHR30461, PS51736,Coil,cd00338
MQAAAYARYSTEHQTSSSIAYQMRKIEEYCDSHGITVSARYADEAMSGTNTQRPAFQSLCQDAALRKFDAVVIYDISRGSRDVSDWFGFRKQMAVLGIQVISVEDHIGDILNPADYLTELITVGLGQHHVLTSRQKSMDSIATKAKTGQFLGGTPNFGYDIVNGRYVINPAEAKIVRKIYRMYAAGKSYGEILSAIGEVRGRRGKVMGKNSLYYLLRNERYIGVYSWCKYHHKIMGKYAGNLPNENAVRIEDSIPAIIDKDTWEAVQMRMDDKKHRACNKAKRSYLLSGLIECTECGASYVGHTSTNSRGYSTRYYCCGNKYRNHTCHSQNINAEELEVFVVQNLRQYLANLDYEQMAQQIASQINGATADLKEERKELADIIFQLENGTKAILKGIDYPELQEEMLRLRVRKSELEDIIQRGKEKNPVSVEKLVQLFRNAMERLDTDTKQVCKAMVKVYAHSNGDCDLEVGVHMNGCGSQI

SEQ ID NO: 6921 - protein, 482 aa, Unknown
  Description of Unknown: Integrase B6922 sequence
  PTHR30461:SF3,SM00857,G3DSA:1.10.10.2600,IPR036162,PF13408, IPR025827,G3DSA:3.40.50.1390,PS51737,IPR006119,IPR038109, PF07508,IPR011109,SSF53041,PTHR30461,Coil, PS51736,cd00338,PF00239
MQAAAYARYSTEHQTSSSIAYQMRKIEEYCDSHGITVSARYADEAMSGTNTQRPAFQSLCQDAALRKFDAVVIYDISRGSRDVSDWFGFRKQMAVLGVQVISVEDHIGDILNPADYLTELITVGLGQHHVLTSRQKSMDSIATKAKTGQFLGGTPNFGYDIVNGRYVINPAEAKIVRKIYRMYAAGKSYGEILSAIGEVRGRRGKVMGKNSLYYLLRNERYIGVYSWCKYHHKIMGKYAGNLPNENAVRIEDSIPAIIDKDTWEAVQMRMDDKKHRACNKAKRSYLLSGLIECTECGASYVGHTSTNSRGYSTRYYCCGNKYRNHTCHSQNINAEELEVFVVQNLRQYLANLDYEQMAQQIASQINGATADLKTERKELADIIFQLENGTKAILKGIDYPELQEEMLRLRVRKSELEDIIRRGREKNPVSVEKLVQLFRDAMERLDTDTKQVCKAMVKVYAHSNGDCDLEVGVHMNGCGSQI

SEQ ID NO: 6922 - protein, 482 aa, Unknown
  Description of Unknown: Integrase B6923 sequence
  PTHR30461:SF3,IPR036162,PS51737,IPR011109,PTHR30461, PS00397,PF00239,G3DSA:1.10.10.2600,IPR006119,SSF53041, SM00857,IPR025827,IPR038109,PS51736,cd03768, IPR006118,PF13408,G3DSA:3.40.50.1390,PF07508,Coil
MMNTINKVAIYVRVSTNVQAEEGYSIDEQIDKLKSYCQIKDWTVYDIYKDGGFSGGNINRPALEKMIIDAKKKRFDTVLVYKLDRLSRSQKDTLFLIEDVFSKNDISFLSLQENFDTSTPFGKAMVGLLSVFAQLEREQIKERMQLGMIGRAKSGKPMMFTNVSFGYTYSPKTQQLTINQAEAVIVKQIFNEFLGGMSPLRLMAYLNENNILRNGKEWNYQGIQRILRNPVYIGKIKYNNVIYPGLHEPIIDEESYYKAQKLLDARQDEMRIKGKNRQFKAKYMLSGTAKCGYCGAPLRIKIGNKRLDGTRLKVYQCCNRYPRKYAVVTYNDNKKCNSGNYQKEDLESYVIAEIRKLQLKPEKIDKLFNKVAKIDTVQINKQIASIDNKINRLNDLYLNDMIDIDKLKADAEKFKEQKRVLEKELDKDLKIQEQEKNKEDFKKTIGFKDVTKLDYKEQSFIVKSLIDKILVKKGFIKILWKI

SEQ ID NO: 6923 - protein, 481 aa, Unknown
  Description of Unknown: Integrase B6924 sequence
  PTHR30461:SF3,IPR036162,PS51737,IPR011109,PTHR30461, PS00397,PF00239,G3DSA:1.10.10.2600,IPR006119,SSF53041, cd00338,SM00857,IPR025827,IPR038109,PS51736, IPR006118,PF13408,G3DSA:3.40.50.1390,Coil
METGKFIGGENYIEEVAAYIRVSTQEQKLHGISLEAQVEKLTEYAQNHGMKIVKFYKDEGVSGRKLIKNRPALQEMIQDAEKGKFKRIIFIKLDRFFRSVAEYHECMKRLSVGGVIWTATEEKYDLSTPSGEAFVNMKLTMAQFEADQAGERIRMVNEYKIKSGQPLYGSQCLPFCYAVGCPEEGERHKYIGKRDEEIMLDLIDYVMKNHSVRAGMNYINQKYNRNFLYNAVMNALKNEMICGTYKGNPNYCEPYITREEFNKLQKIISRNPRTTEKRTYLFTGLIRCPRCGYRLSGGQYYTYSRPNKETGKREKRRGYLAYKCGRSRVNNQCDFNNIVQEQRLEKMLLEQLDDIIAGKKLQAISVKSAGKKVSKHDVEALTAELDRLNYAWQKGRIKSVEEYDKSYDDLMDKIHAAENEQAELNQEPDYEKIQAVLSNGWQEIYKELDGEHKRAFWRSFIEEIQVVWTKDKKEIKDIIFF

SEQ ID NO: 6924 - protein, 481 aa, Unknown
  Description of Unknown: Integrase B6925 sequence
  PTHR30461:SF3,SM00857,G3DSA:1.10.10.2600,IPR036162,PF13408, IPR025827,G3DSA:3.40.50.1390,PS51737,IPR006119,IPR038109, PF07508,IPR011109,SSF53041,PTHR30461,Coil, cd00338,PF00239
MTIIGEYCDRAISGKTDNRPNFQRLIKDSEKGQFEAVIMYTLDRFARNRYDSAIYKAKLKKNGVKVYYAKQPMPDTPEGIILESVLEGYAEYYSENLSRNIKRGLKENALQCLAVGGAGMPLGYTVGEDRKYKIDPVGAKIVQEIFQMYADGMSATQIINECNRRGYKTSRGNAFNKNSLRTMLKNDRYIGVYRFADVVVEDGVPPIISRELFEKVQATLRHNYSARARNKAKDDYLLTTKLFCGHCGSSMVGESGTSRSGKLHHYYKCIDRKRNHKCKKAVEKKDWIEELVVRFTVQNVLNDETIERIARKTMEIIEKESADTSYLNGLQNELKDIKKKIKNLMNAIEQGIITPTTKERMDELEAEKNDLEGKIAREEMKKPLLTKERIMHWLNSFKSGDIDDIEYRRRVVDTLVNSVYVYDDGEKGRRIVFTFNISGQNTATLSCSDIACMAPPKGANPNTLFFVKHCFGFVMNIEEVG

SEQ ID NO: 6925 - protein, 481 aa, Unknown
  Description of Unknown: Integrase B6926 sequence
  PTHR30461:SF3,SM00857,G3DSA:1.10.10.2600,IPR036162,PF13408, IPR025827,G3DSA:3.40.50.1390,PS51737,IPR006119,IPR038109, PF07508,SSF53041,IPR011109,PF00239,PTHR30461, Coil,cd00338
MTIIGEYCDRAISGKTDNRPNFQRLIKDSEKGQFEAVIMYTLDRFARNRYDSAIYKAKLKKNGVKVYYAKQPMPDTPEGIILESVLEGYAEYYSENLSRNIKRGLKENALQCLAVGGAGMPLGYTVGEDRKYKIDPVGAKIVQEIFQMYADGMSATQIINECNRRGYKTSRGNAFNKNSLRTMLKNDRYIGVYRFADVVVEDGVPPIISRELFEKVQATLRHNYSARARNKAKDDYLLTTKLFCGHCGSSMVGESGTSRSGKLHHYYKCIDRKRNHKCKKAVEKKDWIEELVVRFTVQNVLNDETIERIARKTMEIIEKESADTSYLNGLQNELKDIKKKIKNLMNAIEQGIITPTTKERMDELEAEKNDLEGKIAREEMKKPLLTKERIIHWLNSFKSGDIDDIEYRRRVVDTLVNSVYVYDDGEKGRRIVFTFNISGQNTATLSCSDIACMAPPKGANPNTLFFVKHCFGFVMNIEEVG

SEQ ID NO: 6926 - protein, 481 aa, Unknown
  Description of Unknown: Integrase B6927 sequence
  PTHR30461:SF3,SM00857,G3DSA:1.10.10.2600,IPR036162,PF13408, IPR025827,G3DSA:3.40.50.1390,PS51737,IPR006119,IPR038109, PF07508,SSF53041,IPR011109,PTHR30461,Coil, PS51736,cd00338,PF00239
MTVINEYCDRAISGKTDNRPSFQRLIKDSEKGQFEAVIMYTLDRFARNRYDSAIYKAKLKKHGVRVFYAKQPMPDTPEGIILESVLEGYAEYYSENLSRNIKRGLKENALQCIATGGAGVALGYTVGEDRKYKIDPVGAKIVQEVFEMYADGMSATQIINVCNERGYKTSRGNPFNKNSLRTMLKNDKYIGVYRFMDVVVEGGVPAIISKELFDKVQAKLQHNFTARARNKAKEDYLLTTKLFCGHCGSPMVGESGTSKTGKLHFYYKCIDRKRKHVCTKKVEKKDWIEELVTRFTVQEVLTDENIDRIATKAMEIIEKESADTTYLEGLQNELKEVQKKIKNIMTAIEQGIITSTTKDRLEELESEKNEIEGRISREEIKKPLLTKERIVYWLLSFKSGDINDIEYRRRVIDTLVNSVYIYDDGDKGRRIVLTFNVSGQNTATISCSDIACSAPPKGANPNSLFFVKHCFGFVVHIEEVG

SEQ ID NO: 6927 - protein, 481 aa, Unknown
  Description of Unknown: Integrase B6928 sequence
  PTHR30461:SF3,IPR036162,PS51737,IPR011109,PTHR30461, PS00397,PF00239,G3DSA:1.10.10.2600,IPR006119,SSF53041, cd00338,SM00857,IPR025827,IPR038109,PS51736, IPR006118,PF13408,G3DSA:3.40.50.1390,PF07508,Coil
MSELRTAAAYIRVSTDDQVELSPESQLVKVREYAAKNDMLLLPQYIFHDDGISGRDAKKRPGFQQMIAAAKDPAHPFDVIIVWKYSRFARNQEESIFYKSILRSKCKVEVISVSEPLIAGPFGSLIERIIEWMDEFYSVRLSEEVKRSMTVNAKNGAFQASPPFGYKSENHTLAIIPDEAEIVREIFRRFVDGEPMFALAKSVNARNIRTHRGNPFENRTVDYILNNPVYIGKLRWTPTGKVHRDFRNPDSIIADSSHPAIIDVPTWEAAQARILQLKQSYRYYAKPSTERKHWLCGIVRCATCGRTLTFTAPHYMQCSGRLKARCTTSQHTTIEALEEAFLQQLQHDMTFSEFVDCTVQRVSSSNALQDLHQRRSRVSGRLSRLRDAYLDGAETLEDYKAARQQLQKQLDEIDTDIKKAETASIPDTASALRSAIASTLETLRSPTATIAQKYESAQRLIEKCCFDKSRMLLTVYYKLTF

SEQ ID NO: 6928 - protein, 481 aa, Unknown
  Description of Unknown: Integrase B6929 sequence
  PTHR30461:SF3,IPR036162,PS51737,IPR011109,PTHR30461, PS00397,PF00239,G3DSA:1.10.10.2600,IPR006119,SSF53041, cd00338,SM00857,IPR025827,IPR038109,PS51736, IPR006118,PF13408,G3DSA:3.40.50.1390,Coil
METGKFIGGENYIEEVAAYIRVSSQEQKLHGISLEAQVEKLTEYAQNHGMKIVKFYKDEGVSGRKLIKNRPALQEMIQDAEKRKFKRIIFIKLDRFFRSVAEYHECMKRLSVGGVIWTATEEKYDLSTPSGEAFVNMKLTMAQFEADQAGERVRMINEYKIKTGQPLYGSQCLPFCYAVGMPEEGERHKYIGKRDEEIMRDLIDYVMKNHSVRAGMSYINQKYNRNFLYNAVMNALKNEMICGTYKGNPNYCEPYITREEFNQLQKIISRNPRTTEKRTYLFTGLIRCPRCGYRLSGGQYYTYSRPNKETGKREKRRGYLAYKCGRSRVNNQCDFNNIVQEQRLEKMLLEQLGDIIAGKKLQAISVKSAGKKVSKHDVEALTAELDRLNYAWQKGRIKSVEEYDKSYDDLMDKIHAAENEQAELNQEPDYEKIQAVLSNGWQEIYKELDGEHKRAFWRSFIEEIQVVWSKDKKEIKDIIFF

SEQ ID NO: 6929 - protein, 481 aa, Unknown
  Description of Unknown: Integrase B6930 sequence
  PTHR30461:SF3,IPR036162,PS51737,IPR011109,PTHR30461, PS00397,PF00239,G3DSA:1.10.10.2600,IPR006119,SSF53041, cd00338,SM00857,IPR025827,IPR038109,PS51736, IPR006118,PF13408,G3DSA:3.40.50.1390,PF07508,Coil
MPEPRIAAAYIRVSTDDQMELSPDSQMEKIREYAAKNGLLLLSEYIFHDDGISGRAAEKRPGFQQMIATAKDPSHPFDVIIVWKFSRFARNQEESIFYKSILRSKCKVDVVSVSEPLIAGPFGSLIERIIEWMDEFYSVRLAEEVKRSMTVNAKNGTLQATPSFGYRVENRQLVIVPEEAEIIREIFRRFISGDAMFRIAKDLSARGVRTHRGNPFENRTIDYILNNPVYLGKLRWTPTGRTRRNFKNEDSIIADALHEPIIDAETWDAAQARCAELKKSYKRYGKPSSERKHWLCGVVRCSTCGATLIWASPHFMKCNNYAHGRCTTAQHIAVEALEESFLAQLQHDLTFAESVACVVQAAKPAHSDQRLQQQRSRIVSRIDRLRESYLDGVETLETYKVARQQMQAQLDDLDAQIAESAAVPVVDAAALLRNAIAAVLETLRSPTATVAQKYESAMSIIDRCTFDKSQMLLAISYKFIF

SEQ ID NO: 6930 - protein, 481 aa, Unknown
  Description of Unknown: Integrase B6931 sequence
  PTHR30461:SF3,IPR036162,PS51737,IPR011109,PTHR30461, PS00397,PF00239,G3DSA:1.10.10.2600,IPR006119,SSF53041, cd00338,SM00857,IPR025827,IPR038109,PS51736, IPR006118,PF13408,G3DSA:3.40.50.1390,PF07508,Coil
MPEPRIAAAYIRVSTDDQMELSPDSQMEKIREYAAKNGLLLLSEYIFHDDGISGRAAEKRPGFQQMIATAKDPSHPFDTIIVWKFSRFARNQEESIFYKSILRSKCKVDVVSVSEPLIAGPFGSLIERIIEWMDEFYSVRLAEEVKRSMTVNAKNGTLQATPSFGYRAEDRRLVVVPEEAEIIREIFRRFISGDAMFRIAKDLSARGVRTHRGNPFENRTIDYILNNPVYLGKLRWTPTGRTHRNFKNDDSIIADALHEPIIDAETWDAAQARCAELKKSYKRYGKPSSERKHWLCGVVRCSTCGATLIWASPHFMKCNNYAHGRCTTAQHIAVEALEESFLAQLQHDLTFAESVACVVQAAKPAHSDQRLQQQRARIVSRIDRLRESYLDGVETLETYKAARQQMQAQLDDLDAQIAESAAVPVVDTAALLRNAIAAVLETLRSPTATVAQKYESAMSIIDRCTFDKSQMLLAISYKFIF

SEQ ID NO: 6931 - protein, 481 aa, Unknown
  Description of Unknown: Integrase B6932 sequence
  SM00857,G3DSA:1.10.10.2600,IPR036162,PF13408,PS51737, IPR025827,G3DSA:3.40.50.1390,IPR006119,IPR038109,PF07508, IPR011109,SSF53041,PTHR30461,Coil,PS51736, cd00338,PF00239
MPGTNSIPGTAAAYIRVSDDKQDEYSPDSQLKLIRDYAKRNGYYVPDEFVFYDDGISAKTAAKRPKFIEMIGIAKQKNPPFDKILVWKFSRFARNQEESIVYKSLLRKNGVEVISISEPLIDGAFGSLIERIIEWMDEYYLVRLSGEVKRGMKEKASRGEAMSGRVFGYLPKDGTLIPHPEEAPLVRMIFDDYLNGKGARQIAIKLQQLGVKTIRGNDPDNRFVDYVLHNPVYCGKVRWSTDGCAASKRDYNNENIMLVNGNFEPIISEHTFNAAQNKIADQKKRYPKYQRNEAPTEYMLRGLVRCDSCGATLTLQRASKALQCHNYARGSCKVSHSISIAKANKTVIEALQYAVDHLDFNILPDEEKHTPEDYSKPLAALRKKLARTKEAYINGVDTLEEYKENKQRITEEIAKLEKKQAANTALPEVDKEAFAAKVRGVIAVINSPDTTEQAKNEALRSVLAKIIYHKPAQSLELYFYA

SEQ ID NO: 6932 - protein, 481 aa, Unknown
  Description of Unknown: Integrase B6933 sequence
  PTHR30461:SF3,IPR036162,PS51737,IPR011109,PTHR30461, PS00397,PF00239,G3DSA:1.10.10.2600,IPR006119,SSF53041, SM00857,IPR025827,IPR038109,PS51736,cd03768, IPR006118,PF13408,G3DSA:3.40.50.1390,PF07508,Coil
MKTTNKVAIYVRVSTTSQVEEGYSIDEQKAKLSSYCDIKDWNVYKVYTDGGFSGANTDRPALESLIKDAKKRKFDTVLVYKLDRLSRSQKDTLYLIEDIFIKNNIAFLSLQENFDTSTPFGKAMIGLLSVFAQLEREQIKERMQLGKIGRAKAGKSMMWARTSYGYDYHRGTGTITVNPVQALAVKFIFESYLRGRSITKLRDDLNENYPKHVPWSYRAVRAILDNPVYCGFNQFKGEIYPGNHEPIITEEVYNKTKEELKIRQRTAAENVNPRPFQAKYILSGIGQCGYCGAPLKIILGVKRKDGSRFKKYECHQRHPRTLRGITTYNDNKKCDSGFYYKDDLEAYVLTEISKLQDDAGYLDKIFSEDSAETIDRESYKRQIEELSKKLSRLNDLYIDDRITLEELQSKSAEFISMRATLETELENDPTLRRDKRKADMRKLLNAEKVFSMDYERQKILVRGIINKVQVTADKVVIRWKV

SEQ ID NO: 6933 - protein, 481 aa, Unknown
  Description of Unknown: Integrase B6934 sequence
  PTHR30461:SF3,IPR036162,PS51737,IPR011109,PTHR30461, PS00397,PF00239,G3DSA:1.10.10.2600,IPR006119,SSF53041, cd00338,SM00857,IPR025827,IPR038109,PS51736, IPR006118,PF13408,G3DSA:3.40.50.1390,PF07508,Coil
MPEPRIAAAYVRVSTDDQMELSPDSQMEKIREYAAKNGLLLLSEYIFHDDGISGRAAEKRPGFQQMIATAKDPSHPFDVIIVWKFSRFARNQEESIFYKSILRSKCKVDVVSVSEPLIAGPFGSLIERIIEWMDEFYSVRLAEEVKRSMTVNAKNGTLQATPSFGYRVENRQLVIVPEEAEIIREIFRRFISGDAMFRIAKDLSARGVRTHRGNPFENRTIDYILNNPVYLGKLRWTPTGRTRRNFKNEDSIIADALHEPIIDAETWGAAQARCAELKKSYKRYGKPSSERKHWLCGVVRCSACGATLIWANPHFMKCNNYAHGRCTTTQHIAVEALEESFLAQLQHDLTFAESVACVVQAANPAHSDQRLQQQRAHIVSRIDRLRESYLDGVETLETYKAARQQMQAQLDDLDAQIAESAAVPVVDAAALLRNAISAVLETLRSPTATVAQKYESAMSIIDRCTFDKSQMLLAISYKFIF

SEQ ID NO: 6934 - protein, 481 aa, Unknown
  Description of Unknown: Integrase B6935 sequence
  PTHR30461:SF3,SM00857,G3DSA:1.10.10.2600,IPR036162,PF13408, PS51737,IPR025827,G3DSA:3.40.50.1390,IPR006119,IPR038109, PF07508,SSF53041,IPR011109,PTHR30461,Coil, PS51736,cd00338,PF00239
MTIIGEYCDRAISGKTDNRPNFQRLIKDSEKGQFEAVIMYTLDRFARNRYDSAIYKAKLKKNGVRVYYAKQPMPDTPEGIILESVLEGYAEYYSENLSRNIKRGMKENALQCLANGGAGMPLGYIVGEDRKYKVDPVGAKIVQEIFQMYADGMSATQIINECNKRGYKTSRGNAFNKNSLRTMLKNDRYIGIYRFADVIVEDGIPPIISRELFNKVQAMLKHNYSARARKKAKDDYLLTTKLFCGHCGSAMVGESGTSKSGKLHHYYKCIDRKRNRKCKKAVEKKDWIEELVVRFTVQKVLTDENIERIAEKAMEIIEKESADTTYIDGLQSKLKDIKKKIKNLMNAIEQGIITSTTKERMNELELEKNEVEGKIAREEMKKPLLTKERIMYWLYSFKSGDIDDIEYRRRVIDTLVNSVYVYDDGEKGRRIVFTFNISGQNTATLSCSDIACAAPPNSANPNTLFFVKHCFGFVMNIEEVG

SEQ ID NO: 6935 - protein, 481 aa, Unknown
  Description of Unknown: Integrase B6936 sequence
  PTHR30461:SF3,IPR036162,PS51737,IPR011109,PTHR30461, PS00397,PF00239,G3DSA:1.10.10.2600,IPR006119,SSF53041, cd00338,SM00857,IPR025827,IPR038109,PS51736, IPR006118,PF13408,G3DSA:3.40.50.1390,PF07508,Coil
MPEPRIAAAYIRVSTDDQMELSPDSQMEKIREYAAKNGLLLLSEYIFHDDGISGRAAEKRPGFQQMIATAKDPSHPFDVIIVWKFSRFARNQEESIFYKSILRSKCKVDVVSVSEPLIAGPFGSLIERIIEWMDEFYSVRLAEEVKRSMTVNAKNGSLQATPSFGYRVENRQLVIVPEEAEIIREIFRRFISGDAMFCIAKDLSSRGIRTHRGNPFENRTIDYILNNPVYLGKLRWTPTGRTCRNFKNEDSIIADALHEPIIDAETWDAAQARCAELKKSYKRYGKPSSERKHWLCGVVRCSACGATLIWVSPHFMKCNNYAHGRCTTTQHIAVEALEESFLAQLQHDLTFAESVACVVQAAKPAHSDQRLQQQRARIVSRIDRLRESYLDGVETLETYKAARQQMQAQLDDLDAQIAESAAVPVVDAAALLRNAIAAVLETLRSPTATVAQKYESAMSIIDRCTFDKSQMLLAISYKFIF

SEQ ID NO: 6936 - protein, 481 aa, Unknown
  Description of Unknown: Integrase B6937 sequence
  PTHR30461:SF3,IPR036162,PS51737,IPR011109,PTHR30461, PS00397,PF00239,G3DSA:1.10.10.2600,IPR006119,SSF53041, SM00857,IPR025827,IPR038109,PS51736,cd03768, IPR006118,PF13408,G3DSA:3.40.50.1390,PF07508,Coil
MDKINKVALYVRVSTTSQMEEGYSIEEQKAKLESYCDIKDWHIYKVYTDGGFSGSTTERPALEQLIKDAQSKLFDTVLVYKLDRLSRSQKDTLYLIEDIFLKNNIEFVSLLENFDTSTPFGRAVIGLLSVFAQLEREQIKERMQLGKLGRAKAGKSMMWAKTSYGYNYDKETGSMTVNEYEALAVKEIFSSYLAGMSITKLRDKINDEYPKQPAWSYRTIRGILANPVYCGLNQYKGQTFQGTHKPIISLVDFEQTQRELAKRQQKAKELSNPRPFQAKYMLSGLAQCGYCHAPLKVILGQKRKDGSRFKRYECYQRHPRTTKGVTVYNDNKKCDSGYYDMELLEHYVLTRIAQLQNDPDKIQELFSDDTSPEIDKQAIQKQIDSLTLKLSKLNDLYLDDRITLDELRSKSADFIKQRATLEEEIKKAVTDKQAGKREKIEKLLDASSVLDMSYDNQKVIVRELIDKVQVTSDKIVIRWKI

SEQ ID NO: 6937 - protein, 481 aa, Unknown
  Description of Unknown: Integrase B6938 sequence
  PTHR30461:SF3,SM00857,G3DSA:1.10.10.2600,IPR036162,PF13408, IPR025827,G3DSA:3.40.50.1390,PS51737,IPR006119,IPR038109, PF07508,SSF53041,IPR011109,PF00239,PTHR30461, PS51736,Coil,cd00338
MGLKIGAAYIRVSDERQDEYSPDSQLKLIRKYAKNNDYIIPDEYIFYDDGISAKSTKKRAEFNRMIALAKSDDKPFESIFVWKFSRFARNQEESIVYKSLLKKKGVSVISISEPIVDDVFGSLIERIIEWMDEYYLIRLSGEVKRGMTEKASRGEPMCHPALGYDLINNQYVPNAESVYIRRIFESYLNGMGEREIARNLALQGMRTHRGNPPDNRLIDYILHNPVYIGKIRWSTNGRAASTRDYDNENIMIVDGTHEPLIDLDTWNEVQELLMENKHKYKRYQRREQPVQFMLKGLVRCDHCGATLVMQSTKCPSIQCHNYARGSCGVSHSLSINKANKAVIEALEAAVNTLQFTIEPAAVKSESPGLDFDKLISSERNKLKKIKEAYLSGVDTLEEYQQSKAEIQETIDRLENEQKASQEKADCNKVSKKEFSKRVINVLDFIKSPDVSEQAKNEALRTIISKIIYVKPENRLDIIFYT

SEQ ID NO: 6938 - protein, 481 aa, Unknown
  Description of Unknown: Integrase B6939 sequence
  SM00857,G3DSA:1.10.10.2600,IPR036162,PF13408,IPR025827, G3DSA:3.40.50.1390,PS51737,IPR006119,IPR038109,PF07508, SSF53041,IPR011109,PTHR30461,Coil,PS51736, cd00338,PF00239
MPGTNSIPGTAAAYIRVSDDKQDEYSPDSQLKLIRDYAKRNGYYVPDEFVFYDDGISAKTAAKRPKFIEMIGIAKQKNPPFDKILVWKFSRFARNQEESIVYKSLLRKNGVEVISISEPLIDGAFGSLIERIIEWMDEYYLVRLSGEVKRGMKEKASRGEAMSGRVFGYLPKDGTLIPHPEEAPLVRMIFDDYLNGKGARQIAIKLQQLGVKTIRGNDPDNRFVDYVLHNPVYCGKVRWSTDGCAASKRDYNNENIMLVNGNFEPIISEQTFNAAQNKIADQKKRYPKYQRNEAPTEYMLRGLVRCDSCGATLTLQRASKALQCHNYARGSCKVSHSISIAKANKTVIEALQYAVDHLDFNILPDEEKHTPEDYSKPLAALRKKLARTKEAYINGVDTLEEYKDNKQRITEEIAKLEKKQAANTALPEVDKEAFAAKVRGVIAVINSPDTTEQAKNEALRSVLAKIIYHKPAQSLELYFYA

SEQ ID NO: 6939 - protein, 481 aa, Unknown
  Description of Unknown: Integrase B6940 sequence
  PTHR30461:SF3,SM00857,G3DSA:1.10.10.2600,IPR036162,PF13408, PS51737,IPR025827,G3DSA:3.40.50.1390,IPR006119,IPR038109, PF07508,IPR011109,SSF53041,PF00239,PTHR30461, PS51736,Coil,cd00338
MTIIGEYCDRAISGKTDNRPNFQRLIKDSEKGQFEAVIMYTLDRFARNRYDSAIYKAKLKKNGVRVYYAKQPMPDTPEGIILESVLEGYAEYYSENLSRNIKRGMKENALQCLANGGAGMPLGYIVGEDRKYKIDPVGAKIVQEIFQMYADGMSATQIINECNKRGYKTSRGNAFNKNSLRTMLKNDRYIGIYRFADVIVENGIPPIISRELFDKVQAMLKHNYSARARKKAKDDYLLTTKLFCGHCGSAMVGESGTSKSGKLHHYYKCIDRKRNRKCKKAVEKKDWIEELVVRFTVQKVLTDENIERISARAMEIIEKESTDTTYIDGLQNELKDIKKKIKNLMNAIEQGIITSTTKERMNELELEKNEVEGKIAREEMKKPLLTKERIMYWLYSFKSGDIDDIEYRRRVIDTLVNSVYVYDDGEKGRRIVFTFNISGQNTATLSCSDIACAAPPNSANPNTLFFIKHCFGFVVNIEEVG

SEQ ID NO: 6940 - protein, 481 aa, Unknown
  Description of Unknown: Integrase B6941 sequence
  PTHR30461:SF3,SM00857,IPR006118,G3DSA:1.10.10.2600,IPR036162, PS51737,G3DSA:3.40.50.1390,Coil,IPR006119,IPR038109, PF07508,IPR011109,SSF53041,PTHR30461,PS00397, PS51736,cd00338,PF00239
MKKGAIYVRVSSEEQARDGYSIDAQIKALKDYAIKNDIFLEEQYIYKDEGISGRVAKKRPAFMEMIKTAKSKPKKFDVILVHKFDRFSRNREDSIVYKSLLKKECGINVISITEHLDPDDKMSIILEAFLEAMAEYYSINLSEEVKKGQLEKHSQGGLQTNPSFGYNVENNKLIINEQEEKIVKLIFESYAIENKSMMDIAKKVNSLGILTKRGNKFENRTIYYILNNPTYIGKLRYTPGRKNTYDFNDPNTILVDGKHTPIITNELWDLTQLKLSKNNIWKKPKSRIDYSIKHWSKGIIRCKECNCTLVTSGVGKYRCNGYNKGKCSNHTTININEAENLILVQIKKDFNEGTINNIVSNKKEKKSINEYDIITSSITSLEEKEERIKQSYINGIDTLEEYKQNKEMLLKEKEKLTTKLLTLEKPSIEKYKKEIIENGKKVYEILTNDKISLEEKNDIVNKLINKVEYDGEINNLTIFYN

SEQ ID NO: 6941 - protein, 481 aa, Unknown
  Description of Unknown: Integrase B6942 sequence
  PTHR30461:SF3,IPR036162,PS51737,IPR011109,PTHR30461, PS00397,PF00239,G3DSA:1.10.10.2600,IPR006119,SSF53041, cd00338,SM00857,IPR025827,IPR038109,PS51736, IPR006118,PF13408,G3DSA:3.40.50.1390,PF07508,Coil
MPEPHIAAAYIRVSTDDQMELSPDSQMEKIREYAAKNGLLLLSEYIFHDDGISGRAAEKRPGFQQMIATAKDPSHPFDVIIVWKFSRFARNQEESIFYKSILRSKCKVDVVSVSEPLIAGPFGSLIERIIEWMDEFYSVRLAEEVKRSMTVNAKNGALQATPSFGYRVENRQLVIVPEEAEIIREIFRRFISGDAMFRIAKDLSARGVRTHRGNPFENRTIDYILNNPVYLGKLRWTPTGRTHRNFKNDDSIIADALHEPIIDAETWNAAQARCAELKKSYKRYGKPSSERKHWLCGVVRCSTCGATLIWASPHFMKCNNYAHGRCTTAQHIAVEALEESFLAQLQHDLTFAESVACVVQAAKPAHSDQRLQQQRARIVSRIDRLRESYLDGVETLETYKAARQQMQAQLDDLDAQIAESAAVPVVDTAALLRNAIAAVLETLRSPTATVAQKYESAMSIIDRCTFDKSQMLLAISYKFIF

SEQ ID NO: 6942 - protein, 481 aa, Unknown
  Description of Unknown: Integrase B6943 sequence
  PTHR30461:SF3,IPR036162,PS51737,IPR011109,PTHR30461, PS00397,PF00239,G3DSA:1.10.10.2600,IPR006119,SSF53041, cd00338,SM00857,IPR025827,IPR038109,PS51736, IPR006118,PF13408,G3DSA:3.40.50.1390,PF07508,Coil
MPEPRIAAAYVRVSTDDQMELSPDSQMEKIREYAAKNGLLLLSEYIFHDDGISGRAAEKRPGFQQMIATAKDPSHPFDVIIVWKFSRFARNQEESIFYKSILRSKCKVDVVSVSEPLIAGPFGSLIERIIEWMDEFYSVRLAEEVKRSMTVNAKNGALQATPSFGYRAEDRRLVVVPEEAEIIREIFRRFISGDAMFRIAKDLSARGVRTHRGNPFENRTIDYILNNPVYLGKLRWTPTGRTHRNFKNDDSIIADALHEPIIDAETWDAAQARCAELKKSYKRYGKPSSERKHWLCGVVRCSTCGATLIWASPHFMKCNNYAHGRCKTTQHIAVEALEESFLAQLQHDLTFAESVACVVQAANPAHSDHRLQQQRAHIVSRIDRLRESYLDGVETLETYKAARQQMQAQLDDLDAQIAESAAVPVVDAAALLRNAISAVLETLRSPTATVAQKYESAMSIIDRCTFDKSQMLLAISYKFIF

SEQ ID NO: 6943 - protein, 481 aa, Unknown
  Description of Unknown: Integrase B6944 sequence
  SM00857,G3DSA:1.10.10.2600,IPR036162,PF13408,IPR025827, G3DSA:3.40.50.1390,PS51737,IPR006119,IPR038109,PF07508, IPR011109,SSF53041,PTHR30461,Coil,PS51736, cd00338,PF00239
MPGTNSIPGTAAAYIRVSDDKQDEYSPDSQLKLIRDYAKRNGYYVPDEFVFYDDGISAKTAAKRPKFIEMIGIAKQKNPPFDKILVWKFSRFARNQEESIVYKSLLRKNGVEVISISEPLIDGAFGSLIERIIEWMDEYYLVRLSGEVKRGMKEKASRGEAMSGRVFGYLPKDGTLFPHPEEAPLVRMIFDDYLNGKGARQIAIKLQQLGVKTIRGNDPDNRFVDYVLHNPVYCGKVRWSTDGCAASKRDYNNENIMLVNGSFEPIISEQTFNAAQNKIADQKKRYPKYQRNEAPTEYMLRGLVRCDSCGATLTLQRASKALQCHNYARGSCKVSHSISIAKANKTVIEALQYAVDHLDFNILPDEEKHTPEDYSKPLAALRKKLARTKEAYINGVDTLEEYKDNKQRITEEIAKLEKKQAANTALPEVDKEAFAAKVRGVIAVINSPDTTEQAKNEALRSVLAKIIYHKPAQSLELYFYA

SEQ ID NO: 6944 - protein, 481 aa, Unknown
  Description of Unknown: Integrase B6945 sequence
  PTHR30461:SF3,cd00338,SM00857,IPR006118,IPR036162, PF13408,IPR025827,G3DSA:3.40.50.1390,PS51737,IPR006119, SSF53041,IPR011109,PTHR30461,PS00397,PS51736, Coil,PF00239
METGKFMGGENYIEEVAAYIRVSSQEQKLHGISLEAQVEKLTEYAQNHGMKIVKFYKDEGVSGRKLIKNRPALQEMIQDAEKRKFKRIIFIKLDRFFRSVAEYHECMKRLSVGGVIWTATEEKYDLSTPSGEAFVNMKLTMAQFEADQAGERVRMINEYKIKTGQPLYGSQCLPFCYAVGMPEEGERHKYIGKRDEEIMLDLIDYVMTNHSVRAGMNYINQKYNRNFLYNAVMNALKNEMICGTYKGNPNYCEPYITREEFNQLQKIISRNPRTTEKRTYLFTGLIRCPRCGYRLSGGQYYTYSRPNKETGKREKRRGYLAYKCGRSRVNNQCDFNNIVQEQRLEKMLLEQLDDIIAGKKLQAISVKSAGKKVSKHDVEALTAELDRLNYAWQKGRIKSVEEYDKSYDDLMDKIHAAENEQAELNQEPDYEKIQAVLSNGWQEIYKELDGEHKRAFWRSFIEEIQVVWSKDKKEIKDIIFF

SEQ ID NO: 6945 - protein, 481 aa, Unknown
  Description of Unknown: Integrase B6946 sequence
  PTHR30461:SF3,IPR036162,PS51737,IPR011109,PTHR30461, PS00397,PF00239,G3DSA:1.10.10.2600,IPR006119,SSF53041, cd00338,SM00857,IPR025827,IPR038109,PS51736, IPR006118,PF13408,G3DSA:3.40.50.1390,PF07508,Coil
MPEPHIAAAYVRVSTDDQMELSPDSQMEKIREYAAKNGLLLLSEYIFHDDGISGRAAEKRPGFQQMIATAKDPSHPFDVIIVWKFSRFARNQEESIFYKSILRSKCKVDVVSVSEPLIAGPFGSLIERIIEWMDEFYSVRLAEEVKRSMTVNAKNGALQATPSFGYRVENRQLVIVPEEAEIIREIFRRFISGDAMFRIAKDLSSRGIRTHRGNPFENRTIDYILNNPVYVGKLRWTPTGRTHRNFKNEDSIIADALHEPIIDAETWDAAQARCAELKKSYKRYGKPSSERKHWLCGVVRCSTCGATLIWVSPHFMKCNNYAHGRCTTTQHIAVEALEESFLAQLQHDLTFAESVACVVQAAKPAHSDQRLQQQRSRIVSRIDRLRESYLDGVETLETYKAARQQMQAQLDDLDAQIAESAAVPVVDAAALLRNAIAAVLETLRSPTATVAQKYESAMSIIDRCTFDKSQMLLAISYKFIF

SEQ ID NO: 6946 - protein, 481 aa, Unknown
  Description of Unknown: Integrase B6947 sequence
  PTHR30461:SF3,IPR036162,PS51737,IPR011109,PTHR30461, PS00397,PF00239,G3DSA:1.10.10.2600,IPR006119,SSF53041, cd00338,SM00857,IPR025827,IPR038109,PS51736, IPR006118,PF13408,G3DSA:3.40.50.1390,PF07508,Coil
MPEPRIAAAYVRVSTDDQMELSPDSQMEKIREYAAKNGLLLLSEYIFHDDGISGRAAEKRPGFQQMIATAKDPSHPFDTIIVWKFSRFARNQEESIFYKSILRSKCKVDVVSVSEPLIAGPFGSLIERIIEWMDEFYSVRLAEEVKRSMTVNAKNGTLQATPSFGYRAEDRRLVVVPEEAEIIREIFRRFISGDAMFRIAKDLSARGVRTHRGNPFENRTIDYILNNPVYLGKLRWTPTGRTHRNFKNEDSIIADALHEPIIDAETWDAAQARCAELKKSYKRYGKPSSERKHWLCGVVRCSTCGATLIWASPHFMKCNNYAHGRCTTAQHIAVEALEESFLAQLQHDLTFAESVACVVQAAKPAHSDQRLQQQRARIVSRIDRLRESYLDGVETLETYKAARQQMQAQLDDLDAQIAESAAVPVVDAAALLRNAIAAVLETLRSPTATVAQKYESAMSIIDRCTFDKSQMLLAISYKFIF

SEQ ID NO: 6947 - protein, 481 aa, Unknown
  Description of Unknown: Integrase B6948 sequence
  PTHR30461:SF3,IPR036162,PS51737,IPR011109,PTHR30461, PS00397,PF00239,G3DSA:1.10.10.2600,IPR006119,SSF53041, cd00338,SM00857,IPR025827,IPR038109,PS51736, IPR006118,PF13408,G3DSA:3.40.50.1390,Coil
METGKFMGGENYIEEVAAYIRVSTQEQKLHGISLEAQVEKLTEYAQNHGMKIVKFYKDEGVSGRKLIKNRPALQEMIQDAEKGKFKRIIFIKLDRFFRSVAEYHECMKRLSVGGVIWTATEEKYDLSTPSGEAFVNMKLTMAQFEADQAGERIRMVNEYKIKSGQPLYGSQCLPFCYAVGCPEEGERHKYIGKRDEEIMRDLIDYVMKNHSVRAGMNYINQKYNRNFLYNAVMNALKNEMICGTYKGNPNYCEPYITREEFNQLQKIISRNPRTTEKRTYLFTGLIRCPRCGYRLSGGQYYTYSRPNKETGKREKRRGYLAYKCGRSRVNNQCDFNNIVQEQKLEKMLLEQLDDIIAGKKLQAISVKSAGKKVSKHDVEALTAELDRLNYAWQKGRIKSVEEYDKSYDDLMDKIHAAENEQAELNQEPDYEKIQAVLSNGWQEIYKELDGEHKRAFWRSFIEEIQVVWSKDKKEIKDIIFF

SEQ ID NO: 6948 - protein, 481 aa, Unknown
  Description of Unknown: Integrase B6949 sequence
  PTHR30461:SF3,IPR036162,PS51737,IPR011109,PTHR30461, PS00397,PF00239,G3DSA:1.10.10.2600,IPR006119,SSF53041, cd00338,SM00857,IPR025827,IPR038109,PS51736, IPR006118,PF13408,G3DSA:3.40.50.1390,PF07508,Coil
MPEPHIAAAYVRVSTDDQMELSPDSQMEKIREYAAKNGLLLLSEYIFHDDGISGRAAEKRPGFQQMIATAKDPSHPFDVIIVWKFSRFARNQEESIFYKSILRSKCKVDVVSVSEPLIAGPFGSLIERIIEWMDEFYSVRLAEEVKRSMTVNAKNGSLQATPSFGYRVENRQLVIVPEEAEIIREIFRRFISGDAMFCIAKDLSARGVRTHRGNPFENRTIDYILNNPVYLGKLRWTPTGRTCRNFKNEDSIIADALHEPIIDAETWGAAQARCAELKKSYKRYGKPSSERKHWLCGVVRCSACGATLIWVSPHFMKCNNYAHGRCTTTQHIAVEALEESFLAQLQHDLTFAESVACVVQAAKPAHSDQRLQQQRARIVSRIDRLRESYLDGVETLETYKAARQQMQAQLDDLDAQIAESAAVPVVDAAALLRNAIAAVLETLRSPTATVAQKYESAMSIIDRCTFDKSQMLLAISYKFIF

SEQ ID NO: 6949 - protein, 481 aa, Unknown
  Description of Unknown: Integrase B6950 sequence
  PTHR30461:SF3,IPR036162,PS51737,IPR011109,PTHR30461, PS00397,PF00239,G3DSA:1.10.10.2600,IPR006119,SSF53041, cd00338,SM00857,IPR025827,IPR038109,PS51736, IPR006118,PF13408,G3DSA:3.40.50.1390,PF07508,Coil
MPEPHIAAAYVRVSTDDQMELSPDSQMEKIREYAAKNGLLLLSEYIFHDDGISGRAAEKRPGFQQMIATAKDPSHPFDVIIVWKFSRFARNQEESIFYKSILRSKCKVDVVSVSEPLIAGPFGSLIERIIEWMDEFYSVRLAEEVKRSMTVNAKNGSLQATPSFGYRAENRQLVIVPEEAEIIQEIFRRFISGDAMFRIAKDLSSRGIRTHRGNPFENRTIDYILNNPVYLGKLRWTPTGRTRRNFKNEDSIIADALHEPIIDAETWGAAQARCSELKKSYKRYGKPSSERKHWLCGVVRCSACGATLIWASPHFMKCNNYAHGRCSTTQHIAVEALEESFLAQLQHDLTFAESVACVVQAAKPAHSDQRLQQQRARIVSRIDRLRESYLDGVETLETYKAARQQMQAQLDDLDAQIAESAAVPVVDAAALLRNAIAAVLETLRSPTATVAQKYESAMSIIDRCTFDKSQMLLAISYKFIF

SEQ ID NO: 6950 - protein, 481 aa, Unknown
  Description of Unknown: Integrase B6951 sequence
  cd00338,SM00857,G3DSA:1.10.10.2600,IPR036162,PF13408, IPR025827,PS51737,G3DSA:3.40.50.1390,IPR006119,IPR038109, PF07508,IPR011109,SSF53041,PTHR30461,PS51736, Coil,PF00239
MPGTNSIPGTAAAYIRVSDDKQDEYSPDSQLKLIRDYAKRNGYYVPDEFVFYDDGISAKTAAKRPKFIEMIGIAKQKNPPFDKILVWKFSRFARNQEESIVYKSLLRKNGVEVISISEPLIDGAFGSLIERIIEWMDEYYLVRLSGEVKRGMKEKASRGEAMSGRVFGYLPKDGTLFPHPEEAPLVRMIFDDYLNGKGARQIAIKLQQLGVKTIRGNDPDNRFVDYVLHNPVYCGKVRWSTDGRAASKRDYHNENIMLVNGSFEPIISEQTFNAAQKKIVDQKKRYPKYQRNEAPTEYMLRGLVRCDSCGATLTLQRASKALQCHNYARGSCKVSHSISIAKANKTVIEALQYAVDHLDFNILPDEEKHTPEDYSKPLAALRKKLARTKEAYINGVDTLEEYKDNKLRITEEIAKLEKKQAANTALPEVDKEAFAAKVRGVIAVINSPDTTEQAKNEALRSVLAKIIYHKPAQSLELYFYA

SEQ ID NO: 6951 - protein, 481 aa, Unknown
  Description of Unknown: Integrase B6952 sequence
  SM00857,G3DSA:1.10.10.2600,IPR036162,PS51737,G3DSA:3.40.50.1390, IPR006119,IPR038109,PF07508,IPR011109,SSF53041, PTHR30461,Coil,PS51736,cd00338,PF00239
MPTARTAVIYARFSCNKQREASIDDQLRICRQWCQREKYAIVAEYCDYAISGRTDDRPEFQRMVANAGESDIVLVYMMDRFSRGEYDAPIYKRELAQHGVKLVSALEQIPDSPEGIIYEKLLEGLAACESKKTAIRTRRGMEGNALKCKTNGVRVFGYASNEADEYVINEDEAAFVREAFKRRIAKETTNSIARDFAARGVKTSQGNPCGYSMVERMVKNRKYTGRYEWGGVVKEGGMPAIIDEVTFMEAQGIRAAKERSAESWGDFALSGKAICAGCGRNLQGVSGRGRGNRKYEYYRCHDGCVKPVRREELEGEIVKALRALLQDREEALRIARMVAESSDGAEVAARRKQAAQSLSAAERGLRNILNAIEQGIIAPGAKERIAELEHQRDRAKLDLEAIRDDQLDPERLADFLQCGSALDDATLLKAFVYQASVSDEECIVTLNYDVENNEPARLDVQRVRTKCKWCPQRDSNPRYPP

SEQ ID NO: 6952 - protein, 481 aa, Unknown
  Description of Unknown: Integrase B6953 sequence
  PTHR30461:SF3,IPR036162,PS51737,IPR011109,PTHR30461, PS00397,PF00239,G3DSA:1.10.10.2600,IPR006119,SSF53041, SM00857,IPR025827,IPR038109,PS51736, cd03768,IPR006118,PF13408,G3DSA:3.40.50.1390,PF07508,Coil
MITTNKVAIYVRVSTTSQAEEGYSIEEQKAKLSSYCDIKDWSVYKIYTDGGFSGSNTDRPALEGLIKDAKKRKFDTVLVYKLDRLSRSQKDTLYLIEDIFIKNNIAFLSLQENFDTSTPFGKAMIGLLSVFAQLEREQIKERMQLGKIGRAKAGKSMMWAKTSYGYDYHRETGTITINPAQALAVKFIFESYLRGRSITKLRDDLNEKYPKHVPWSYRSVRAILDNPVYCGFNQYKGEIYPGNHEPIISKEEYDKTQSELKIRQRTAAENVNPRPFQAKYILSGIAQCGYCGAPLKIMLGVKRKDGSRLKKYECHQRHPRTLRGVTTYNDNKKCDSGFYYKDKLEAYVLEEISKLQDNADYLDKIFSGDNAETIDRESYKKQIEELSKKLSRLNDLYIDDRITLEELQNKSAEFISMRATLETELENDPALGKDKRKADMRELLNAKKIFSMDYEGQKVLVRGLINKVQVTAEDIVINWKI

SEQ ID NO: 6953 - protein, 481 aa, Unknown
  Description of Unknown: Integrase B6954 sequence
  PTHR30461:SF3,IPR036162,PS51737,IPR011109,PTHR30461, PS00397,PF00239,G3DSA:1.10.10.2600,IPR006119,SSF53041, SM00857,IPR025827,IPR038109,PS51736,cd03768, IPR006118,PF13408,G3DSA:3.40.50.1390,PF07508,Coil
MNTINKVAIYVRVSTNVQAEEGYSIDEQIDKLKSYCQIKDWTVYDVYKDGGFSGGNINRPALEKMIVDAKKKRFDTVLVYKLDRLSRSQKDTLFLIEDVFSKNDISFLSLQENFDTSTPFGKAMVGLLSVFAQLEREQIKERMQLGMIGRAKSGKPMMFTNVSFGYTYSPKTQQLTINQAEAVIVKQIFNEFLGGMSPLRLMAYLNENNILRNGKEWNYQGIQRILRNPVYIGKIKYNNVIYPGLHEPIIDEESYYKAQKLLDARQDEMRIKGKNRQFKAKYMLSGTAKCGYCGAPLRIKIGNKRLDGTRLKVYQCCNRYPRKYAVVTYNDNKKCNSGNYQKEDLEQYVIAEIRKLQLKPEKIDKLFNKVSKIDTVQINKQIASIDNKINRLNDLYLNDMIDIDKLKADAEKFKEQKRVLEKELDKDLKIQEQEKNKEDFKKTIGFKDVTKLDYEEQSFIVKSLIDKILVKKGFIKILWKI

SEQ ID NO: 6954 - protein, 481 aa, Unknown
  Description of Unknown: Integrase B6955 sequence
  PTHR30461:SF3,IPR036162,PS51737,IPR011109,PTHR30461, PS00397,PF00239,G3DSA:1.10.10.2600,IPR006119,SSF53041, cd00338,SM00857,IPR025827,IPR038109,PS51736, IPR006118,PF13408,G3DSA:3.40.50.1390,PF07508,Coil
MPEPHIAAAYVRVSTDDQMELSPDSQMEKIREYAAKNGLLLLSEYIFHDDGISGRAADKRPGFQQMIATAKDPSHPFDVIIVWKFSRFARNQEESIFYKSILRSKCKVDVVSVSEPLIAGPFGSLIERIIEWMDEFYSVRLAEEVKRSMTVNAKNGTLQATPSFGYRAEDRRLVVVPEEAEIIREIFRRFISGDAMFRIAKDLSARGVRTHRGNPFENRTIDYILNNPVYLGKLRWTPTGRTHRNFKNDDSIIADALHEPIIDAETWDAAQARCAELKKSYKRYGKPSSERKHWLCGVVRCSACGATLIWANPHFMKCNNYAHGRCTTTQHIAVEALEESFLAQLQHDLTFAESVACVVQAAKPAHSDQRLQQQRARIVSRIDRLRDSYLDGIETLETYKAARQQMQAQLDDLDAQIAESAAVPVVDTAALLRNAIAAVLETLRSPTATVAQKYESAMSIIDRCTFDKSQMLLAISYKFIF

SEQ ID NO: 6955 - protein, 481 aa, Unknown
  Description of Unknown: Integrase B6956 sequence
  PTHR30461:SF3,SM00857,G3DSA:1.10.10.2600,IPR036162,PF13408, IPR025827,PS51737,G3DSA:3.40.50.1390,IPR006119,IPR038109, PF07508,IPR011109,SSF53041,PF00239,PTHR30461, Coil,cd00338
MTIIGEYCDRAISGKTDNRPNFQRLIKDSEKGQFEAVIMYTLDRFARNRYDSAIYKAKLKKNGVKVYYAKQPMPDTPEGIILESVLEGYAEYYSENLSRNIKRGLKENALQCLAVGGAGMPLGYTVGEDRKYKIDPVGAKIVQEIFQMYADGMSATQIINECNRRGYKTSRGNAFNKNSLRTMLKNDRYIGVYRFADVVVEDGVPPIISRELFEKVQTTLRHNYSARARNKAKDDYLLTTKLFCGHCGSSMVGESGTSRSGKLHHYYKCIDRKRNRKCKKAVEKKDWIEELVVRFTVQNVLNDETIERIARKTMEIIEKESADTSYLNGLQNELKGIKKKIKNLMNAIEQGIITPTTKERMDELEAEKNDLEGKIAREEMKKPLLTKERIMHWLNSFKSGNVNDIEYRRRVIDTLVNSVYIYDDGDKGRRIVFTFNMSGQNTATLSCSDIACVAPPKGANPNTLFFVKHCFGFVMNIEEVG

SEQ ID NO: 6956 - protein, 481 aa, Unknown
  Description of Unknown: Integrase B6957 sequence
  PTHR30461:SF3,IPR036162,PS51737,IPR011109,PTHR30461, PS00397,PF00239,G3DSA:1.10.10.2600,IPR006119,SSF53041, cd00338,SM00857,IPR025827,IPR038109,PS51736, IPR006118,PF13408,G3DSA:3.40.50.1390,PF07508,Coil
MKKGAIYVRVSSAEQAREGYSIDAQIKALRDYAIKNDIFLEEQYIYKDEGISGRKAEKRPAFMEMIKTAKSKPKKFDVILVHKFDRFSRNREDSIVYKSLLKKECGINVISITEHLDPDDKTSIILEAFLEASAEYYSINLSEEVKKGQLEKHSQGGLQTNPSFGYNVVNNKLVINEEEEKIVKLIFESYAIENKSMMDIAKKINSLGILTKRGNKFENRTIYYILNNPTYIGKLRYTPGRKNTYDFDDPNTILVEGQHTPIISSDLWDLVQLKLSKNSIWKKPKARLDFSIKHWSKGLIRCSECNCTLVATGVEKYRCNGYNKGKCSNHTKISISEAENLILSQLKQDFSKGIIRNIVPNKKEKKSINEYEIIISSIRSLEEKEERIKQSYINGVDTLEEYKQNKNMLNKEKDRLNEKLLTLEKPSIEKHKKEIIENGKKVYEILTNDKISLEEKNDIVNKLINKVEYEEKTNNLVIFYN

SEQ ID NO: 6957 - protein, 481 aa, Unknown
  Description of Unknown: Integrase B6958 sequence
  PTHR30461:SF3,SM00857,G3DSA:1.10.10.2600,IPR036162,PF13408, PS51737,G3DSA:3.40.50.1390,IPR025827,IPR006119,IPR038109, PF07508,IPR011109,SSF53041,PTHR30461,Coil, PS51736,cd00338,PF00239
MTIIGEYCDKAISGKTDNRPSFQRLIKDSEKGQFEAVIMYTLDRFARNRYDSAIYKAKLKKNGVRVYYAKQPMPDTPEGIILESVLEGYAEYYSENLSRNIKRGMKENALQCIANGGAGMPLGYTVGEDRRYKIDPVGARIVQEIFQMYADGMSATQIINECNKRGYKTARGNAFNKNSLRTMLKNDRYIGVYRFADVVVEGGVPPIISRELFDKVQATLKHNYSARARNKAKDDYLLTAKLFCGHCGSSMVGESGTSKSGKLHHYYKCIERKRKHKCNKAVEKKDWMEELVVRFTVQKVLTDENIERIAVKAMEIIEKESADTTYIDGLRNELKEVKKKIKNLMTAIEQGIITPSTKERMDELELEKNEIEGRIASEEMKKPLLTKERIMYWLYSFKSGNIDDVEYKRRVIDTLVNSVYVYDEGDRGRRIVFTFNISGQNTATLSCSDIACFAPPHMKNPNLFPIGNAFGFFIFIKDISY

SEQ ID NO: 6958 - protein, 481 aa, Unknown
  Description of Unknown: Integrase B6959 sequence
  cd00338,SM00857,G3DSA:1.10.10.2600,IPR036162,PF13408, IPR025827,G3DSA:3.40.50.1390,PS51737,IPR006119,IPR038109, PF07508,SSF53041,IPR011109,PTHR30461,PS51736, Coil,PF00239
MPGTNSIPGTAAAYIRVSDDKQDEYSPDSQLKLIRDYAKRNGYYVPDEFVFYDDGISAKTAAKRPKFIEMIGIAKQKNPPFDKILVWKFSRFARNQEESIVYKSLLRKNGVEVISISEPLIDGAFGSLIERIIEWMDEYYLVRLSGEVKRGMKEKASRGEAMSGRVFGYLPKDGTLIPHPEEAPLVRMIFDDYLNGKRERQIAIKLQQLGVKTIRGNDPDNRFVDYVLNNPVYCGKVRWSTDGRAASKRDYHNENIMLVNGSFEPIISEQTFNAAQKKIVDQKKRYPKYQRNEAPTEYMLRGLVRCDSCGATLTLQRASKALQCHNYARGSCKVSHSISIAKANKTVIEALQYAVDHLDFNILPDEEKHTPEDYSKPLAALRKKLARTKEAYINGVDTLEEYKENKQRITEDIAKLEKKQAANTALPEVDKEAFAAKVRGVIAVISSPDTTEQAKNEALRSVIAKIVYHKLAQSLELYFYA

SEQ ID NO: 6959 - protein, 481 aa, Unknown
  Description of Unknown: Integrase B6960 sequence
  PTHR30461:SF3,IPR036162,PS51737,IPR011109,PTHR30461, PS00397,PF00239,G3DSA:1.10.10.2600,IPR006119,SSF53041, SM00857,IPR025827,IPR038109,PS51736,cd03768, IPR006118,PF13408,G3DSA:3.40.50.1390,PF07508,Coil
MMTTNKVAIYVRVSTTSQVEEGYSIDEQKAKLSSYCDIKDWNVYKIYTDGGFSGANTDRPALEGLIQDAKKRKFDTVLVYKLDRLSRSQKDTLYLIEDIFIKNNIAFLSLQENFDTSTPFGKAMIGLLSVFAQLEREQIKERMQLGKIGRAKAGKSMMWAKTSYGYDYHRDTGTITINPAQALAVKFIFESYLRGRSITKLRDDLNEKYPKHVPWSYRAVRTILDNPVYCGFNQYKGEIYPGNHEPIISKEEYDKTQSELKIRQRTAAENVNPRPFQAKYILSGIAQCGYCGAPLKIMLGVKRKDGSRLKKYECHQRHPRTLRGVTTYNDNKKCDSGFYYKDKLEAYVLEEISKLQDDADFLDKIFSGDNAETIDRESYKKQIEELSKKLSRLNDLYIDDRITLEELQSKSAEFISMRATLETELENDPALRKNKRKADMRKLLNAEKIFSMDYEGQKVLVRGLINKVQVTAEDIVIKWKI

SEQ ID NO: 6960 - protein, 481 aa, Unknown
  Description of Unknown: Integrase B6961 sequence
  PTHR30461:SF3,cd00338,SM00857,IPR006118,G3DSA:1.10.10.2600, IPR036162,PS51737,G3DSA:3.40.50.1390,IPR006119,IPR038109, PF07508,IPR011109,SSF53041,PTHR30461,PS00397, PS51736,Coil,PF00239
MPEPRIAAAYVRVSTDDQMELSPDSQMEKIREYAAKNGLLLLSEYIFHDDGISGRAAEKRPGFQQMIATAKDPSHPFDTIIVWKFSRFARNQEESIFYKSILRSKCKVDVVSVSEPLIAGPFGSLIERIIEWMDEFYSVRLAEEVKRSMTVNAKNGTLQSTPSFGYRVENRQLVIVPEEADIIREIFRRFISGDAMFRIAKDLSARGVRTHRGNPFENRTIDYILNNPVYLGKLRWTPTGRTHRNFKNEDSIIADALHEPIIDAETWDAAQARCAELKKSYKRYGKPSSERKHWLCGVVRCSTCGATLIWAGPHFMKCNNYAHGRCTTAQHIAVEALEESFLAQLQHDLTFAESVACVVQAAKPAHSDQRLQQQRARIVSRIDRLRESYLDGVETLETYKAARQQMQAQLDDLDAQISESAAVPVVDAAALLRNAIAAVLETLRSPTATVAQKYESAMSIIDRCTFDKSQMLLAISYKFIF

SEQ ID NO: 6961 - protein, 481 aa, Unknown
  Description of Unknown: Integrase B6962 sequence
  PTHR30461:SF3,IPR036162,PS51737,IPR011109,PTHR30461, PS00397,PF00239,G3DSA:1.10.10.2600,IPR006119,SSF53041, SM00857,IPR025827,IPR038109,PS51736,cd03768, IPR006118,PF13408,G3DSA:3.40.50.1390,PF07508,Coil
MNTINKVAIYVRVSTNMQAEEGYSIDEQIDKLKSYCQIKDWTVYDVYKDGGFSGGNINRPALEKMIIDAKKKRFDTVLVYKLDRLSRSQKDTLFLIEDVFSKNDISFLSLQENFDTSTPFGKAMVGLLSVFAQLEREQIKERMQLGMIGRAKSGKPMMFTNVSFGYTYSPKTQQLTINQAEAVIVKQIFNEFLGGMSPLRLMAYLNENNILRNGKEWNYQGIQRILRNPVYIGKIKYNNVIYPGLHEPIIDEESYYKAQKLLDARQDEMRIKGKNRQFKAKYMLSGTAKCGYCGAPLRIKIGNKRLDGTRLKVYQCCNRYPRKYAVVTYNDNKKCNSGNYQKEDLEQYVIAEIRKLQLKPEKIDKLFNKVSKIDTVQINKQIASIDNKINRLNDLYLNDMIDIDKLKADAEKFKEQKRVLEKELDKDLKIQEQEKNKEDFKKTIGFKDVTKLDYEEQSFIVKSLIDKILVKKGFIKILWKI

SEQ ID NO: 6962 - protein, 481 aa, Unknown
  Description of Unknown: Integrase B6963 sequence
  PTHR30461:SF3,SM00857,G3DSA:1.10.10.2600,IPR036162,PS51737, G3DSA:3.40.50.1390,IPR006119,IPR038109,PF07508,IPR011109, SSF53041,PF00239,PTHR30461,PS51736,Coil, cd00338
MKIAAVYTRVSTDEQAREGYSLDAQLKAIKKYAQNNDILIDSKYIFSDEGISGRKAEKRPAFMEMIKQAKSKPRKFDVILVHKFDRFSRNREDSVVYKSLLKKEYGIPVISISEPLDPDDKMSVIMEAFLEAMAEYYSLNLSGEVKKGQLEKHSKGELQTNPSFGYNVSDNKLIVNEDEANVVKMIFEQYAIDNLPMMQIARNVNALNVKTKRGRHFENRTIYYILNNPVYIGKLRYTPGRRNQYDFDDPNTILVDGQHEPIISMDLWNSVQMKLTKNSIWKKPKQHIDVNPKHWTKGLVRCKECGCTMVTCGKTKLRCNGYNKGKCSNSSTLLIADVYDLIIDNIKQVMKNGRIEHIVQSKKEKKESNQYLILQHQLEQLSDKEQRIKEAYREGVDTIDEYKENKNIILREKNRLLKEIDKVEKPKTENKKKEIIENGKKVYEILTDDKISLKEKNEVAHILINKVEYDPTSNTLELYYN

SEQ ID NO: 6963 - protein, 481 aa, Unknown
  Description of Unknown: Integrase B6964 sequence
  PTHR30461:SF3,IPR036162,PS51737,IPR011109,PTHR30461, PS00397,PF00239,G3DSA:1.10.10.2600,IPR006119,SSF53041, SM00857,IPR025827,IPR038109,PS51736,cd03768, IPR006118,PF13408,G3DSA:3.40.50.1390,PF07508,Coil
MNEINKVALYVRVSTTSQMEEGYSIEEQKAKLESYCDIKDWHIYKVYTDGGFSGSTTERPALEQLIKDAQSKLFDTVLVYKLDRLSRSQKDTLYLIEDIFLKNNIEFVSLLENFDTSTPFGRAVIGLLSVFAQLEREQIKERMQLGKLGRAKAGKSMMWAKTSYGYDYNKETGSMTINEYEALAVKEIFTSYLAGMSITKLRDKINEEYPKQPAWSYRTIRGILANPVYCGLNQYKGQTFQGTHKAIISLVDFEQTQRELAKRQQTAKELSNPRPFQAKYMLSGLAQCGYCHAPLKVILGQKRKDGTRFKRYECYQRHPRKTRGVTVYNDNKKCESGYYDMELLEHYVLTRIAQLQNDPDKIQELFSDDTSPAVDKQAIQKQIDSLTLKLSKLNDLYLDDRITLDELRAKSSDFIKQRAALEEEIKKASTDKQAGKRKKIEKLLDASSVLDMSYDNQKVIVRELIDKVQVTSDKIVIRWKI

SEQ ID NO: 6964 - protein, 481 aa, Unknown
  Description of Unknown: Integrase B6965 sequence
  SM00857,IPR006118,G3DSA:1.10.10.2600,IPR036162,PF13408, IPR025827,G3DSA:3.40.50.1390,PS51737,IPR006119,IPR038109, PF07508,SSF53041,IPR011109,PF00239,PTHR30461, PS00397,Coil,cd00338
MTPKALEIGAAYIRVSTDDQTELSPDAQLRVILDEAKKDGFVIPPEYIFEEKKGISGRKADNRPEFQKMIAIAKSQSPAPFKRLYLWKFSRFARNQEESTFYKGILRKKCGVEIKSVSEPIMEGMFGRLIETIIEWFDEYYSYNLSGEVVRGMTEKALRQGYQSSPSLGYEAVGEGKAFVINEETYKIVEYIFRSYYDGKDMTAIARACNEHHWRTRRGNPFERRTISRILQNQFYNGTVLWNGYSFQGTHEVRPSVTKIFPAVQERIRAEYRPLKRREVSSCGHWLSGLLVCSVCGASLSLNRVRSNHGSDFFQCWKYSKGLHPGSCAITVAKAEQLLLHSIKTVLESESVEYEYLPPETTAAATEQDLITDALDKVTLKELRIKEAYEAGIDTLEEYKENKLRLAAEREELLQKLQETAPSPQAEIPDQNEVLRRIQSAYDLFSDPNVDFEIKGNALRKIVKKIIYDRQNGEFKVIYYV

SEQ ID NO: 6965 - protein, 481 aa, Unknown
  Description of Unknown: Integrase B6966 sequence
  PTHR30461:SF3,SM00857,G3DSA:1.10.10.2600,IPR036162,PF13408, IPR025827,PS51737,G3DSA:3.40.50.1390,IPR006119,IPR038109, PF07508,IPR011109,SSF53041,PTHR30461,Coil, cd00338,PF00239
MTIIGEYCDRAISGKTDNRPNFQRLIKDSEKGQFEAVIMYTLDRFARNRYDSAIYKAKLKKNGVKVYYAKQPMPDTPEGIILESVLEGYAEYYSENLSRNIKRGLKENALQCLAVGGAGMPLGYTVGEDRKYKIDPVGAKIVQEIFQMYADGMSATQIINECNRRGYKTSRGNAFNKNSLRTMLKNDRYIGVYRFADVVVEDGVPPIISRELFEKVQTTLRHNYSARARNKAKDDYLLTTKLFCGHCGSSMVGESGTSRSGKLHHYYKCIDRKRNHKCKKAVEKKDWIEELVVRFTVQNVLNDETIERIARKTMEIIEKESADTSYLNGLQNELKGIKKKIKNLMNAIEQGIITPTTKERMDELEAEKNDLEGKIAREEMKKPLLTKERIIHWLNSFKSGNVNDIEYRRRVIDTLVNSVYIYDDGDKGRRIVFTFNMSGQNTATLSCSDIACVAPPKGANPNTLFFVKHCFGFVMNIEEVG

SEQ ID NO: 6966 - protein, 481 aa, Unknown
  Description of Unknown: Integrase B6967 sequence
  PTHR30461:SF3,IPR036162,PS51737,IPR011109,PTHR30461, PS00397,PF00239,G3DSA:1.10.10.2600,IPR006119,SSF53041, cd00338,SM00857,IPR025827,IPR038109,PS51736, IPR006118,PF13408,G3DSA:3.40.50.1390,PF07508,Coil
MPEPHIAAAYVRVSTDDQMELSPDSQMEKIREYAAKNGLLLLSEYIFHDDGISGRAAEKRPGFQQMIATAKDPSHPFDVIIVWKFSRFARNQEESIFYKSILRSKCKVDVVSVSEPLIAGPFGSLIERIIEWMDEFYSVRLAEEVKRSMTVNAKTGTLQATPSFGYRVENRQLVIVPEEAEIIREIFRRFISGDAMFRIAKDLSSRGIRTHRGNPFENRTIDYILNNPVYLGKLRWTPTGRTCRNFKNEDSIIADALHEPIIDAETWGAAQARCAELKKSYKRYGKPSSERKHWLCGVVRCSTCGATLIWANPHFMKCNNYAHGRCTTTQHIAVEALEESFLAQLQHDLTFAESVACVVQAAKPAHSNQRLQQQRARIVSRIDRLRESYLDGVETLETYKAARQQMQAQLDDLDAQISESASVPVVDTAALLRNAIAAVLETLRSPTATVAQKYESAMSIIDRCTFDKSQMLLAISYKFIF

SEQ ID NO: 6967 - protein, 481 aa, Unknown
  Description of Unknown: Integrase B6968 sequence
  PTHR30461:SF3,SM00857,G3DSA:1.10.10.2600,IPR036162,PF13408, PS51737,G3DSA:3.40.50.1390,IPR025827,IPR006119,IPR038109, PF07508,SSF53041,IPR011109,PTHR30461,Coil, PS51736,cd00338,PF00239
MTVINEYCDRAISGKTDNRPSFQRLIKDSEKGQFEAVIMYTLDRFARNRYDSAIYKAKLKKHGVRVFYAKQPMPDTPEGIILESVLEGYAEYYSENLSRNIKRGLKENALQCIATGGAGVALGYTVGEDRKYKIDPVGAKIVQEVFEMYADGMSATQIINVCNERGYKTSRGNPFNKNSLRTMLKNDKYIGVYRFMDVVVEGGVPAIISKELFDKVQAKLQHNFTARARNKAKEDYLLTTKLFCGHCGSPMVGESGTSKTGKLHFYYKCIDRKRKHVCTKKVEKKDWIEELVTRFTVQEVLTDENIDRIATKAMEIIEKESADTTYLEGLQNELKEVQKKIKNIMTAIEQGIITSTTKDRLEELESEKNEIEGRIAREEIKKPLLTKERIVYWLLSFKSGDINDIEYRRRVIDTLVNSVYIYDDGDKGRRIVLTFNVSGQNTATISCSDIACSAPPKGANPNSLFFVKHCFGFVVHIEEVG

SEQ ID NO: 6968 - protein, 481 aa, Unknown
  Description of Unknown: Integrase B6969 sequence
  PTHR30461:SF3,SM00857,G3DSA:1.10.10.2600,IPR036162,PS51737, G3DSA:3.40.50.1390,IPR006119,IPR038109,PF07508,IPR011109, SSF53041,PTHR30461,Coil,PS51736,cd00338, PF00239
MPIARTAVIYARFSCNKQREASIDDQLRICRQWCQREKYAIVAEYCDYAISGRTDDRPEFQRMVANAGESDIVLVYMMDRFSRGEYDAPIYKRELAQHGVKLVSALEQIPDSPEGIIYEKLLEGLAACESKKTAIRTRRGMEGNALKCKTNGVRVFGYASNEADEYVINEDEAAFVREAFKRRIAKETTNSIARDFAARGVKTSQGNPCGYSMVERMVKNRKYTGRYEWGGVVKEGGMPAIIDEVTFMEAQGIRAAKERSAESWGDFALSGKAICAGCGRNLQGVSGRGRKNVKYEYYRCHDGCVRPVRREELEGEIVKALRALLQDREEALRIARMVAESSDGAEVAARRKQAAQSLSAAERGLKNILNAIEQGIIAPGAKERIAELEHQRDRAKLDLEAIRDEQIDPERLADFLQCGSSLDDATLLKAFVYQVSVSDEECIVTLNYDVESNEPARLDVQRVRTKCKWCPRADSNRRHPL

SEQ ID NO: 6969 - protein, 481 aa, Unknown
  Description of Unknown: Integrase B6970 sequence
  PTHR30461:SF3,SM00857,G3DSA:1.10.10.2600,IPR036162,PF13408, PS51737,G3DSA:3.40.50.1390,IPR025827,IPR006119,IPR038109, PF07508,IPR011109,SSF53041,PTHR30461,Coil, PS51736,cd00338,PF00239
MTIIGEYCDKAISGKTDNRPSFQRLIKDSEKGQFEAVIMYTLDRFARNRYDSAIYKAKLKKNGVRVYYAKQPMPDTPEGIILESVLEGYAEYYSENLSRNIKRGMKENALQCIANGGAGMPLGYTVGEDRRYKIDPVGARIVQEVFQMYADGMSATQIINECNKRGYKTARGNAFNKNSLRTMLKNDRYIGVYRFADVVVEGGVPPIISRELFDKVQATLKHNYSARARNKAKDDYLLTAKLFCGHCGSSMVGESGTSKSGKLHHYYKCIERKRKHKCNKAVEKKDWMEELVVRFTVQKVLTDENIERIAVKAMEIIEKESADTTYIDGLRNELKEVKKKIKNLMTAIEQGIITPSTKERMDELELEKNEIEGRIASEEMKKPLLTKERIMYWLYSFKSGNIDDVEYKRRVIDTLVNSVYVYDEGDKGRRIVFTFNISGQNTATLSCSDIACFAPPNSANPNTLFFVKHCFGFVMNIEEVG

SEQ ID NO: 6970 - protein, 481 aa, Unknown
  Description of Unknown: Integrase B6971 sequence
  PTHR30461:SF3,cd00338,SM00857,G3DSA:1.10.10.2600,IPR036162, PF13408,PS51737,IPR025827,G3DSA:3.40.50.1390,IPR006119, IPR038109,PF07508,IPR011109,SSF53041,PTHR30461, PS51736,Coil,PF00239
MCAKKKPAMLEPDMQDAVIYTRYSSHNQRDCSIEQQVADCEIFARQNNLRVVKVYADRHLSGTTDNRPQFQQMLKDASHGHWAYVICWKIDRFARNRYDSATYKFRLKKAGVRVLYAKESIPDGPEGILLESVLEGSAEYYSAALAQNIRRGMKFNAEQCKVNSGSIPFGYCKGPDGRFAIHEANAEVVREIFRKAAAGMPFVDIANDLNSRGLKTSRGGRWNKGSFRLLMNEAYIGVYHFSDTRIEGGMPALIDQGTFWAANERLKANSSVRGRHQDGGDYLLTGKLKCAHCGSYMIGFSGTGKSGELHYYYGCQKRRRERACKKANVPREWIERVVVKAALDYVLRPDVMEWIADAVMEYQEREAASAQLAALTAELEENQKATDNVMKAIEAGIITSTTKQRLLDLEAKAQDLKRAIELEKLSHVRLERDQVLFWLDRFRGGSLQSQEFRRKVIDAFVSVVYLSDDHLRIAFNYSGGV

SEQ ID NO: 6971 - protein, 481 aa, Unknown
  Description of Unknown: Integrase B6972 sequence
  PTHR30461:SF3,IPR036162,PS51737,IPR011109,PTHR30461, PS00397,PF00239,G3DSA:1.10.10.2600,IPR006119,SSF53041, cd00338,SM00857,IPR025827,IPR038109,IPR006118, PF13408,G3DSA:3.40.50.1390,PF07508,Coil
MAPTVLQIGAAYIRVSTDDQTELSPDAQLRVIKEEATRDGFVIPPEYIFVEHKGISGRKASNRPEFQRMISIAKSQSPAPFKRLYLWKFSRFARNQEESTFYKSILRKKCGVEIKSVSEPIMEGMFGRLIETIIEWFDEYYSYNLSGEVIRGMTEKALRQGYQMTPPLGYKAVGEGKPFVINEDAYRIVEFIFKSYAAGMDMSAITRYCNEHCWKTQRGNPFERRGIQRILKNRFYIGEVEWNGYKFQGPHETRGSVKDCFETVQKRIRDEYTPANRRDASASLHWLAGIMVCGTCGATLGYNRVFSQKRPSYYQCWKYAKGMHTGSCSITAAKAERLLLQSLNEVLSSQAVEYEHIQQAQSDTISERELIEAAIERVAVKEQRVKEAYEAGIDTLEEYKGNKLRLAEEREDLRMKLENISPAADPDDPGLDEVLSRIKNIYDLISSPDVDDETKGKAIRRIVKKIVLDKEKGEFKVVYYA

SEQ ID NO: 6972 - protein, 481 aa, Unknown
  Description of Unknown: Integrase B6973 sequence
  PTHR30461:SF3,SM00857,G3DSA:1.10.10.2600,IPR036162,PF13408, PS51737,G3DSA:3.40.50.1390,IPR025827,IPR006119,IPR038109, PF07508,IPR011109,SSF53041,PTHR30461,Coil, PS51736,cd00338,PF00239
MTIIGEYCDKAISGKTDNRPSFQRLIKDSEKGQFEAVIMYTLDRFARNRYDSAIYKAKLKKNGVRVYYAKQPMPDTPEGIILESVLEGYAEYYSENLSRNIKRGMKENALQCIANGGAGMPLGYTVGEDRRYKIDPVGARIVQEIFQMYADGMSSTQIINECNKRGYKTARGNAFNKNSLRTMLKNDRYIGVYRFADVVVEGGVPPIISRELFDKVQATLKHNYSARARNKAKDDYLLTAKLFCGHCGSSMVGESGTSKSGKLHHYYKCIERKRKHKCNKAVEKKDWMEELVVRFTVQKVLTDENIERIAVKAMEIIEKESADTTYVDGLRNELKEVKKKIKNLMTAIEQGIITPSTKERMDELELEKNEIEGRIASEEMKKPLLTKERIMYWLYSFKSGNIDDVEYKRRVIDTLVNSVYIYDEGDKGRRIVFTFNVSGQNTATLSCSDIACFAPPNSANPNTLFFVKHCFGFVMNIEEVG

SEQ ID NO: 6973 - protein, 481 aa, Unknown
  Description of Unknown: Integrase B6974 sequence
  cd00338,SM00857,G3DSA:1.10.10.2600,IPR036162,PF13408, IPR025827,PS51737,G3DSA:3.40.50.1390,IPR006119,IPR038109, PF07508,IPR011109,SSF53041,PTHR30461,PS51736, Coil,PF00239
MPGTNSIPGTAAAYIRVSDDKQDEYSPDSQLKLIRDYAKRNGYYVPDEFVFYDDGISAKTAAKRPKFIEMIGIAKQKNPPFDKILVWKFSRFARNQEESIVYKSLLRKNGVEVISISEPLIDGAFGSLIERIIEWMDEYYLVRLSGEVKRGMKEKASRGEAMSGRVFGYLPKDGTLIPHPEEAPLVRMIFDDYLNGKRERQIAIKLQQLGVKTIRGNDPDNRFVDYVLNNPVYCGKVRWSTDGRAASKRDYHNENIMLVNGSFEPIISEQTFNAAQNKIADQKKRYPKYQRNEAPTEYMLRGLVRCDSCGATLTLQRASKALQCHNYARGSCKVSHSISIAKANKTVIEALQYAVDHLDFNILPDEEKHTPEDYSKPLAALRKKLARTKEAYINGVDTLEEYKENKQRIAEEIAKLEKKQAANTALPEVDKEAFAAKVRGVIAVINSPDTTEQAKNEALRSVLAKIIYHKPAQSLELYFYA

SEQ ID NO: 6974 - protein, 481 aa, Unknown
  Description of Unknown: Integrase B6975 sequence
  PTHR30461:SF3,IPR036162,PS51737,IPR011109,PTHR30461, PS00397,PF00239,G3DSA:1.10.10.2600,IPR006119,SSF53041, cd00338,SM00857,IPR025827,IPR038109,PS51736, IPR006118,PF13408,G3DSA:3.40.50.1390,PF07508,Coil
MPEPRIAAAYIRVSTDDQMELSPDSQMEKIREYAAKNGLLLLSEYIFHDDGISGRAAEKRPGFQQMIATAKDPSHPFDVIIVWKFSRFARNQEESIFYKSILRSKCKVDVVSVSEPLIAGPFGSLIERIIEWMDEFYSVRLAEEVKRSMTVNAKNGSLQATPSFGYRVENRQLVIVPEEAEIIREIFRRFISGDAMFCIAKDLSSRGIRTHRGNPFENRTIDYILNNPVYLGKLRWTPTGRTCRNFKNEDSIIADALHEPIIDAETWDAAQSRCAELKKSYKRYGKPSSERKHWLCGVVRCSVCGATLIWVSPHFMKCNNYAHGRCTTTQHIAVEALEESFLAQLQHDLTFAESVSCVVQAAKPAHSDQRLQQQRARIVSRIDRLRESYLDGVETLETYKAARQQMQAQLDDLDAQIAESASVPVVDTAALLRNAIAAVLETLRSPTATVAQKYESAMSIIDRCTFDKSQMLLAISYKFIF

SEQ ID NO: 6975 - protein, 480 aa, Unknown
  Description of Unknown: Integrase B6976 sequence
  PTHR30461:SF3,IPR036162,PS51737,IPR011109,PTHR30461, PS00397,PF00239,G3DSA:1.10.10.2600,IPR006119,SSF53041, cd00338,SM00857,IPR025827,IPR038109,PS51736, IPR006118,PF13408,G3DSA:3.40.50.1390,PF07508,Coil
MKIGALYIRVSTDDQLEYSPAAQQKLGLDYAKKNGIVIPKDFIFVDEGISGRKVKNRPAFQQLISLAKSNEHPIEVILVWKFSRFARNQEESIVYKNLLKRAGVELVSISEPLPDGAIGQLVERIFEWMDEYYSINLGVEVLRGMSERARQGGCNVSPPLGYKMEDGSPVIVPEQAIIVKKIFDLFVNDKLSFYDIAGKLNSLGYKTKRGGKFQNRTVAYIVRNEFYDQQLVWNKTEKATRKLKDSSEWISVKGDYPRIISHELWEAAQERDKATRRPRGSRPASTYRHWLSGMLVCSNCGGKLVRVGTNKSGNTYFQCTNYNHASCSESHSTNARVIQSAILESFKDVISSGNVVYNATATKKDDSERALIEDSIKKISFKEARIKQAYRDGIDTIEEYKENKRILSEEKANLEQMLSELKDDNAEQTLLLKKIRSAYDIIASDETSETQKHEALTSVVRKIVFNKKEEKFTLYYFINY

SEQ ID NO: 6976 - protein, 480 aa, Unknown
  Description of Unknown: Integrase B6977 sequence
  PTHR30461:SF3,IPR036162,PS51737,IPR011109,PTHR30461, PS00397,PF00239,G3DSA:1.10.10.2600,IPR006119,SSF53041, SM00857,IPR025827,IPR038109,PS51736,cd03768, IPR006118,PF13408,G3DSA:3.40.50.1390,PF07508,Coil
MATHKVAIYVRVSTTSQVDEGYSIDEQKAKLTSYCDIKDWSIYDIYTDGGFSGSNTERPALERLIKDAKRKLFDTVLVYKLDRLSRSQKDTLYLIEDVFLENDIEFVSLLENFDTSTPFGKALIGLLSVFAQLEREQIKERMQLGKLGRAKSGKSMMWSKTSYGYDYIKETGTLSVNPYQALIVRKMFEWYLSGMSVTKLRDTLNEQYGQDKEWSYRTVRVILSNPVYCGYNQFKGQIFPGTHEPIISEEDFNKAQEEIKTRQRTAAQRFNPRPFQAKYMLSGIAQCGYCSAPLAIKLGTIRKDGTRLVKYECKQRHPRKTKGVTVYNNNEKCDSGFYFKDDIEHFVLTEISKLQTDSDYIDKLFSNTNQETIDRDSYQKQIDNLTAKISRLNDLYIDDRISLEELQKRSSDFMAKRAALEKELDADTSLKTVERKEDVKRVLDTKDIFTLDYEQQKAIARALISKVRVTSESIVILWKL

SEQ ID NO: 6977 - protein, 480 aa, Unknown
  Description of Unknown: Integrase B6978 sequence
  PTHR30461:SF3,IPR036162,PS51737,IPR011109,PTHR30461, PS00397,PF00239,G3DSA:1.10.10.2600,IPR006119,SSF53041, SM00857,IPR025827,IPR038109,PS51736,cd03768, IPR006118,PF13408,G3DSA:3.40.50.1390,PF07508,Coil
MTMHKVAIYVRVSTTSQVDEGYSIDEQKAKLTSYCDIKDWNIYDIYTDGGFSGSNTERPALEQLIRDAKRKLFDTVLVYKLDRLSRSQKDTLYLIEDVFLENDIEFVSLLENFDTSTPFGKAMIGLLSVFAQLEREQIKERMQLGKLGRAKSGKSMQWAKTSFGYDYIKETGTLSVNPYQALIVRKMFEWYLSGMSITKLRDALNEQYGQDKEWNYRTVRVILSNPVYCGYNQFKGQIFPGTHEPIISEEDFNKTQEEIKTRQRTAAQRFNPRPFQAKYMLSGIAQCGYCSAPLAIKLGMKRKDGTRLVKYECKQRHPRKTKGVTVYNNNEKCDSGFYFKDDIEHFVLTEISKLQTDSDYIDKLFSNTDKETIDRDSYQKQIDKLTAKISRLNDLYIDDRISLEELQKRSSDFMAERTALEKELEADSSVKTVERKKDIRRVLDTKDIFSLDYEQQKAIARALISKVRVTSETIVILWKL

SEQ ID NO: 6978 - protein, 480 aa, Unknown
  Description of Unknown: Integrase B6979 sequence
  PTHR30461:SF3,IPR036162,PS51737,IPR011109,PTHR30461, PS00397,PF00239,G3DSA:1.10.10.2600,IPR006119,SSF53041, SM00857,IPR025827,IPR038109,PS51736,cd03768, IPR006118,PF13408,G3DSA:3.40.50.1390,PF07508,Coil
MAMHKVAIYVRVSTTSQVDEGYSIDEQKAKLTSYCEIKDWNIYEIYTDGGFSGSNTERPALEQLIRDAKRKLFDTVLVYKLDRLSRSQKDTLYLIEDVFLENDIEFVSLLENFDTSTPFGKAMIGLLSVFAQLEREQIKERMQLGKLGRAKSGKSMQWAKTSYGYDYIKETGTLSVNPYQALIVRKMFEWYLSGMSITKLRDALNEQYGQDKEWNYRTVRVILSNPVYCGYNQFKGQIFLGTHEPIISEEDFNKTQEEIKTRQRTAAQRFNPRPFQAKYMLSGIAQCGYCSAPLAIKLGMKRKDGTRLVKYECKQRHPRKTKGVTVYNNNEKCDSGFYFKDDIEHFVLTEISKLQTDSDYIDKLFSNTDKETIDRASYQKQIANLTAKISRLNDLYIDDRISLEELQKRSSDFMAERSALEKELDADSSVKAVERKKDMRRVLDTKDVFTLDYEQQKAIARALISKVRVTSETIVILWKL

SEQ ID NO: 6979 - protein, 480 aa, Unknown
  Description of Unknown: Integrase B6980 sequence
  PTHR30461:SF3,SM00857,G3DSA:1.10.10.2600,IPR036162,PF13408, IPR025827,PS51737,G3DSA:3.40.50.1390,IPR006119,IPR038109, IPR011109,SSF53041,PTHR30461,PS51736,cd00338, PF00239
MNSTYFRPQPELFGLRVVKYIRCSHDGQVLHGDTLEAQDALLDEFIKVNRMVLIDTFIDEALTARKKFTRRKEFVRLLDGVRAHSFDMILFTKLDRWFRNIGDYHKIQEILEANGVQWKAITESYDTTTTNGRLHINIRLSVAQDECDRDSDRIKDVFAYKLKNKTYLSGSLPRGLKLDDEKHVIIDPEWKQFALDMFDHFEQTNSKRGTLLYLKEKYGIYLCYDTISRNLRNSLYKGMYRDDPDFCEPLIEPERFDRIQVLGKRNVRQRYSNRTYVFTGLLICSSCNHYLVGQTTHRTLSDGTEKHYPSYRCNQRYQSHSCDRNRSYREDYVEEYLLQHIRPALSEYVAEYEVTGTNPARKNPAAEAAKIRTKMQKLYELYMDDLIDRDTYKRDYSAFQEKLKELDSIVVAPSRDLADLKKLLEQDYEEIYRTFSPQEKNAFWKSFVQSITVHEDGEMDIVFFMILFLLTMHRLSVLRS

SEQ ID NO: 6980 - protein, 480 aa, Unknown
  Description of Unknown: Integrase B6981 sequence
  PTHR30461:SF3,IPR036162,PS51737,IPR011109,PTHR30461, PS00397,PF00239,G3DSA:1.10.10.2600,IPR006119,SSF53041, SM00857,IPR025827,IPR038109,PS51736,cd03768, IPR006118,PF13408,G3DSA:3.40.50.1390,PF07508,Coil
MATHKVAIYVRVSTTSQVDEGYSIDEQKAKLTSYCDIKDWNIYDIYTDGGFSGSNTERPALEQLIRDAKRKLFDTVLVYKLDRLSRSQKDTLYLIEDVFLENDIEFVSLLENFDTSTPFGKAMIGLLSVFAQLEREQIKERMQLGKLGRAKSGKSMQWAKTSFGYDYIKETGTLSVNPYQALIVRKMFEWYLSGMSITKLRDTLNEQYGQDKEWNYRTVRVILSNPVYCGYNQFKGQIFPGTHEPIISEEDFNKTQEEIKTRQRTAAQRFNPRPFQAKYMLSGIAQCGYCSAPLAIKLGMKRKDGTRLVKYECKQRHPRKTKGVTVYNNNEKCDSGFYFKDDIEHFVLTEISKLQTDSDYIDKLFSNTDKETIDRASYQKQIDNLTAKISRLNELYIDDRISLEELQKRSSDFMAERSALEKELETDTSLKAVERKKDIRRVLDTKDIFTLDYEQQKAIARALISKVRVTSETIVILWKL

SEQ ID NO: 6981 - protein, 480 aa, Unknown
  Description of Unknown: Integrase B6982 sequence
  PTHR30461:SF3,IPR036162,PS51737,IPR011109,PTHR30461, PS00397,PF00239,G3DSA:1.10.10.2600,IPR006119,SSF53041, SM00857,IPR025827,IPR038109,PS51736,cd03768, IPR006118,PF13408,G3DSA:3.40.50.1390,PF07508,Coil
MATHKVAIYVRVSTTSQVDEGYSIDEQKAKLTSYCDIKDWNIYEIYTDGGFSGSNTERPALEQLIRDAKRKLFDTVLVYKLDRLSRSQKDTLYLIEDVFLENDIEFVSLLENFDTSTPFGKAMIGLLSVFAQLEREQIKERMQLGKLGRAKSGKSMMWSKTSYGYDYIKETGTLSVNPYQALIVRKMFQWYLSGMSITKLRDALNEQYGQDKEWNYRTVRVILSNPVYCGYNQFKGQIFPGTHEPIISEEDFNKTQEEIKTRQRTAAQRFNPRPFQAKYMLSGMAQCGYCSAPLAIKLGMKRKDGTRLVKYECKQRHPRKTKGVTVYNNNEKCDSGFYFKDDIEHFVLTEISKLQTDSDYIDKLFSNTNQETIDRDSYQKQIDNLTAKISRLNDLYIDDRISLEELQKRSSDFMAERTTLEKELDADSSVKVVERKEDIKRVLDTKDIFTLDYEQQKAIARALISKARVTSETIVILWKL

SEQ ID NO: 6982 - protein, 480 aa, Unknown
  Description of Unknown: Integrase B6983 sequence
  PTHR30461:SF3,IPR036162,PS51737,IPR011109,PTHR30461, PS00397,PF00239,G3DSA:1.10.10.2600,IPR006119,SSF53041, cd00338,SM00857,IPR025827,IPR038109,PS51736, IPR006118,PF13408,G3DSA:3.40.50.1390,PF07508,Coil
MKIGALYIRVSTDDQLEYSPAAQQKLGLDYAKKNGIVIPKDFIFVDEGISGRKVKNRPAFQQLISLAKSNEHPIEVILVWKFSRFARNQEESIVYKNLLKRAGVELVSISEPLPDGAIGQLVERIFEWMDEYYSINLGVEVLRGMSERARQGGCNVSPPLGYKMEDGSPVIDPEQAIIVKKIFDFFVNDKLSFYDIAVKLNSLGYKTKRGGKFQNRTVAYIVRNEFYDQQLVWNKTEKATRKLKDSSEWISVKGDYPRIISHELWEAAQERDKATRRPRGSRPASTYRHWLSGMLVCSNCGGKLVRVGTNKSGNTYFQCTNYNHASCSESHSTNARVIQSAILESFKDVISSGNVVYNATATKKDDSERALIEDSIKKISFKEARIKQAYRDGIDTIEEYKENKRILSEEKANLEQMLSELKDDNAEQTLLLKKIRSAYDIIASDETSETQKHEALTSVVQKIVFNKKEEKFTLYYFINY

SEQ ID NO: 6983 - protein, 480 aa, Unknown
  Description of Unknown: Integrase B6984 sequence
  cd00338,SM00857,G3DSA:1.10.10.2600,IPR036162,PS51737, G3DSA:3.40.50.1390,IPR006119,IPR038109,PF07508,IPR011109, SSF53041,PTHR30461,PS51736,Coil,PF00239
MPEDIKTAVIYARFSCSKQREASIDDQLRVCRDWCAREGYAIVGEYSDYAMSGRSDDRPQFQKMISNAGESDIVLVYMMDRFSRDEYDAPAYKHELRRKGVEVVSAMEAMPDGPERILIEKIYEGLAAVESVKTSMRTRRGMEGNALKCKTNGVRVYGYGRNDDDEYVVNEDEAAIVREAFRRSCDHEPVDSIASDFARRGVTTRTGRPCGYSMVYQMLHNRKYTGFYSWGGIEVEGGMPQIIDKATFAMAQEVKPKKRRASEDWGTFALSGRAICSECGHNMAGTSGRGKKNVKYEYYGCRCGAKPVRRDWLEHELAEAIRGMLRDRETALRISHMLWDEPEPEIADARRRAMASKRKAENGLQNIMAAIEQGIVMPEFTDRIAQLQAQKARAERDLASYDEARIDPEEFADFLQCGGGMDDAAVLDSFVYQVMVTPEECVATLYCDDERNEPARLSIARVRTFSGWCPQRDSNPRYPP

SEQ ID NO: 6984 - protein, 480 aa, Unknown
  Description of Unknown: Integrase B6985 sequence
  PTHR30461:SF3,IPR036162,PS51737,IPR011109,PTHR30461, PS00397,PF00239,G3DSA:1.10.10.2600,IPR006119,SSF53041, cd00338,SM00857,IPR025827,IPR038109, PS51736,IPR006118,PF13408,G3DSA:3.40.50.1390,PF07508,Coil
MQDLLPTAIYVRVSSEMQAGEDRYSIPEQIDRLRKYCDAQGWTIAKEYVDPGHSGSNLKRPAIQELISDTKNGFIRRVVVFKLDRLSRSQRDTMYLIEDVFKAHDVAFVSLSEMFDTSTPFGMAMIGILSVFAQLERENIKDRMSMGRLGRAKRGLWRGGCNTPVGYDFMDGQLVINEYEALQVREIFRLFIDEQLSFHAISREMQGRFTNKYSTYNDSGSISTILRNRLYIGKIKYGTQEFDGQHQPIIDREIFERAQARIEEISRNTGEHWKNPYHGKHLLSGLIWCGNCGARYFCVTTKRKNGPQYRYYQCYTRNGSSDMRKADFCKNPNWRVEKLNAAVMEEIRRLCTDEKYFNRIARDGKKENNNAGKEKALQRELSSIEKQISRLVELYQMGVSVQDIATRIHDAQERKNKLTQELLSLNQQSPKNRRQEALTYIHELKWCLDADDVAAQRRLLDALVNKIVITEGGFEVDWKF

SEQ ID NO: 6985 - protein, 480 aa, Unknown
  Description of Unknown: Integrase B6986 sequence
  PTHR30461:SF3,SM00857,G3DSA:1.10.10.2600,IPR036162,PF13408, IPR025827,G3DSA:3.40.50.1390,PS51737,IPR006119,IPR038109, PF07508,IPR011109,SSF53041,PTHR30461,Coil, PS51736,cd00338,PF00239
MTIIGEYCDKAISGKTDNRPSFQRLVKDSEKGQFEAVIMYTLDRFARNRYDSAIYKAKLKKNGVRVYYAKQPMPDTPEGIILESVLEGYAEYYSENLSRNIKRGMKENALQCIANGGAGMPLGYTVGEDRRYKIDPVGARIVQEIFQMYADGMSATQIINECNKRGYKTARGNAFNKNSLRTMLKNDRYIGVYRFADVVVEGGVPPIISRELFDKVQATLKHNYSARARNKAKDDYLLTAKLFCGHCGSSMVGESGTSKSGKLHHYYKCIERKRKHKCNKAVEKKDWMEELVVRFTVQQVLTDENIERIAVKAMEIIEKESADTTYVDGLRNELKEVKKKIKNLMTAIEQGIITPSTKERMDELELEKNEIEGRIASEEMKKPLLTKERIMYWLYSFKSGNIDDVEYKRRVIDTLVNSVYIYDEGDKGRRIVFTFNVSGQNTATLSCSDIACFAPPKKHCNFDTMCIRVAVLFLALFRII

SEQ ID NO: 6986 - protein, 480 aa, Unknown
  Description of Unknown: Integrase B6987 sequence
  PTHR30461:SF3,IPR036162,PS51737,IPR011109,PTHR30461, PS00397,PF00239,G3DSA:1.10.10.2600,IPR006119,SSF53041, SM00857,IPR025827,IPR038109,PS51736,cd03768, IPR006118,PF13408,G3DSA:3.40.50.1390,PF07508,Coil
MIATNKVAIYIRVSTTNQAEEGYSIEEQQEKLKAYCAIKDWSIYDVYIDGGFTGSNTDRPELKRLVKEAKNKKFDTVLVYKLDRLSRSQKDTLYLIEEVFTKNNIAFLSLLENFDTSSAFGKAMIGILSVFAQLEREQIKERMQLGKVGRAKSGKSMMWAKPSYGYIYHQETGEMTVDEYESIAIKFIFSSYLAGRSITKLRDDLNKKYPKKIAWNYKMVRHILDNPVYCGNIRFKDEIYSGNHEAIISKEDFEKVQEELVIRQRTAAENSNPRPFQAKYMLSGIAQCGYCKAPLKIIMGAIRKDGTRFIRYECYQRHPRKIKGVTVYNDNKKCNSGYYDKKELEQYVLKEVSKLQEDKEYLESLFNVPDKSIERDKIQGQVNILEKKIRRLNDLYVDDRISLDELKIKSDNFFKMKAVLETELENDPAIKQQKKKENMKKILKTKDILSMNYEQQKAIIRALITKVKVTAESIIIKWKI

SEQ ID NO: 6987 - protein, 480 aa, Unknown
  Description of Unknown: Integrase B6988 sequence
  PTHR30461:SF3,IPR036162,PS51737,IPR011109,PTHR30461, PS00397,PF00239,G3DSA:1.10.10.2600,IPR006119,SSF53041, cd00338,SM00857,IPR025827,IPR038109,PS51736, IPR006118,PF13408,G3DSA:3.40.50.1390,PF07508,Coil
MKIGALYIRVSTDDQLEYSPAAQQKLGLDYAKKNGIVIPKDFIFVDEGISGRKVKNRPAFQQLISLAKSNEHPIEVILVWKFSRFARNQEESIVYKNLLKRAGVELVSISEPLPDGAIGQLVERIFEWMDKYYSINLGVEVLRGMSERARQGGCNVSPPLGYKMEDGSPVIVPEQAIIVKKIFDFFVNDKLSFYDIAVKLNSLGYKTKRGGNFQNRTVAYIVRNEFYDQQLLWNKTEKATRKLKDSSEWISVKGDYPRIISHELWEAAQERDKATRRPRGSRPASTYRHWLSGMLVCSNCGGKLVRVGTNKSGNTYFQCTNYNHASCSESHSTNARVIQAAILESFKDVISSGNVVYNATATKKDDSERALIEDSIKKISFKEARIKQAYRDGIDTIEEYKENKRILSEEKANLEQMLSELKDDNAEQTLLLKKIRSAYDIIASDETSETQKHEALTSVVQKIVFNKKEEKFTLYYFINY

SEQ ID NO: 6988 - protein, 480 aa, Unknown
  Description of Unknown: Integrase B6989 sequence
  PTHR30461:SF3,IPR036162,PS51737,IPR011109,PTHR30461, PS00397,PF00239,G3DSA:1.10.10.2600,IPR006119,SSF53041, SM00857,IPR025827,IPR038109,PS51736,cd03768, IPR006118,PF13408,G3DSA:3.40.50.1390,PF07508,Coil
MATHKVAIYVRVSTTSQVDEGYSIDEQKAKLTSYCEIKDWNVYEIYTDGGFSGSNTERPALEQLIRDAKRKLFDTVLVYKLDRLSRSQKDTLYLIEDVFLENDIEFVSLLENFDTSTPFGKAMIGLLSVFAQLEREQIKERMQLGKLGRAKSGKAMQWSKTSYGYDYVKETGTLSINPYQALIVRKMFKWYLSGMSITKLRDALNEQYGQDKEWNYRTVRVILSNPVYCGYNQFKGQIFPGTHEPIISEDDFNKTQEEIKTRQRTAAQRFNPRPFQAKYMLSGIAQCGYCSAPLAIKLGMKRKDGTRLVKYECKQRHPRKTKGVTVYNNNEKCDSGFYFKDDIEHFVLTEISKLQTDSDYIDKLFSNTDKETIDRDSYQKQIDNLTAKISRLNDLYIDDRISLEELQKRSSDFMAERTALEKELDADTSLKAVERKKDIRRVLDTKDIFTLDYNQQKAIARALISKVKVTSKSIVILWKL

SEQ ID NO: 6989 - protein, 480 aa, Unknown
  Description of Unknown: Integrase B6990 sequence
  PTHR30461:SF3,IPR036162,PS51737,IPR011109,PTHR30461, PS00397,PF00239,G3DSA:1.10.10.2600,IPR006119,SSF53041, cd00338,SM00857,IPR025827,IPR038109,PS51736, IPR006118,PF13408,G3DSA:3.40.50.1390,PF07508,Coil
MIDKEIVALYVRVSTQEQAREGYSIEEQKDKLIKYAEAHGWIIYNTYVDAGYSGGSLERPSIKRLLDDADGNKFSKVVVYKLDRISRSQKDTLFLIEDVFIPNGVDFVSMSENFDTSTPFGKFMIGILSTFAQLERETIKERTRLGKEGRAKSGLWGGGGRVPIGYRYDNNDNLTIDPYEATIVKRIYKEYTEDLKTIREISRQLRQEKLRSSYGPFPKTTVFNILHHKVYAGYIMYNGKDYAGIHEPIISLETWEKAQERLKYYQKEDKNNLNFYKKASIITSMVVCPYCGDIMILKYDKVGGKKNWTKEKGYKIFLSCKDKIKKGCPNKRYKLSEIEDLVLKELKKLKIDPDYLDSVKSKTESAIDNNEADVLRNQIKVNEDKISKLMDLYSLGTIDITTIKEKVDEINDEIDGLRSRIEVLEKNTDEVITVEDIVERLDKLEYYLDLEDIENTHAIISSLINRIEVTPDETRIYWRF

SEQ ID NO: 6990 - protein, 480 aa, Unknown
  Description of Unknown: Integrase B6991 sequence
  PTHR30461:SF3,IPR036162,PS51737,IPR011109,PTHR30461, PS00397,PF00239,G3DSA:1.10.10.2600,IPR006119,SSF53041, SM00857,IPR025827,IPR038109,PS51736,cd03768, IPR006118,PF13408,G3DSA:3.40.50.1390,PF07508,Coil
MATHKVAIYVRVSTTSQVDEGYSIDEQKAKLTSYCDIKDWNIYDIYTDGGFSGSNTERPALELLIRDAKRKLFDTVLVYKLDRLSRSQKDTLYLIEDVFLENDIEFVSLLENFDTSTPFGKAMIGLLSVFAQLEREQIKERMQLGKLGRAKSGKSMQWAKTSYGYDYIKETGTLSVNPYQALIVRKMFEWYLSGMSITKLRDTLNEQYGQDKEWSYRTVRVILSNPVYCGYNQFKGQIFPGTHEPIISEEDFNKAQEEIKTRQRTAAQRFNPRPFQAKYMLSGIAQCGYCSAPLAIKLGTIRKDGTRLVKYECKQRHPRKTKGVTVYNNNAKCDSGFYFKDDIEHFVLTEISKLQTDSDYIDKLFSNTDKETIDRDSYQKQIDNLTAKISRLNDLYIDDRISLEELQKRSSDFMAERTALEKELEADTSLKAVERKEDVRRVLDTKDIFTLDYEQQKAIARALISKVRVTSESIIILWKL

SEQ ID NO: 6991 - protein, 480 aa, Unknown
  Description of Unknown: Integrase B6992 sequence
  PTHR30461:SF3,IPR036162,PS51737,IPR011109,PTHR30461, PS00397,PF00239,G3DSA:1.10.10.2600,IPR006119,SSF53041, SM00857,IPR025827,IPR038109,PS51736,cd03768, IPR006118,PF13408,G3DSA:3.40.50.1390,PF07508,Coil
MTTHKVAIYVRVSTTSQADEGYSIDEQKAKLTSYCEIKDWNIYEIYTDGGFSGSNTERPALEQLIRDAKRKLFDTVLVYKLDRLSRSQKDTLYLIEDVFLENNIEFVSLLENFDTSTPFGKAMIGLLSVFAQLEREQIKERMQLGKLGRAKSGKSMQWAKTSYGYDYIKETGTLSVNPYQALIVRKMFKWYLSGMSITKLRDALNEQYGQDKEWNYRTVRVILSNPVYCGYNQFKGQIFPGTHEPIVSEDDFNKTQEEIKTRQRTAAQRFNPRPFQAKYMLSGIAQCGYCSAPLAIKLGMIRKDGTRLVKYECKQRHPRKTKGVTVYNNNAKCDSGFYFKDDIEHFVLAEISKLQTDSDYIDKLFSNTDKETIDRASYQKQIDNLTAKISRLNDLYIDDRISLEELQKRSSDFMAERTALEKELDADTSLKAVERKKDIRRVLDTKDVFTLDYEQQKAIARALISKVRVTSETIVILWKL

SEQ ID NO: 6992 - protein, 480 aa, Unknown
  Description of Unknown: Integrase B6993 sequence
  PTHR30461:SF3,IPR036162,PS51737,IPR011109,PTHR30461, PS00397,PF00239,G3DSA:1.10.10.2600,IPR006119,SSF53041, cd00338,SM00857,IPR025827,IPR038109,PS51736, IPR006118,PF13408,G3DSA:3.40.50.1390,PF07508,Coil
MKIGALYIRVSTDDQLEYSPAAQQKLGLDYAKKNGIVIPKDFIFVDEGISGRKVKNRPAFQQLISLAKSNEHPIEVILVWKFSRFARNQEESIVYKNLLKRAGVELVSISEPLPDGAIGQLVERIFEWMDEYYSINLGVEVLRGMSERARQGGCNISPPLGYKMEDGSPVIVPEQAIIVKKIFDLFVNDKLSFYEIAGKLNSLGYKTKRGGNFQNRTVAYIVRNEFYDQQLLWNKTEKATRKLKDSSEWISVKADYPRIISHELWKAAQERDKATRRPRGSRPASTYRHWLSGMLVCSNCGGKLVRVGTNKSGNTYFQCTNYNHASCSESHSTNARIIQSAILESFKDVISSGNVVYNATATKKDDSERALIEDNIKKISFKEARIKQAYRDGIDTIEEYKENKRILFEEKANLEQMLSELKDDNAEQTLLLKKIRSAYDIIASDETSETQKHEALTSVVQKIVFNKKEEKFTLYYFINY

SEQ ID NO: 6993 - protein, 480 aa, Unknown
  Description of Unknown: Integrase B6994 sequence
  PTHR30461:SF3,IPR036162,PS51737,IPR011109,PTHR30461, PS00397,PF00239,G3DSA:1.10.10.2600,IPR006119,SSF53041, SM00857,IPR025827,IPR038109,PS51736,cd03768, IPR006118,PF13408,G3DSA:3.40.50.1390,PF07508,Coil
MTTHKVAIYVRVSTTSQVDEGYSIDEQKAKLTSYCEIKDWNIYEIYTDGGFSGSNTERPALEQLIRDAKRKLFDTVLVYKLDRLSRSQKDTLYLIEDVFLENDIEFVSLLENFDTSTPFGKAMIGLLSVFAQLEREQIKERMQLGKLGRAKSGKSMQWAKTSYGYDYIKETGTLSVNPYQALIVRKMFEWYLSGMSITKLRDALNEQHGQDKEWNYRTVRVILSNPVYCGYNQFKGQIFPGTHEPIISEEDFNKTQEEIKTRQRTAAQRFNPRPFQAKYMLSGIAQCGYCSAPLAIKLGMIRKDGTRLVKYECKQRHPRKTKGATVYNNNEKCDSGFYFKDDIEHFVLTEISKLQTDSDYIDKLFSNTGKETIDRASYQKQIDNLTAKISRLNDLYIDDRISLEELQKRSSDFMAERTALEKELDADTSLKAVERKEDIRRVLDTKDIFTLDYEQQKAIARALISKVRVTSESIVILWKL

SEQ ID NO: 6994 - protein, 480 aa, Unknown
  Description of Unknown: Integrase B6995 sequence
  PTHR30461:SF3,IPR036162,PS51737,IPR011109,PTHR30461, PS00397,PF00239,G3DSA:1.10.10.2600,IPR006119,SSF53041, SM00857,IPR025827,IPR038109,PS51736,cd03768, IPR006118,PF13408,G3DSA:3.40.50.1390,PF07508,Coil
MATHKVAIYVRVSTTSQVDEGYSIDEQKAKLTSYCDIKDWSIYEIYTDGGFSGSNTERPALEQLIRDAKRKLFDTVLVYKLDRLSRSQKDTLYLIEDVFLENNIEFVSLLENFDTSTPFGKAMIGLLSVFAQLEREQIKERMQLGKLGRAKSGKSMQWAKTSYGYDYIKETGTLSVNPYQALIVRKMFEWYLSGMSITKLRDALNEQYGQDKEWSYRTVRVILSNPVYCGYNQFKGQIFPGTHEPIISEEDFNKAQEEIKTRQRTAAQRFNPRPFQAKYMLSGIAQCGYCSAPLAIKLGTIRKDGTRLVKYECKQRHPRKTKGVTVYNNNEKCDSGFYFKDDIEHFVLTEISKLQTDSDYIDKLFSNTNQETIDRDGYQKQIDNLTAKISRLNDLYIDDRISLEELQKRSSDFMAERTALEKELEADTSLKAVERKEDVRRVLDTKDIFTLDYEQQKTIVRSLINKVRVTSETIIILWKL

SEQ ID NO: 6995 - protein, 480 aa, Unknown
  Description of Unknown: Integrase B6996 sequence
  PTHR30461:SF3,IPR036162,PS51737,IPR011109,PTHR30461, PS00397,PF00239,G3DSA:1.10.10.2600,IPR006119,SSF53041, SM00857,IPR025827,IPR038109,PS51736,cd03768, IPR006118,PF13408,G3DSA:3.40.50.1390,PF07508,Coil
MTMHKVAIYVRVSTTSQVDEGYSIDEQKAKLTSYCDIKDWNVYDIYTDGGFSGSNTERPALEQLVRDAKRKLFDTVLVYKLDRLSRSQKDTLYLIEDVFLENNIEFVSLLENFDTSTPFGKAMIGLLSVFAQLEREQIKERMQLGKLGRAKSGKSMMWSKTSFGYDYIKETGTLSVNPYQALIVKKMFQWYLSGMSITKLRDTLNEQYGQDKEWSYRTVRGILSNPVYCGYNQFKGQIFPGTHEAIISEEEYNKTQEEIKTRQRTAAQRFNPRPFQAKYMLSGIAQCGYCSAPLAIKLGTIRKDGTRLVKYECKQRHPRKTKGVTVYNNNEKCDSGFYFKDDIEHFVLTEISKLQTDSDYIDELFSNTNQETIDRDSYQKQIDNLTAKISRLNDLYIDDRISLEGLQKRSSDFMAERTALEKELDADTSLKAVERKEDVRRVLDTKDIFTLDYEQQKAIARALISKVRVTSESIVILWKL

SEQ ID NO: 6996 - protein, 480 aa, Unknown
  Description of Unknown: Integrase B6997 sequence
  PTHR30461:SF3,IPR036162,PS51737,IPR011109,PTHR30461, PS00397,PF00239,G3DSA:1.10.10.2600,IPR006119,SSF53041, SM00857,IPR025827,IPR038109,PS51736,cd03768, IPR006118,PF13408,G3DSA:3.40.50.1390,PF07508,Coil
MATHKVAIYVRVSTTSQVDEGYSIDEQKAKLTSYCDIKDWNIYEIYTDGGFSGSNTERPALEQLIRDAKRKLFDTVLVYKLDRLSRSQKDTLYLIEDIFLENDIEFVSLLENFDTSTPFGKAMIGLLSVFAQLEREQIKERMQLGKLGRAKSGKSMQWAKTSFGYDYIKETGTLSVNPYQALIVRKMFEWYLSGMSITKLRDALNEQYGQDKEWSYRTVRVILSNPVYCGYNQFKGQIFPGAHEPIISEEDFNKTQEEIKTRQRTAAQRFNPRPFQAKYMLSGIAQCGYCSAPLAIKLGMIRKDGTRLVKYECKQRHPRKIKGVTVYNNNAKCDSGFYFKDDIEHFVLTEISKLQTDSDYIDKLFSNTDKETIDRASYQKQIDNLTAKISRLNDLYIDDRISLEELQKRSSDFMAERSALEKELDADSSLKAVERKKDIRRVLDTKDIFTLDYEQQKTIARALISKVRVTSESIVILWKL

SEQ ID NO: 6997 - protein, 480 aa, Unknown
  Description of Unknown: Integrase B6998 sequence
  PTHR30461:SF3,IPR036162,PS51737,IPR011109,PTHR30461, PS00397,PF00239,G3DSA:1.10.10.2600,IPR006119,SSF53041, SM00857,IPR025827,IPR038109,PS51736,cd03768, IPR006118,PF13408,G3DSA:3.40.50.1390,PF07508,Coil
MAMHKVAIYVRVSTTSQVDEGYSIDEQKAKLTSYCDIKDWNIYEIYTDGGFSGSNTERPALEQLIRDAKRKLFDTVLVYKLDRLSRSQKDTLYLIEDVFLENDIEFVSLLENFDTSTPFGKAMIGLLSVFAQLEREQIKERMQLGKLGRAKSGKSMQWAKTSYGYDYIKETGTLSVNPYQALIVRKMFEWYLSGMSMTKLRDTLNEQYGQDKEWNYRTVRVILSNPVYCGYNQFKGQIFPGTHEPIISEEDFNKTQEEIKTRQRTAAQRFNPRPFQAKYMLSGIAQCGYCSAPLAIKLGMIRKDGTRLVKYECKQRHPRKTKGVTVYNNNAKCDSGFYFKDDIEHFVLTEISKLQTDSDYIDKLFSNTDKETIDRASYQKQIDNLTAKISRLNDLYIDDRISLEELQKRSSDFMAERSALEKELDADTSLKAVERKKDIRRVLDTKDILTLDYERQKTIARALISKVRVTSESIVILWKL

SEQ ID NO: 6998 - protein, 480 aa, Unknown
  Description of Unknown: Integrase B6999 sequence
  PTHR30461:SF3,IPR036162,PS51737,IPR011109,PTHR30461, PS00397,PF00239,G3DSA:1.10.10.2600,IPR006119,SSF53041, SM00857,IPR025827,IPR038109,PS51736,cd03768, IPR006118,PF13408,G3DSA:3.40.50.1390,PF07508,Coil
MATHKVAIYVRVSTTSQVDEGYSIDEQKAKLTSYCDIKDWNIYDIYTDGGFSGSNTERPALERLIRDAKRKLFDTVLVYKLDRLSRSQKDTLYLIEDVFLENDIEFVSLLENFDTSTPFGKAMIGLLSVFAQLEREQIKERMQLGKLGRAKSGKSMQWAKTSYGYDYIKETGTLSVNPYQALIVRKMFEWYLSGMSITKLRDALNEQYGQDKEWSYRTVRVILSNPVYCGYNQFKGQIFPGTHEPIISEDDFNKTQEEIKTRQRTAAQRFNPRPFQAKYMLSGIAQCGYCSAPLAIKLGMKRKDGTRLVKYECKQRHPRKTKGVTVYNNNEKCDSGFYFKDDIEHFVLTEISKLQTDSDYIDKLFSNTDKETIDRASYQKQIDNLTAKISRLNDLYIDDRISLEELQKRSSDFMAERSALEKELDADSSLKAVERKKDIRRVLDTKDIFTLDYEQQKTIARALISKVRVTSESIVILWKL

SEQ ID NO: 6999 - protein, 480 aa, Unknown
  Description of Unknown: Integrase B7000 sequence
  PTHR30461:SF3,IPR036162,PS51737,IPR011109,PTHR30461, PS00397,PF00239,G3DSA:1.10.10.2600,IPR006119,SSF53041, cd00338,SM00857,IPR025827,IPR038109,PS51736, IPR006118,PF13408,G3DSA:3.40.50.1390,PF07508,Coil
MKIGALYIRVSTDDQLEYSPAAQQKLGLDYAKKNGIVIPKDFIFVDEGISGRKVKNRPAFQQLISLAKSNEHPIEVILVWKFSRFARNQEESIVYKNLLKRAGVELVSISEPLPDGAIGQLVERIFEWMDEYYSINLGVEVLRGMSERARQGGCNVSPPLGYKMEDGSPVIVPEQAIIVKKIFDFFVNDKLSFYDIAGKLNSLGYKTKRGGNFQNRTVAYILRNEFYDQQLVWNKTEKATRKLKDSSEWISVKGDYPRIISHELWEAAQERDKATRRPRGSRPASTYRHWLSGMLVCSNCGGKLVRVGTNKSGNTYFQCTNYNHASCSESHSTNAHIIQSAILESFKDVISSGNVVYNATATKKDDSERALIEDNIKKISFKEARIKQAYRDGIDTIEEYKENKRILFEEKANLEQMLSELKDDNAEQTLLLKKIRSAYDIIASDETSETQKHEALTSVVHKIVFNKKEEKFTLYYFINY

SEQ ID NO: 7000 - protein, 480 aa, Unknown
  Description of Unknown: Integrase B7001 sequence
  cd00338,SM00857,IPR006118,G3DSA:1.10.10.2600,IPR036162, PS51737,G3DSA:3.40.50.1390,IPR006119,IPR038109,PF07508, IPR011109,SSF53041,PTHR30461,PS00397,PS51736, Coil,PF00239
MDKKIGAAYIRVSTDDQLEYSPESQIKLIQEYAKQHDIIVPEEYIFRDDGISGRTAKKRPGFLQMIATAKQKPRPFEVILVWKFSRFARNQEESVVYKSLLKKENGIEVVSISEPLMEGPFGDLIERIIEWFDAFYSINLATEVRRGMTERVQKGGAVSVAPLGYVYEDKQLIIEPSEAETVRMIYRDFLDGASIVGIAKKLNSIGIKTKRGGTWENRTVRYILTNPIYTGKVRWSPQGANNYHKHNASSLDTIIIEGKHEAIISQDTFDAAQKQIVERVDSLHGSFDLVRKREDGHHMLQGVVKCSACGGTLTKTAHGQLQCSKYMHGRCTQSHSIKLETMENLVLSAMKMQFETLDFNFASKPAQQDDQKDEIMRQIKKEQEILQRCREAYAAGIDTLEEYRQNKMACKARIDRLQASIIKPEKPVDKAEFAAKHSNALQRLTDQSTPPEEKHRIINSFVDHITYFKEFQAVDIVYRT

SEQ ID NO: 7001 - protein, 480 aa, Unknown
  Description of Unknown: Integrase B7002 sequence
  PTHR30461:SF3,IPR036162,PS51737,IPR011109,PTHR30461, PS00397,PF00239,G3DSA:1.10.10.2600,IPR006119,SSF53041, cd00338,SM00857,IPR025827,IPR038109,PS51736, IPR006118,PF13408,G3DSA:3.40.50.1390,PF07508,Coil
MQDLLPTAIYVRVSSEMQAGEDRYSIPEQIDRLRKYCDAQGWTIAKEYVDPGHSGSNLKRPAIQELISDAKNGFIRRVVVFKLDRLSRSQRDTMYLIEDVFKAHDVAFVSLSEMFDTSTPFGMAMIGILSVFAQLERENIKDRMSMGRLGRAKRGLWRGGSNTPVGYDFIDGQLVINEYEALQVREIFRLFIDEQLSFHAISREMQSRFTNKYSTYNDSGSISTILRNRLYIGKIKYGTQEFDGQHQPIIDRETFERAQARIEEISRNTGEHWKNPYHGKHLLSGLIWCGNCGARYFCVTTKRKNGPQYRYYQCYTRNGSSDMRKADFCKNPNWRVEKLNAAVMEEIRRLCTDEKYFNRIARDGKKENNNAGKEKALQRELSSIEKQISRLVELYQMGVSVQDIATRIHDAQERKNKLTQELLSLNQQSPKNRRQEALTYIHELKWCLDTDDVAAQRRLLDALVNKIVITDGGFEVDWKF

SEQ ID NO: 7002 - protein, 480 aa, Unknown
  Description of Unknown: Integrase B7003 sequence
  PTHR30461:SF3,IPR036162,PS51737,IPR011109,PTHR30461, PS00397,PF00239,G3DSA:1.10.10.2600,IPR006119,SSF53041, cd00338,SM00857,IPR025827,IPR038109,PS51736, IPR006118,PF13408,G3DSA:3.40.50.1390,PF07508,Coil
MKFAIYVRVSTLEQAEEGYSIEEQIDKLIKYCEVKNWDIFKVYKDGGFSGSTTDRPGLSSLITDSKRKKFQGVLVYKLDRLSRSQKDTLYLIEDIFTANDISFVSLNENFDTSSAFGKAMIGILAVFAQLEREQIKERMVMGKVGRAKSGKAMSWSKVPFGYIYENDTYVAHPIQAPIVKQIFDDYMSGISITKLKEKLNDEGHIGKEISWSYRTIRQTLANPIYAGINRYNGELFEGNHEGIITKDYFEKVQSELKVRQVAAYEKNNNPRPFQSKYMLSGIIRCGLCGASLSVGMRAKRKDGSRHRYYRCYSKSKKKNLTMTKDPNGCSSPNYSMDELEKHILSQIEKIRLNPELIDVLSSNDSVVDLSSYDKRIDELDLSLEKIVNLFIDDAIPKDILEARMEKIKQEKDSLENKIDSLKLKRPILEPIDAKDILSKLTDNIWNLSYEDQKSIVMELISKILVYPDKLEIHWKFAINQ

SEQ ID NO: 7003 - protein, 480 aa, Unknown
  Description of Unknown: Integrase B7004 sequence
  PTHR30461:SF3,IPR036162,PS51737,IPR011109,PTHR30461, PS00397,PF00239,G3DSA:1.10.10.2600,IPR006119,SSF53041, SM00857,IPR025827,IPR038109,PS51736,cd03768, IPR006118,PF13408,G3DSA:3.40.50.1390,PF07508,Coil
MATHKVAIYVRVSTTSQVDEGYSIDEQKAKLTSYCDIKDWNIYEIYTDGGFSGSNTERPALEQLIRDAKRKLFDTVLVYKLDRLSRSQKDTLYLIEDVFLENDIEFVSLLENFDTSTPFGKAMIGLLSVFAQLEREQIKERMQLGKLGRAKSGKSMQWAKTSFGYDYIKETGTLSVNPYQALIVRKMFEWYLSGMSITKLRDALNEQYGQDKEWSYRTVRVILSNPVYCGYNQFKGQIFPGAHEPIISEEDFNKTQEEIKTRQRTAAQRFNPRPFQAKYMLSGIAQCGYCSAPLAIKLGMIRKDGTRLVKYECKQRHPRKIKGVTVYNNNAKCDSGFYFKDDIEHFVLTEISKLQTDSDYIDKLFSNTDKETIDRASYQKQIDNLTAKISRLNDLYIDDRISLEELQKRSSDFMAERSALEKELDADSSLKAVERKKDIRRVLDTKDIFTLDYEQQKTIARALISKVRVTSESIVILWKL

SEQ ID NO: 7004 - protein, 480 aa, Unknown
  Description of Unknown: Integrase B7005 sequence
  PTHR30461:SF3,IPR036162,PS51737,IPR011109,PTHR30461, PS00397,PF00239,G3DSA:1.10.10.2600,IPR006119,SSF53041, SM00857,IPR025827,IPR038109,PS51736,cd03768, IPR006118,PF13408,G3DSA:3.40.50.1390,PF07508,Coil
MTMHKVAIYVRVSTTNQVEEGYSIDEQKAKLTSYCDIKDWNIYEIYTDGGFSGSNTERPALEQLIRDAKRKLFDTVLVYKLDRLSRSQKDTLYLIEDIFLENDIEFVSLLENFDTSTPFGKAMIGLLSVFAQLEREQIKERMQLGKLGRAKSGKSMMWSKTSYGYDYIKETGTLSVNPYQALIVRKMFEWYLSGMSITKLRDALNEQYGQGKEWSYRTVRVILSNPVYCGYNQFKGQIFPGTHEPIISEEDFNKTQEEIKTRQRTAAQRFNPRPFQAKYMLSGIAQCGYCSAPLAIKLGMKRKDGTRLVKYECKQRHPRKTKGVTVYNNNAKCDSGFYFKDDIEHFVLTEISKLQTDSDYIDKLFSNTNQETIDRDSYQKQIDNLTAKISRLNDLYIDDRISLEELQKRSSDFMAKRATLEKELDADTSLKAVERKKDIRRVLDAKDIFTLDYEHQKAIVRALISKVRVTSETIVILWKL

SEQ ID NO: 7005 - protein, 480 aa, Unknown
  Description of Unknown: Integrase B7006 sequence
  PTHR30461:SF3,SM00857,G3DSA:1.10.10.2600,IPR036162,PF13408, IPR025827,G3DSA:3.40.50.1390,PS51737,IPR006119,IPR038109, PF07508,SSF53041,IPR011109,PTHR30461,Coil, cd00338,PF00239
MTIIGEYCDRAISGKTDNRPNFQRLIKDSEKGQFEAVIMYTLDRFARNRYDSAIYKAKLKKNGVKVYYAKQPMPDTPEGIILESVLEGYAEYYSENLSRNIKRGMKENALQCLANGGAGMPLGYTVGEDRKYQIDPVGAKIVQEIFQMYADGMSATQIINECNRRGYKTSRGNTFNKNSLRTMLKNDRYIGVYRFADVIVEDGVPPIISRELFDKVQATLRHNYSARARNKAKDDYLLTTKLFCGHCGSSMVGESGTSKSGKLHHYYKCIDRKRKRKCKKAVEKKAWIEELVVRFTVQNVLTDENIERIAAKAMEIIEKESADTSYLDGLQSELKDIKKKIKNLMTAIEQGIITASTKERMDELESEKNEIEGKIAREEMKKPLLTKERIMYWLYSFKSGDIDNIEYQRRVIDTLVNSVYVYDDGEKGRRIVFTFNISGQNTATLSCSDIACMAPPKRQNPNLFLIRDGFGFVFYLEDTI

SEQ ID NO: 7006 - protein, 480 aa, Unknown
  Description of Unknown: Integrase B7007 sequence
  PTHR30461:SF3,IPR036162,PS51737,IPR011109,PTHR30461, PS00397,PF00239,G3DSA:1.10.10.2600,IPR006119,SSF53041, cd00338,SM00857,IPR025827,IPR038109,PS51736, IPR006118,PF13408,G3DSA:3.40.50.1390,PF07508,Coil
MQDLLPTAIYVRVSSEMQAGEDRYSIPEQIDRLRKYCDAQGWTIAKEYVDPGHSGSNLKRPAIQELISDAKNGFIRRVVVFKLDRLSRSQRDTMYLIEDVFKAHDVAFVSLSEMFDTSTPFGMAMIGILSVFAQLERENIKDRMSMGRLGRAKRGLWRGGSNTPVGYDFIDGQLVINEYEALQVREIFRLFIDEQLSFHAISREMQGRFTNKYSTYNDSGSISTILRNRLYIGKIKYGTQEFDGQHQPIIDRETFERAQARIEEISRNTGEHWKNPYHGKHLLSGLIWCGNCGARYFCVTTKRKNGPQYRYYQCYTRNGSSDMRKADFCKNPNWRVEKLNAAVMEEIRRLCTDEKYFNRIARDGKKENNNAGKEKALQRELSSIEKQISRLVELYQMGVSVQDIATRIHDAQERKNKLTQELLSLNQQSPKNRRQEALTYIHELKWCLDADDVAAQRRLLDALVNKIVITEGGFEVDWKF

SEQ ID NO: 7007 - protein, 480 aa, Unknown
  Description of Unknown: Integrase B7008 sequence
  PTHR30461:SF3,IPR036162,PS51737,IPR011109,PTHR30461, PS00397,PF00239,G3DSA:1.10.10.2600,IPR006119,SSF53041, cd00338,SM00857,IPR025827,IPR038109,PS51736, IPR006118,PF13408,G3DSA:3.40.50.1390,PF07508,Coil
MKIGALYIRVSTDDQLEYSPAAQQKLGLDYAKKNGIVIPKDFIFVDEGISGRKVKNRPAFQQLISLAKSNEHPIEVILVWKFSRFARNQEESIVYKNLLKRAGVELVSISEPLPDGAIGQLVERIFEWMDEYYSINLGVEVLRGMSERARQGGCNVSPPLGYKMEDGSPVIVPEQAIIVKKIFDFFVNDKLSFYDIAVKLNSLGYKTKRGGNFQNRTVAYILRNEFYDQQLVWNKTEKATRKLKDSSEWISVKGDYPRIISHELWEAAQERDKATRRPRGSRPASTYRHWLSGMLVCSNCGGKLVRVGTNKSGNTYFQCTNYNHASCSESHSTNARVIQSAILESFKDVISSGNVVYNATATKKDDSERALIEDSIKKISFKEARIKQAYRDGIDTIEEYKENKRILSEEKANLERMLSELKDDNAEQTLLLKKIRSAYDIIASDETSETQKHEALTSVVQKIVFNKKEEKFTLYYFINY

SEQ ID NO: 7008 - protein, 480 aa, Unknown
  Description of Unknown: Integrase B7009 sequence
  PTHR30461:SF3,IPR036162,PS51737,IPR011109,PTHR30461, PS00397,PF00239,G3DSA:1.10.10.2600,IPR006119,SSF53041, SM00857,IPR025827,IPR038109,PS51736,cd03768, IPR006118,PF13408,G3DSA:3.40.50.1390,PF07508,Coil
MATHKVAIYVRVSTTSQADEGYSIDEQKAKLTSYCDIKDWNIYEIYTDGGFSGSNTERPALEQLIRDAKRKLFDTVLVYKLDRLSRSQKDTLYLIEDVFLENDIEFVSLLENFDTSTPFGKAMIGLLSVFAQLEREQIKERMQLGKLGRAKSGKSMQWAKTSYGYDYVKETGTLSINPYQALIVRKMFKWYLSGMSITKLRDALNEQYGQDKEWSYRTVRAILSNPVYCGYNQFKGQIFPGAHEPIISEEDFNKTQEEIKIRQRTAAQRFNPRPFQAKYMLSGIAQCGYCSAPLAIKLGMKRKDGTRLVKYECKQRHPRKTKGVTVYNNNEKCDSGFYFKDDIEHFVLTEISKLQTDSDYIDKLFSNSNQETIDRDSYQKQIDNLTAKISRLNDLYIDDRISLEELQKRSSDFMAERTALEKELDADSSIKTVERKKDIRRVLDTKDIFSLDYEHQKAIARALISKVRVTSETIVILWKL

SEQ ID NO: 7009 - protein, 480 aa, Unknown
  Description of Unknown: Integrase B7010 sequence
  PTHR30461:SF3,IPR036162,PS51737,IPR011109,PTHR30461, PS00397,PF00239,G3DSA:1.10.10.2600,IPR006119,SSF53041, SM00857,IPR025827,IPR038109,PS51736,cd03768, IPR006118,PF13408,G3DSA:3.40.50.1390,PF07508,Coil
MRTAIYVRVSTLEQAQEGYSIDEQIDKLKKYCAAKDWNVYQIYKDPGFTGSNTNRPGLNALISAAKRNLFDTVLVYKLDRLSRSQKDTLYLIEDVFGKMGISFVSLNENFDTSTPFGKAMIGILAVFAQLEREQIKERMSMGKLGRAKSGKAMAWNKSPFGYRYENGNYVIEPIEAQIVKRIFDEYLSGTSITKIRDHLNEEGHIGKKAEWPYRSIRSILDNATYAGFSKFKEELFEGNHEAIVTKEAYFTTQKELEIRQKEAYKKNNNPRPFQAKYMLSGLMRCGICGSTFEVNLRNVRKDGTRLKKYRCASHSSKRHNYTIKRNPNGCTSPTYDMEELENAILAQIEKLRINTDIIQEKSLTQSDVDTNSYEIKLKQLNSQLEKLIDLYLDMEIPKKTLEIRKKSIIHEIDSIETKLESLKENNNNQVSVKELMRELSNIKSSVYTLPYDQQKNLVRKLIKNIVVYPERMEVHWVFEK

SEQ ID NO: 7010 - protein, 480 aa, Unknown
  Description of Unknown: Integrase B7011 sequence
  PTHR30461:SF3,IPR036162,PS51737,IPR011109,PTHR30461, PS00397,PF00239,G3DSA:1.10.10.2600,IPR006119,SSF53041, SM00857,IPR025827,IPR038109,PS51736,cd03768, IPR006118,PF13408,G3DSA:3.40.50.1390,PF07508,Coil
MKTTNKVAIYIRVSTTSQVEEGYSIDEQKDKLASYCKIKDWNVYKVYTDGGFSGSNTERPALEKLIKDAKNKKFDTVLVYKLDRLSRSQKDTLYLIEEIFIKNGIEFLSLQENFDTSTPFGKAMIGLLAVFAQLEREQIKERMQLGKLGRAKSGKSMMWARTSYGYDYHRDTGTMTINEVEAIAIRDIFESYLNGMSVTKIRDMLNDKYPKTPNWHYRIVRGILANPVYCGYNQYKGHVFPGNHEPIINEEAFNKTQEELKIRQQTALEKFNPRPFRAKYMLSGIAQCGYCGAPLSITLGTIRKDGTRNIRYQCKNRFPRATKGVTVYNDNKKCDSGFYEKADIERYVIEQICKLQHDKKYVEELFADNGPSVDRVACQKQIDLLTNKISRLNDLYIDDRITLEELQVKSSEFSSQRAILEKELENDPALKRKKREKEMKKILRTGDISGLDYEHQKNLVRSLINKVQVTVDKIVIKWKI

SEQ ID NO: 7011 - protein, 480 aa, Unknown
  Description of Unknown: Integrase B7012 sequence
  PTHR30461:SF3,IPR036162,PS51737,IPR011109,PTHR30461, PS00397,PF00239,G3DSA:1.10.10.2600,IPR006119,SSF53041, SM00857,IPR025827,IPR038109,PS51736,cd03768, IPR006118,PF13408,G3DSA:3.40.50.1390,PF07508,Coil
MTMHKVAIYVRVSTTSQVDEGYSIDEQKAKLTSYCEIKDWNVYDVYTDGGFSGSNTERPALEQLVRDAKRKLFDTVLVYKLDRLSRSQKDTLYLIEDVFLENDIEFVSLLENFDTSTPFGKAMIGLLSVFAQLEREQIKERMQLGKLGRAKSGKSMMWSKTSYGYDYIKETGTLSVNQYQALIVRKMFKWYLSGMSITKLRDALNEQYGQDKEWSYRTVRAILSNPVYCGYNQFKGQIFPGTHEPIISEEDFNKTQEEIKTRQRTAAQRFNPRPFQAKYMLSGIAQCGYCSAPLAIKLGMKRKDGTRLVKYECKQRHPRKTKGVTVYNNNEKCDSGFYFKDDIEHFVLTEISKLQTDSDYIDKLFSNTNQETIDRASYQKQIDKLTAKISRLNDLYIDDRISLEELQKRSSDFMAERTALEKELDADSSVKAVERKKDIKRVLDTKDIFTLDYEHQKAMARALISKVRVTSETIVILWKL

SEQ ID NO: 7012 - protein, 480 aa, Unknown
  Description of Unknown: Integrase B7013 sequence
  PTHR30461:SF3,IPR036162,PS51737,IPR011109,PTHR30461, PS00397,PF00239,G3DSA:1.10.10.2600,IPR006119,SSF53041, SM00857,IPR025827,IPR038109,PS51736,cd03768, IPR006118,PF13408,G3DSA:3.40.50.1390,PF07508,Coil
MATHKVAIYVRVSTTSQADEGYSIDEQKAKLTSYCDIKDWNIYDIYTDGGFSGSNTERPALEQLIRDAKRKLFDTVLVYKLDRLSRSQKDTLYLIEDVFLENDIEFVSLLENFDTSTPFGKAMIGLLSVFAQLEREQIKERMQLGKLGRAKSGKSMQWAKISYGYDYIKETGTLSVNPYQALIVRKMFEWYLSGMSITKLRDALNEQYGQDKEWSYRTVRVILSNPVYCGYNQFKGQIFPGAHEPIISEEDFNKTQEEIKTRQRTAAQRFNPRPFQAKYMLSGIAQCGYCSAPLAIKLGMIRKDGTRLVKYECKQRHPRKTKGVTVYNNNAKCDSGFYFKDDIEHFVLTEISKLQTDSDYIDKLFSNTNQETIDRASYQKQIDNLTAKISRLNDLYIDDRISLEELQKRSSDFMAERAALEKELDADTSLKAAERKKDIRRVLDTKDIFTLDYEQQKAIARALISKVRVTSETIVILWKL

SEQ ID NO: 7013 - protein, 480 aa, Unknown
  Description of Unknown: Integrase B7014 sequence
  PTHR30461:SF3,IPR036162,PS51737,IPR011109,PTHR30461, PS00397,PF00239,G3DSA:1.10.10.2600,IPR006119,SSF53041, cd00338,SM00857,IPR025827,IPR038109,PS51736, IPR006118,PF13408,G3DSA:3.40.50.1390,PF07508,Coil
MKIGALYIRVSTDDQLEYSPAAQQKLGLDYAKKNGIVIPKDFIFVDEGISGRKVKNRPAFQQLISLAKSNEHPIEVILVWKFSRFARNQEESIVYKNLLKRAGVELVSISEPLPDGAIGQLVERIFEWMDEYYSINLGVEVLRGMSERARQGGCNVSPPLGYKMEDGSPVIVPEQAIIVKKIFDFFVNDKLSFYDIAVKLNSLGYKTKRGGNFQNRTVAYILRNEFYDQQLVWNKTEKATRKLKDSSEWISVKGDYPRIISHELWKAAQERDKATRRPRGSRPASTYRHWLSGMLVCSNCGGKLVRVGTNKSGNTYFQCTNYNHASCSESHSTNARIIQSAILESFKDVISSGNVVYNATATKKDDSERALIEDNIKKISFKEARIKQAYRDGIDTIEEYKENKRILSEEKANLEHMLSELKDDNAEQTLLLKKIRSAYDIIASDETSETQKHEALTSVVQKIVFNKKEEKFTLYYFINY

SEQ ID NO: 7014 - protein, 480 aa, Unknown
  Description of Unknown: Integrase B7015 sequence
  PTHR30461:SF3,IPR036162,PS51737,IPR011109,PTHR30461, PS00397,PF00239,G3DSA:1.10.10.2600,IPR006119,SSF53041, SM00857,IPR025827,IPR038109,PS51736,cd03768, IPR006118,PF13408,G3DSA:3.40.50.1390,PF07508,Coil
MATHKVAIYVRVSTTSQVDEGYSIDEQKAKLTSYCDIKDWNIYEIYTDGGFSGSNTERPALEQLIRGAKRKLFDTVLVYKLDRLSRSQKDTLYLIEDVFLENDIEFVSLLENFDTSTPFGKAMIGLLSVFAQLEREQIKERMQLGKLGRAKSGKSMQWAKTSFGYDYIKETGTLSVNPYQALIVRKMFEWYLSGMSITKLRDALNEQYGQDKEWNYRTVRVILSNPVYCGYNQFKGQIFPGTHEPIISEEDFNKTQEEIKTRQRTAAQRFNPRPFQAKYMLSGIAQCGYCSAPLAIKLGMIRKDGTRLVKYECKQRHPRKTKGVTVYNNNEKCDSGFYFKDDIEHFVLTEISKLQTDLDYIDKLFSNTDKETIDRASYQKQIDNLTAKISRLNDLYIDDRISLEELQKRSSDFMAERTALEKELDADTSLKAVERKKDIRRVLDTKDVFTLDYEQQKAIARALISKVRVTSETIVILWKL

SEQ ID NO: 7015 - protein, 480 aa, Unknown
  Description of Unknown: Integrase B7016 sequence
  PTHR30461:SF3,IPR036162,PS51737,IPR011109,PTHR30461, PS00397,PF00239,G3DSA:1.10.10.2600,IPR006119,SSF53041, SM00857,IPR025827,IPR038109,PS51736,cd03768, IPR006118,PF13408,G3DSA:3.40.50.1390,PF07508,Coil
MTMHKVAIYVRVSTTNQAEEGYSIDEQKAKLTSYCDIKDWNIYDIYTDGGFSGSNTERPALERLIRDAKRKLFDTVLVYKLDRLSRSQKDTLYLIEDVFLENDIEFVSLLENFDTSTPFGKAMIGLLSVFAQLEREQIKERMQLGKLGRAKSGKSMQWAKTSYGYDYVKETGTLSVNPYQALIVRKMFEWYLSGMSITKLRDALNEQYGQDKEWSYRTVRVILSNPVYCGYNQFKGQIFPGTHEPIVSEEDFNKTQEEIKTRQRTAAERFNPRPFQAKYMLSGIAQCGYCLAPLAIKMGMRRKDGTRLVKYECKQRHPRKTKGVTVYNNNEKCDSGFYFKDDIEHLVLTEISKLQTDSDYIDKLFSNTDKETIDRDSYQKQIDNLTAKISRLNDLYIDDRISLEELQKRSSNFMAERSALEKELDADSSLKAVERKKDIKRVLDTKDIFTIDYEQQKAIVRALISKVRVTSESIVILWKL

SEQ ID NO: 7016 - protein, 480 aa, Unknown
  Description of Unknown: Integrase B7017 sequence
  PTHR30461:SF3,IPR036162,PS51737,IPR011109,PTHR30461, PS00397,PF00239,G3DSA:1.10.10.2600,IPR006119,SSF53041, SM00857,IPR025827,IPR038109,PS51736,cd03768, IPR006118,PF13408,G3DSA:3.40.50.1390,PF07508,Coil
MAMHKVAIYVRVSTTNQAEEGYSIDEQKSKLTSYCEIKDWNIYDIYTDGGFSGSNTERPALERLIRDAKRKLFDTVLVYKLDRLSRSQKDTLYLIEDVFLENNIEFVSLLENFDTSTPFGKAMIGLLSVFAQLEREQIKERMQLGKLGRAKSGKSMQWAKTSYGYDYVKETGTLSVNPYQALIVRKMFEWYLSGMSITKLRDALNEQYGQDKEWNYRTVRVILSNPVYCGYNQFKGQIFPGTHEPIISEEDFNKAQEEIKTRQRTAAQRFNPRPFQAKYMLSGIAQCGYCLAPLAIKMGMRRKDGTRLVKYECKQRHPRKTKGVTVYNNNEKCDSGFYFKDDIEHFVLTEISKLQTDSDYIDKLFSNTDKETIDRDSYQKQIDNLTAKISRLNNLYIDDRISLEELQKRSSDFMAERAALEKELDADSSVRAVERKKDIRRVLDTKDIFMLDYEQQKAIVRALISKVRVTSESIVILWKL

SEQ ID NO: 7017 - protein, 480 aa, Unknown
  Description of Unknown: Integrase B7018 sequence
  PTHR30461:SF3,SM00857,G3DSA:1.10.10.2600,IPR036162,PF13408, IPR025827,G3DSA:3.40.50.1390,PS51737,IPR006119,IPR038109, PF07508,IPR011109,SSF53041,PTHR30461,Coil, PS51736,cd00338,PF00239
MTIIGEYCDKAISGKTDNRPSFQRLIKDSEKGQFEAVIMYTLDRFARNRYDSAIYKAKLKKNGVRVYYAKQPMPDTPEGIILESVLEGYAEYYSENLSRNIKRGMKENALQCIANGGAGMPLGYTVGEDRRYKIDPVGARIVQEIFQMYADGMSATQIINECNKRGYKTARGNAFNKNSLRTMLKNDRYIGVYRFADVVVEGGVPPIISRELFDKVQATLKHNYSARARNKAKDDYLLTAKLFCGHCGSSMVGESGTSKSGKLHHYYKCIERKRKHKCNKAVEKKDWMEELVVRFTVQKVLTDENIERIAVKAMEIIEKESADTTYIDGLRNELKEVKKKIKNLMTAIEQGIITPSTKERMDELELEKNEIEGRIASEEMKKPLLTKERIMYWLYSFKSGNIDDVEYKRRVIDTLVNSVYVYDEGDKGRRIVFTFNISGQNTATLSCSDIACFAPPNCANPNTLFFVKHCFGFVLIVEEV

SEQ ID NO: 7018 - protein, 480 aa, Unknown
  Description of Unknown: Integrase B7019 sequence
  PTHR30461:SF3,IPR036162,PS51737,IPR011109,PTHR30461, PS00397,PF00239,G3DSA:1.10.10.2600,IPR006119,SSF53041, cd00338,SM00857,IPR025827,IPR038109,PS51736, IPR006118,PF13408,G3DSA:3.40.50.1390,PF07508,Coil
MKFAIYVRVSTLEQAEEGYSIEEQIDKLIKYCEVKNWDIFKVYKDGGFSGSTTDRPGLSSLITDSKRKKFQGVLVYKLDRLSRSQKDTLYLIEDIFTANDISFVSLNENFDTSSAFGKAMIGILAVFAQLEREQIKERMVMGKVGRAKSGKAMSWSKVPFGYIYENDTYVAHPIQAPIVKQIFDDYMSGISITKLKEKLNDEGHIGKEISWSYRTIRQTLANPIYAGINRYNGELFEGNHEGIITKDYFEKVQSELKVRQVAAYEKNNNPRPFQSKYMLSGIIRCGLCGASLSVGMRAKRKDGSRHRYYRCYSKSKKKNLTMTKDPNGCSSPNYSMDELEKHILSQIEKIRLNPELIDVLSANDSVVDLSSYNKRIDELDLSLEKIVNLFIDDAIPKDILEARMEKIKQEKDSLENKIDSLKIKRPILAPIDAKDILSKLTDNIWNLSYEDQKSIVMELISKILVYPDKLEIHWKFANNQ

SEQ ID NO: 7019 - protein, 480 aa, Unknown
  Description of Unknown: Integrase B7020 sequence
  PTHR30461:SF3,IPR036162,PS51737,IPR011109,PTHR30461, PS00397,PF00239,G3DSA:1.10.10.2600,IPR006119,SSF53041, SM00857,IPR025827,IPR038109,PS51736,cd03768, IPR006118,PF13408,G3DSA:3.40.50.1390,PF07508,Coil
MATHKVAIYVRVSTTSQVDEGYSIDEQKAKLTSYCDIKDWNIYEIYTDGGFSGSNTERPALEQLIRDAKRKLFDTVLVYKLDRLSRSQKDTLYLIEDVFLENDIEFVSLLENFDTSTPFGKAMIGLLSVFAQLEREQIKERMQLGKLGRAKSGKSMMWSKTSYGYDYIKETGTLSVNPYQALIVRKMFEWYLSGMSITKLRDALNEQYGQGKEWSYRTVRVILSNPVYCGYNQFKGQIFPGTHEPIISEEDFNKTQEEIKTRQRTAAQRFNPRPFQAKYMLSGIAQCGYCSAPLAIKLGMKRKDGTRLVKYECKQRHPRKTKGVTVYNNNAKCDSGFYFKDDIEHFVLTEISKLQTDSDYIDKLFSNTNQETIDRDSYQKQIDNLTAKISRLNDLYIDDRISLEELQKRSSDFMAERTALEKELDADTSLKAVERKKDIRRVLDAKDIFTLDYEQQKAIVRALISKVRVTSESIVILWKL

SEQ ID NO: 7020 - protein, 480 aa, Unknown
  Description of Unknown: Integrase B7021 sequence
  PTHR30461:SF3,IPR036162,PS51737,IPR011109,PTHR30461, PS00397,PF00239,G3DSA:1.10.10.2600,IPR006119,SSF53041, SM00857,IPR025827,IPR038109,PS51736,cd03768, IPR006118,PF13408,G3DSA:3.40.50.1390,PF07508,Coil
MTTHKVAIYVRVSTTSQADEGYSIDEQKAKLTSYCDIKDWNIYDIYTDGGFSGSNTERPALEQLIRDAKRKLFDTVLVYKLDRLSRSQKDTLYLIEDVFLENDIEFVSLLENFDTSTPFGKAMIGLLSVFAQLEREQIKERMQLGKLGRAKSGKSMQWAKTSYGYDYIKETGTLSVNPYQALIVRKMFEWYLSGMSITKLRDALNEQYGQDKEWNYRTVRVILSNPVYCGYNQFKGQIFLGTHEPIISEEDFNKTQEEIKTRQRTAAQRFNPRPFQAKYMLSGIAQCGYCSAPLAIKLGMIRKDGTRLVKYECKQRHPRKTKGVTVYNNNEKCDSGFYFKDDIEHFVLTEISKLQTDSDYIDKLFSNTNQETIDRDSYQKQIDNLTAKISRLNDLYIDDRISLEELQKRSSDFMAERSVLEKELDADTSLKAVERKKDIRRVLDTKDIFTLDYEQQKTIARALISKVRVTSESIVILWKL

SEQ ID NO: 7021 - protein, 480 aa, Unknown
  Description of Unknown: Integrase B7022 sequence
  PTHR30461:SF3,IPR036162,PS51737,IPR011109,PTHR30461, PS00397,PF00239,G3DSA:1.10.10.2600,IPR006119,SSF53041, SM00857,IPR025827,IPR038109,PS51736,cd03768, IPR006118,PF13408,G3DSA:3.40.50.1390,PF07508,Coil
MATHKVAIYVRVSTTSQVDEGYSIDEQKAKLTSYCDIKDWNIYEIYTDGGFSGSNTERPALEQLIRDAKRKLFDTVLVYKLDRLSRSQKDTLYLIEDVFLENNIEFVSLLENFDTSTPFGKAMIGLLSVFAQLEREQIKERMQLGKLGRAKSGKSMQWAKTSYGYDYVKETGTLSVNPYQALIVRKMFEWYLSGMSITKLRDALNEQYGQDKEWNYRTVRVILSNPVYCGYNQFKGQIFPGTHEAIISVDDFNKTQEEIKTRQRTAAQRFNPRPFQAKYMLSGIAQCGYCSAPLAIKLGMKRKDGTRLVKYECKQRHPRKTKGVTVYNNNEKCDSGFYFKDDIEHFVLTEISKLQTDSDYIDKLFSNTDKETIDRDSYQKQIDNLTAKISRLNDLYIDDRISLEELQKRSSDFMAKRAALEKELDTDTSLKAVERKEDVRRVLDTKDIFTLDYEQQKAIARALISKVRVTSESIVILWKL

SEQ ID NO: 7022 - protein, 479 aa, Unknown
  Description of Unknown: Integrase B7023 sequence
  IPR036162,PS51737,IPR011109,PTHR30461,PS00397, PF00239,G3DSA:1.10.10.2600,IPR006119,SSF53041,SM00857, IPR025827,IPR038109,PS51736,cd03768,IPR006118, PF13408,G3DSA:3.40.50.1390,PF07508,Coil
MPKVAIYARVSTLNQAEEGYSIEGQLANLRKYCSALDWQIYQEYVDPGFSGGSLNRPAIQKLIVDAKSHRFDIVLIYKLDRLSRSVQDTLYLVKDVFDKNKISFVSLNEKIDTSSPMGNLFLTLLASIAEFEREQIKERMMMGKVGRAKSGKAMGWSKVPFGYTYDKQTGIYQINTLQAQIVKRIYRDYLDGVSITKLVDLLNAEGHITKDRPWTYRTVRQALDNVVYTGRQFYQGNVYPGQHEAIISIEDYDKTQAELKRRQLTNAQKFNPRPFRAKYMLSGLLRCSFCGSSMMVQTRYLKYADDYHYYRCVSSIRKRIRFSYRQDTELCQNRSDYLKDDLESAIIKTIRHLQLHPDQMPVNTVKFDDKPLKDELNRINDKLNKLVDLYLNSNGISIGIINQKRDELLQQKEALENKLQERKPKQPELDPKKALLLLSKKNILELPYKEQVKLVKSLISKIEVSPSKMKIHWRFNVEK

SEQ ID NO: 7023 - protein, 479 aa, Unknown
  Description of Unknown: Integrase B7024 sequence
  PTHR30461:SF3,cd00338,SM00857,IPR006118,G3DSA:1.10.10.2600, IPR036162,PS51737,G3DSA:3.40.50.1390,IPR006119,IPR038109, PF07508,IPR011109,SSF53041,PTHR30461,PS00397, PS51736,Coil,PF00239
MEKKLKTAAAYIRVSTDRQTELSPDSQLRIIKEYAKQNGYNIPSEYIFRENGLSGKYVKKRPQFIEMIGLAKQKPAPFSAILVWKFSRFARNQEESIVYKSMLKKNDVSVISCSETLDEENPFSSLIERIIEWMDEYYSIRLSGEVLRGMSEKVKRGQPVTIPSFGYDIVDKQYVINEEKAAIVRKIFTDYIDGKSSMQIASELNEIGVKTTRGNPFENRTIDYILKNPVYIGKIRWNQNGKTDYRYSNNKDIVYTQGVHKSIVSDEIFYKVQNLIETNGRKQRKGIHNNIKQEYMLHGLIKCSNCGSALAYSNKGLQCIKYSKSICKQSHYISLTNINNLVILGLEQVFENKDFKLSVKSLSQTVADCIDYTNLIEKENQKIQRIKSAYLEGIYTVEEVKEYKKSVEDKIKNLSSRQVQLKQEKTKPRKENVKEKKNFLATLKSPAISEKEKNEILKGFVDCIVFNRSTSSVDIFLYI

SEQ ID NO: 7024 - protein, 479 aa, Unknown
  Description of Unknown: Integrase B7025 sequence
  PTHR30461:SF3,SM00857,G3DSA:1.10.10.2600,IPR036162,PF13408, PS51737,G3DSA:3.40.50.1390,IPR025827,IPR006119,IPR038109, PF07508,IPR011109,SSF53041,PTHR30461,Coil, PS51736,cd00338,PF00239
MSKSKIYCLKYLYTITFSKGVIIMETIVKKAACYCRVSHEEQKLHGLSIEAQKEDLKQYCKRNNYKIYKFYIDEGLTAKNTKRQGLQNLLSDLDKDKFDIVLFTKLDRLSRNIIDANLLDEKFKNNNVCMKAIFEDDIDTSTADGKFTFNLKLSLAERELDKTSERIKDIFRYKIERNEVISGSVPKGYKIVDKKLAIDENTAWIVKKSFDLVEELMSARAAFIQINTVYNQPTSLRSFSKLLKNVIYTGTYKSKNYYKENYCEPIISLEQFNNVQRILKNNKQYTSNNRKETYIFSGLLRCSHCGYKIVGHYSNRSGKNVIKTYRCNRYSIYKDCDQKKSINEKKLEKVLLSCIVEEYKNYLYSFDISSKKTNSIDVSQNKSKIQKKVDKLRELYLNDLISLEDYKKDYAIFTQALKEIESKEVTKVAPKDADKILSILDNIETIYYNLDATERKRFWSSFIDVITIDGNYNIDIKFL

SEQ ID NO: 7025 - protein, 479 aa, Unknown
  Description of Unknown: Integrase B7026 sequence
  PTHR30461:SF3,cd00338,SM00857,IPR006118,G3DSA:1.10.10.2600, IPR036162,PS51737,G3DSA:3.40.50.1390,IPR006119,IPR038109, PF07508,SSF53041,IPR011109,PTHR30461,PS00397, PS51736,Coil,PF00239
MEKELKTAAAYIRVSTDRQTELSPDSQLRIIKEYAKQNGYNIPSEYIFREDGLSGKYVKKRPQFIEMIGLAKQNPAPFSTILVWKFSRFARNQEESIVYKSMLKKNDVSVISCSETLDEENPFSSLIERIIEWMDEYYSIRLSGEVLRGMSEKVKRGQPVTIPSFGYDIVDKQYVINEEKAAIVRKIFTDYIDGKNSMQIASELNEIGVKTTRGNPFENRTIDYILKNPVYIGKIRWNQNGKTDYRYSNNKDIVYTQGIHKSIVSDEIFYKVQNLIEANSRKQRKGIHNNIKQEYMLHGLIKCSNCGSALAYSNKGLQCIKYSKSICKQSHYISLTNINNLVILGLEQVFENKDFKLSVKSLSQTVADCIDYTNLIEKENQKIQRIKNAYLEGIYTVEEVKEYKKSVEDKIKNLSSRQVQLKQEKTKPRKENVKEKKNFLATLKSPAISEKEKNEILKGFVDCIVFNRSTSSVDIFLYI

SEQ ID NO: 7026 - protein, 479 aa, Unknown
  Description of Unknown: Integrase B7027 sequence
  PTHR30461:SF3,SM00857,IPR006118,G3DSA:1.10.10.2600,IPR036162, PS51737,G3DSA:3.40.50.1390,Coil,IPR006119,IPR038109, PF07508,IPR011109,SSF53041,PTHR30461,PS00397, PS51736,cd00338,PF00239
MDDLKIAAAYIRVSTDDQTELSPDSQIKVVREFAKQKGYLIPKEYIFRDDGISGRKASKRPEFNHMIAVAKQTPSPFSAIMVWKFSRFARNQEEAIFYKGMLKKRGIDVISTSEPIIDGPFGSLIERIIEWFDEYYSINLSTEVKRGMTEKVSRGGAVSIPAFGYDIVDKKYQVNPINAPIVQRIFIKYLNGVGCRAIANELNDLGIKTTRGNNWENRTIEYILRNPVYIGKIRWNPKRRTRRNYDDKDIMIVDGIHQPIIDTDIFDKVQKKLDENKAKYRPYITDRQNGKEYMLKGLVKCSNCGATLSLACNSLQCIKYAHGTCNVSHSIQVNRLNEVVINAIDDTLKSGDFQLKPKEQPHEEPQELNIDFMIEKENTKLRRIKEAYEEGVYNLAEFKQRKELIESKIRSLQKQNKPPEPKPDHLLAKKKLMSRRKEIISTLKSKSTPEVEKNALLCTFIDKIIFNRSLSSVELFFCF

SEQ ID NO: 7027 - protein, 479 aa, Unknown
  Description of Unknown: Integrase B7028 sequence
  SM00857,G3DSA:1.10.10.2600,IPR036162,PS51737,G3DSA:3.40.50.1390, IPR006119,IPR038109,PF07508,IPR011109,SSF53041, PTHR30461,Coil,PS51736,cd00338,PF00239
MPKTAVIYARFSCNKQREASIDDQLRVCRDWCKREGYAIAAEYCDYAISGRTDDRPEFQRMIANAGESDIVLVYMMDRFSRGEYDAPIYKRELAKKGVKLVSALEAIPDSPEGIIYEKLLEGLAACESKKTAIRTKRGMEGNALRCKTNGVRVFGYRKSEDDEYEIDEHDAAFVREAFKRRINRETVNSIARDFAQRGVKTSNGNPCGYSMVYQMLHNRRYTGRYEWGGIVKEGGMPAIIDEVTFMDAQQVQGTKKRSSEDWGDFALAGKAICAGCGRNLQGVSGRGRHNVKYEYYSCVDGCMRNVRREELEGAIVGALRELLSDREEALRIARMVADRADGAEIATRRKQAAESLSAAERGLKNILNAIEQGIIAPGVKERIAELEQQKARANYDLQAIQEQKIDPERFADFLQCGAKLDDATLLKAFVWQVSVSDEDVLVTLNYDTESNEPARLDIQRVRGKLEWCPRADSNRRHPL

SEQ ID NO: 7028 - protein, 479 aa, Unknown
  Description of Unknown: Integrase B7029 sequence
  PTHR30461:SF3,cd00338,SM00857,IPR006118,G3DSA:1.10.10.2600, IPR036162,PS51737,G3DSA:3.40.50.1390,IPR006119,IPR038109, PF07508,IPR011109,SSF53041,PTHR30461, PS00397,PS51736,Coil,PF00239
MGKKLKTAAAYIRVSTDRQTELSPDSQLRIIKEYAKQNGYNIPSEYIFRENGLSGKYVKKRPQFIEMIGLAKQKPAPFSAILVWKFSRFARNQEESIVYKSMLKKNDVSVISCSETLDEENPFSSLIERIIEWMDEYYSIRLSGEVLRGMSEKVKRGQPVTIPSFGYDIVDKQYVINEEKAAIVRKIFTDYIDGKSSMQIASELNEIGVKTTRGNPFENRTIDYILKNPVYIGKIRWNQNGKTDYRYSNNKDIVYTQGVHKSIVSDEIFYKVQNLIETNGRKQRKGIHNNIKQEYMLHGLIKCSNCGSALAYSNKGLQCIKYSKSICKQSHYISLTNINNLVILGLEQVFENKDFKLSVKSLSQTVADCIDYTNLIEKENQKIQRIKSAYLEGIYTVEEVKEYKKSVEDKIKNLSSRQVQLKQEKTKPRKENVKEKKNFLATLKSPAISEKEKNEILKGFVDCIVFNRSTSSVDIFLYI

SEQ ID NO: 7029 - protein, 479 aa, Unknown
  Description of Unknown: Integrase B7030 sequence
  PTHR30461:SF3,SM00857,G3DSA:1.10.10.2600,IPR036162,PF13408, IPR025827,PS51737,G3DSA:3.40.50.1390,IPR006119,IPR038109, PF07508,SSF53041,IPR011109,PF00239,PTHR30461, PS51736,Coil,cd00338
MSNAVIYARYSSDKQSEDSIEAQLRACRQYAATKGYNIVAVYADEAISGKGSMTASRAQYQKMLRDCNKGTFDTILIHKYDRVARSLGEHVNLDARLQKMGITLIAVGQDFGFGPESKIMRALMWSMSEYYIDNLANETKKGEREIALKGLHNGGYPPFGYDIVDQKYVINPYEAEYVRKIFAAVKNHEGTKDIIAEMAAVGIVGKRGKPLKYSAVYEILRNEKYTGTYIYCVDEEKDRSKRRSKPNAIRIENALPMIIDKATFDEVQKIMDSRKQSGPKTSYLCSGLVYCSCGAKMHAHISTKKGHVYHYYRCSKKCGAPMISMDIVDDAAKTYLRTLLNEENQKAIATAMRKYKCGEPERAADFKKIVASKISEKQKQYDTLMTNMSSGVLPADVIEDIGAKMNQLRSEIEALKKTEMPKDYTTDQISLWLKALHDSPDDKAIRLLISRIDIKNTTEINIQSTLTSVVGTIGCGSWI

SEQ ID NO: 7030 - protein, 479 aa, Unknown
  Description of Unknown: Integrase B7031 sequence
  PTHR30461:SF3,cd00338,SM00857,G3DSA:1.10.10.2600,IPR036162, PF13408,IPR025827,G3DSA:3.40.50.1390,PS51737,IPR006119, IPR038109,PF07508,IPR011109,SSF53041,PTHR30461, PS51736,Coil,PF00239
MRGVIYARYSPGPRQTEQSIEGQVADCQQYAEEHGIDIIEIYADRKVSGKSVVGRDEFQRMLRDAEKGRFDCVLVWKIDRFGRDRQDIALGKMTLKRAGVKLMYARESVPEGPEGIILESVLEGLAEYYSADLRQKVIRGMRETAKKGQYCGQSLPIGYKVDAERHIVVDEREAAVVREAFKLHIAGGQIRDIVQLFADRGIMGRRGKPVSNAVVYRMLRNEKYLGEFYIQDVKLNVEPIIDQATFLEAARHFKTSRNNAAGRAKVNYLLSCKMFCGYCGSMINAETGTGKLGKVYRYYKCGDKKRGKACELKPFPKDHLEDAIILATVNDMLTDDMIEKLTVRILEVQEQENADDPVVGLRRRLDSNKKRQRNLLDAIEEGGARGLVSRLAALEEEEEQLVLEIQRAEIKRPRLTREVVEAWLRSFRVGDVTDDDFRARLVDTFIARVELRNDEALIFYNIREKGPHSRVRVRPEWWT

SEQ ID NO: 7031 - protein, 479 aa, Unknown
  Description of Unknown: Integrase B7032 sequence
  PTHR30461:SF3,cd00338,SM00857,IPR006118,G3DSA:1.10.10.2600, IPR036162,PS51737,G3DSA:3.40.50.1390,IPR006119,IPR038109, PF07508,IPR011109,SSF53041,PTHR30461,PS00397, PS51736,Coil,PF00239
MEKELKTAAAYIRVSTDRQTELSPDSQLRIIKEYAKQNGYNIPSEYIFREDGLSGKYVKKRPQFIEMIGLAKQKPAPFSAILVWKFSRFARNQEESIVYKSMLKKNDVSVISCSETLDEENPFSSLIERIIEWMDEYYSIRLSGEVLRGMSEKVKRGQPVTIPSFGYDIIDKQYVINEEKAAIVRKIFTDYIDGKSSIQIASELNEIGVKTTRGNPFENRTIDYILKNPVYIGKIRWNQNGKTDYRYSNNKDIVYTQGVHKSIVSDEIFYKVQNLIEANGRKQRKGIHNNIKQEYMLHGLIKCSNCGSALAYSNKGLQCIKYSKSICKQSHYISLTNINNLVILGLEQVFKNKDFKLSVKSLSQTVADCIDYTNLIKKENQKIQRIKSAYLEGIYTVEEVKEYKKSVEDKIKNLSSRQVQLKQEKTKPRKENVKEKKNFLATLKSPAISEKEKNEILKGFVDCVVFNRSTSSVDIFLYI

SEQ ID NO: 7032 - protein, 479 aa, Unknown
  Description of Unknown: Integrase B7033 sequence
  IPR036162,PS51737,IPR011109,PTHR30461,PS00397, PF00239,G3DSA:1.10.10.2600,IPR006119,SSF53041,SM00857, IPR025827,IPR038109,PS51736,cd03768,IPR006118, PF13408,G3DSA:3.40.50.1390,PF07508,Coil
MPKVAIYARVSTLNQAEEGYSIEGQLANLRKYCSALDWQIYQEYVDPGFSGGSLNRPAIQKLIVDAKSHRFDIVLIYKLDRLSRSVQDTLYLVKDIFDKNKISFVSLNEKIDTSSPMGNLFLTLLASIAEFEREQIKERMMMGKVGRAKSGKAMGWSKVPFGYTYDKQTGIYQINTLQAQIVKRIYRDYLDGVSITKLVDLLNAEGHITKDRPWTYRTVRQALDNVVYTGRQFYQGNVYPGQHEAIISIEDYDKTQAELKRRQLTNAQKFNPRPFRAKYMLSGLLRCSFCGSSMMVQTRYLKYADDYHYYRCVSSIRKRIRFSYRQDTELCQNRSDYLKDDLENAIIKTIRHLQLHPDQMPVNTVKFDDKPLKDELNRINDKLNKLVDLYLNSNGISIGIINQKRDELLQQKEALENKLQERKPKQPELDPKKALLLLSKKNILELPYKEQVKLVKSLISKIEVSPSKMKIHWRFNVEK

SEQ ID NO: 7033 - protein, 479 aa, Unknown
  Description of Unknown: Integrase B7034 sequence
  PTHR30461:SF3,SM00857,G3DSA:1.10.10.2600,IPR036162,PF13408, IPR025827,PS51737,G3DSA:3.40.50.1390,IPR006119,IPR038109, PF07508,IPR011109,SSF53041,PTHR30461,Coil, PS51736,cd00338,PF00239
MNAVIYARYSCDRQTEQSIEGQLRECKAFAASEGINIIGEYIDRAISGTTANRPEFQRMIADSRYKTFQAVIVYKLDRFARNRYDSAMYKSKLKANGVRVLSAKEHITDSPEGIILEGLLEAMNEYYSAELSQKIKRGMRENAIKGKTTGGNVALGYRIGADKQMEIEPAGASLVRRIFTSYDNGRTFTEICDDLNHAGYTTSRGKQFRIDTISRILANQRYTGTFQCAGEDAHCPPIIEPELFRSVQERLTESRHKHRHTQSPHEYVLTGKAICGTCGRRLTGRAGTSKTDKRYYYYCCPNKCCGWLPAAELEHAVLDAIAQYTTPEACEQIANATYVLYQQSTHENADLTAAQRRLQETEKKLENAVNAVLNGITSAALQATMQQLEQQKAALETEVRLLQTDAPELKLEHFQYFAHRLLEVQAEGTEKILQLLVNQVIVYKEQITVLVNLTDKTKTPPLEQVTAALRESSCSVACA

SEQ ID NO: 7034 - protein, 479 aa, Unknown
  Description of Unknown: Integrase B7035 sequence
  PTHR30461:SF3,IPR036162,PS51737,IPR011109,PTHR30461, PS00397,PF00239,G3DSA:1.10.10.2600,IPR006119,SSF53041, cd00338,SM00857,IPR025827,IPR038109,PS51736, IPR006118,PF13408,G3DSA:3.40.50.1390,PF07508,Coil
MIRKVAIYVRVSTTNQAEEGYSIDGQIDSLEKYCEAMGWDVYNKYIDAGFSGGSLKRPEMANLINDVKKGLFDTVLVYKLDRLSRNVRDTLYLIKDVFNINKIDFVSIQENIDTSSAMGTLFLTLLSAIAEFEREQIKERMQLGKLGRAKSGKSMQWAKTSYGYDYIKETGTLSVNPYQALIVRKMFEWYLSGMSITKLRDTLNEQYGQDKEWSYRTVRVILSNPVYCGYNQFKGQIFPGTHEAIISEDDFNKTQEEIKTRQRTAAQRFNPRPFQAKYMLSGIAQCGYCSAPLAIKLGMKRKDGTRLVKYECKQRHPRKTKGVTVYNNNEKCDSGFYFKDDIEHFVLTEISKLQTDSDYIDKLFSNTNQETIDRDSYQKQIDNLTAKISRLNDLYIDDRISLEELQKRSSDFMAERTALEKELEADTSLKAVERKEDVRRVLDTKDIFTLDYEQQKAIARALISKVRVTSESIVILWKL

SEQ ID NO: 7035 - protein, 479 aa, Unknown
  Description of Unknown: Integrase B7036 sequence
  PTHR30461:SF3,SM00857,IPR006118,G3DSA:1.10.10.2600,IPR036162, PS51737,G3DSA:3.40.50.1390,Coil,IPR006119,IPR038109, PF07508,IPR011109,SSF53041,PTHR30461,PS00397, PS51736,cd00338,PF00239
MDDLKIAAAYIRVSTDDQTELSPDSQIKVVRDFAKQKGYLIPKEYIFRDDGISGRKASKRPEFNHMIAVAKQTPSPFSAIMVWKFSRFARNQEEAIFYKGMLKKRGIDVISTSEPIIDGPFGSLIERIIEWFDEYYSINLSTEVKRGMTEKVSRGGAVSIPAFGYDIVDKKYQVNPINAPIVQRIFIKYLNGVGCRAIANELNDLGIKTTRGNNWENRTIEYILRNPVYIGKIRWNPKRRTRRNYDDKDIMIVDGIHQPIIDTDLFDKVQKKLDENKAKYRPYITDRQNGKDYMLKGLVKCSNCGATMSMSCNGLQCIKYTHGTCRVSHYIQLNKLNEVVINAIDDTLKSGDFQLKPKEQPHEEPQELNIDFMIEKENTKLRRIKEAYEEGVYNLAEFKQRKELIESKIHSLQKQNKPPEPKPDLLLAKKKLMSRRKEIISTLKSKSTPEVEKNALLCTFIDKIIFNRSLSSVELFFCF

SEQ ID NO: 7036 - protein, 479 aa, Unknown
  Description of Unknown: Integrase B7037 sequence
  PTHR30461:SF3,IPR036162,PS51737,IPR011109,PTHR30461, PS00397,PF00239,G3DSA:1.10.10.2600,IPR006119,SSF53041, cd00338,SM00857,IPR025827,IPR038109,PS51736, IPR006118,PF13408,G3DSA:3.40.50.1390,PF07508,Coil
MKTAACYIRVSTDDQTEYSPDSQLKIVRDYAFKHDISLVEKYIFAEDGGKSGKNMTNRTEFMRLISLTKKKPKPFDAILVWKFSRFARNQEESIVLKSMLHKNGIDVISVSEALPEGPFGSLVERIIEWSDEYYLINLAQEVKRGMKERASRGQPVCPPPIGYSMDNGKYVPNADAQFVKNVFADYLAGLGLRAIAIKYGNLGLKTTRGNAPDNRFIEYMLRNPVYIGKIRWSVDGRAASRRVYDDPNIMISDGNHEPIISEEVFNEVQKRIGETKRLYKKYQRPDQPMEYMLKGLVRCSACGSTLTRVITGSAPGLQCHNYSRGSCHVSHSIRISKANDAIIAGLESSIETGNFNIVPPKINNAESTIDYDKLLANEQLRLERVKAAYQNGIDTLEEYKRNKEQIYAFMDKIKAEMKANGTRAAAADNAGFRQKAANVLKIIKDPSQPESAKNIALRSIVERIVFKKPENEFDIFFYV

SEQ ID NO: 7037 - protein, 479 aa, Unknown
  Description of Unknown: Integrase B7038 sequence
  PTHR30461:SF3,SM00857,IPR006118,G3DSA:1.10.10.2600,IPR036162, PS51737,G3DSA:3.40.50.1390,Coil,IPR006119,IPR038109, PF07508,IPR011109,SSF53041,PTHR30461,PS00397, PS51736,cd00338,PF00239
MDDLKIAAAYIRVSTDDQTELSPDSQIKVVREFAKQKGYLIPKEYIFRDDGISGRKASKRPEFNHMIAVAKQTPSPFSAIMVWKFSRFARNQEEAIFYKGMLKKRGIDVISTSEPIIDGPFGSLIERIIEWFDEYYSINLSTEVKRGMTEKVSRGGAVSIPAFGYDIVDKKYQVNPINAPIVQRIFIKYLNGVGCRAIANELNDLGIKTTRGNNWENRTIEYILRNPVYIGKIRWNPKRRTRRNYDDKDIMIVDGIHQPIIDTDLFDKVQKKLDENKAKYRPYITDRQNGKEYMLKGLVKCSNCGATLSLACNSLQCIKYAHGTCNVSHSIQVNRLNEVVINAIDDTLKSGDFQLKPKEQPHEEPQELNIDFMIEKENTKLRRIKEAYEEGVYNLAEFKQRKELIESKIHSLQKQNKPPEPKPDHLLAKKKLMSRRKEIISTLKSKSTPEVEKSALLCTFIDKIIFNRSLSSVELFFCF

SEQ ID NO: 7038 - protein, 479 aa, Unknown
  Description of Unknown: Integrase B7039 sequence
  PTHR30461:SF3,SM00857,IPR006118,G3DSA:1.10.10.2600,IPR036162, PS51737,G3DSA:3.40.50.1390,Coil,IPR006119,IPR038109, PF07508,IPR011109,SSF53041,PTHR30461,PS00397, PS51736,cd00338,PF00239
MDDLKIAAAYIRVSTDDQTELSPDSQIKVVREFAKQKGYLIPKEYIFRDDGISGRKASKRPEFNHMIAVAKQTPSPFSAIMVWKFSRFARNQEEAIFYKGMLKKRGIDVISTSEPIIDGPFGSLIERIIEWFDEYYSINLSTEVKRGMTEKVSRGGAVSIPAFGYDIVDKKYQVNPINAPIVQRIFIKYLNGVGCRAIANELNDLGIKTTRGNNWENRTIEYILRNPVYIGKIRWNPKRRTKRNYDDKDIMIVDGIHQPIIDTDLFDKVQKKLDENKAKYRPYITDRQNGKEYMLKGLVKCSNCGATMSMSCNGLQCIKYTHGTCKVSHYIQLNKLNEVVINAIDDTLKSGDFQLKPKEQPHEEPQELNIDFMIEKENTKLRRIKEAYEEGVYNLAEFKQRKELIESKIHSLQKQNKPPEPKPDHLLAKKKLMSRRKEIISTLKSKSTPEVEKNALLCTFIDKIIFNRSLSSVELFFCF

SEQ ID NO: 7039 - protein, 479 aa, Unknown
  Description of Unknown: Integrase B7040 sequence
  PTHR30461:SF3,SM00857,IPR006118,G3DSA:1.10.10.2600,IPR036162, PS51737,G3DSA:3.40.50.1390,PS00397,IPR006119,IPR038109, PF07508,IPR011109,SSF53041,PTHR30461,Coil, PS51736,cd00338,PF00239
MDDLKIAAAYIRVSTDDQTELSPDSQIKVVREFAKQKGYLIPKEYIFRDDGISGRKASKRPEFNHMIAVAKQTPSPFSAIMVWKFSRFARNQEEAIFYKGMLKKRGIDVISTSEPIIDGPFGSLIERIIEWFDEYYSINLSTEVKRGMTEKVSRGGAVSIPAFGYDIVDKKYQVNPINAPIVQRIFIKYLNGVGCRAIANELNDLGITTTRGNNWENRTIEYILRNPVYIGKIRWNPKRRTRRNYDDKDIMIVDGIHQPIIDTDLFDKVQKKLDENKAKYRPYITDRQNGKEYMLKGLVKCSNCGATMSMSCNGLQCIKYTHGTCKVSHYIQLNKLNEVVINAIDDTLKSGDFQLKPKEQPHEETQELNIDFMIEKENTKLRRIKEAYEEGVYNLAEFKQRKELIESKIHSLQKQNKPPEPEPDHLLAKKKLMSRRKEIISTLKSKSTPEVEKNALLCTFIDKIIFNRSLSSVELFFCF

SEQ ID NO: 7040 - protein, 479 aa, Unknown
  Description of Unknown: Integrase B7041 sequence
  PTHR30461:SF3,SM00857,G3DSA:1.10.10.2600,IPR036162,PF13408, PS51737,G3DSA:3.40.50.1390,IPR025827,IPR006119,IPR038109, PF07508,IPR011109,SSF53041,PF00239,PTHR30461, PS51736,Coil,cd00338
MSNAVIYARYSSDKQSEDSIEAQLRACRQYAATKGYNIVAVYADEAISGKGSMTASRAQYQKMLRDCNKGTFDTILIHKYDRVARSLGEHVNLDTRLQKMGITLIAVGQDFGFGPESKIMRALMWSMSEYYIDNLASETKKGEREIALKGLHNGGYPPFGYDIVNQKYVINPYEAEYVRKIFAAVKNHEGTKDIIAEMAAVGIVGKRGKPLKYSAVYEILRNEKYTGTYIYCVDEEKDRSKRRSKPNAIRIENALPIIIDKATFDEVQKIMDSRKQSGPKTSYLCSGLVYCSCGAKMHAHISTKKGHIYHYYRCSKKCGAPMISMDIVDDAAKTYLRTLLSEENQKAIAKAMRKYKCGEPERAADFKKIVASKISEKQKQYDTLMTNMSSGVLPADVIKDIGAKMNQLRSEIEALKKTEMPKDYTSDQISIWLKALHDSPDDKAIRLLISRIDIKNTTEINIQSTLTSVVGTIGCGSWI

SEQ ID NO: 7041 - protein, 479 aa, Unknown
  Description of Unknown: Integrase B7042 sequence
  IPR036162,PS51737,IPR011109,PTHR30461,PS00397, PF00239,G3DSA:1.10.10.2600,IPR006119,SSF53041,cd00338, SM00857,IPR025827,IPR038109,PS51736,IPR006118, PF13408,G3DSA:3.40.50.1390,PF07508,Coil
MDQSNKENINQLRVGCLYIRVSTTDQEELSPDAQKRLLLDYAKSNHIVVPDEFIFEESVSGRNAQKRPKFQQMIALAKSSEHPVDVVLVWKFSRFARNQEESIVYKSMLRKDHVDVISVSEPLVDGPFGSLIERIIEWMDEYYSIRLSGEVLRGMKQKALNNGYQSSPCLGYDSVGKGKPFIINEEDFKIVSYIMDQYDNHNMDPTAIARKCNEIGYRTRRGGLFERRSIEYILRNPFYCGVVEWNGIRFEGTHEVRYTREQYENRIRLMDSRKPPKRHRNISACQHWLSGLLKCSICGATLSYNYNKQCSFFQCWKYAKGFHKQSSCISVKKVERTVKECLELLMRGENSAYIRRQPKPVDNTDEINSLTRELNRISVKEMRVKDAYENGIDSLQEYKENRIRLNKQRQELEERIKVLDSQTTHCKSESEFLKDCEAAYNAIVDPDVSNEERGTLIRTVFESISFDRKSGELLFDAKS

SEQ ID NO: 7042 - protein, 479 aa, Unknown
  Description of Unknown: Integrase B7043 sequence
  PTHR30461:SF3,SM00857,IPR006118,G3DSA:1.10.10.2600,IPR036162, PS51737,G3DSA:3.40.50.1390,IPR006119,IPR038109,PF07508, IPR011109,SSF53041,PTHR30461,PS00397,PS51736, cd00338,PF00239
MDDLKIAAAYIRVSTDDQTELSPDSQIKVVREFAKQKGYLIPKEYIFRDDGISGRKASKRPEFNHMIAVAKQTPSPFSAIMVWKFSRFARNQEEAIFYKGMLKKRGIDVISTSEPIIDGPFGSLIERIIEWFDEYYSINLSTEVKRGMTEKVSRGGAVSIPAFGYDIVDKKYQVNPINAPIVQRIFIKYLNGVGCRAIANELNDLGIKTTRGNNWENRTIEYILRNPVYIGKIRWNPKRRTRRNYDDKDIMIVDGIHQPIIDTDLFDKVQKKLDENKAKYRPYITDRQNGKEYMLKGLVKCSNCGATMSMSCNGLQCIKYTHGTCKVSHYIQLNKLNEVVINAIDDTLKSGDFQLKPKEQPHEEPQELNIDFMIEKENTKLRRIKEAYEEGVYNLAEFKQRKELIESKICSLQKQNKPPEPKPDHLLAKKKLMSRRKEIISTLKSKSTPEVEKNALLCTFIDKIIFNRSLSSVELFFCF

SEQ ID NO: 7043 - protein, 479 aa, Unknown
  Description of Unknown: Integrase B7044 sequence
  PTHR30461:SF3,SM00857,IPR006118,G3DSA:1.10.10.2600,IPR036162, PS51737,G3DSA:3.40.50.1390,Coil,IPR006119,IPR038109, PF07508,SSF53041,IPR011109,PTHR30461,PS00397, PS51736,cd00338,PF00239
MDDLKMAAAYIRVSTDDQTELSPDSQIKVVREFAKQKGYLIPKEYIFRDDGISGRKASKRPEFNHMIAVAKQTPSPFSAIMVWKFSRFARNQEEAIFYKGMLKKRGIDVISTSEPIIDGPFGSLIERIIEWFDEYYSINLSTEVKRGMTEKVSRGGAVSIPAFGYDIVDKKYQVNPINAPIVQRIFIKYLNGVGCRAIANELNDLSIKTTRGNNWENRTIEYILRNPVYIGKIRWNPKRRTRRNYDDKDIMIVDGIHQPIIDTDLFDKVQKKLDENKAKYRPYITDRQNGKEYMLKGLVKCSNCGATMSMSCNGLQCIKYTHGTCKVSHYIQLNKLNEVVINAIDDTLKSGDFQLKPKEQPHEEPQELNIDFMIEKENTKLRRIKEAYEEGVYNLTEFKQRKELIESKIHSLQKQNKPPEPKPDHLLAKKKLMSRRKEIISTLKSKSTPEVEKNALLCTFIDKIIFNRSLSSVELFFCF

SEQ ID NO: 7044 - protein, 479 aa, Unknown
  Description of Unknown: Integrase B7045 sequence
  PTHR30461:SF3,SM00857,IPR006118,G3DSA:1.10.10.2600,IPR036162, PS51737,G3DSA:3.40.50.1390,IPR006119,IPR038109,PF07508, IPR011109,SSF53041,PTHR30461,PS00397,PS51736, cd00338,PF00239
MDDLKIAAAYIRVSTDDQTELSPDSQIKVVRDFAKQKGYLIPKEYIFRDDGISGRKASKRPEFNHMIAVAKQTPSPFSAIMVWKFSRFARNQEEAIFYKGMLKKRGIDVISTSEPIIDGPFGSLIERIIEWFDEYYSINLSTEVKRGMTEKVSRGGAVSIPAFGYDIVNKKYQVNPINAPIVQRIFIKYLNGVGCRAIANELNDLGIKTTRGNNWENRTIEYILRNPVYIGKIRWNPKRRTRRNYDDKDIMIVDGIHQPIIDTDLFDKVQKKLDENKAKYRPYITDRQNGKEYMLKGLVKCSNCGATMSMSCNGLQCIKYTHGTCKVSHYIQLNKLNEVVINAIDDTLKSGDFQLKPKEQPHEEPQELNIDFMIEKENTKLRRIKEAYEEGVYNLAEFKQRKELIESKICSLQKQNKPPEPKLDHLLAKKKLMSRRKEIISTLKSKSTPEVEKNALLCTFIDKIIFNRSLSSVELFFCF

SEQ ID NO: 7045 - protein, 479 aa, Unknown
  Description of Unknown: Integrase B7046 sequence
  PTHR30461:SF3,SM00857,G3DSA:1.10.10.2600,IPR036162,PF13408, IPR025827,PS51737,G3DSA:3.40.50.1390,IPR006119,IPR038109, PF07508,SSF53041,IPR011109,PF00239,PTHR30461, PS51736,Coil,cd00338
MNNAVIYARYSSDKQTEDSIEAQLRACREYAAAHGLNVVGEYIDEAVSGKGSKTASRAGYQKMLRECGKGGFDTILIHKYDRIARSLGEHVNLASKLQSLNINLVATAQDFGTSNEAKIMRTLMWSLSEYYIDNLSSEVKKGHKETALKALHNGGYPPFGYDVVEQKYVINELEAHYVRRIFNAALDNAGYTDIIKEMSERGITGKRGKPIKYTQIYEMLRNEKYTGVYVYSPQEERNRADRRTKPNAIRIENALPIIIDKAKFEEVQKIMNERKHVGRKSNYLCSGLVYCSCGAKMHAVKPTKKGHTYYYYYCSAKCGAPMVRMEEVDKAAVNYLRALLSDDNQERIMKALRAYKGAENARIADFREIIKRKVSEKQKRYDTLMKNLSSGVLPAEIVSDIGEEMNSIKAEIKQLESTEPPKDYTVDHIKAWLNALKNTPDDKAVRLLIERIDIKNKTDFNIQSTLKSVLRNIGCGGRI

SEQ ID NO: 7046 - protein, 479 aa, Unknown
  Description of Unknown: Integrase B7047 sequence
  IPR036162,PS51737,IPR011109,PTHR30461,PS00397, PF00239,G3DSA:1.10.10.2600,IPR006119,SSF53041,SM00857, IPR025827,IPR038109,PS51736,cd03768,IPR006118, PF13408,G3DSA:3.40.50.1390,PF07508,Coil
MPKVAIYARVSTLNQAEEGYSIEGQLASLRKYCNALDWQIYQEYVDPGFSGGSLKRPAIQKLIEDAKSCRFDIVLIYKLDRLSRSVQDTLYLVKDIFDKNKISFVSLNEKIDTSSPMGNLFLTLLASIAEFEREQIKERMMMGKVGRAKSGKAMGWSKVPFGYTYDKQTGIYQINTLQAQIVKRIYRDYLDGVSITKLVDLLNAEGHITKDRPWTYRTVRQALDNVVYTGRQFYQGNVYPGQHEAIISIEDYDKTQAELKRRQLTNAQKFNPRPFRAKYMLSGLLHCSVCGSSMMVQTRYLKYADDYHYYRCVSSIRKRIRFSYRQDTELCQNRSNYLKDDLESAIIKTIRHLQLHPDQMPVDTVKFDDKPLKDELNRINDKLNKLVDLYLNSNGISIGIINQKREELLQQKEALENKLQERKPKQPELDPKKALLLLSKKNILELPYEEQVKLVKSLISKIEVSPSKMKIHWRFNVEK

SEQ ID NO: 7047 - protein, 479 aa, Unknown
  Description of Unknown: Integrase B7048 sequence
  PTHR30461:SF3,IPR036162,PS51737,IPR011109,PTHR30461, PS00397,PF00239,G3DSA:1.10.10.2600,IPR006119,SSF53041, SM00857,IPR025827,IPR038109,PS51736,cd03768, IPR006118,PF13408,G3DSA:3.40.50.1390,PF07508,Coil
MIRKVAIYARVSTTNQAEEGYSIDGQIDSLEKYCEAMGWDVYNKYIDAGFSGGSLKRPEMANLINDVKKGLFDTVLVYKLDRLSRNVRDTLYLIKDVFNINKIDFVSIQENIDTSSAMGTLFLTLLSAIAEFEREQIKERMQLGKLGRAKSGKSMQWAKTSFGYDYIKETGTLSVNPYQALIVRKMFEWYLSGMSITKLRDTLNEQYGQDKEWNYRTVRVILSNPVYCGYNQFKGQIFPGTHEPIISEEDFNKTQEEIKTRQRTAAQRFNPRPFQAKYMLSGIAQCGYCSAPLAIKLGMKRKDGTRLVKYECKQRHPRKTKGVTVYNNNEKCDSGFYFKNDIERFVLTEISKLQTDSDYIDKLFSNTNQETIDRDSYQKQIDNLTAKISRLNDLYIDDRISLEELQKRSSDFMAERSALEKELETDTSLKAVERKKDIRRVLDTKDIFTLDYEQQKAIARALISKVRVTSETIVILWKL

SEQ ID NO: 7048 - protein, 479 aa, Unknown
  Description of Unknown: Integrase B7049 sequence
  PTHR30461:SF3,IPR036162,PS51737,IPR011109,PTHR30461, PS00397,PF00239,G3DSA:1.10.10.2600,IPR006119,SSF53041, SM00857,IPR025827,IPR038109,PS51736,cd03768, IPR006118,PF13408,G3DSA:3.40.50.1390,PF07508,Coil
MNKVAIYVRVSTKGQAEEGYSIDEQIALLTSYCSIHKWKIHDTYVDAGISGATIERPELSRLSRDAQKKKFNTMIVYDLKRLGRSQRNNISFIEDVLEKNGIGFISLTENFDTSTPLGKAMVGILSAFGQLDRDTIRERMMMGKIGRAKSGKPMMTSTIAFGYTYDKVTSSLNINQAEAIIVKTIFNEYLSGRSLTKLRDYLNENDLLRNGKPWNYQGVSRVLRNPVYMGMVRFRGEVYQGNHDPIIDSETFEAVQKELKKRQLETYEFNKNTRPFRAKYMLSGIIKCGYCGSPMGVTLGTKRKDGTRNIRYQCVNRFPRTTKGITVYNNGQKCNSGFYEKDDIEIYVLGQVRLLQLNKAKLNKMFETPEIINVEEIENQINSLNNKMKRLNDLYLNDMISLDELKTQTYTFLKQKDLLENALNNNPAIHQEENRKQFQKLLGTKDITQLSYEEQSFAIKNLIDKVFVKPGIIDINWRI

SEQ ID NO: 7049 - protein, 479 aa, Unknown
  Description of Unknown: Integrase B7050 sequence
  PTHR30461:SF3,SM00857,G3DSA:1.10.10.2600,IPR036162,PF13408, PS51737,IPR025827,G3DSA:3.40.50.1390,IPR006119,IPR038109, PF07508,IPR011109,SSF53041,PF00239,PTHR30461, PS51736,Coil,cd00338
MARKKKFELNDNNLAIAYYRFSSHSQNEASIDQQRELAHAWADAHGFKIVKEYEDAAISGTTENRPGFQQMLSEVAKIRPRVLIMWKTDRLGRDKYVLAMAKRTIRDAGCEIRLLAENIPTDGPEGVLIEGLMDAMAEYYSRQLSQNIQRGMDYNAQHALYNGHKLFGYGVDKSTKRYIVDPDTAPFVQRMFAEYAEGKAMQTICDELNAQGLRTTRGAKFGVKTMNKMLQNRAYIGEYRHGDIVVEGGMPALVDEETFDKVQRKFAENKRKGSQRARGMDENDAPRYWLTGKVYCGKCGSTLQGVSGTSGTGRTYYYYYCSAQRRKQCTLKKVRKEKLEDAVTMILRSILHDSENLMSLAVDAAAYYEKNYRDTGYLDGLEAKRREVEKSLANLVKVIESGLISETVTERLVQLEEQKSALNEAIEAENIRAALCEDEHTIKAYFEKFLHADFDNPETRDQVLEYFVDKIYLTDDGLG

SEQ ID NO: 7050 - protein, 479 aa, Unknown
  Description of Unknown: Integrase B7051 sequence
  PTHR30461:SF3,SM00857,G3DSA:1.10.10.2600,IPR036162,PS51737, G3DSA:3.40.50.1390,IPR006119,IPR038109,PF07508,SSF53041, IPR011109,PTHR30461,Coil,PS51736,cd00338, PF00239
MPKTAVIYARFSCNKQREASIDDQLRICRQWCQRERYAIVAEYCDYAISGRTDDRPEFQRMVANAGESDIVLVYMMDRFSRGEYDAPIYKRELAQHGVKLVSALEQIPDSPEGIIYEKLLEGLAACESKKTAIRTRRGMEGNALKCKTNGVRVFGYASNEADEYVIDEDEAAFVREAFKRRIAKETTNSIARDFAARGVKTSQGNPCGYSMVERMVKNRKYTGRYEWGGVVKEGGMPAIIDEVTFMEAQGIRAAKERSAESWGDFALSGKAICAGCGRNLQGVSGRGRKNVKYEYYRCHDGCVRPVRREELEGGIVEALRALLQDREEALRIARMVAESSDGAEVAARRKQAAQSLSVAERGLKNILNAIEQGIIAPGAKERIAELEHQRDRAKLDLEAIKDEQIDPERLADFLQCGSALDDATLLNAFVYQASVSDEECIVTLNYDVENNEPARLDIQRVRTKCKWCPQRDSNPRYPP

SEQ ID NO: 7051 - protein, 479 aa, Unknown
  Description of Unknown: Integrase B7052 sequence
  PTHR30461:SF3,SM00857,IPR006118,G3DSA:1.10.10.2600,IPR036162, PS51737,G3DSA:3.40.50.1390,IPR006119,IPR038109,PF07508, SSF53041,IPR011109,PF00239,PTHR30461,PS00397, PS51736,Coil,cd00338
MEKKLKTAAAYIRVSTDRQTELSPDSQLRIIKEYAKRNGYNIPSEYIFREDGLSGKYVKKRPQFIEMIGLAKQNPAPFSTILVWKFSRFARNQEESIVYKSMLKKNDVSVISCSETLDEENPFSSLIERIIEWMDEYYSIRLSGEVLRGMSEKVKRGQPVTIPSFGYDIVDKQYVINEEKAAIVRKIFTDYIDGKSSMQIAAELNEIGVKTTRGNPFENRTIDYILKNPVYIGKIRWNQNGKTDYRYSNNKDIVYTQGVHKSIVSDEIFYKVQNLIETNGRKQRKGIHNNIKQEYMLHGLIKCSNCGSALAYSNKGLQCIKYSKSICKQSHYISLTNINNLVILGLEQVFENKDFKLLVKSLSQTVADCIDYTNLIEKENQKIQRIKNAYLEGIYTVEEVKEYKKSVEDKIKKLSSRQVQLKQEKTKPIKENVKEKKNFLATLKSPAISEKEKNEILKGFVDCIVFNRSTSSVDIFLYI

SEQ ID NO: 7052 - protein, 479 aa, Unknown
  Description of Unknown: Integrase B7053 sequence
  PTHR30461:SF3,cd00338,SM00857,IPR006118,G3DSA:1.10.10.2600, IPR036162,PS51737,G3DSA:3.40.50.1390,IPR006119,IPR038109, PF07508,SSF53041,IPR011109,PTHR30461,PS00397, PS51736,Coil,PF00239
MEKELKTAAAYIRVSTDRQTELSPDSQLRIIKEYAKQNGYNIPSEYIFREDGLSGKYVKKRPQFIEMIGFAKQKPAPFSAILVWKFSRFARNQEESIVYKSMLKKNDVSVISCSETLDEENPFSSLIERIIEWMDEYYSIRLSGEVLRGMSEKVKRGQPVTIPSFGYDIVDKQYVINEEKAAIVRKIFTDYIDGKNSMQIASELNEIGVKTTRGNPFENRTIDYILKNPVYIGKIRWNQNGKTDYRYSNNKDIVYTQGVHKSIVSDEIFYKVQNLIETNGRKQRKGIHNNIKQEYMLHGLIKCSNCGSALAYSNKGLQCIKYSKSICKQSHYISLTNINNLVILGLEQVFENKDFKLSVKSLSQTVADCIDYTNLIEKENQKIQRIKNAYLEGIYTVEEVKEYKKSVEDKIKNLSSRQVQLKQEKTKPRKENVKEKKNFLATLKSPAISEKEKNEILKGFVDCIVFNRSTSSVDIFLYI

SEQ ID NO: 7053 - protein, 479 aa, Unknown
  Description of Unknown: Integrase B7054 sequence
  PTHR30461:SF3,cd00338,SM00857,IPR006118,G3DSA:1.10.10.2600, IPR036162,PS51737,G3DSA:3.40.50.1390,IPR006119,IPR038109, PF07508,IPR011109,SSF53041,PTHR30461,PS00397, PS51736,Coil,PF00239
MEKELKTVAAYIRVSTDRQTELSPDSQLRIIKEYAKQNGYNIPSEYIFREDGLSGKYVKKRPQFIEMIGLAKQKPAPFSAILVWKFSRFARNQEESIVYKSMLKKNDVSVISCSETLDEENPFSSLIERIIEWMDEYYSIRLSGEVLRGMSEKVKRGQPVTIPSFGYDIVDKQYVINEEKAAIVRKIFTDYIDGKNSMQIASELNEIGVKTTRGNPFENRTIDYILKNPVYIGKIRWNQNGKTDYRYSNNKDIVYTQGVHKSIISDEIFYKVQNLIETNGRKQRKGIHNNIKQEYMLHGLIKCSNCGSALAYSNKGLQCIKYSKSICKQSHYISLTNINNLVILGLEQVFENKDFKLSVKSLSQTVADCIDYTNLIEKENQKIQRIKNAYLEGIYTVEEVKEYKKSVEDKIKNLSSRQVQLKQEKTKPRKENVKEKKNFLATLKSPAISEKEKNEILKGFVDCIVFNRSTSSVEIFLYI

SEQ ID NO: 7054 - protein, 479 aa, Unknown
  Description of Unknown: Integrase B7055 sequence
  PTHR30461:SF3,SM00857,G3DSA:1.10.10.2600,IPR036162,PF13408, PS51737,IPR025827,G3DSA:3.40.50.1390,IPR006119,IPR038109, PF07508,IPR011109,SSF53041,PTHR30461,Coil, PS51736,cd00338,PF00239
MNAVIYARYSCDRQTEQSIEGQLRECKAFAASEGIHIIGEYIDRAISGTTANRPEFQRMISDSKYKTFQAVIVYKLDRFARNRYDSAMYKSKLKANGVKVLSAKEHITDSPEGIILEGLLEAMNEYYSAELSQKIKRGMRENAIKGKTTGGNVALGYRIGADKQMEIDPAGASLVHRIFTGYDSGMTFTEICDDLNHAGYTTSRGKQFRIDTISRILANQRYTGTFQCAGEDAHCPPIIEPELFRSVQERLTESRHKHRHTQSPHEYVLTGKAICGTCDRRLTGRAGTSKTDKRYYYYCCPNKCCGWLPAAELEHAVLDAIAQYTTPEACEQIANATYALYQQSTHENADLTAAQRRLQETEKKLENAVNAVLNGITSAALQATMQQLEQQKAALETEVRLLQTDAPELKLEHFQYFAHRLLEVQAEGTEKILQLLVNQVIVYKEQITVLVNLTDKTKTPPLEQVTAALRESSCSIACA

SEQ ID NO: 7055 - protein, 479 aa, Unknown
  Description of Unknown: Integrase B7056 sequence
  PTHR30461:SF3,cd00338,SM00857,IPR036162,PF13408, IPR025827,G3DSA:3.40.50.1390,IPR006119,SSF53041,PTHR30461, PS51736,Coil,PF00239
MIADLPRKGKDKMAQSRSVTEKILRVALYPRVSTEEQFLRGYSLQTQEEVLTQYAHDHGYKIVGVYRDEGHSARKPALKRKVMQELLADVQAGKIDRILFIKLDRWFRNVREYHKIQEILEANNVTWQATMEDYNTATADGRLKVNIMLSVAENESDRTSERIKFVFDGKRRRKEWCFTGGPDQWPYGYMPQVIDGAKRCVKNPETEVIVQDFWDYVVKYSSVRKAGMYCCEKYGITRDYRTWMTTARNELYTGIFHGVEDYCPAYINRADWERIILGHEVIKKTQHPDRVYLFTGLIRCPGCGATMKATFKTYPNDRSKEYNGYRCNNSKLRTCAYRHQLSERKIEKYLLGNIKSQLENYIVQAEAQETQKRRQPKIQSLVALNEQLRRLNVIFIAGNIGDEEYAAETKRIKAEIKKAKQQESENRPANLDWIKSFLESDFLSTYESLDKEDQRRLWRSIIEEIYIDGTEVTGIKPRI

SEQ ID NO: 7056 - protein, 479 aa, Unknown
  Description of Unknown: Integrase B7057 sequence
  PTHR30461:SF3,cd00338,SM00857,IPR006118, G3DSA:1.10.10.2600,IPR036162,PS51737,G3DSA:3.40.50.1390, IPR006119,IPR038109,PF07508,IPR011109, SSF53041,PTHR30461,PS00397,PS51736,Coil,PF00239
MEKELKTAAAYIRVSTDRQTELSPDSQLRIIKEYAKQNGYNIPSEYIFREDGLSGKYVKKRPQFIEMIGLAKQKPAPFSAILVWKFSRFARNQEESIVYKSMLKKNDVSVISCSETLDEENPFSSLIERIIEWMDEYYSIRLSGEVLRGMSEKVKRGQPVTIPSFGYDIVDKQYVINEEKATIVRKIFTDYIDGKSSMQIASELNEIGVKTTRGNPFENRTIDYILKNPVYIGKIRWNQNGKTDYRYSNNKDIVYTQGVHKSIVSDEIFYKVQNLIEANGRKQRKGIHNNIKQEYMLHGFIKCSNCGSALAYSNKGLQCIKYSKSICKQSHYISLTNINNLVILGLEQVFKNKDFKLSVKSLSQTCADCIDYINLIEKENQKIQRIKNAYLEGIYTVEEVKEYKKSVEDKIKNLSSRQVQLKQEKTKPRKENVKEKKNFLATLKSPAISEKEKNEILKGFVDCIVFNRSTSSVDIFLYI

SEQ ID NO: 7057 - protein, 479 aa, Unknown
  Description of Unknown: Integrase B7058 sequence
  PTHR30461:SF3,cd00338,SM00857,IPR006118,G3DSA:1.10.10.2600, IPR036162,PS51737,G3DSA:3.40.50.1390,IPR006119,IPR038109, PF07508,IPR011109,SSF53041,PTHR30461,PS00397, PS51736,Coil,PF00239
MEKELKTAAAYIRVSTDRQTELSPDSQLRIIKEYAKQNGYNIPSEYIFREDGLSGKYVKKRPQFIEMIGLAKQKPAPFSAILVWKFSRFARNQEESIVYKSMLKKNDVSVISCSETLDEENPFSSLIERIIEWMDEYYSIRLSGEVLRGMSEKVKRGQPVTIPSFGYDIVDKQYVINEEKAAIVRKIFTDYIDGKNSTQIASELNEIGVKTTRGNPFENRTIDYILKNPVYIGKIRWNQNGKTDYRYSNNKDIVYTQGVHKSIVSDEIFYKVQNLIETNGRKQRKGIHNNIKQEYMLHGLIKCSNCGSALAYSNKGLQCIKYSKSICKQSHYISLTNINNLVILGLEQVFENKDFKLSVKSLSQTVADCIDYTNLIEKENQKIQRIKNAYLEGIYTVEEVKEYKKSVEDKIKNLSSRQVQLKQEKTKPRKENVKEKKNFLATLKSPAISEKEKNEILKGFVDCIVFNRSTSSIDIFLYI

SEQ ID NO: 7058 - protein, 479 aa, Unknown
  Description of Unknown: Integrase B7059 sequence
  PTHR30461:SF3,cd00338,SM00857,IPR006118,G3DSA:1.10.10.2600, IPR036162,PS51737,G3DSA:3.40.50.1390,IPR006119,IPR038109, PF07508,IPR011109,SSF53041,PTHR30461,PS00397, PS51736,Coil,PF00239
MEKELKTAAAYIRVSTDRQTELSPDSQLRIIKEYAKQNGYNIPSEYIFREDGLSGKYVKKRPQFIEMIGLAKQNPAPFSAILVWKFSRFARNQEESIVYKSMLKKNDVSVISCSETLDEENPFSSLIERIIEWMDEYYSIRLSGEVLRGMSEKVKRGQPVTIPSFGYDIVDKQYVINEEKAAIVRKIFTDYIDGKNSTQIASELNEIGVKTTRGNPFENRTIDYILKNPVYIGKIRWNQNGKTDYRYSNNKDIVYTQGVHKSIVSDEIFYKVQNLIETNGRKQRKGIHNNIKQEYMLHGLIKCSNCGSALAYSNKGLQCIKYSKSICKQSHYISLTNINNLVILGLEQVFENKDFKLSVKSLSQTVADCIDYTNLIEKENQKIQRIKNAYLEGIYTVEEVKEYKKSVEDKIKNLSSRQVQLKQEKTKPRKENVKEKKNFLATLKSPAISEKEKNEILKGFVDCIVFNRSTSSVDIFLYI

SEQ ID NO: 7059 - protein, 479 aa, Unknown
  Description of Unknown: Integrase B7060 sequence
  PTHR30461:SF3,cd00338,SM00857,G3DSA:1.10.10.2600,IPR036162, PF13408,IPR025827,PS51737,G3DSA:3.40.50.1390,IPR006119, IPR038109,PF07508,IPR011109,SSF53041,PTHR30461, PS51736,Coil,PF00239
MSNAVIYARYSSDKQSEESIEAQLRACRQYAATKGYNIVAVYADEAISGKGSMTASRAQYQKMLRDCNKGTFDTILIHKYDRVARSLGEHVNLDARLQKMGITLIAVGQDFGFGPESKIMRALMWSMSEYYIDNLANETKKGEREVALKGLHNGGYPPFGYDIVDQKYVINPYEAEYVRKIFAAVKNHEGTKDIIAEMAAVGIVGKRGKPLKYSAVYEILRNEKYTGTYIYCVDEEKDRSKRRSKPNAIRIENALPMIIDKATFDEVQKIMDSRKQSGPKTSYLCSGLVYCSCGAKMHAHISTKKGHVYHYYRCSKKCGAPMISMDIVDDAAKTYLRTLLSEENQKAIANAMRKYKCGEPERAADFKKIVASKISEKQKQYDTLMTNMSSGVLPVDVIEDIGAKMNQLRSEIEALKKTEMPKDYTTDQISLWLKALHDSPDDKAIRLLISRIDIKNTTEINIQSTLTSVVGTIGCGSWI

SEQ ID NO: 7060 - protein, 479 aa, Unknown
  Description of Unknown: Integrase B7061 sequence
  PTHR30461:SF3,cd00338,SM00857,IPR006118,G3DSA:1.10.10.2600, IPR036162,PS51737,G3DSA:3.40.50.1390,IPR006119,IPR038109, PF07508,IPR011109,SSF53041,PTHR30461,PS00397, PS51736,Coil,PF00239
MEKELKTAAAYIRVSTDRQTELSPDSQLRIIKEYAKQNGYNIPSEYIFREDGLSGKYVKKRPQFIEMIGLAKQKPAPFSAILVWKFSRFARNQEESIVYKSMLKKNDVSVISCSETLDEENPFSSLIERIIEWMDEYYSIRLSGEVLRGMSEKVKRGQPVTIPSFGYDIVDKQYVINEEKAAIVRKIFTDYIDGKNSMQIASELNEIGVKTTRGNPFENRTIDYILKNPVYIGKIRWNQNGKTDYRYSNNKDIVYTQGVHKSIVSDEIFYKVQNLIEANGRKQRKGIHNNIKQEYMLHGLIKCSNCGSALAYSNKGLQCIKYSKSICKQSHYISLTNINNLVILGLEQVFKNKDFKLSVKSLSQTCADCIDYINLIEKENQKIQRIKNAYLEGIYTVEEVKEYKKSVEDKIKNLSSRQVQLKQEKTKPRKENVKEKKNFLATLKSPAISEKEKNEILKGFVDCIVFNRSTSSVDIFLYI

SEQ ID NO: 7061 - protein, 479 aa, Unknown
  Description of Unknown: Integrase B7062 sequence
  PTHR30461:SF3,SM00857,IPR006118,G3DSA:1.10.10.2600,IPR036162, PS51737,G3DSA:3.40.50.1390,Coil,IPR006119,IPR038109, PF07508,IPR011109,SSF53041,PTHR30461,PS00397, PS51736,cd00338,PF00239
MDDLKIAAAYIRVSTDDQTELSPDSQIKVVREFAKQKGYLIPKEYIFRDDGISGRKASKRPEFNHMIAVAKQTPSPFSAIMVWKFSRFARNQEEAIFYKGMLKKRGIDVISTSEPIIDGPFGSLIERIIEWFDEYYSINLSTEVKRGMTEKVSRGGAVSIPAFGYDIVNKKYQVNPINAPIVQRIFIKYLNGVGCRAIANELNDLGIKTTRGNNWENRTIEYILRNPVYIGKIRWNPKRRTMRNYDDKDIMIVDGIHQPIIDTDLFDKVQKKLDENKAKYRPYITDRQNGKEYMLKGLVKCSNCGATMSMSCNGLQCIKYTHGTCKVSHYIQLNKLNEVVINAIDDTLKSGDFQLKPKEQPHEEPQELNVEFMIEKENTKLKRVKEAYEEGVYNLAEFKQRKELIESKIHSLQKQNKPPEPKLDHLLAKKKLMSRRKEIISTLKSKSTPEVEKNALLCTFIDKIIFNRSLSSVELFFCF

SEQ ID NO: 7062 - protein, 479 aa, Unknown
  Description of Unknown: Integrase B7063 sequence
  PTHR30461:SF3,cd00338,SM00857,IPR006118,G3DSA:1.10.10.2600, IPR036162,PS51737,G3DSA:3.40.50.1390,IPR006119,IPR038109, PF07508,IPR011109,SSF53041,PTHR30461,PS00397, PS51736,Coil,PF00239
MEKELKTAAAYIRVSTDRQTELSPDSQLRIIKEYAKQNGYNIPSEYIFREDGLSGKYVKKRPQFIEMIGLAKQKPAPFSTILVWKFSRFARNQEESIVYKSMLKKNDVSVISCSETLDEENPFSSLIERIIEWMDEYYSIRLSGEVLRGMSEKVKRGQPVTIPSFGYDIVDKQYVINEEKAAIVRKIFTDYIDGKNSMQIASELNEIGVKTTRGNPFENRTIDYILKNPVYIGKIRWNQNGKTDYRYSNNKDIVYTQGIHKSIVSDEIFYEVQNLIETNGRKQRKGIHNNIKQEYMLHGLIKCSNCGSALAYSNKGLQCIKYSKSICKQSHYISLTNINNLVILGLEQVFENKDFKLSVKSLSQTVADCIDYTNLIEKENQKIQRIKNAYLEGIYTVEEVKEYKKSVEDKIKNLSSRQVQLKQEKTKPRKENVKEKKNFLATLKSPAISEKEKNEILKGFVDCIVFNRSTSSVDIFLYI

SEQ ID NO: 7063 - protein, 479 aa, Unknown
  Description of Unknown: Integrase B7064 sequence
  PTHR30461:SF3,cd00338,SM00857,IPR036162,PF13408, IPR025827,G3DSA:3.40.50.1390,IPR006119,SSF53041,PTHR30461, PS51736,Coil,PF00239
MIADLPRKGKDKMAQSRSVTEKILRVALYPRVSTEEQFLRGYSLQTQEEVLTQYAHDHGYKIVGVYRDEGHSARKPALKRKVMQELLADVQAGKIDRILFIKLDRWFRNVREYHKIQEILEANNVTWQATMEDYNTATADGRLKVNIMLSVAENESDRTSERIKFVFDGKRRRKEWCFTGGPDQWPYGYMPQIIDGAKRCVKNPETEMIVQDFWDYVVKYSSVRKAGMYCCEKYGITRNYRTWMTTARNELYTGIFHGVEDYCPAYINRADWERIILGHEVIKKTQRPDRVYLFTGLIRCPGCGATMKATFKTYPNDRSKEYNGYRCNNSKLKTCAYRHQLSERKIEKYLLENIKSQLESYIVQAEAQETQKRRQPKIQSLVALNEQLRRLNVIFIAGNIGDEEYAAETKRIKAEVEKAKQQESENRPANLDWIKSFLESDFLSTYESLDKEEQRRLWRSIIEEIYIDGTEVTGIKPRI

SEQ ID NO: 7064 - protein, 479 aa, Unknown
  Description of Unknown: Integrase B7065 sequence
  PTHR30461:SF3,cd00338,SM00857,IPR006118, G3DSA:1.10.10.2600,IPR036162,PS51737,G3DSA:3.40.50.1390, IPR006119,IPR038109,PF07508,IPR011109, SSF53041,PTHR30461,PS00397,PS51736,Coil,PF00239
MEKELKTAAAYIRVSTDRQTELSPDSQLRIIKEYAKQNGYNIPSEYIFREDGLSGKYVKKRPQFIEMIGLAKQKPAPFSAILVWKFSRFARNQEESIVYKSMLKKNDVSVISCSETLDEENPFSSLIERIIEWMDEYYSIRLSGEVLRGMSEKVKRGQPVTIPSFGYDIVDKQYVINEEKAAIVRKIFTDYIDGKNSTQIASELNEIGVKTTRGNPFENRTIDYILKNPVYIGKIRWNQNGKTDYRYSNNKDIVYTQGVHKSIVSDEIFYKVQNLIETNGRKQRKGIHNNIKQEYMLHGLIKCSNCGSALAYSNKGLQCIKYSKSICKQSHYISLTNINNLVILGLEQVFENKDFKLSVKSLSQTVADCIDYTNLIEKENQKIQRIKNAYLEGIYTVEEVKEYKKSVEDKIKNLSSRQVQLKQEKTKPRKENVKEKKNFLATLKSPAISEKEKNEILKGFVDCIVFNRSTSSVDIFLYI

SEQ ID NO: 7065 - protein, 479 aa, Unknown
  Description of Unknown: Integrase B7066 sequence
  PTHR30461:SF3,SM00857,IPR006118,G3DSA:1.10.10.2600,IPR036162, PS51737,G3DSA:3.40.50.1390,Coil,IPR006119,IPR038109, PF07508,IPR011109,SSF53041,PTHR30461,PS00397, PS51736,cd00338,PF00239
MDDLKIAAAYIRVSTDDQTELSPDSQIKVVREFAKQKGYLIPKEYIFRDDGISGRKASKRPEFNHMIAVAKQTPSPFSAIMVWKFSRFARNQEEAIFYKGMLKKRGIDVISTSEPIIDGPFGSLIERIIEWFDEYYSINLSTEVKRGMTEKVSRGGAVSIPAFGYDIVDKKYQVNPINAPIVQRIFIKYLNGVGCRAIANELNDLGIKTTRGNNWENRTIEYILRNPVYIGKIRWNPKRRTRRNYDDKDIMIVDGIHQPIIDTDIFDKVQKKLDENKAKYRPYITDRQNGKDYMLKGLVKCSNCGATLSLACNSLQCIKYAHGTCNVSHSIQVNRLNEVVINAIDDTLKSGDFQLKPKEQPHEEPQELNIDFMIEKENTKLRRIKEAYEEGVYNLAEFKQRKELIESKIRSLQKQNKPPEPKPDHLLAKKKLMSRRKEIISTLKSKSTPEVEKNALLCTFIDKIIFNRSLSSVELFFCF

SEQ ID NO: 7066 - protein, 479 aa, Unknown
  Description of Unknown: Integrase B7067 sequence
  PTHR30461:SF3,IPR036162,PS51737,IPR011109,PTHR30461, PS00397,PF00239,G3DSA:1.10.10.2600,IPR006119,SSF53041, cd00338,SM00857,IPR025827,IPR038109,PS51736, IPR006118,PF13408,G3DSA:3.40.50.1390,PF07508,Coil
MIRKVAIYARVSTMNQAEEGYSIDGQIDSLEKYCEAMGWDVYNKYIDAGFSGGSLKRPEMTNLINDVKKGLFDTVLVYKLDRLSRDVRDTLYLIKDVFNINKIDFVSIQENIDTSSAMGTLFLTLLSAIAEFEREQIKERMQLGKLGRAKSGKSMQWAKTSYGYDYIKETGTLSVNPYQALIVRKMFEWYLSGMSITKLRDALNEQYGQDKEWSYRTVRVILSNPVYCGYNQFKGQIFPGTHEAIISEEDFNKTQEEIKTRQRTAAQRFNPRPFQAKYMLSGIAQCGYCSAPLAIKLGMKRKDGTRLVKYECKQRHPRKTKGVTVYNNNEKCDSGFYFKDDIEHFVLTEISKLQTDSNYIDKLFSNTNQETIDRASYQKQIDNLTAKIRRLNDLYIDDRISLEELQKRSSDFMAERTALEKELDADTSLKAVERKEDVRRVLDTKDIFTLDYEQQKAIARALISKVRVTSESIVILWKL

SEQ ID NO: 7067 - protein, 479 aa, Unknown
  Description of Unknown: Integrase B7068 sequence
  PTHR30461:SF3,SM00857,IPR006118,G3DSA:1.10.10.2600,IPR036162, PS51737,G3DSA:3.40.50.1390,IPR006119,IPR038109,PF07508, IPR011109,SSF53041,PTHR30461,PS00397,PS51736, cd00338,PF00239
MDDLKIAAAYIRVSTDDQTELSPDSQIKVVRDFAKQKGYLIPKEYIFRDDGISGRKASKRPEFNHMIAVAKQTPSPFSAIMVWKFSRFARNQEEAIFYKGMLKKRGIDVISTSEPIIDGPFGSLIERIIEWFDEYYSINLSTEVKRGMTEKVSRGGAVSTPAFGYDIVDKKYQVNPINAPIVQRIFIKYLNGVGCRAIANELNDLGIKTTRGNNWENRTIEYILRNLVYIGKIRWNPKRRTRRNYDDKDIMIVDGIHQPIIDTDLFNKVQKKLDENKSKYRPYITERKNGKEYMLKGLVKCSNCGATMSMTCNGLQCIKYAHGTCNVSHYIQLNKLNEVVINAIDDTLKSGDFQLKPKEQPHEEPQELNIDFMIEKENTKLRRIKEAYEEGVYNLAEFKQRKELIESKICSLQKQNKPPEPKPDHLLAKKKLMSRRKEIISTLKSKSTPEVEKNALLCTFIDKIIFNRSLSSVELFFCF

SEQ ID NO: 7068 - protein, 479 aa, Unknown
  Description of Unknown: Integrase B7069 sequence
  PTHR30461:SF3,SM00857,IPR006118,G3DSA:1.10.10.2600,IPR036162, PS51737,G3DSA:3.40.50.1390,Coil,IPR006119,IPR038109, PF07508,IPR011109,SSF53041,PTHR30461,PS00397, PS51736,cd00338,PF00239
MDDLKIAAAYIRVSTDDQTELSPDSQIKVVREFAKQKGYLIPKEYIFRDDGISGRKASKRPEFNHMIAVAKQTPSPFSAIMVWKFSRFARNQEEAIFYKGMLKKRGIDVISTSEPIIDGPFGSLIERIIEWFDEYYSINLSTEVKRGMTEKVSRGGAVSIPAFGYDIVDKKYQVNPINAPIVQRIFIKYLNGVGCRAIANELNDLGIKTTRGNNWENRTIEYILRNPVYIGKIRWNPKRRTRRNYDDKDIMIVDGIHQPIIDTDLFDKVQKKLDENKSKYRPYITDRRNGKEYMLKGLVKCSNCGATMSMSCNGLQCIKYTHGTCKVSHYIQLNKLNEVVINAIDDTLKSGDFQLKPKEQPHEEPQELNIDFMIEKENTKLRRIKEAYEEGVYNLAEFKQRKELIESKIHSLQKQNKPPEPKSDHLLAKKKLMSRRKEIISTLKSKSTPEVEKNALLCTFIDKIIFNRSLSSVELFFCF

SEQ ID NO: 7069 - protein, 479 aa, Unknown
  Description of Unknown: Integrase B7070 sequence
  PTHR30461:SF3,IPR036162,PS51737,IPR011109,PTHR30461, PS00397,PF00239,G3DSA:1.10.10.2600,IPR006119,SSF53041, SM00857,IPR025827,IPR038109,PS51736,cd03768, IPR006118,PF13408,G3DSA:3.40.50.1390,PF07508,Coil
MPKVAIYARVSTLNQAEEGYSIEGQLASLRKYCSALDWQIYQEYVDPGFSGGSLNRPAIQKLIVDAKSHRFDIVLIYKLDRLSRSVQDTLYLVKDIFDKNKISFVSLNEKIDTSSPMGNLFLTLLASIAEFEREQIKERMMMGKVGRAKSGKAMGWSKVPFGYTYDKQTGIYQINTLQAQIVKRIYRDYLDGVSITKLVDLLNAEGHIAKDRPWTYRTVRQALDNVVYTGRQFYQGNVYPGQHEAIISIEDYDKTQAELKRRQLTNAQKFNPRPFRAKYMLSGLLRCSVCGSSMMVQTRYLKYADDYHYYRCVSSIRKRIRFSYRQDTELCQNRSDYLKDDLENAIIKTIRHLQLHPDQMPVNTVKFDDKPLKDEINRINDKLNKLVDLYLNSNGISIGIINQKRDELLQQKEALENKLQERKPKQPELDPKKALLLLSKKNILELPYEEQVKLVKSLISKIEVSPSKMKIHWRFNVEK

SEQ ID NO: 7070 - protein, 479 aa, Unknown
  Description of Unknown: Integrase B7071 sequence
  PTHR30461:SF3,IPR036162,PS51737,IPR011109,PTHR30461, PS00397,PF00239,G3DSA:1.10.10.2600,IPR006119,SSF53041, cd00338,SM00857,IPR025827,IPR038109,PS51736, IPR006118,PF13408,G3DSA:3.40.50.1390,PF07508
MKTAACYIRVSTDDQTEYSPDSQLKIIRDYAFKHEISLIENYIFAEDGGKSGKNMTNRTQFMRLISLTKKKPKPFDIILVWKFSRFARNQEESIVLKSMLHKNGIEVISVSESLPEGPFGSLVERIIEWSDEYYLINLAQEVKRGMKERASRGQPVCPPPIGYSMENGNYVPNDDAQFVKNVFADYLAGLGVRTIAIKYGKLGLKTTRGNAPDNRFIEYMLRNPVYIGKIRWSIDGRAASRRNYDDPNIMIADGNHEPLISEEDFNAVQKKIDETKQLYRKYQRSEQPVEYMLKGLVHCSACGSTLVRINGGKKPGLQCHNYGRGNCHVSHSVRLEKATNAIIEGIENSLRTGNFNIAPPKRLETESTVDYDKLLANEQIKLERVKTAYRDGIDTLEEYKHNKEQIYTFIEKIKTEQAEARSLSAPIGKEEFRKKAANVLKIIKDPKQPENAKNIALRSIVERIVYQKSQNAFEIYFYV

SEQ ID NO: 7071 - protein, 479 aa, Unknown
  Description of Unknown: Integrase B7072 sequence
  IPR036162,PS51737,IPR011109,PTHR30461,PS00397, PF00239,G3DSA:1.10.10.2600,IPR006119,SSF53041,SM00857, IPR025827,IPR038109,PS51736,cd03768,IPR006118, PF13408,G3DSA:3.40.50.1390,PF07508,Coil
MPKVAIYARVSTLNQAEEGYSIEGQLASLRKYCSALDWQIYQEYVDPGFSGGSLNRPAIQKLIVDAKSHRFDIVLIYKLDRLSRSVQDTLYLVKDIFDKNKISFVSLNEKIDTSSPMGNLFLTLLASIAEFEREQIKERMMMGKVGRAKSGKAMGWSKVPFGYTYDKQTGIYQINTLQAQIVKRIYRDYLDGVSITKLVDLLNAEGHITKDRPWTYRTVRQALDNVVYTGRQFYQGNVYPGQHEAIISIEDYDKTQAELKRRQLTNAQKFNPRPFRAKYMLSGLLRCSFCGSSMMVQTRYLKYADDYHYYRCVSSIRKRIRFSYRQDTELCQNRSDYLKDDLESAIIKTIRHLQLHPDQMPVNTVKFDDKSLKDELNRINDKLNKLVDLYLNSNGISIGIINQKRDELLQQKEALENKLQERKPKQPELDPKKALLLLSKKNILELPYKEQVKLVKSLISKIEVSPSKMKIHWRFNVEK

SEQ ID NO: 7072 - protein, 479 aa, Unknown
  Description of Unknown: Integrase B7073 sequence
  PTHR30461:SF3,cd00338,SM00857,IPR006118,G3DSA:1.10.10.2600, IPR036162,PS51737,G3DSA:3.40.50.1390,IPR006119,IPR038109, PF07508,IPR011109,SSF53041,PTHR30461,PS00397, PS51736,Coil,PF00239
MEKELKTAAAYIRVSTDRQTELSPDSQLRIIKEYAKQNGYNIPSEYIFREDGLSGKYVKKRPQFIEMIGLAKQNPAPFSAILVWKFSRFARNQEESIVYKSMLKKNDVSVISCSETLDEENPFSSLIERIIEWMDEYYSIRLSGEVLRGMSEKVKRGQPVTIPSFGYDIVDKQYVIDEEKAVIVRKIFTDYIDGKSSMQIASELNEIGVKTTRGNPFENRTIDYILKNPVYIGKIRWNQNGKTDYRYSNNKDIVYTQGVHKSIVSDEIFYKVQNLIETNGRKQRKGIHNNIKQEYMLHGLIKCSNCGSALAYSNKGLQCIKYSKSICKQSHYISLTNINNLVILGLEQVFENKDFKLSVKSLSQTVADCIDYTNLIEKENQKIQRIKNAYLEGIYTVEEVKEYKKSVEDKIKNLSSRQVQLKQEKTKPRKENVKEKKNFLATLKSPAISEKEKNEILKGFVDCIVFNRSTSSVDIFLYI

SEQ ID NO: 7073 - protein, 479 aa, Unknown
  Description of Unknown: Integrase B7074 sequence
  PTHR30461:SF3,IPR036162,PS51737,IPR011109,PTHR30461, PS00397,PF00239,G3DSA:1.10.10.2600,IPR006119,SSF53041, cd00338,SM00857,IPR025827,IPR038109,PS51736, IPR006118,PF13408,G3DSA:3.40.50.1390,PF07508,Coil
MKTAACYIRVSTDDQTEYSPDSQLKIVRDYAFKHDISLVEKYIFAEDGGKSGKNMTNRTEFMRLISLTKKKPKPFDAILVWKFSRFARNQEESIVLKSMLHKNGIDVISVSEALPEGPFGSLVERIIEWSDEYYLINLAQEVKRGMKERASRGQPVCPPPIGYSMDNGKYVPNADAQFVKNVFADYLAGLGLRAIAIKYGNLGLKTTRGNAPDNRFIEYMLRNPVYIGKIRWSVDGRAASRRVYDDPNIMISDGNHEPIISEEVFNEVQKRIGETKRLYKKYQRPDQPMEYMLKGLVRCSACGSTLTRVITGSAPGLQCHNYSRGSCHVSHSIRISKANDAIIAGLESSIETGNFNIVPPKINNAESTIDYDKLLANEQLRLERVKAAYQNGIDTLEEYKRNKEQIYAFMEKIKAEMEANGTRAAAADNAGFRQKAANVLKIIKDPSQPESAKNIALRSIVERIVFKKPENEFDIFFYV

SEQ ID NO: 7074 - protein, 479 aa, Unknown
  Description of Unknown: Integrase B7075 sequence
  PTHR30461:SF3,cd00338,SM00857,G3DSA:1.10.10.2600,IPR036162, PF13408,IPR025827,G3DSA:3.40.50.1390,PS51737,IPR006119, IPR038109,PF07508,SSF53041,IPR011109,PTHR30461, PS51736,Coil,PF00239
MSNAVIYARYSSDKQSEESIEAQLRACRQYAATRGYNIVAVYADEAISGKGSMTASRAQYQRMLRDCNKGTFDTILIHKYDRVARSLGEHVNLDARLQKMGITLIAVGQDFGFGPESKIMRALMWSMSEYYIDNLANETKKGEREIALKGLHNGGYPPFGYDIVDQKYVINPYEAEYVRKIFAAVKNREGTKDIIAEMAAVGIVGKRGKPLTYSAVYEILRNEKYTGTYIYCVDEEKDRSKRRSKPNAIRIENALPMIIDKATFDEVQKIMDSRKQSGPKTSYLCSGLVYCSCGAKMHAHISTKKGHVYHYYRCSKKCGAPMISMDIVDDAAKTYLRTLLNEENQKAIATAMRKYKCGEPERAADFKKIVASKISEKQKQYDTLMTNMSSGVLPADVIEDIGAKMNQLRSEIEALKKTEMPKDYTTDQISLWLKALHDSPDDKAIRLLISRIDIKNTTEINIQSTLTSVVGTIGCGSWI

SEQ ID NO: 7075 - protein, 479 aa, Unknown
  Description of Unknown: Integrase B7076 sequence
  SM00857,G3DSA:1.10.10.2600,IPR036162,PF13408,PS51737, G3DSA:3.40.50.1390,IPR025827,IPR006119,IPR038109,PF07508, IPR011109,SSF53041,PTHR30461,Coil,PS51736, cd00338,PF00239
MRGVIYARYSPGPHQTEQSIEGQVADCQQYAEEHGIDIIEIYADRHVSGKSVVGRDEFQRMLRDAEKGRFDCVLVWKIDRFGRDRQDIAMGKMTLKRAGVKLMYARESVPEGPEGIILESVLEGLAEYYSADLRQKVIRGMKETAKKGQYCGQPLPIGYKVDSQRHVVIDEREAAAVREAFKMHIAGAQLRDIVQMFAERGIMGRRGKPVSNAVVYRMLRNEKYLGEFYIQDVKLNVEPIIDQATFLEAARHFKTSRNNAAGRAKVNYLLSCKTFCGYCGSMISAEAGTGKLGKVYRYYKCGDKKRGKKCELKPFPKDHLEDAIILATVNDMLTDEMIEKLTVRILEVQEQENADDPVVGLRRRLDSNKKRQRNLLDAIEEGGARGLVSRLAALEEEEERLVLEIQRAEIKRPRLTHEVVEAWLRSFRVGDVTDDDFRARLVDTFIARVELRNDEALIFYNIREKGPHSRVRVRPEWWT

SEQ ID NO: 7076 - protein, 479 aa, Unknown
  Description of Unknown: Integrase B7077 sequence
  PTHR30461:SF3,SM00857,G3DSA:1.10.10.2600,IPR036162,PS51737, G3DSA:3.40.50.1390,IPR006119,IPR038109,PF07508,SSF53041, IPR011109,PF00239,PTHR30461,PS51736,Coil, cd00338
MPKTAVIYARFSCNKQREASIDDQLRICRQWCQREKYAIVAEYCDYAISGRTDDRPEFQRMVANAGESDIVLVYMMDRFSRGEYDAPIYKRELAQHGVKLVSALEQIPDSPEGIIYEKLLEGLAACESKKTAIRTRRGMEGNALKCKTNGVRVFGYASNEADEYVIDEDEAAFVREAFKRRIAKETTNSIARDFAARGVKTSQGNPCGYSMVERMVKNRKYTGRYEWGGVVKEGGMPAIIDEVTFMEAQGIRAAKERSAESWGDFALSGKAICAGCGRNLQGVSGRGRGNRKYEYYRCHDGCVKPVRREELEGEIVKALRALLQDREEALRIARMVAESSDGAEVAARRKQAAQSLSAAERGLKNILNAIEQGIIAPGAKERIAELEHQRDRAKLDLEAIRDDQIDPERLADFLQCGSALDDATLLKAFVYQASVSDEECIVTLNYDVENNEPARLDIQRVRTKCKWCPRADSNRRHPL

SEQ ID NO: 7077 - protein, 479 aa, Unknown
  Description of Unknown: Integrase B7078 sequence
  PTHR30461:SF3,SM00857,IPR006118,G3DSA:1.10.10.2600,IPR036162, PS51737,G3DSA:3.40.50.1390,Coil,IPR006119,IPR038109, PF07508,IPR011109,SSF53041,PTHR30461,PS00397, PS51736,cd00338,PF00239
MDNLKIAAAYIRVSTDDQTELSPDSQIKVVREFAKQKGYLIPKEYIFRDDGISGRKASKRPEFNHMIAVAKQTPSPFSAIMVWKFSRFARNQEEAIFYKGMLKKRGIDVISTSEPIIDGPFGSLIERIIEWFDEYYSINLSTEVKRGMTEKVSRGGAVSIPAFGYDIVDKKYQVNPINAPIVQRIFIKYLNGVGCRAIANELNDLGIKTTRGNNWENRTIEYILRNPVYIGKIRWNPKRRTRRNYDDKDIMIVDGIHQPIIDTDLFDKVQKKLDENKAKYRPYITDRQNGKEYMLKGLVKCSNCGATMSMSCNGLQCIKYTHGTCKVSHYIQLNKLNEVVINAIDDTLKSGDFQLKPKEQPHEEPQELNIDFMIEKENTKLRRIKEAYEEGVYNLAEFKQRKELIESKIHSLQKQNKPPEPKPDHLLAKKKLMSRRKEIISTLKSKSTPEVEKNALLCTFIDKIIFNRSLSSVELFFCF

SEQ ID NO: 7078 - protein, 479 aa, Unknown
  Description of Unknown: Integrase B7079 sequence
  PTHR30461:SF3,SM00857,IPR006118,G3DSA:1.10.10.2600,IPR036162, PS51737,G3DSA:3.40.50.1390,Coil,IPR006119,IPR038109, PF07508,IPR011109,SSF53041,PTHR30461,PS00397, PS51736,cd00338,PF00239
MDDLKIAAAYIRVSTDDQTELSPDSQIKVVREFAKQKGYLIPKEYIFRDDGISGRKASKRPEFNHMIAVAKQTPSPFSAIMVWKFSRFARNQEEAIFYKGMLKKRGIDVISTSEPIIDGPFGSLIERIIEWFDEYYSINLSTEVKRGMTEKVSRGGAVSIPAFGYDIVDKKYQVSPINAPIVQRIFIKYLNGVGCRAIANELNDLGIKTTRGNNWENRTIEYILRNPVYIGKIRWNPKRRTRRNYDDKDIMIVDGIHQPIIDTDLFDKVQKKLDENKAKYRPYITDRQNGKEYMLKGLVKCSNCGATLSLACNSLQCIKYAHGTCNVSHSIQVNRLNEVVINAIDDTLKSGDFQLKPKEQPHEEPQELNIDFMIEKENTKLRRIKEAYEEGVYNLAEFKQRKELIESKIHSLQKQNKPPEPKPDHLLAKKKLMSRRKEIISTLKSKSTPEVEKNALLCTFIDKIIFNRSLSSVELFFCF

SEQ ID NO: 7079 - protein, 479 aa, Unknown
  Description of Unknown: Integrase B7080 sequence
  PTHR30461:SF3,SM00857,IPR006118,G3DSA:1.10.10.2600,IPR036162, PS51737,G3DSA:3.40.50.1390,PS00397,IPR006119,IPR038109, PF07508,IPR011109,SSF53041,PTHR30461,Coil, PS51736,cd00338,PF00239
MDDLKIAAAYIRVSTDDQTELSPDSQIKVVREFAKQKGYLIPKEYIFRDDGISGRKASKRPEFNHMIAVAKQTPSPFSAIMVWKFSRFARNQEEAIFYKGMLKKRGIDVISTSEPIIDGPFGSLIERIIEWFDEYYSINLSTEVKRGMTEKVSRGGAVSIPAFGYDIVDKKYQVNPINAPIVQRIFIKYLNGVGCRAIANELNDLGIKTTRGNNWENRTIEYILRNPVYIGKIRWNPKRRTRRNYDDKDIMIVDGIHQPIIDTDLFDKVQKKLDENKAKYRPYITDRQNGKEYMLKGLVKCSNCGATLSLACNSLQCIKYAHGTCNVSHSIQVNRLNEVVINAIDDTLKSGDFQLKPKEQPHEEPQELNIDFMIEKENTKLRRIKEAYEEGVYNLAEFKQRKELIESKIHSLQKQNKPPEPKPDHLLAKKKLMSRRKEIISTLKSKSTPEVEKNALLCTFIDKIIFNRSLSSVELFFCF

SEQ ID NO: 7080 - protein, 479 aa, Unknown
  Description of Unknown: Integrase B7081 sequence
  PTHR30461:SF3,cd00338,SM00857,IPR006118,G3DSA:1.10.10.2600, IPR036162,PS51737,G3DSA:3.40.50.1390,IPR006119,IPR038109, PF07508,SSF53041,IPR011109,PTHR30461,PS00397, PS51736,Coil,PF00239
MEKELKTAAAYIRVSTDRQTELSPDSQLRIIKEYAKRNGYNIPSEYIFREDGLSGKYVKKRPQFIEMIGLAKQKPAPFSTILVWKFSRFARNQEESIVYKSMLKKNDVSVISCSETLDEENPFSSLIERIIEWMDEYYSIRLSGEVLRGMSEKVKRGQPVTIPSFGYDIVDKQYVINEEKAAIVRKIFTDYIDGKNSMQIASELNEIGVKTTRGNPFENRTIDYILKNPVYIGKIRWNQNGKTDYRYSNNKDIVYTQGVHKSIVSDEIFYKVQNLIETNGRKQRKGIHNHIKQEYMLHGLIKCSNCGSALAYSNKGLQCIKYSKSICKQSHYISLTNINNLVILGLEQVFENKDFKLSVKSLSQTVADCIDYTNLIEKENQKIQRIKNAYLEGIYTVEEVKEYKKSVEDKIKNLSSRQVQLKQEKTKPRKENVKEKKNFLSTLKSPAISEKEKNEILKGFVDRIVFNRSTSSVDIFLYI

SEQ ID NO: 7081 - protein, 479 aa, Unknown
  Description of Unknown: Integrase B7082 sequence
  IPR036162,PS51737,IPR011109,PTHR30461,PS00397, PF00239,G3DSA:1.10.10.2600,IPR006119,SSF53041,SM00857, IPR025827,IPR038109,PS51736,cd03768,IPR006118, PF13408,G3DSA:3.40.50.1390,PF07508,Coil
MPKVAIYARVSTLNQAEEGYSIEGQLASLRKYCSALDWQIYQEYVDPGFSGGSLNRPAIQKLIVDAKSHRFDIVLIYKLDRLSRSVQDTLYLVKDIFDKNKISFVSLNEKIDTSSPMGNLFLTLLASIAEFEREQIKERMMMGKVGRAKSGKAMGWSKVPFGYTYDKQTGIYQINTLQAQIVKRIYRDYLDGVSITKLVDLLNAEGHITKDRPWTYRTVRQALDNVVYTGRQFYQGNVYPGQHEAIISIEDYDKTQAELKRRQLTNAQKFNPRPFRAKYMLSGLLYCSVCGSSMMVQTRYLKYADDYHYYRCVSSIRKRIRFSYRQDTELCQNRSNYLKDDLESAIIKTIRHLQLHPDQMPVDTVKFDDKPLKDELNRINDKLNKLVDLYLNSNGISIGIINQKREELLQQKEALENKLQERKPKQPELDPKKALLLLSKKNILELPYEEQVKLVKSLISKIEVSPSKMKIHWRFNVEK

SEQ ID NO: 7082 - protein, 479 aa, Unknown
  Description of Unknown: Integrase B7083 sequence
  PTHR30461:SF3,SM00857,IPR006118,G3DSA:1.10.10.2600,IPR036162, PS51737,G3DSA:3.40.50.1390,Coil,IPR006119,IPR038109, PF07508,IPR011109,SSF53041,PTHR30461,PS00397, PS51736,cd00338,PF00239
MDDLKIAAAYIRVSTDDQTELSPDSQIKVVREFAKQKGYLIPKEYIFRDDGISGRKASKRPEFNHMIAVAKQTPSPFSAIMVWKFSRFARNQEEAIFYKGMLKKRGIDVISTSEPIIDGPFGSLIERIIEWFDEYYSINLSTEVKRGMTEKVSRGGAVSIPAFGYDIVDKKYQVNPINAPIVQRIFIKYLNGVGCRAIANELNDLGIKTTRGNNWENRTIEYILRNPVYIGKIRWNPKRRTRRNYDDKDIMIVDGIHQTIIDTDLFDKVQKKLDENKAKYRPYITDRQNGKEYMLKGLVKCSNCGATMSMSCNGLQCIKYTHGTCKVSHYIQLNKLNEVVINAIDDTLKSGDFQLKPKEQPHEEPQELNIDFMIEKENTKLRRIKEAYEEGVYNLAEFKQRKELIESKIHSLQKQNKPPEPKSDHLLAKKKLMSRRKEIISTLKSKSTPEVEKNALLCTFIDKIIFNRSLSSVELFFCF

SEQ ID NO: 7083 - protein, 479 aa, Unknown
  Description of Unknown: Integrase B7084 sequence
  SM00857,G3DSA:1.10.10.2600,IPR036162,PF13408,PS51737, IPR025827,G3DSA:3.40.50.1390,IPR006119,IPR038109,PF07508, IPR011109,SSF53041,PTHR30461,Coil,PS51736, cd00338,PF00239
MLNEYRCNFKSSCSLYSCQVSTEDQAELSPDAQKRLLLDYAQKNDMIVSGDFIFTESVSGRHAQKRPEFQKMIALAKQPSHPIDVILVWKFSRFARNQEESIVYKSMLKKDNVDVISVSEPLIEGPFGSLIERIIEWMDEYYSIRLSGEVLRGMKEKALQKGYQTSPCLGYTAVGHGKPYIINEAEYAIVSYIMDLYDNQNLDETAIARRCNDLGYRTKRGKLFERRSVDRILGNPFYCGTVVWNGVEFEGNHEVRLSRERYEKRQKLITSRKRPVKARNVSACKHWLSGLLKCSVCGATLSYTGNNKCPYFQCWKYAKGFHKTSVALSVKKAEEAVISYFDQILDGAEFTYVCKKKKTDHSLQIEQLQKGIGKLTMRESRIKEAYEAGVDTLEEYKNNKDRLVSDRLELTAALSQLLQEEQAEQPDTEKILKEIRSVADVLKNPDVGYEEKGNLIRSVVEQIIYDKESGKMSFDIIIS

SEQ ID NO: 7084 - protein, 479 aa, Unknown
  Description of Unknown: Integrase B7085 sequence
  PTHR30461:SF3,IPR036162,PS51737,IPR011109,PTHR30461, PS00397,PF00239,G3DSA:1.10.10.2600,IPR006119,SSF53041, SM00857,IPR025827,IPR038109,PS51736,cd03768, IPR006118,PF13408,G3DSA:3.40.50.1390,PF07508,Coil
MQNKVAIYVRVSTTSQVEEGYSIDEQKAKLSSYCDIKDWNVYKIYTDGGFSGANTDRPALEGLIKDAKRKKFDTVLVYKLDRLSRSQKDTLYLIEDIFIKNNIAFLSLQENFDTSTPFGKAMIGLLSVFAQLEREQIKERMQLGKIGRAKAGKSMMWAKTSYGYDYHRETGTITINPAQALAVKFIFESYLRGRSITKLRDDLNEKFPKGIDWSYRAVRAILDNPVYCGFNQFKGEVYPGNHEPIITEEVYNKTKEELKIRQRTAAENVNPRPFQAKYILSGIAQCGYCGAPLKIMLGVKRKDGSRLKKYECHQRHPRTLRGVTTYNDNKKCDSGFYYKDKLEAYVLEEISKLQDNADYLDKIFSGDNAETIDRESYKRQIEELSKKLSRLNDLYIDDRITLEELQSKSAEFISMRATLETELENDPALRKDKRKADMRKLLNAEKVFSMDYESQKVLVRGLINKVQVTAEDIVINWKI

SEQ ID NO: 7085 - protein, 479 aa, Unknown
  Description of Unknown: Integrase B7086 sequence
  PTHR30461:SF3,SM00857,G3DSA:1.10.10.2600,IPR036162,PF13408, IPR025827,PS51737,G3DSA:3.40.50.1390,IPR006119,IPR038109, PF07508,SSF53041,IPR011109,PTHR30461,Coil, PS51736,cd00338,PF00239
MSNAVIYARYSSDKQSEESIEAQLRACRQYAATKGYNIVAVYADEAISGKGSMTASRAQYQKMLRDCNKGTFDTILIHKYDRVARSLSEHVNLDTRLQKMGVTLIAVGQDFGLGPESKIMRALMWSMSEYYIDNLANETKKGEREIALKGLHNGGYPPFGYDIVDQKYVINPYEAEYVRKIFAAVKNHEGTKDIIAEMAAVGIVGKRGKPLKYSAVYEILRNEKYTGTYIYCVDEEKDRSKRRSKPNAIRIENALPMIIDKATFDEVQKIMDSRKQSGPKTSYLCSGLVYCSCGAKMHAHISTKKGHVYHYYRCSKKCGAPMISMDIVDDAAKTYLRTLLNEENQKAIATAMRKYKCGEPERAADFKKIVASKISEKQKQYDTLMTNMSSGVLPADVIEDIGAKMNQLRSEIEALKKTEMPKDYTTDQISLWLKALHDSPDDKAIRLLISRIDIKNTTEINIQSTLTSVVGTIGCGSWI

SEQ ID NO: 7086 - protein, 479 aa, Unknown
  Description of Unknown: Integrase B7087 sequence
  PTHR30461:SF3,IPR036162,PS51737,IPR011109,PTHR30461, PS00397,PF00239,G3DSA:1.10.10.2600,IPR006119,SSF53041, cd00338,SM00857,IPR025827,IPR038109,PS51736, IPR006118,PF13408,G3DSA:3.40.50.1390,PF07508,Coil
MIRKVAIYVRVSTTNQAEEGYSIDGQIDSLEKYCEAMGWDVYNKYIDAGFSGGSLKRPEMANLINDVKKGLFDTVLVYKLDRLSRNVRDTLYLIKDVFNINKIDFVSIQENIDTSSAMGTLFLTLLSAIAEFEREQIKERMQLGKLGRAKSGKSMQWAKTSFGYDYIKETGTLSVNPYQALIVRKMFEWYLSGMSITKLRDALNKQYGQDKEWSYRTVRVILSNPVYCGYNQFKGQIFPGTHEPIISEEDFNKTQEEIKTRQRTAAERFNPRPFQAKYMLSGIAQCGYCSAPLAIKLGMVRKDGTRLVKYECKQRHPRKTKGVTVYNNNAKCDSGFYFKDDIEHFVLTEISKLQTDSSYIDKLFSNTNQETIDRDSYQKQIDNLTAKISRLNDLYIDDRISLEELQKRSSDFMAKRTALEKELDADSSIKTVERKKDIRRVLDTKDIFTLDYEQQKVIARALISKVRVTSESIVILWKL

SEQ ID NO: 7087 - protein, 479 aa, Unknown
  Description of Unknown: Integrase B7088 sequence
  PTHR30461:SF3,cd00338,SM00857,G3DSA:1.10.10.2600,IPR036162, PS51737,G3DSA:3.40.50.1390,IPR006119,IPR038109,PF07508, IPR011109,SSF53041,PTHR30461,PS51736,Coil, PF00239
MPKTAVIYARFSCNKQREASIDDQLRICRQWCQRERYAIVAEYCDYAISGRTDDRPEFQRMVANAGESDIVLVYMMDRFSRGEYDAPIYKRELAQHGVKLVSALEQIPDSPEGIIYEKLLEGLAACESKKTAIRTRRGMEGNALKCKTNGVRVFGYASNEADEYVVNEDEAAFVREAFKRRIAKETTNSIARDFAARGVKTSQGNPCGYSMVERMVKNRKYTGRYEWGGVVKEGGMPAIIDEVTFMEAQGIRAAKERSAESWGDFALSGKAICAGCGRNLQGVSGRGRKNVKYEYYRCHDGCVRPVRREELEGEIVKALRALLQDREEALRIAHMVAESSDGAEVAARRKQAAQSLSAAERGLKNILNAIEQGIIAPGAKERIAELEHQRDRAKLDLEAIRDDQIDPERLADFLQCGSALDDATLLKAFVYQVSVSDEECIVTLNYDVESNEPARLDVQRVRTKCKWCPQRDSNPRYPP

SEQ ID NO: 7088 - protein, 479 aa, Unknown
  Description of Unknown: Integrase B7089 sequence
  SM00857,G3DSA:1.10.10.2600,IPR036162,PF13408,IPR025827, G3DSA:3.40.50.1390,PS51737,IPR006119,IPR038109,PF07508, SSF53041,IPR011109,PTHR30461,Coil,PS51736, cd00338,PF00239
MRGVIYARYSPGPHQTEQSIEGQVADCQQYAEEHGIDIIEIYADRHVSGKSVVGRDEFQRMLRDAEKGRFDCVLVWKIDRFGRDRQDIAMGKMTLRRAGVKLMYARESVPDGPEGIILESVLEGLAEYYSADLRQKVIRGMKETAKKGQYCGQPLPIGYKVDAERHVVIDEREAAAVRDAFKMHIAGAQLRDIVQMFADHGVMGRRGKPVSNAVVYRMLRNEKYLGEFYIQDVKLNVEPIIDQATFLEAARHFKTSRNNAAGRAKVNYLLSCKMFCGYCGSMISAEAGTGKLGKVYRYYKCGDKKRGKKCELKPFPKDHLEDAIILATVNDMLTDEMIEKLTVRILEVQEQENADDPVVGLRRRLDSNKKRQRNLLDAIEEGGARGLVSRLAALEEEEEQLVLEIQRAEIKRPRLTHEVVEAWLRSFRVGDVTDDDFRARLVDTFIARVELRNDEALIFYNIREKGPHSRVRVRPEWWR

SEQ ID NO: 7089 - protein, 479 aa, Unknown
  Description of Unknown: Integrase B7090 sequence
  PTHR30461:SF3,cd00338,SM00857,IPR006118,G3DSA:1.10.10.2600, IPR036162,PS51737,G3DSA:3.40.50.1390,IPR006119,IPR038109, PF07508,IPR011109,SSF53041,PTHR30461,PS00397, PS51736,Coil,PF00239
MEKELKTAAAYIRVSTDRQTELSPDSQLRIIKEYAKQNGYNIPSEYIFREDGLSGKYVKKRPQFIEMIGLAKQKPAPFSAILVWKFSRFARNQEESIVYKSMLKKNDVSVISCSETLDEENPFSSLIERIIEWMDEYYSIRLSGEVLRGMSEKVKRGQPVTIPSFGYDIVDKQYVINEEKATIVRKIFTDYIDGKNCMQIASELNEIGVKTTRGNPFENRTIDYILKNPVYIGKIRWNQNGKTDYRYSNNKDIVYTQGVHKSIVSDEIFYKVQNLIETNGHKQRKGIHNNIKQEYMLHGLIKCSNCGSALAYSNKGLQCIKYSKSICKQSHYISLTNINNLVILGLEQVFENKDFKLSVKSLYQTVADCIDYTNLIEKENQKIQRIKNAYLEGIYTVEEVKEYKKSVEDKIKNLSSRQVQLKQEKTKPRKENVKEKKNFLATLKSPAISEKEKNEILKGFVDCIVFNRSTSSVDIFLYI

SEQ ID NO: 7090 - protein, 479 aa, Unknown
  Description of Unknown: Integrase B7091 sequence
  PTHR30461:SF3,IPR036162,PS51737,IPR011109,PTHR30461, PS00397,PF00239,G3DSA:1.10.10.2600,IPR006119,SSF53041, SM00857,IPR025827,IPR038109,PS51736,cd03768, IPR006118,PF13408,G3DSA:3.40.50.1390,PF07508,Coil
MPKVAIYARVSTLNQAEEGYSIEGQLASLRKYCSALDWQIYQEYVDPGFSGGSLNRPAIQKLIVDAKSHRFDIVLIYKLDRLSRSVQDTLYLVKDIFDKNKISFVSLNEKIDTSSPMGNLFLTLLASIAEFEREQIKERMMMGKVGRAKSGKAMGWSKVPFGYTYDKQTGIYQINTLQAQIVKRIYRDYLDGVSITKLVDLLNAEGHIAKDRPWTYRTVRQALDNVVYTGRQFYQGNVYPGQHEAIISIEDYDKTQAELKRRQLTNAQKFNPRPFRAKYMLSGLLRCSVCGSSMMVQTRYLKYADDYHYYRCVSSIRKRIRFSYRQDTELCQNRSDYLKDDLENAIIKTIRHLQLHPDQMPVNTVKFDDKPLKDEINRINDKLNKLVDLYLNSNGISIGIINQKRDELLQQKEALENKLQERKPKQPELDPKKALLLLSKKNILELPYEEQVKLVKFLISKIEVSPSKMKIHWRFNVEK

SEQ ID NO: 7091 - protein, 479 aa, Unknown
  Description of Unknown: Integrase B7092 sequence
  PTHR30461:SF3,SM00857,IPR006118,G3DSA:1.10.10.2600,IPR036162, PS51737,PS00397,G3DSA:3.40.50.1390,IPR006119,IPR038109, PF07508,IPR011109,SSF53041,PTHR30461,Coil, PS51736,cd00338,PF00239
MDDLKIAAAYIRVSTDDQTELSPDSQIKVVREFAKQKGYLIPKEYIFRDDGISGRKASKRPEFNHMIAVAKQTPSPFSAIMVWKFSRFARNQEEAIFYKGMLKKRGIDVISTSEPIIDGPFGSLIERIIEWFDEYYSINLSTEVKRGMTEKVSRGGAVSIPAFGYDIVDKKYQVNPINAPIVQRIFIKYLNGVGCRAIANELNDLGIKTTRGNNWENRTIEYILRNPVYIGKIRWNPKRRTRRNYDDKDIMIVDGIHQPIIDTDLFDKVQKKLDENKAKYRPYITDRQNGKDYMLKGLVKCSNCGATMSMSCNGLQCIKYTHGTCKVSHYIQLNKLNEVVINAIDDTLKSGDFQLKPKEQPHEEPQELNIDFMIEKENTKLRRIKEAYEEGVYNLAEFKQRKELIESKIHSLQKQNKPPEPKPDHLLAKKKLMNRRKEIISTLKSKSTPEVEKNTLLCTFIDKIIFNRSLSSVELFFCF

SEQ ID NO: 7092 - protein, 479 aa, Unknown
  Description of Unknown: Integrase B7093 sequence
  PTHR30461:SF3,SM00857,G3DSA:1.10.10.2600,IPR036162,PS51737, G3DSA:3.40.50.1390,IPR006119,IPR038109,PF07508,IPR011109, SSF53041,PTHR30461,Coil,PS51736,cd00338, PF00239
MPKTAVIYARFSCNKQREASIDDQLRICRQWCQREGYAVVAEYCDYAISGRTDDRPEFQRMIASAGESDIVLVYMMDRFSRGEYDAPIYKRELAQHGVKLVSALEQIPDSPEGIIYEKLLEGLAACESKKTAIRTRRGMEGNALKCKTNGVRVFGYTRNDADEYVIDEGEASFVREAFKRRIAKETTNSIARDFAARGVKTSNGNPCGYSMVERMVKNRKYTGRYEWGGIVKEGGMPAIVDEVTFMEAQGIRAAKERSAESWGDFALSGKAICAGCGRNLQGVSGRGRGNRKYEYYRCHDGCVKPVRREELEGEIVKALRALLQDRDEALRIAKMVAESSDGAEVAARRKQAARSLSAAERGLRNILNAIEQGIIAPGAKERIAELEYQRDRARLDLEAIRDEEIDPERLADFLQCGAALDDSTLMRAFVYQVSVSDDECIVTLNYDVENNEPARLDVQRVRTKCKWCPRADSNRRHPL

SEQ ID NO: 7093 - protein, 479 aa, Unknown
  Description of Unknown: Integrase B7094 sequence
  PTHR30461:SF3,cd00338,SM00857,IPR006118,G3DSA:1.10.10.2600, IPR036162,PS51737,G3DSA:3.40.50.1390,IPR006119,IPR038109, PF07508,SSF53041,IPR011109,PTHR30461,PS00397, PS51736,Coil,PF00239
MEKELKTAAAYIRVSTDRQTELSPDSQLRIIKEYAKQNGYNIPSEYIFREDGLSGKYVKKRPQFIEMIGLAKQNPAPFSTILVWKFSRFARNQEESIVYKSMLKKNDVSVISCSETLDEENPFSSLIERIIEWMDEYYSIRLSGEVLRGMSEKVKRGQPVTIPSFGYDIVDKQYVINEEKAAIVRKIFTDYIGGKNSMQIASELNEIGVKTTRGNPFENRTIDYILKNPVYIGKIRWNQNGKTDYRYSNNKDIVYTQGVHKSIVSDEIFYKVQNLIEANSRKQRKGIHNHIKQEYMLHGLIKCSNCGSALAYSNKGLQCIKYSKSICKQSHYISLTNINNLVILGLEQVFENKDFKLSVKSLSQTVADCIDYTNLIEKENQKIQRIKNAYLEGIYTVEEVKEYKKSVEDKIKNLSSRQVQLKQEKTKPRKENVKEKKNFLATLKSPAISEKEKNEILKGFVDCIVFNRSTSSVDIFLYI

SEQ ID NO: 7094 - protein, 479 aa, Unknown
  Description of Unknown: Integrase B7095 sequence
  PTHR30461:SF3,SM00857,IPR006118,G3DSA:1.10.10.2600,IPR036162, PS51737,G3DSA:3.40.50.1390,Coil,IPR006119,IPR038109, PF07508,SSF53041,IPR011109,PTHR30461,PS00397, PS51736,cd00338,PF00239
MDDLKMAAAYIRVSTDDQTELSPDSQIKVVREFAKQKGYLIPKEYIFRDDGISGRKASKRPEFNHMIAVAKQTPSPFSAIMVWKFSRFARNQEEAIFYKGMLKKRGIDVISTSEPIIDGPFGSLIERIIEWFDEYYSINLSTEVKRGMTEKVSRGGAVSIPAFGYDIVDKKYQVNPINAPIVQRIFIKYLNGVGCRAIANELNDLSIKTTRGNNWENRTIEYILRNPVYIGKIRWNPKRRTRRNYDDKDIMIVDGIHQPIIDTDLFDKVQKKLDENKAKYRPYITDRQNGKEYMLKGLVKCSNCGATMSMSCNGLQCIKYTHGTCKVSHYIQLNKLNEVVINAIDDTLKSGDFQLKPKEQPHEEPQELNIDFMIEKENTKLRRIKEAYEEGVYNLTEFKQRKESIESKIHSLQKQNKPPEPKPDHLLAKKKLMSRRKEIISTLKSKSTPEVEKNALLCTFIDKIIFNRSLSSVELFFCF

SEQ ID NO: 7095 - protein, 479 aa, Unknown
  Description of Unknown: Integrase B7096 sequence
  PTHR30461:SF3,SM00857,G3DSA:1.10.10.2600,IPR036162,PF13408, PS51737,G3DSA:3.40.50.1390,IPR025827,IPR006119,IPR038109, PF07508,IPR011109,SSF53041,PTHR30461,Coil, PS51736,cd00338,PF00239
MSKSKIYCLKYLYTITFSKGVIIMETIVKKAACYCRVSHEEQKLHGLSIEAQKEDLKQYCKRNNYKIYKFYIDEGLTAKNTKRQGLQNLLSDLDKDKFDIVLFTKLDRLSRNIIDANLLDEKFKNNNVCMKAIFEDDIDTSTADGKFTFNLKLSLAERELDKTSERIKDIFRYKIERNEVISGSVPKGYKIVDKKLAIDENTAWIVKKSFDLVEELMSARAAFIQINTVYNQPTSLRSFSKLLKNVIYTGTYKSKNYYKENYCEPIISLEQFNNVQRILKNNKQYTSNNRKETYIFSGLLRCSHCGYKIVGHYSNRSGKNVIKTYRCNRYSIYKDCDQKKSINEKKLEKVLLSCIVEEYKNYLYSFDVSSKKTNSIDVSQNKSKIQKKVDKLRELYLNDLISLEDYKKDYAIFTQALKEIESKEVTKVAPKDADKILSILDNIETIYYNLDATERKRFWSSFIDVITIDGNYNIDIKFL

SEQ ID NO: 7096 - protein, 479 aa, Unknown
  Description of Unknown: Integrase B7097 sequence
  PTHR30461:SF3,IPR036162,PS51737,IPR011109,PTHR30461, PS00397,PF00239,G3DSA:1.10.10.2600,IPR006119,SSF53041, cd00338,SM00857,IPR025827,IPR038109,PS51736, IPR006118,PF13408,G3DSA:3.40.50.1390,PF07508,Coil
MIRKVAIYARVSTMNQAEEGYSIDGQIDSLEKYCEAMGWDVYNKYIDAGFSGGSLKRPEMTNLIIDVKKGLFDTVLVYKLDRLSRNVRDTLYLIKDVFNINKIDFVSIQENIDTSSAMGTLFLTLLSAIAEFEREQIKERMQLGKLGRAKSGKSMQWAKTSYGYDYIKETGTLSVNPYQALIVRKMFEWYLSGMSITKLRDALNEQYGQDKEWNYRTVRVILSNPVYCGYNQFKGQMFPGTHEPIISEEDFNKTQEEIKTRQRTAAQRFNPRPFQAKYMLSGIAQCGYCPAPLAIKLGMKRKDGTRLVKYECKQRHPRKTKGVTVYNNNEKCDSGFYFKDDIEHFVLTEISKLQTDSDYIDKLFSNTDKETIDRDSYQKQIDKLTAKISRLNDLYIDDRISLEELQKRSSDFMAERTALEKELDADKSVKTVKRKKDIRRVLDTKDIFTLDYEQQKAIARALISKVRVTSESIVILWKL

SEQ ID NO: 7097 - protein, 479 aa, Unknown
  Description of Unknown: Integrase B7098 sequence
  PTHR30461:SF3,IPR036162,PS51737,IPR011109,PTHR30461, PS00397,PF00239,G3DSA:1.10.10.2600,IPR006119,SSF53041, cd00338,SM00857,IPR025827,IPR038109,PS51736, IPR006118,PF13408,G3DSA:3.40.50.1390,PF07508,Coil
MIRKVAIYVRVSTTNQAEEGYSIDGQIDSLEKYCEAMGWDVYNKYIDAGFSGGSLKRPEMANLINDVKKGLFDTVLVYKLDRLSRNVRDTLYLIKDVFNINKIDFVSIQENIDTSSAMGTLFLTLLSAIAEFEREQIKERMQLGKLGRAKSGKSMQWAKTSFGYDYIKETGTLSVNPYQALIVRKMFEWYLSGMSVTKLRDTLNEQYGQDKEWSYRTVRVILSNPVYCGYNQFKGQIFPGTHEAIISEDDFNKTQEEIKTRQRTAAQRFNPRPFQAKYMLSGIAQCGYCSAPLAIKLGMKRKDGTRLVKYECKQRHPRKTKGVTVYNNNEKCDSGFYFKDDIEHFVLTEISKLQTDSDYIDKLFSNTDKETIDRDSYQKQIDNLTAKISRLNDLYIDDRISLEELQKRSSDFMAKRAALEKELDTDTSLKAVERKEDVRRVLDTKDIFTLDYEQQKAIARALISKVRVTSESIVILWKL

SEQ ID NO: 7098 - protein, 479 aa, Unknown
  Description of Unknown: Integrase B7099 sequence
  IPR036162,PS51737,IPR011109,PTHR30461,PS00397, PF00239,G3DSA:1.10.10.2600,IPR006119,SSF53041,cd00338, SM00857,IPR025827,IPR038109,PS51736,IPR006118, PF13408,G3DSA:3.40.50.1390,PF07508,Coil
MSENDTKQLQTGALYIRVSTADQAELSPDAQKRLLLDYAKKNNIIISNDFIYMESVSGRRAQKRPEFQKMIATAKQESHPIDVILVWKYSRFARNQEESIVYKSMLKKDGVEVISVSEPLIDGPFGTLIERIIEWMDEYYSIRLSGEVLRGMKEKALKNGYQATPCLGYDAVGSGQPFVINEEEYRIIDYIMDQYDHYNVDATAIARKCNDLGYRTKRGNPFERRNIDFILRNPFYTGTVVWNGTEFEGAHEARLSKERYEERIRLMNARKRPAKHRNVSTCKHWLSGLLKCSICGSTLSYTGNQTCPYFQCWKYAKGFHKTSVSLSVKKAEEAVLEYFKKILDGADFSYVYKGEAPSEKDISQIESLQQELEHIAVKEQRVRAAYENEIDTLEEYRENRRRLSIQREELSNEIYRLESQQNNIEPSPQDVLKEIQTVYDIIQNSDITYETKGMFIRTVLDQIIYDKESGCLYFDIIIS

SEQ ID NO: 7099 - protein, 479 aa, Unknown
  Description of Unknown: Integrase B7100 sequence
  PTHR30461:SF3,IPR036162,PS51737,IPR011109,PTHR30461, PS00397,PF00239,G3DSA:1.10.10.2600,IPR006119,SSF53041, SM00857,IPR025827,IPR038109,PS51736,cd03768, IPR006118,PF13408,G3DSA:3.40.50.1390,PF07508,Coil
MIRKVAIYARVSTTNQAEEGYSIDGQIDSLEKYCEAMGWDVYNKYIDAGFSGGSLKRPEMANLINDVKKGLFDTVLVYKLDRLSRNVRDTLYLIKDVFNINKIDFVSIQENIDTSSAMGTLFLTLLSAIAEFEREQIKERMQLGKLGRAKSGKSMMWSKTSYGYDYVKETGTLSVNQYQALIVRKMFKWYLSGMSITKLRDALNEQYGQDKEWSYRTVRAILSNPVYCGYNQFKGQIFPGTHDPIISEEDFNKTQEEIKIMQRTAAQRFNPRPFQAKYMLSGIAQCGYCSAPLAVKLGMKRKDGTRLVKYECKQRHPRKTKGVTVYNNNEKCDSGFYFKDDIEHFVLTEISKLQTDSDYIDKLFSNTDKETIDRDSYQKQIDNLTAKISRLNDLYIDDRISLEELQKRSSDFIAERSALEKELDADSSSKTVERKKDIKRVLDTKDVLTLDYEQQKAIARALISKVRVTSESIVILWKL

SEQ ID NO: 7100 - protein, 479 aa, Unknown
  Description of Unknown: Integrase B7101 sequence
  PTHR30461:SF3,SM00857,G3DSA:1.10.10.2600,IPR036162,PF13408, IPR025827,PS51737,G3DSA:3.40.50.1390,IPR006119,IPR038109, PF07508,SSF53041,IPR011109,PF00239,PTHR30461, PS51736,Coil,cd00338
MSNAVIYARYSSDKQSEESIEAQLRACRQYAATRGYNIVAVYADEAISGKGSMTASRAQYQKMLRDCNKGTFDTILIHKYDRVARSLGEHVNLDTRLQKMGITLIAVGQDFGFGPESKIMRALMWSMSEYYIDNLANETKKGEREIALKGLHNGGYPPFGYDIVDQKYVINPYEAEYVRKIFAAVKNHEGTKDIIAEMAAVGIVGKRGKPLKYSAVYEILRNEKYTGTYIYCVDEEKDRSKRRSKPNAIRIENALPMIIDKATFDEVQKIMDSRKQSGPKTSYLCSGLVYCSCGAKMHAHISTKKGHVYHYYRCSKKCGAPMISMDIVDDAAKTYLRTLLNEENQKAIAKAMRKYKCGEPERAADFKKIVASKISEKQKQYDTLMTNMSSGVLPADVIEDIGAKMNQLRSEIEALKKTEMPKDYTTDQISLWLKALHDSPDDKAIRLLISRIDIKNTTEINIQSTLTSVVGTIGCGSWI

SEQ ID NO: 7101 - protein, 479 aa, Unknown
  Description of Unknown: Integrase B7102 sequence
  IPR036162,PS51737,IPR011109,PTHR30461,PS00397, PF00239,G3DSA:1.10.10.2600,IPR006119,SSF53041,SM00857, IPR025827,IPR038109,PS51736,cd03768,IPR006118, PF13408,G3DSA:3.40.50.1390,PF07508,Coil
MPKVAIYARVSTLNQAEEGYSIEGQLASLRKYCSALDWQIYQEYVDPGFSGGSLNRPAIQKLIEDAKSCRFDIVLIYKLDRLSRSVQDTLYLVKDIFDKNKISFVSLNEKIDTSSPMGNLFLTLLASIAEFEREQIKERMMMGKVGRAKSGKAMGWSKVPFGYTYDKQTGIYQINTLQAQIVKRIYRDYLDGVSITKLVDLLNAEGHITKDRPWTYRTVRQALDNVVYTGRQFYQGNVYPGQHEAIISIEDYDKTQAELKRRQLTNAQKFNPRPFRAKYMLSGLLHCSVCGSSMMVQTRYLKYADDYHYYRCVSSIRKRIRFSYRQDTELCQNRSNYLKDDLESAIIKTIRHLQLHPDQMPVDTVKFDDKPLKDELNRINDKLNKLVDLYLNSNGISIGIINQKREELLQQKEALENKLQERKPKQPELDPKKALLLLSKKNILELPYEEQVKLVKSLISKIEVSPSKMKIHWRFNAEK

SEQ ID NO: 7102 - protein, 479 aa, Unknown
  Description of Unknown: Integrase B7103 sequence
  PTHR30461:SF3,cd00338,SM00857,IPR006118,G3DSA:1.10.10.2600, IPR036162,PS51737,G3DSA:3.40.50.1390,IPR006119,IPR038109, PF07508,IPR011109,SSF53041,PTHR30461,PS00397, PS51736,Coil,PF00239
MEKELKTAAAYIRVSTDRQTELSPDSQLRIIKEYAKQNGYNIPSEYIFREDGLSGKYVKKRPQFIEMIGLAKQKPAPFSAILVWKFSRFARNQEESIVYKSMLKKNDVSVISCSETLDEENPFSSLIERIIEWMDEYYSIRLSGEVLRGMSEKVKRGQPVTIPSFGYDIVDKQYVINEEKAAIVRKIFTDYIDGKNSMQIASELNEIGVKTTRGNPFENRTIDYILKNPVYIGKIRWNQNGKTDYRYSSNKDIVYTQGVHKSIVSDEIFYKVQNLIETNGRKQRKGIHNNIKQEYMLHGLIKCSNCGSALAYSNKGLQCIKYSKSICKQSHYISLTNINNLVILGLEQVFENKDFKLSVKSLSQTVADCIDYTNLIEKENQKIQRIKNAYLEGIYTVEEVKEYKKSVEDKIKNLSSRQVQLKQEKTKPRKENVKEKKNFLATLKSPAISEKEKNEILKGFVDCIVFNRSTSLVDIFLYI

SEQ ID NO: 7103 - protein, 479 aa, Unknown
  Description of Unknown: Integrase B7104 sequence
  SM00857,G3DSA:1.10.10.2600,IPR036162,PF13408,IPR025827, PS51737,G3DSA:3.40.50.1390,IPR006119,IPR038109,PF07508, SSF53041,IPR011109,PTHR30461,Coil,PS51736, cd00338,PF00239
MRGVIYARYSPGPHQTEQSIEGQVADCQQYAEEHGIDIIEIYADRHVSGKSVVGRDEFQRMLRDAEKGRFDCVLVWKIDRFGRDRQDIAMGKMTLKRAGVKLMYARESVPDGPEGIILESVLEGLAEYYSADLRQKVIRGMKETAKKGQYCGQPLPIGYKVDAERHVVIDEREAAAVRDAFKMHIAGAQLRDIVQMFADHGVMGRRGKPVSNAVVYRMLRNEKYLGEFYIQDVKLNVEPIIDQATFLEAARHFKTSRNNAAGRAKVNYLLSCKMFCGYCGSMISAEAGTGKLGKVYRYYKCGDKKRGKKCELKPFPKDHLEDAIILATVNDMLTDEMIEKLTVRILEVQEQENADDPVVGLRRRLDSNKKRQRNLLDAIEEGGARGLVSRLAALEEEEDQLVLEIQRAEIKRPRLTHEVVEAWLRSFRVGDVTDDDFRARLVDTFIARVELRNDEALIFYNIREKGPHSRVRVRPEWWS

SEQ ID NO: 7104 - protein, 479 aa, Unknown
  Description of Unknown: Integrase B7105 sequence
  PTHR30461:SF3,IPR036162,PS51737,IPR011109,PTHR30461, PS00397,PF00239,G3DSA:1.10.10.2600,IPR006119,SSF53041, cd00338,SM00857,IPR025827,IPR038109,PS51736, IPR006118,PF13408,G3DSA:3.40.50.1390,PF07508,Coil
MKVAVYIRVSTLEQAEEGYSIGEQKDKLRKYCEIKDWTVVKEYVDPGRSGSNLNRPSMQQLIKDAPKGLYDAVLVYKLDRLSRSQKDTLYLIEDVFQKNDIHFVSLSENFDTSTAFGKAMIGILSVFAQLEREQIKERMTMGRIGRVKSGKIMEFNNPPFGYEVEDDNYKVKPLQGAIVKKIYDMYLSGKSISKIKETLNEEGHVGNPYPWSDTRVRYILSNPTYIGKIPYRGKLYDGRFTPLVNDATFSKVQQELKERQVSTAKRFNMQLRPFQSKYMLSGILKCGYCGATLFVNSYVQPNGHRRLRYNCPSTYASMRKAKKYAVKDPNCPFKLVYAEKLEPVVINEVKKLALHPESIHKPKVAHHKGINVDAVKKELASIKKQQQKLIDLYVISDDINIENISKKSADLKIQEEALTKKLSQAVEPDNGKLINFQNLLAKSSDIDQLSYDEQKFIVKKLIKSIDVYNNDRIKIHWNI

SEQ ID NO: 7105 - protein, 479 aa, Unknown
  Description of Unknown: Integrase B7106 sequence
  PTHR30461:SF3,SM00857,IPR006118,G3DSA:1.10.10.2600,IPR036162, PS51737,G3DSA:3.40.50.1390,Coil,IPR006119,IPR038109, PF07508,IPR011109,SSF53041,PTHR30461,PS00397, PS51736,cd00338,PF00239
MDDLKIAAAYIRVSTDDQTELSPDSQIKVVREFAKQKGYLIPKEYIFRDDGISGRKASKRPEFNHMIAVAKQTPSPFSAIMVWKFSRFARNQEEAIFYKGMLKKRGIDVISTSEPIIDGPFGSLIERIIEWFDEYYSINLSTEVKRGMTEKVSRGGAVSIPAFGYDIVDKKYQVNPINAPIVQRIFIKYLNGVGCRAIANELNDLGIKTTRGNNWENRTIEYILRNPVYIGKIRWNPKRRTRRNYDDKDIMIVDGIHQPIIDTDLFDKVQKKLDENKSKYRPYITDRQNGKEYMLKGLVKCSNCGATMSMTCNGLQCIKYTHGTCNVSHYIQLNKLNEVVINAIDDTLKSGDFQLKPKEQPHEEPQELNIDFMIEKENTKLRRIKEAYEEGVYNLAEFKQRKELIESKIHSLQKQNKPPEPKPDHLLAKKKLMSRRKEIISTLKSKSTSEVEKNALLCTFIDKIIFNRSLSSVELFFCF

SEQ ID NO: 7106 - protein, 479 aa, Unknown
  Description of Unknown: Integrase B7107 sequence
  PTHR30461:SF3,SM00857,IPR006118,G3DSA:1.10.10.2600,IPR036162, PS51737,G3DSA:3.40.50.1390,Coil,IPR006119,IPR038109, PF07508,IPR011109,SSF53041,PTHR30461,PS00397, PS51736,cd00338,PF00239
MDDLKIAAAYIRVSTDDQTELSPDSQIKVVREFAKQKGYLIPKEYIFRDDGISGRKASKRPEFNHMIAVAKQTPSPFSAIMVWKFSRFARNQEEAIFYKGMLKKRGIDVISTSEPIIDGPFGSLIERIIEWFDEYYSINLSTEVKRGMTEKVSRGGAVAIPAFGYDIVDKKYQVNPINAPIVQRIFIKYLNGVGCRAIANELNDLGIKTTRGNNWENRTIEYILRNPVYIGKIRWNPKRRTRRNYDDKDIMIVDGIHQPIIDTDLFDKVQKKLDENKAKYRPYITDRRNGKEYMLKGLVKCSNCGATMSMSCNGLQCIKYTHGTCKVSHYIQLNKLNEVVINAIDDTLKSGDFQLKPKEQPHEEPQELNIDFMIEKENTKLRRIKEAYEEGVYNLAEFKQRKELIESKIHSLQKQNKPPEPKSDHLLAKKKLMSRRKEIISTLKSKSTPEVEKNALLCTFIDKIVFNRSLSSVELFFCF

SEQ ID NO: 7107 - protein, 479 aa, Unknown
  Description of Unknown: Integrase B7108 sequence
  PTHR30461:SF3,SM00857,G3DSA:1.10.10.2600,IPR036162,PF13408, PS51737,G3DSA:3.40.50.1390,IPR025827,IPR006119,IPR038109, PF07508,IPR011109,SSF53041,PF00239,PTHR30461, PS51736,Coil,cd00338
MKKVTKIDGVQKNTAINSKLRVAAYCRVSTGSDAQLESLETQKSHYEQYINSREDWQFAGLYFDEGITGTKAEKRPELLRLITDCEAKRIDFVITKSISRFSRNTTDCLALVRKLQSLDIPIYFEKENINTGSMESELFLAILSSMAEGESASISENAKWSVKRRFQNGTYKLGYTPYGYDWDGKNMIINPDQAAVVKRIFADILSGKSTNAIADELNAEKVPSKKNNHWTSSTIRGILANEKYTGDVIFQKTYTDENFNRHTNYGEVDQYMAPDHHEAIISHSDFDAANALVNQRAAEKGIDKGSDKYQQRYAFSGKIICGECGDTFKRRIHSCTTYKYVAWACNTHLKNKESCHMKYVRDDEIKTAFITMLNKLIYGYRLILTPYLKVLENSSGDEAIQRIQHLEQLIAQNSEQREALTKLMAQGYIDQILYNQETNALLLQAETYRSDIEAITIGMTGDATKVTETNLLLHFFNPV

SEQ ID NO: 7108 - protein, 479 aa, Unknown
  Description of Unknown: Integrase B7109 sequence
  PTHR30461:SF3,SM00857,IPR006118,G3DSA:1.10.10.2600,IPR036162, PS51737,G3DSA:3.40.50.1390,Coil,IPR006119,IPR038109, PF07508,IPR011109,SSF53041,PTHR30461,PS00397, PS51736,cd00338,PF00239
MDDLKIAAAYIRVSTDDQTELSPDSQIKVVREFAKQKGYLIPKEYIFRDDGISGRKASKRPEFNHMIAVAKQTPSPFSAIMVWKFSRFARNQEEAIFYKGMLKKRGIDVISTSEPIIDGPFGSLIERIIEWFDEYYSINLSTEVKRGMTEKVSRGGAVSIPAFGYDIVDKKYQVNPINAPIVQRIFIKYLNGVGCRTIANELNDLGIKTTRGNNWENRTIEYILRNPVYIGKIRWNPKRRTKRNYDDKDIMIVDGIHQPIIDTDLFDKVQKKLDENKAKYRPYITDRQNGKEYMLKGLVKCSNCGATLSLACNSLQCIKYAHGTCNVSHSIQVNRLNEVVINAIDDTLKSGDFQLKPKEQPHEEPQELNIDFMIEKENTKLRRIKEAYEEGVYNLAEFKQRKELIESKIHSLQKQNKPPEPKPDHLLAKKKLMSRRKEIISTLKSKSTPEVEKNALLCTFIDKIIFNRSLSSVELFFCF

SEQ ID NO: 7109 - protein, 478 aa, Unknown
  Description of Unknown: Integrase B7110 sequence
  PTHR30461:SF3,IPR036162,PS51737,IPR011109,PTHR30461, PS00397,PF00239,G3DSA:1.10.10.2600,IPR006119,SSF53041, cd00338,SM00857,IPR025827,IPR038109,PS51736, IPR006118,PF13408,G3DSA:3.40.50.1390,PF07508,Coil
MLIGAAYIRVSTDDQLDLSPDSQLDEIKKYAAANDIVLSPDYIFMEQEGRSGKKAENRPEFQRMISTAKVKPKPFDCILVWKFSRFARNQDESTFYKGMLRKKLGIDVVSVSEPIMEGMYGRLIEMIIEWQDEFYSYNLGVEVKRGMTKKAELKGYQIVPCLGYAAVGNGKPFVIVENEYKIVEDIFRMYALENLDRTAIARRLNAQGKKAKRGNPFEQRTITRILTNPFYNGTVSWNGISFQGSHETRQSVTGLYDICQERLKQEFRPVKRRSISTCRHWLSGILKCSVCGATMSYNGGGKSRPDAVFACWKYAKGLHKESCSVTVAKAERIVIRSLEKILETGNFEYDRIPRPASEQDSSQKAAIGVKLERLALKEERIRAAYENGIDSLEEYRARKEQLLKERTELEAELASLEPADCSPAPSHEELMERVKTVHDLLCSPDVDFETKGTALRSILKFIVFDRKADRFEFHYYIS

SEQ ID NO: 7110 - protein, 478 aa, Unknown
  Description of Unknown: Integrase B7111 sequence
  IPR036162,PS51737,IPR011109,PTHR30461,PS00397, PF00239,G3DSA:1.10.10.2600,IPR006119,SSF53041,cd00338, SM00857,IPR025827,IPR038109,PS51736,IPR006118, PF13408,G3DSA:3.40.50.1390,PF07508,Coil
MKTVCAYIRVSTDSQEEYSPDAQIRLLKEYAASHDMTIIDIYQDLGISGRNADKRPQFQDMIAMAKSKEHPYDAILVWKFSRFARNQEESIVYKSLLKKNHVDVVSVSEPLPDGVIGELVERIFEWMDEYYSIRLSGEVRRGMTQKALAGGYNSNVPIGYTKERGPDTIPQIDEYYGPMVQRCFHMFAIEHIPMTKIAATINNLGYRTRTGKRWETRNITDMFQNPFYIGKIRWNSASSRRTTPRVGEEIIRDGKHQPLIDQELWDATQERYAKITARMGHGKRPDIYKHWLSGLLKCPNCGGTLAYQNGLDTKTGKHYPYFVCWKNVKGMCATRNSISAGKAAQYVLDGLLNIVENKDIKTIAPIVQFNQDEAAIAKQIASVKAKLGRVKEAYVNGIDTLKEYKATKEKLEAEIAHLKELVVPEVKPKAVTVDVIRTVHDTIMNAQSDSEKATAINSIVDHIIYDKEADTMEFFFIP

SEQ ID NO: 7111 - protein, 478 aa, Unknown
  Description of Unknown: Integrase B7112 sequence
  PTHR30461:SF3,IPR036162,PS51737,IPR011109,PTHR30461, PS00397,PF00239,G3DSA:1.10.10.2600,IPR006119,SSF53041, cd00338,SM00857,IPR025827,IPR038109,PS51736, IPR006118,PF13408,G3DSA:3.40.50.1390,PF07508,Coil
MLIGAAYIRVSTDDQLDLSPDSQLDEIKKYAAANDIVLSPDYIFMEQEGRSGKKAENRPEFQRMISTAKVKPKPFDCILVWKFSRFARNQDESTFYKGMLRKKLGIDVVSVSEPIMEGMYGRLIEMIIEWQDEFYSYNLGVEVKRGMTKKAELKGYQIVPCLGYAAVGNGKPFVIVEDEYKIVEDIFRMYALENLDRTAIARRLNAQGKKAKRGNPFEQRTITRILTNPFYNGTVSWNGISFQGSHETRQSVTGLYDICQERLKQEFRPVKRRSISTCRHWLSGILKCSVCGATMSYNGGGKSRPDAVFACWKYAKGLHKESCSVTVAKAERIVIRSLEKILETGNFEYDRIPRPASEQDSSQKAAIEVKLERLALKEERIRSAYENGIDSLEEYRTRKEQLLKERAELEAELASLEPADCSPALSREELLERVKTVHDLLCSPDVDFETKGTALRSILKFIVFDRKADRFEFHYYIS

SEQ ID NO: 7112 - protein, 478 aa, Unknown
  Description of Unknown: Integrase B7113 sequence
  IPR036162,PS51737,IPR011109,PTHR30461,PS00397, PF00239,G3DSA:1.10.10.2600,IPR006119,SSF53041,cd00338, SM00857,IPR025827,IPR038109,PS51736,IPR006118, PF13408,G3DSA:3.40.50.1390,PF07508,Coil
MKTVCAYIRVSTDSQEEYSPDAQIRLLKEYAASHDMTIIDIYQDLGISGRNADKRPQFQDMIAMAKSKEHPYDAILVWKFSRFARNQEESIVYKSLLKKNHVDVVSVSEPLPDGVIGELVERIFEWMDEYYSIRLSGEVRRGMTQKALAGGYNSNVPIGYTKERGPDAIPQIDEYYGPMVQRCFHMFAIEHIPMTKIAATINNLGYRTRTGKRWETRNITDMFQNPFYIGKIRWNSASSRRTTPRVGEEIIRDGKHQPLIDQELWDATQERYAKITARMGHGKRPDIYKHWLSGLLKCPNCGGTLAYQNGLDTKTGKHYPYFVCWKNVKGMCATRNSISAGKAAQYVLDGLLNIVEDKDIKTIAPIVQFNQDEAAIAKQIASVKAKLGRVKEAYVNGIDTLEEYKANKEKLEAEIAHLKELVVPEVKPKTVTVDVIRTVHDTIMNAQSDSEKATAINSIVDHIIYDKEADTMEFFFIP

SEQ ID NO: 7113 - protein, 478 aa, Unknown
  Description of Unknown: Integrase B7114 sequence
  PTHR30461:SF3,IPR036162,PS51737,IPR011109,PTHR30461, PS00397,PF00239,G3DSA:1.10.10.2600,IPR006119,SSF53041, cd00338,SM00857,IPR025827,IPR038109,PS51736, IPR006118,PF13408,G3DSA:3.40.50.1390,PF07508,Coil
MLIGAAYIRVSTDDQLDLSPDSQLDEIKKYAAANDIVLSPDYIFMEQEGRSGKKAENRPEFQRMISTAKVKPKPFDCILVWKFSRFARNQDESTFYKGMLRKKLGIDVISVSEPIMEGMYGRLIEMIIEWQDEFYSYNLGVEVKRGMTKKAELKGYQMVPCLGYAAVGNGKPFVIMEDEYKIVEDIFRMYALENLDRTAIARRLNAQGKTAKRGNPFEQRTVTRILTNPFYNGIVNWNGISFQGSHETRRSVTDLYDICQERLKQEFRPVKRRSISTCRHWLSGLLKCSVCGATMSYNGGGKSRPDAVFACWKYAKGLHKESCSVTVAKAERVVIRSLEKILETGNFEYDRIPRPASEQDSSQKAAIEVKLERLALKEERIRSAYENGIDSLEEYKTRKEQLLKERAELEAELASLEPADCSPAPSLEELLERVKTVHDLLCSPDVDFETKGTALRSILKFIVFDRKADRFEFHYYIS

SEQ ID NO: 7114 - protein, 478 aa, Unknown
  Description of Unknown: Integrase B7115 sequence
  PTHR30461:SF3,SM00857,G3DSA:1.10.10.2600,IPR036162,PF13408, IPR025827,G3DSA:3.40.50.1390,PS51737,IPR006119,IPR038109, PF07508,SSF53041,IPR011109,PF00239,PTHR30461, PS51736,Coil,cd00338
MKNGFTIINEYCDRALSGKTDNRPMFQKLIRDSEKRQFDAVVMYTLDRFARNRYDSAIYKAKLKKNGVKVFYAKQPMPDTPEGIILESVLEGYAEYYSENLARNIRRGLKENALQGIAVGGANLALGYTVGPDRKYVVEPIGAKIVQEIFQMYADGHSASQIIDYCNEKGYKTARGNPFNKNSLKTILRNEKYIGTYKYMDVVIPHGVPAIIEDTLFEKVQAMLKHNSTARAKSKAHEDYLLTSKVFCGHCGSPMIGESGTSKTGRVYYYYKCAARKRSLACRKAPERKDWLEEVVVRFTVQKVLTDENIARIAKKAMELIEGESADNSYLMALQGELKGIHIKINNLVSAIEQGIITPSTKNRLTELEGEKNEVEGKIAAEEMKKPLLTRERIEYWLTSFNSGDIDDVEYRRRVIDMLVNSIYVYDEDDGSKTIVFTFNLSGQNTATLKSSDFGCFAPPKNRLNKRLFIFCVAFRVV

SEQ ID NO: 7115 - protein, 478 aa, Unknown
  Description of Unknown: Integrase B7116 sequence
  PTHR30461:SF3,IPR036162,PS51737,IPR011109,PTHR30461, PS00397,PF00239,G3DSA:1.10.10.2600,IPR006119,SSF53041, SM00857,IPR025827,IPR038109,PS51736,cd03768, IPR006118,PF13408,G3DSA:3.40.50.1390,PF07508,Coil
MHKVAIYVRVSTTSQVDEGYSIDEQKAKLTSYCEIKDWNIYDIYTDGGFSGSNTERPALEQLIRDAKRKLFDTVLVYKLDRLSRSQKDTLYLIEDVFLENDIEFVSLLENFDTSTPFGKAMIGLLSVFAQLEREQIKERMQLGKLGRAKSGKSMQWAKTSFGYDYIKGTGTLSINPYQALIVRKMFEWYLSGMSITKLRDTLNEQYGQDKEWNYRTVRVILSNPVYCGYNQFKGQIFPGTHEAIISEEDFNKTQEEIKTRQRTAAQRFNPRPFQAKYMLSGIAQCGYCSAPLAIKLGMIRKDGTRLVKYECKQRHPRKTKGVTVYNNNAKCDSGFYFKDDIEHFVLTEISKLQTDSDYIDKLFSNTNQETIDRASYQKQIDKLTAKISRLNDLYIDDRISLEELQKRSSDFMAERTALEKELDADSSLKAVERKEDVRRVLDTKDIFTLDYEQQKAIARALISKVRVTSESIVILWKL

SEQ ID NO: 7116 - protein, 478 aa, Unknown
  Description of Unknown: Integrase B7117 sequence
  PTHR30461:SF3,IPR036162,PS51737,IPR011109,PTHR30461, PS00397,PF00239,G3DSA:1.10.10.2600,IPR006119,SSF53041, cd00338,SM00857,IPR025827,IPR038109,PS51736, IPR006118,PF13408,G3DSA:3.40.50.1390,PF07508,Coil
MKTVCAYIRVSTDSQEEYSPDAQIRLLKEYAASNDMIVVDIYQDLGMSGKFVKIRPKFKEMIAMAKSKDHPYDAILVWKFSRFARNQEESIVYKSLLKKNQVDVISVSEPLPDGPIGRLIERIFEWMDEYYSIRLSEEVRRGMTQKALAGGYNSNVPIGYTKERGPDTIPQIDEYYGPMVQRCFHMFAIEHIPMAKIAATINNLGYRTRTGKRWETRNITDMFQNPFYIGKIRWNSASSRRTTPRVGEEIIRDGKHQPLIDQELWDATQERYAKITARMGHGKRPDIYKHWLSGLLKCPNCGGTLAYQNGLDTKTGKHYPYFVCWKNVKGMCATRNSISAGKAAQYVLDGLLNIVEDKDIKTIAPIVQFNQDEAAIAKQIASVKAKLGRVKEAYVNGIDTLEEYKANKEKLEAEIAHLKELVVPEVKPKTVTVDVIRTVHDTIMNAQSDSEKATAINSIVDHIIYDKEADTMEFFFIP

SEQ ID NO: 7117 - protein, 478 aa, Unknown
  Description of Unknown: Integrase B7118 sequence
  PTHR30461:SF3,cd00338,SM00857,IPR006118,IPR036162, PF13408,IPR025827,G3DSA:3.40.50.1390,IPR006119,SSF53041, PTHR30461,PS00397,PS51736,Coil,PF00239
MTNQAEKTSYIENVAAYIRVSTQEQKLHGISIEAQEEKLNEYADSHGMKIVKFYKDEGVSGRKLIRKRPALQAMIQDAEKGNFRRIIFIKLDRFFRSVAEYHECMKRLAAGGVIWTATEEKYDLSTPSGEAFVNMKLTMAQFEADQVGERIRMINEYKVKSGQPLYGSQALPFCYQVKQSGDGDRRKYIAKRDEIIMEDLIDHFCKNRSVRAALHYINAKYSRAFSYSTIKNALTSELICGTYRGNPAYCEGYMTPAAFETMQKYIQHNPRTSQREHTYIFGGLIRCPCCGNMLVGSPTVLNRIGKSGQKLSYKYYGYRCYRGNLEKKCDFRTMAFEHRLEAIMLSEVEAVMRGKQMYLLRLQNAPQRVAQHDLVELQQELARLNYAWQKGRIKTAADYDRQYDDLMARIDAANAERQELAANPDYRKISRILSDGWKQLYISLDNDHKRAFWRAFIEEIQLEWTKDVKRIRDITFFT

SEQ ID NO: 7118 - protein, 478 aa, Unknown
  Description of Unknown: Integrase B7119 sequence
  PTHR30461:SF3,IPR036162,PS51737,IPR011109,PTHR30461, PS00397,PF00239,G3DSA:1.10.10.2600,IPR006119,SSF53041, cd00338,SM00857,IPR025827,IPR038109, PS51736,IPR006118,PF13408,G3DSA:3.40.50.1390,PF07508,Coil
MLIGAAYIRVSTDDQLDLSPDSQLDEIKKYAAANDIVLSPDYIFMEQEGRSGKKAENRPEFQRMISTAKVKPKPFDCILVWKFSRFARNQDESTFYKGMLRKKLGIDVVSVSEPIMEGMYGRLIEMIIEWQDEFYSYNLGVEVKRGMTKKAELKGYQIVPCLGYAAVGNGKPFVIVEDEYKIVEDIFRMYALENLDRTSIARRLNAQGKKAKRGNPFEQRTITRILTNPFYNGTVSWNGISFQGSHETRQSVTGLYDICQERLKQEFRPVKRRSISTCRHWLSGILKCSVCGATMSYNGGGKSRPDAVFACWKYAKGLHKESCSVTVAKAERIVIRSLEKILETGNFEYDRIPRPASEQDSSQKAAIEVKLERLALKEERIRSAYENGIDSLEEYRTRKEQLLKERAELEAELASLEPADCYPVLSREELLERVKTVHDLLCSPDVDFETKGTALRSILKFIVFDRKADRFEFHYYIS

SEQ ID NO: 7119 - protein, 478 aa, Unknown
  Description of Unknown: Integrase B7120 sequence
  PTHR30461:SF3,SM00857,G3DSA:1.10.10.2600,IPR036162,PS51737, G3DSA:3.40.50.1390,IPR006119,IPR038109,PF07508,IPR011109, SSF53041,PTHR30461,Coil,PS51736,cd00338, PF00239
MKYAAAYIRVSDDRQDEYSPCSQLKLIRQYAKNNDYIVPDEYVFYDDGISGRSVKKRKAFNSMIGYAKSKEHPFDAILVWKFSRFARNQEESIVYKSMLRKINVAVISVSETIDDSPFAPLIERIIEFMDEYYSTRLSQEVTRGMTEKASRGEVMTIAPFGYDLKNKTYIPNDNAKTVNYIYDSYLAGKGYRAIAQELAAMGIRTKRGNIPDNRFVEYILQNPVYIGKIRWSPEGKQSKQRYKGDNSNVMIIDGKHEAIIDTDKFERVQDMIADQKKRYGKYQRREQPVQFMLKGLMRCGNCGATLVYVGTQSPAMQCHQYARGVCKVSHSLSIAKANRVVIDKIEETLKTLDFNIIYKTQNNPQENIDYDKLIKQEKEKIRRASEAYDAGFDTLEEYGVKKRTYQSRIDEYEKAKSKVPPKESKAVPKEFVDKVASVLKTIKSPETDEAVKNEALRSIIDHITYEKEANNLAIYFYL

SEQ ID NO: 7120 - protein, 478 aa, Unknown
  Description of Unknown: Integrase B7121 sequence
  PTHR30461:SF3,SM00857,IPR006118,G3DSA:1.10.10.2600,IPR036162, PS51737,G3DSA:3.40.50.1390,IPR006119,IPR038109,PF07508, IPR011109,SSF53041,PF00239,PTHR30461,PS00397, PS51736,Coil,cd00338
MSKELKNAAAYIRVSTDRQTELSPDSQLKVIRQYAKQNGYIIPKEYVFRDDGISGRSAEKRPSFNQMIATAKQNPSPFSAIMVWKFSRFARNQEEAIVYKSMLKKNGVTVISCSETLDDGPYSSLIERIIEWMDEYYSIRLSGEVKRGMTEKVQRGQPVSISAFGYDIADKKYVINEQSAPIVRKIFLDYLNGKGTRKIASELNSLGIKTSRGNNWESRTIEYILQNPVYTGKIRWNTNGRTDRNYDDDNIIITQGEHEPIIEQNAFDEVQELIAYNHKCHSKYTHSTVKTEFMLHGLVKCSSCGASMAMTAKGQGLQCIKYAKGACKDSHYISMDKINAIVLSGIEKVFENENINLNIKGNDSKDDFIDYNALIKKEYKKLSRIKTAYAEGLYTIDELKEYRQVIEQQINTLINRCKSSVFNESDSDVKVISKNKNLLNHLRNPNISEQEKNVMLRGFVDKIVFDRSIPKVDIFFYI

SEQ ID NO: 7121 - protein, 478 aa, Unknown
  Description of Unknown: Integrase B7122 sequence
  PTHR30461:SF3,cd00338,SM00857,IPR006118,IPR036162, PF13408,IPR025827,G3DSA:3.40.50.1390,IPR006119,SSF53041, PTHR30461,PS00397,PS51736,Coil,PF00239
MTNQAEKTSYIENVAAYIRVSTQEQKLHGISIEAQEEKLTEYADSHGMKIVKFYKDEGVSGRKLIRKRPALQAMIQDAEKGNFRRIIFIKLDRFFRSVAEYHECMKRLAAGGVIWTATEEKYDLSTPSGEAFVNMKLTMAQFEADQVGERIRMINEYKVKSGQPLYGSQALPFCYQVKQSGDGDRRKYIAKRDEIIMEDLIDHFCKNRSVRAALHYINAKYSRAFSYSTIKNALTSELICGTYRGNPAYCEGYMTPAAFETMQKYIQHNPRTSQREHSYIFGGLIRCPCCGNMLVGSPTVLNRIGKSGQKLSYKYYGYRCYRGNLEKKCDFRTMAFEHRLEAIMLSEVEAVMRGKQMYLLRLQNAPQRVAQHDLAELQQELARLNYAWQKGRIKTAADYDRQYDDLMTRIDAANAERQELAANPDYRKISRILSDGWKQLYISLDNDHKRAFWRAFIEEIQLEWTKGVKRIRDITFFT

SEQ ID NO: 7122 - protein, 478 aa, Unknown
  Description of Unknown: Integrase B7123 sequence
  IPR036162,PS51737,IPR011109,PTHR30461, PS00397,PF00239,G3DSA:1.10.10.2600,IPR006119, SSF53041,cd00338,SM00857,IPR025827,IPR038109,PS51736 ,IPR006118,PF13408,G3DSA:3.40.50.1390,PF07508,Coil
MKTVCAYIRVSTDSQEEYSPDAQIRLLKEYAASNDMIVVDIYQDLGMSGKFVKIRPKFKEMIAMAKSKDHPYDAILVWKFSRFARNQEESIVYKSLLKKNQVDVISVSEPLPDGPIGRLIERIFEWMDEYYSIRLSEEVRRGMTQKALAGGYNSNVPIGYTKERGPDTIPQIDEYYGPMVQRCFHMFAIEHIPMTKIAATINNLGYRTRTGKRWETRNITDMFQNPFYIGKIRWNSASSRRTTQRVGEEIIRDGKHQPLIDQELWDATQERYAKITARMGHGKRPDIYKHWLSGLLKCPNCGGTLAYQNGLDTKTGKHYPYFVCWKNVKGMCATRNSISAGKAAQYVLDGLLDIVENKDIKTITPIIPFNQDEATIAKQIASVKAKLGRVKESYINGIDTLEEYKANKEKLEAEIAHLKELVVPEVKTKTVTVDVIRTVHDTITNAQSDLEKATAINSIVDHIVYDKEADTMEFFFIP

SEQ ID NO: 7123 - protein, 478 aa, Unknown
  Description of Unknown: Integrase B7124 sequence
  PTHR30461:SF3,IPR036162,PS51737,IPR011109,PTHR30461, PS00397,PF00239,G3DSA:1.10.10.2600,IPR006119,SSF53041, SM00857,IPR025827,IPR038109,PS51736,cd03768, IPR006118,PF13408,G3DSA:3.40.50.1390,PF07508,Coil
MNKVALYVRVSTTSQLEEGYSIEEQKAKLESYCDIKDWHVYKVYTDGGFSGSTTERPALEQLIKDAQSKLFDTVLVYKLDRLSRSQKDTLYLIEDIFLKNNIEFVSLLENFDTSTPFGRAVIGLLSVFAQLEREQIKERMQLGKLGRAKSGKSMMWAKTSYGYNYNKDTGTMTVNEYEALAVKEIYSSYLAGMSITKLRDKINEEYPKQPAWSYRTIRGILANPVYCGLNQYKGQTFQGTHKAIISLDDFEQTQRELAKRQQTAKELSNPRPFQAKYMLSGLTQCGYCHAPLKVILGQKRKDGTRFKRYECYQRHPRKTRGVTVYNDNKKCESGYYDMELLEHYVLTRISQLQNDPEKIQELFSDDTSPAVDRQAIQKQIDSLTLKLSKLNDLYLDDRITLDELRTKSSDFIKQRTALEEEIKKASTDKQAGQRKKIEKLLDASSVLGMSYDNQKVIVRELIDKVQVTSDKIVIRWKI

SEQ ID NO: 7124 - protein, 478 aa, Unknown
  Description of Unknown: Integrase B7125 sequence
  PTHR30461:SF3,SM00857,G3DSA:1.10.10.2600,IPR036162,PF13408, PS51737,IPR025827,G3DSA:3.40.50.1390,IPR006119,IPR038109, PF07508,IPR011109,SSF53041,PTHR30461,Coil, PS51736,cd00338,PF00239
MKYAAAYIRVSDDRQDEYSPDSQLKLIRQYAKNNDYIVPDEYVFYDDGISGRSVKKRKAFNSMIGYAKSKEHPFDAILVWKFSRFARNQEESIVYKSMLRKINVAVISVSETIDDSPFAPLIERIIEFMDEYYSTRLSQEVTRGMTEKASRGEVMTIAPFGYDLKNKTYIPNDNAKTVNYIYDSYLAGKGYRAIAQELATMGIRTKRGNIPDNRFVEYILQNPVYIGKIRWSPEGKQSKQRYKGDNSNVMIIDGKHEAIIDTDKFERVQDMIADQKKRYGKYQRREQPVQFMLKGLMRCGNCGATLVYVGTQSPAMQCHQYARGVCKVSHSLSVAKANRVVIDKIEETLKTLDFNIIYKTQNNPQENIDYDKLIKQEKEKIRRASEAYDAGFDTLEEYGVKKRTYQSRIDEYEKAKSKVPPKESKAVPKEFVDKVASVLKTIKSPETDEAVKNEALRSIIDHITYEKEANNLAIYFYL

SEQ ID NO: 7125 - protein, 478 aa, Unknown
  Description of Unknown: Integrase B7126 sequence
  PTHR30461:SF3,SM00857,G3DSA:1.10.10.2600,IPR036162,PF13408, PS51737,IPR025827,G3DSA:3.40.50.1390,IPR006119,IPR038109, PF07508,IPR011109,SSF53041,PTHR30461,Coil, PS51736,cd00338,PF00239
MKYAAAYIRVSDDRQDEYSPDSQLKLIRQYAKNNDYIVPDEYVFYDDGISGRSVKKRKAFNSMIGYAKSKEHPFDAILVWKFSRFARNQEESIVYKSMLRKINVAVISVSETIDDSPFAPLIERIIEFMDEYYSTRLSQEVTRGMTEKASRGEVMTIAPFGYDLKNKTYIPNDNAKTVNYIYDSYLAGKGYRAIAQELATMGIRTKRGNIPDNRFVEYILQNPVYIGKIRWSPEGKQSKQRYKGDNSNVMIIDGKHEAIIDTDKFERVQDMIADQKKRYGKYQRREQPVQFMLKGLMRCGNCGATLVYVGTQSPAMQCHQYARGVCKVSHSLSVAKANRVVIDKIEETLKTLDFNIIYKTQNNPQENIDYDKLIKQEKEKIRRASEAYDAGFDTLEEYGVKKRTYQSRIDEYEKAKSKVPPKESKAVPKEFVDKVASVLKTIKSPETDEAIKNEALRSIIDHITYEKEANNLAIYFYL

SEQ ID NO: 7126 - protein, 478 aa, Unknown
  Description of Unknown: Integrase B7127 sequence
  PTHR30461:SF3,IPR036162,PS51737,IPR011109,PTHR30461, PS00397,PF00239,G3DSA:1.10.10.2600,IPR006119,SSF53041, cd00338,SM00857,IPR025827,IPR038109,PS51736, IPR006118,PF13408,G3DSA:3.40.50.1390,PF07508,Coil
MLIGAAYIRVSTDDQLDLSPDSQLDEIKKYAAANDIVLSPDYIFMEQEGRSGKKAENRPEFQRMISTAKVKPKPFDCILVWKFSRFARNQDESTFYKGMLRKKLGIDVISVSEPIMEGMYGRLIEMIIEWQDEFYSYNLGVEVKRGMTKKAELKGYQMVPCLGYAAVGNGKPFVIVEDEYKIVEDIFRMYALENLDRTAIARRLNAQGKTAKRGNPFEQRTVTRILTNPFYNGIVNWNGISFRGSHETRRAVTDLYDICQERLKREFRPVKRRSVSTCRHWLSGLLKCSVCGATMSYNGGGKSRPDAVFACWKYAKGLHKESCSVTVAKAERVVIRSLEKILETGNFEYDRIPRPASEQDSIQKAAIEVKLERLALKEERIRSAYENGIDSLEEYRTRKEQLLKERAELEAELVSLEPASSSPAPSREELLKRVKTVHDLLCSPDVDFETKGNALRSILKFVVFDRKSDRFEFHYYIS

SEQ ID NO: 7127 - protein, 478 aa, Unknown
  Description of Unknown: Integrase B7128 sequence
  PTHR30461:SF3,SM00857,G3DSA:1.10.10.2600,IPR036162,PS51737, G3DSA:3.40.50.1390,IPR006119,IPR038109,PF07508,SSF53041, IPR011109,PTHR30461,Coil,PS51736,cd00338, PF00239
MKYAAAYIRVSDDRQDEYSPDSQLKLIRQYAKNNDYIVPDEYVFYDDGISGRSVKKRKAFNSMIGYAKSKEHPFDAILVWKFSRFARNQEESIVYKSMLRKINVAVISVSETIDDSPFAPLIERIIEFMDEYYSTRLSQEVTRGMTEKASRGEVMTIAPFGYDLKNKTYIPNDNAKTVNYIYDSYLAGKGYRAIAQELATMGIRTKRGNIPDNRFVEYILQNPVYIGKIRWSPEGKQSKQRYKGDNSNVMIIDGKHEAIIDTDKFERVQDMIADQKKRYGKYQRREQPVQFMLKGLMRCGNCSATLVYVGTQSPAMQCHQYARGVCKISHSLSIAKANRVVIDKIEETLKTLDFNIIYKTQNNPQENIDYDKLIKQEKEKIRRASEAYDAGFDTLEEYGIKKRTYQSRIDEYEKAKSKVPPKESKAVPKEFVDKVASVLKTIKSPETDEAVKNEALRSIIDHITYEKEANNLAIYFYL

SEQ ID NO: 7128 - protein, 478 aa, Unknown
  Description of Unknown: Integrase B7129 sequence
  PTHR30461:SF3,SM00857,G3DSA:1.10.10.2600,IPR036162,PF13408, IPR025827,PS51737,G3DSA:3.40.50.1390,IPR006119,IPR038109, PF07508,SSF53041,IPR011109,PTHR30461,PS51736, cd00338,PF00239
MKYAAAYIRVSDDRQDEYSPDSQLKLIRQYAKNNDYIVPDEYVFYDDGISGRSVKKRKAFNSMIGYAKSKEHPFDAILVWKFSRFARNQEESIVYKSMLRKINVAVISVSETIDDSPFAPLIERIIEFMDEYYSTRLSQEVTRGMTEKASRGEAMSTAPFGYDSQGKSFIPNDDAKIVNYIYDSYLSGKGYRAIAQELGTMGIRTKRGNIPDNRFVEYILQNPVYIGKIRWSPECKGSKSRYKGDNSSVMIVDGKHEAIIDTAKFEQVQDMIADQKKRYGKYQRKEQPVQFMLKGLVRCGNCGATLVYVGTKYPALQCHQYARGVCKVSHSLSIAKANRVVIDKIEETLKTLDFNIIYKTQNNPQENIDYDKLIKQEKEKIRRASEAYDAGFDTLEEYGIKKRTYQSRISEYESAKIQQPKKKNDTIPNEFLEKCQNVLKIIKSPEADEAAKNEALRTIIDHITYEKEDNNLAIYFYL

SEQ ID NO: 7129 - protein, 478 aa, Unknown
  Description of Unknown: Integrase B7130 sequence
  PTHR30461:SF3,IPR036162,PS51737,IPR011109,PTHR30461, PS00397,PF00239,G3DSA:1.10.10.2600,IPR006119,SSF53041, cd00338,SM00857,IPR025827,IPR038109,PS51736, IPR006118,PF13408,G3DSA:3.40.50.1390,PF07508,Coil
MQTAAAYIRVSTDDQIEYSPDSQIKAIRKYAKDHDMILPEEFIFVDEGISGRKADKRPSFQRMIGTAKIKPKPFDVILLWKFSRFARNRQDSIVYKSMLRKQCGIDVVSISEQLGDDNTSILIEALIEAMDEYYSLNLAEEVKRGMTEKFSRGGVVSQPPYGYMMKDGIFAPDPETAPIVQKIFADFIAGKGTREIARELNDLGLRTAKGNFFENRAIEYIITNPVYIGKLRRSKEKNISDHYHQDAENTLIVNGNHVPIIDTETFEQAQRKRSELKQRYPKHARQTPSEFMLKGIVRCSACGATLVNQSAAKSLQCHNYARGVCKTSHSITVKKINAAVLEKLRSDAKSQNFEVAVEPTGASSSSAPDFSSLIAREKKKLARVREAYEAGVDTLAEYKTAKQKIQDHIAELEAKASKVLPKSDKDIKEIISRKIMASLKILESDETSEALKNYTLRGLVDRITYIKPKGIIEILYKM

SEQ ID NO: 7130 - protein, 478 aa, Unknown
  Description of Unknown: Integrase B7131 sequence
  PTHR30461:SF3,SM00857,G3DSA:1.10.10.2600,IPR036162,PS51737, G3DSA:3.40.50.1390,IPR006119,IPR038109,PF07508,SSF53041, IPR011109,PTHR30461,Coil,PS51736,cd00338, PF00239
MKYAAAYIRVSDDRQDEYSPDSQLKLIRQYAKNNDYIVPDEYVFYDDGISGRSVKKRKAFNNMIGYAKSKEHPFDAILVWKFSRFARNQEESIVYKSMLRKINVAVISVSETIDDSPFAPLIERIIEFMDEYYSTRLSQEVTRGMTEKASRGEVMTIAPFGYDLKNKTYIPNDNAKTVNYIYDSYLAGKGYRAIAQELATMGIRTKRGNIPDNRFVEYILQNPVYIGKIRWSPEGKQSKQRYKGDNSNVMIIDGKHEAIIDTDKFERVQDMIADQKKRYGKYQRREQPVQFMLKGLMRCGNCGATLVYVGTQSPAMQCHQYARGVCKISHSLSIAKANRVVIDKIEETLKTLDFNIIYKTQNNPQENIDYDKLIKQEKEKIRRASEAYDAGFDTLEEYGIKKRTYQSRIDEYEKAKSKVSPKENKAVPKEFVDKVASVLKTIKSPETDEAVKNEALRSVIDHITYEKEANNLAIYFYL

SEQ ID NO: 7131 - protein, 478 aa, Unknown
  Description of Unknown: Integrase B7132 sequence
  PTHR30461:SF3,SM00857,G3DSA:1.10.10.2600,IPR036162,PS51737, G3DSA:3.40.50.1390,IPR006119,IPR038109,PF07508,IPR011109, SSF53041,PTHR30461,Coil,PS51736,cd00338, PF00239
MKYAAAYIRVSDDRQDEYSPNSQLKLIRQYAKNNDYIVPDEYVFYDDGISGRSVKKRKAFNSMIGYAKSKEHPFDAILVWKFSRFARNQEESIVYKSMLRKINVAVISVSETIDDSPFAPLIERIIEFMDEYYSTRLSQEVTRGMTEKASRGEVMTIAPFGYDLKNKTYIPNDNAKTVNYIYDSYLAGKGYRSIAQELATMGIRTKRGNIPDNRFVEYILQNPVYIGKIRWSPEGKQSKQRYKGDNSNVMIIDGKHEAIIDTDKFERVQDMIADQKKRYGKYQRREQPVQFMLKGLMRCGNCGATLVYVGTQSPAMQCHQYARGVCKVSHSLSIAKANRVVIDKIEETLKTLDFNIIYKTQNNPQENIDYDKLIKQEKEKIRRASEAYDAGFDTLEEYGVKKRTYQSRIDEYEKAKSKVPPKESKAVPKEFVDKVASVLKTIKSPETDEAVKNEALRSVIDHITYEKEANNLAIYFYL

SEQ ID NO: 7132 - protein, 478 aa, Unknown
  Description of Unknown: Integrase B7133 sequence
  PTHR30461:SF3,IPR036162,PS51737,IPR011109,PTHR30461, PS00397,PF00239,G3DSA:1.10.10.2600,IPR006119,SSF53041, cd00338,SM00857,IPR025827,IPR038109,PS51736, IPR006118,PF13408,G3DSA:3.40.50.1390,PF07508,Coil
MQTAAAYIRVSTDDQIEYSPDSQIKAIRKYAKDHDMILPEEFIFVDEGISGRKADKRPSFQRMIGTAKIKPKPFDVILLWKFSRFARNRQDSIVYKSMLRKQCGIDVVSISEQLGDDNTSILIEALIEAMDEYYSLNLAEEVKRGMTEKFSRGGVVSQPPYGYMMKDGIFAPDPETAPIVQKIFADFIAGKGTREIARELNDLGLRTAKGNFFENRAIEYIITNPVYIGKLRRSKEKNISDHYHQDAENTLIVNGNHVPIIDTETFEQAQRKRSELKQRYPKHARQTPSEFMLKGIVRCSACGATLVNQSAAKSLQCHNYAKGVCKTSHSITVKKINAAVLEKLRSDAKSQDFEVAVEPTGSSSSSAPDFSSLIAREKKKLARVREAYEAGVDTLAEYKTAKQKIQDHIAELEAKAAKVLPKSDKDIKEIISRKIMASLEILESDETSEALKNYTLRGLVDRITYIKPKGIIEILYKM

SEQ ID NO: 7133 - protein, 478 aa, Unknown
  Description of Unknown: Integrase B7134 sequence
  PTHR30461:SF3,SM00857,G3DSA:1.10.10.2600,IPR036162,PF13408, PS51737,G3DSA:3.40.50.1390,IPR025827,IPR006119,IPR038109, PF07508,IPR011109,SSF53041,PTHR30461,PS51736, cd00338,PF00239
MKYAAAYIRVSDDRQDEYSPDSQLKLIRQYAKNNDYIVPDEYVFYDDGISGRSVKKRKAFNSMIGYAKSKEHPFDAILVWKFSRFARNQEESIVYKSMLRKINVTVISVSETIDDSPFAPLIERIIEFMDEYYSTRLSQEVTRGMTEKASRGEAMSAAPFGYDSQGKSFIPNDDAKIVNYIYDSYLSGKGYRAIAQELGTMGIRTKRGNIPDNRFVEYVLQNPVYIGKIRWSPECKGSKSRYKGDNSSVMIVDGKHEAIIDTAKFEQVQDMIADQKKRYGKYQRKEQPVQFMLKGLVRCGNCGATLVYVGTKYPALQCHQYARGVCKVSHSLSIAKANRVVIDKIEETLKTLDFNIIYKTQSDLQENIDYDKLIKQEKEKIRRASEAYDAGFDTLEEYGIKKRTYQSRISEYESAKIQQPQKKNDTIPNEFLEKCQNVLKIIKSPEADEAAKNEALRTIIDHITYEKEDNNLAIYFYL

SEQ ID NO: 7134 - protein, 478 aa, Unknown
  Description of Unknown: Integrase B7135 sequence
  PTHR30461:SF3,SM00857,G3DSA:1.10.10.2600,IPR036162,PF13408, PS51737,IPR025827,G3DSA:3.40.50.1390,IPR006119,IPR038109, PF07508,IPR011109,SSF53041,PTHR30461,Coil, PS51736,cd00338,PF00239
MKYAAAYIRVSDDRQDEYSPDSQLKLIRQYAKSNDYIVPDEYVFYDDGISGRSVKKRKAFNSMIGYAKSKEHPFDAILVWKFSRFARNQEESIVYKSMLRKINVTVISVSETIDDSPFAPLIERIIEFMDEYYSTRLSQEVTRGMTEKASRGEAMSAAPFGYDLQAKTFIPNDDAKIVNYIYDSYLSGKGYRAIAQELGSMGIRTKRGNIPDNRFVEYILQNPVYIGKIRWSPECKGSKSRYKGDNSSVMIVDGKHKAIIDTAKFEQVQDMIADQKKRYGKYQRREQPVQFMLKGLMRCGNCGATLVYVGTKYPAMQCHQYARGICKVSHSLSISKANRVVIDKIEETLKTLDFNIIYKTQNNPQENIDYDKLIKQEKEKIRRASEAYDAGFDTLEEYGIKKRTYQSRISEYERAKIQQPKKKNDTIPNEFLEKCQNVLKIIKSPEADEAAKNEALRTIIDHITYEKEDNNLAIYFYL

SEQ ID NO: 7135 - protein, 478 aa, Unknown
  Description of Unknown: Integrase B7136 sequence
  PTHR30461:SF3,cd00338,SM00857,IPR006118,IPR036162, PF13408,IPR025827,G3DSA:3.40.50.1390,IPR006119,SSF53041, PTHR30461,PS00397,PS51736,Coil,PF00239
MTNQAEKTSYIENVAAYIRVSTQEQKLHGISIEAQEEKLNEYADSHGMKIVKFYKDEGVSGRKLIRKRPALQAMIQDAEKGNFRRIIFIKLDRFFRSVAEYHECMKRLAAGGVIWTATEEKYDLSTPSGEAFVNMKLTMAQFEADQVGERIRMINEYKVKSGQPLYGSQALPFCYQVKQSGDGDRRKYIAKRDEIIMEDLIDHFCKNRSVRAALHYINAKYSRAFSYSTIKNALTSELICGTYRGNPAYCEGYMTPAAFETMQKYIQHNPRTSQREHSYIFGGLIRCPCCGNMLVGSPTVLNRIGKSGQKLSYKYYGYRCYRGNLEKKCDFRTMAFEHRLEAIMLSEVEAVMRGKQMYLLRLQNAPQRVAQHDLAELQQELARLNYAWQKGRIKTAADYDRQYDDLMMRIDAANAERQELAANPDYRKISRILSDGWKQLYISLDNDHKRAFWRAFIEEIQLEWTKDVKRIRDITFFT

SEQ ID NO: 7136 - protein, 478 aa, Unknown
  Description of Unknown: Integrase B7137 sequence
  PTHR30461:SF3,IPR036162,PS51737,IPR011109,PTHR30461, PS00397,PF00239,G3DSA:1.10.10.2600,IPR006119,SSF53041, SM00857,IPR025827,IPR038109,PS51736, cd03768,IPR006118,PF13408,G3DSA:3.40.50.1390,PF07508,Coil
MPKIKVGIYIRVSTQEQANEGYSIDAQTDRLTSYCKSRDWAIYNTYIDGGFSGSNTNRPALHQLMQDIQDKKLNCVLVYKLDRLSRSQKDTLYLIEDVFLKNKIDFVSLNENFDTSSPFGRAMIGILSVFAQLEREQIKERSLMGRIERAKNGLWHGGGFEPFGYNYINGQLIVNEYEANIVREAFELFLQKLPIHRINRIISEKYGKEFHETVLRSILSTRLYTGKISYLGGIYDGQHQAIITEDTFKAAETLLAYRKKKFSNSNPFKATRLLGGILYCAHCGARYLAKGNYSGHGNKKVYRPYYTCYSRAKCTKKYILDPNCKNPSYAVVVLDEIIINEIRKLFINKEYLYSAKNATAATNTVNKQKSILKQIDSIQSQMSRLLDLYQIEGISIDDIQDRIKKLQHEKDVLEETLSNLKTNQKKKLTTTEVLSMEASFNEIMENGTDMEKQAIVRTLIDKIIVHEELNSFEIIWNF

SEQ ID NO: 7137 - protein, 478 aa, Unknown
  Description of Unknown: Integrase B7138 sequence
  PTHR30461:SF3,SM00857,G3DSA:1.10.10.2600,IPR036162,PS51737, G3DSA:3.40.50.1390,IPR006119,IPR038109,PF07508,IPR011109, SSF53041,PTHR30461,Coil,PS51736,cd00338, PF00239
MKYAAAYIRVSDDRQDEYSPYSQLKLIRQYAKNNDYIVPDEYVFYDDGISGRSVKKRKAFNSMIGYAKSKEHPFDAILVWKFSRFARNQEESIVYKSMLRKINVAVISVSETIDDSPFAPLIERIIEFMDEYYSTRLSQEVTRGMTEKASRGEVMTIAPFGYDLKNKTYIPNDNAKTVNYIYDSYLAGKGYRAIAQELAAMGIRTKRGNIPDNRFVEYILQNPVYIGKIRWSPEGKQSKQRYKGDNSNVMIIDGKHEAIIDTDKFERVQDMIADQKKRYGKYQRREQPVQFMLKGLMRCGNCGATLVYVGTQSPAMQCHQYARGVCKVSHSLSIAKANRVVIDKIEETLKTLDFNIIYKTQNNPQENIDYDKLIKQEKEKIRRASEAYDAGFDTLEEYGVKKRTYQSRIDEYEKAKSKVPPKESKAVPKEFVDKVASVLKTIKSPETDEAVKNEALRSIIDHITYEKEANNLAIYFYL

SEQ ID NO: 7138 - protein, 478 aa, Unknown
  Description of Unknown: Integrase B7139 sequence
  PTHR30461:SF3,IPR036162,PS51737,IPR011109,PTHR30461, PS00397,PF00239,G3DSA:1.10.10.2600,IPR006119,SSF53041, SM00857,IPR025827,IPR038109,PS51736,cd03768, IPR006118,PF13408,G3DSA:3.40.50.1390,PF07508,Coil
MHKVAIYVRVSTTSQVDEGYSIDEQKAKLTSYCEIKDWNIYDIYTDGGFSGSNTERPALERLIRDAKRKLFDTVLVYKLDRLSRSQKDTLYLIEDVFLENDIEFVSLLENLDTSTPFGKAMIGLLSVFAQLEREQIKERMQLGKLGRAKSGKSMQWAKTSFGYDYIKETGTLSINPYQALIVRKMFEWYLSGMSITKLRDTLNEQYGQDKEWNYRTVRVILSNPVYCGYNQFKGQIFPGTHEPIVSEEDFNKTQEEIKTRQRAAAERFNPRPFQAKYMLSGIAQCGYCSAPLAIKMGMRRKDGTRLVKYECKQRHPRKTKGVTVYNNNEKCDSGFYFKDDIEHFVLTEISKLQTDSDYIDKLFSNTDKETIDRDSYQKQIDNLTAKISRLNDLYIDDRISLEELQKRSSDFMAERAALEKELDADSSLKAVERKKDIRRVLDTKDIFMLDYEQQKAVVRALISKVRVTSDSIVILWKL

SEQ ID NO: 7139 - protein, 478 aa, Unknown
  Description of Unknown: Integrase B7140 sequence
  PTHR30461:SF3,SM00857,G3DSA:1.10.10.2600,IPR036162,PF13408, PS51737,G3DSA:3.40.50.1390,IPR025827,IPR006119,IPR038109, PF07508,IPR011109,SSF53041,PTHR30461,Coil, PS51736,cd00338,PF00239
MKYAAAYIRVSDDRQDEYSPDSQLKLIRQYAKSNDYIVPDEYVFYDDGISGRSVKKRKAFNSMIGYAKSKEHPFDAILVWKFSRFARNQEESIVYKSMLRKINVAVISVSETIDDSPFAPLIERIIEFMDEYYSTRLSQEVTRGMTEKASRGEVMTIAPFGYDLKNKTYIPNDNAKTVNYIYDSYLAGKGYRAIAQELATMGIRTKRGNIPDNRFVEYILQNPVYIGKIRWSPEGKQSKQRYKGDNSNVMIIDGKHEAIIDTDKFERVQDMIADQKKRYGKYQRREQPVQFMLKGLMRCGNCGATLVYVGTQSPAMQCHQYARGVCKVSHSLSVAKANRVVIDKIEETLKTLDFNIIYKTQNNPQENIDYDKLIKQEKEKIRRASEAYDAGFDTLEEYGVKKRTYQSRIDEYEKAKSKVPPKESKAVPKKFVDKVANVLKTIKSPETDEAVKNEALRSVIDHITYEKEANNLAIYFYL

SEQ ID NO: 7140 - protein, 478 aa, Unknown
  Description of Unknown: Integrase B7141 sequence
  PTHR30461:SF3,SM00857,IPR006118,IPR036162,PF13408, IPR025827,G3DSA:3.40.50.1390,IPR006119,SSF53041,PF00239, PTHR30461,PS00397,PS51736,Coil,cd00338
MTNQAEKTSYIENVAAYIRVSTQEQKLHGISIEAQEEKLTEYADSHGMKIVKFYKDEGVSGRKLIRKRPALQAMIQDAEKGNFRRIIFIKLDRFFRSVAEYHECMKRLAAGGVIWTATEEKYDLSTPSGEAFVNMKLTMAQFEADQVGERIRMINEYKVKSGQPLYGSQALPFCYQVKQSDDGDRRKYIAKRDEIIMEDLIAHFCKNRSVRAALHYINAKYSRAFSYSTIKNALTSELICGTYRGNPAYCEGYMTPAAFETMQKYIQHNPRTSQREHTYIFGGLIRCPCCGNMLVGSPTVLNRIGKSGQKLSYKYYGYRCYRGNLEKKCDFRTMAFEHRLEAIMLSEVEAVMREKHMYLLRLQSAPQRVAQHDLAELQQELARLNYAWQKGRIKTAADYDRQYDDLMARIDAANAERQELTAKPDYHKISRILSDGWKQLYISLDNDHKRAFWRAFIEEIQLEWTKDVKRIRDITFFT

SEQ ID NO: 7141 - protein, 478 aa, Unknown
  Description of Unknown: Integrase B7142 sequence
  PTHR30461:SF3,SM00857,IPR006118,G3DSA:1.10.10.2600,IPR036162, PS51737,G3DSA:3.40.50.1390,Coil,IPR006119,IPR038109, PF07508,IPR011109,SSF53041,PTHR30461, PS00397,PS51736,cd00338,PF00239
MKIAAAYVRVSTDDQLEYSPDSQLQAIRDYAKSHDLILAEEYIFREEDGRSGRQAEKRPEFMRMISTAKQQPPPFEVILCWKYSRFARNQEESIVYKSMLKKDGIEVLSISEPLIDGPFGSLIERIIEWMDEYYSIRLSGEVKRGMTEKVSRGEPVTIPPLGYLMENKQLVPDPEMAPVISMLFDEFAAGVPMLQLAKKLNEIGIRTRRGNKIENRTVNYILQNPIYIGKIRWTPTGRASNNRYRDAQDTVIVNGNHQPIVTIEQWEKAQAKIAENKQKFARYQRNTVSKVMLRGLVRCSNCGSTLVYLPPSSMQCHLYSKGVCTVSHCISVTRLESAVLQGLEHDALDMGGNLKIEYRTQPAPVATTTIKAQIKKEQNKLQRCKEAYQGGVDTLAEYRNNKEAILSTIADLENQLNTVPTATPAPDPQALRDKIIAAIPVLKDPNVTPTAKNDLLRCFISKIIYTKSGEEIEIYYYM

SEQ ID NO: 7142 - protein, 478 aa, Unknown
  Description of Unknown: Integrase B7143 sequence
  PTHR30461:SF3,SM00857,G3DSA:1.10.10.2600,IPR036162,PS51737, G3DSA:3.40.50.1390,IPR006119,IPR038109,PF07508,SSF53041, IPR011109,PTHR30461,Coil,PS51736,cd00338, PF00239
MKYAAAYIRVSDDRQDEYSPDSQLKLIRQYAKNNDYIVPDEYVFYDDGISGRSVKKRKAFNSMIGYAKSKEHPFDAILVWKFSRFARNQEESIVYKSMLRKINVAVISVSETIDDSPFAPLIERIIEFMDEYYSTRLSQEVTRGMTEKASRGEVMTIAPFGYDLKNKTYIPNDNAKTVNYIYDSYLAGKGYRAIAQELATMGIRTKRGNIPDNRFVEYILQNPVYIGKIRWSPEGKQSKQRYKGDNSNVMIIDGKHEAIIDTDKFERVQDMIADQKKRYGKYQRREQPVQFMLKGLMRCGSCGATLVYVGTQSPAMQCHQYARGVCKVSHSLSIAKANRVVIDKIEETLKTLDFNIIYKTQNNPQENIDYDKLIKQEKEKIRRASEAYDAGFDTLEEYGVKKRTYQSRIDEYENAKSKVPPKESKAVPKKFVDKVASVLKTIKSPETDEAVKNEALRSIIDHITYEKEANNLAIYFYL

SEQ ID NO: 7143 - protein, 478 aa, Unknown
  Description of Unknown: Integrase B7144 sequence
  PTHR30461:SF3,SM00857,G3DSA:1.10.10.2600,IPR036162,PF13408, PS51737,G3DSA:3.40.50.1390,IPR025827,IPR006119,IPR038109, PF07508,IPR011109,SSF53041,PTHR30461,Coil, PS51736,cd00338,PF00239
MKYAAAYIRVSDDRQDEYSPDSQLKLIRQYAKNNDYIVPDEYVFYDDGISGRSVKKRKAFNSMIGYAKSKEHPFDAILVWKFSRFARNQEESIVYKSMLRKINVTVISVSETIDDSPFAPLIERIIEFMDEYYSTRLSQEVTRGMTEKASRGEAMSAAPFGYDSQAKTFIPNDDAKIVNYIYDSYLSGKGYRAIAQELGTMGIRTKRGNIPDNRFVEYVLQNPVYIGKIRWSPECKGSKSRYKGDNSSVMIVDGKHEAIIDTAKFEQVQDMIADQKKRYGKYQRKEQPVQFMLKGLVRCGNCGATLVYVGTKYPALQCHQYARGVCKVSHSLSIAKANRVVIDKIEETLKTLDFNIIYKTQNNPQENIDYDKLIKQEKEKIRRASEAYDAGFDTLEEYGIKKRTYQSRISEYERAKIQQPKKKNDTIPNEFLEKCQNVLKIIKSPEADEAAKNEALRTIIDHITYEKEDNNLAIYFYL

SEQ ID NO: 7144 - protein, 478 aa, Unknown
  Description of Unknown: Integrase B7145 sequence
  IPR036162,PS51737,IPR011109,PTHR30461,PS00397, PF00239,G3DSA:1.10.10.2600,IPR006119,SSF53041,cd00338, SM00857,IPR025827,IPR038109,PS51736,IPR006118, PF13408,G3DSA:3.40.50.1390,PF07508,Coil
MKTVCAYIRVSTDSQEEYSPDAQIRLLKEYAASHDMTIIDIYQDLGISGRNADKRPQFQDMIAMAKSKEHPYDAILVWKFSRFARNQEESIVYKSLLKKNHVDVVSVSEPLPDGVIGELVERIFEWMDEYYSIRLSGEVRRGMTQKALAGGYNSNVPIGYTKERGPDTIPQIDEYYGPMVQRCFHMFAIEHIPMTKIAATINNLGYRTRTGKRWETRNITDMFQNPFYIGKIRWNSASSRRTTPRVGEEIIRDGKHQPLIDQELWDATQERYAKITARMGHGKRPDIYKHWLSGLLKCPNCGGTLAYQNGLDTKTGKHYPYFVCWKNVKGMCATRNSISAGKAAQYVLDGLLNIVEDKDIKTIAPIVQFNQDEAAIAKQIASVKAKLGRVKEAYVNGIDTLEEYKANKEKLEAEIAHLKELVVPEVKPKTVTVDVIRTVHDTITNAQSDSEKATAINSIVDHIVYNKESDTMEFFFVS

SEQ ID NO: 7145 - protein, 478 aa, Unknown
  Description of Unknown: Integrase B7146 sequence
  PTHR30461:SF3,IPR036162,PS51737,IPR011109,PTHR30461, PS00397,PF00239,G3DSA:1.10.10.2600,IPR006119,SSF53041, cd00338,SM00857,IPR025827,IPR038109,PS51736, IPR006118,PF13408,G3DSA:3.40.50.1390,PF07508,Coil
MLIGAAYIRVSTDDQLDLSPDSQLDEIKKYAAANDIVLSPDYIFMEQEGRSGKKAENRPEFQRMISTAKVKPKPFDCILVWKFSRFARNQDESTFYKGMLRKKLGIDVVSVSEPIMEGMYGRLIEMIIEWQDEFYSYNLGVEVKRGMTKKAELKGYQIVPCLGYAAVGNGKPFVIMEDEYKIVEDIFRMYALENLDRTAIARRLNAQGKTAKRGNPFEQRTVTRILTNPFYNGIVNWNGISFQGSHETRRSVTDLYDICQERLKQEFRPVKRRSISTCRHWLSGLLKCSVCGATMSYNGGGKSRPDAVFACWKYAKGLHKESCSVTVAKAEQVVIRSLEKILETGNFEYDRIPRPASEQDSSQKAAIEVKLERLALKEERIRSAYENGIDSLEEYKTRKEQLLKERAELEAELASLEPADCSPAPSLEELLERVKTVHDLLCSPDVDFETKGTALRSILKFIVFDRKADRFEFHYYIS

SEQ ID NO: 7146 - protein, 478 aa, Unknown
  Description of Unknown: Integrase B7147 sequence
  PTHR30461:SF3,IPR036162,PS51737,IPR011109,PTHR30461, PS00397,PF00239,G3DSA:1.10.10.2600,IPR006119,SSF53041, SM00857,IPR025827,IPR038109,PS51736,cd03768, IPR006118,PF13408,G3DSA:3.40.50.1390,PF07508,Coil
MPKVKVGIYIRVSTQEQATEGYSIDAQTDRLTNYCKSRDWSIYNTYIDGGFSGSNTNRPALHQLMQDIKDKKLNCVLVYKLDRLSRSQKDTLYLIEDVFLKNKIDFVSLNENFDTSSPFGRAMIGILSVFAQLEREQIKERSLMGRIERAKNGLWHGGGFEPFGYNYINGQLIVNEYEANIVQEAFELFLQKLPIHRINRIISEKYGKDFHETVLRSILSTRLYTGKISYLGGIYDGQHQAIISEDTFKAAEMLLAYRKKKFSNSNPFKATKLLGGILYCAHCGARYLAKGNYSGHGDKKVYRPYYTCYSRAKSTKKYIVDPNCKNPSYAVVVLDEIIINEIRKLFIDKEYLYSAKNATATSNTVNKQKSILKQIDSIQSQISRLLDLYQIDGISIDDIQDRIKKLQHEKDVLEETLSNLKTSQKKKLTTNEVLSMEASFNEIMENGTDMEKQTIVRTLIDKIIVHEELNSFEIIWNF

SEQ ID NO: 7147 - protein, 478 aa, Unknown
  Description of Unknown: Integrase B7148 sequence
  PTHR30461:SF3,SM00857,G3DSA:1.10.10.2600,IPR036162,PF13408, PS51737,G3DSA:3.40.50.1390,IPR025827,IPR006119,IPR038109, PF07508,IPR011109,SSF53041,PTHR30461,PS51736, cd00338,PF00239
MKYAAAYIRVSDDRQDEYSPDSQLKLIRQYAKNNDYIVPDEYVFYDDGISGRSVKKRKAFNGMIGYAKSKEHPFDAILVWKFSRFARNQEESIVYKSMLRKINVAVISVSETIDDSPFAPLIERIIEFMDEYYSTRLSQEVTRGMTEKASRGEAMSAAPFGYDSQGKSFIPNDDAKIVNYIYDSYLSGKGYRAIAQELGTMGIRTKRGNIPDNRFVEYILRNPVYIGKIRWSPECKGSKSRYKGDNSSVMIVDGKHEAVIDTDKFERVQDMIADQKKRYGKYQRKEQPVQFMLKGLVRCGNCGATLVYVGTKYPAMQCHQYARGVCKVSHSLSIAKANRVVIDKIEETLKTLDFNIIYKTQNNPQENIDYDKLIKQEKEKIRRASEAYDAGFDTLEEYGIKKRTYQSRISEYESAKIQQPKKKNDTIPNEFLEKCQNVLKIIKSPEADEAAKNEALRTIIDHITYEKEDNNLAIYFYL

SEQ ID NO: 7148 - protein, 478 aa, Unknown
  Description of Unknown: Integrase B7149 sequence
  IPR036162,PS51737,IPR011109,PTHR30461,PS00397, PF00239,G3DSA:1.10.10.2600,IPR006119,SSF53041,cd00338, SM00857,IPR025827,IPR038109,PS51736,IPR006118, PF13408,G3DSA:3.40.50.1390,PF07508,Coil
MKTVCAYIRVSTDSQEEYSPDAQIRLLKEYAASHDMTIIDIYQDLGISGRNADKRPQFQDMIAMAKSKEHPYDAILVWKFSRFARNQEESIVYKSLLKKNHVDVVSVSEPLPDGVIGELVERIFEWMDEYYSIRLSGEVRRGMTQKALAGGYNSNVPIGYTKERGPDTIPQIDEYYGPMVQRCFHMFAIEHIPMTKIAATINNLGYRTRTGKRWETRNITDMFQNPFYIGKIRWNSASSRRTTPRVGEEIIRDGKHQPLIDQELWDATQERYAKITARMGHGKRPDIYKHWLSGLLKCPNCGGTLAYQNGLDTKTGKHYPYFVCWKNVKGMCATRNSISAGKAAQYVLDGLLDIVENKDIKTITPIIPFNQDEATVTKQIASVKAKLGRVKESYINGIDTLEEYKANKEKLEAEIAHLKELVVPEVKPKTVTVDVIRTVHDTIMNAQSDSEKATAINSIVDHIIYDKEADTMEFFFIP

SEQ ID NO: 7149 - protein, 478 aa, Unknown
  Description of Unknown: Integrase B7150 sequence
  PTHR30461:SF3,IPR036162,PS51737,IPR011109,PTHR30461, PS00397,PF00239,G3DSA:1.10.10.2600,IPR006119,SSF53041, cd00338,SM00857,IPR025827,IPR038109,PS51736, IPR006118,PF13408,G3DSA:3.40.50.1390,PF07508,Coil
MLIGAAYIRVSTDDQLDLSPDSQLDEIKKYAAANDIVLSPDYIFMEQEGRSGKKAENRPEFQRMISTAKVKPKPFDCILVWKFSRFARNQDESTFYKGMLRKKLGIDVISVSEPIMEGMYGRLIEMIIEWQDEFYSYNLGVEVKRGMTKKAELKGYQIVPCLGYAAVGNGKPFVIVEDEYKIVEDIFRMYALENLDRTAIARRLNAQGKTAKRGNPFEQRTITRILTNPFYNGTVSWNGISFQGSHETRQSVTDLYDICQERLKQEFRPVKRRSISTCRHWLSGILKCSVCGATMSYNGGGKSRPDAVFACWKYAKGLHKESCSVTVAKAERVVIHSLEKILETGNFKYDRIPQPVSEQAAGQKAAVEEKLERLSLKEERIRAAYENGIDSLEEYRERKERLAAERKELEEELASLEPASCSPALSREELLERVKTVHDLLCSPDVDFETKGTALRSILKFIVFDRKADRFEFHYYIS

SEQ ID NO: 7150 - protein, 478 aa, Unknown
  Description of Unknown: Integrase B7151 sequence
  PTHR30461:SF3,SM00857,G3DSA:1.10.10.2600,IPR036162,PS51737, G3DSA:3.40.50.1390,IPR006119,IPR038109,PF07508,SSF53041, IPR011109,PTHR30461,Coil,PS51736,cd00338, PF00239
MKYAAAYIRVSDDRQDEYSPDSQLKLIRQYAKNNDYIVPDEYVFYDDGISGRSVKKRKAFNSMIGYAKSKEHPFDAILVWKFSRFARNQEESIVYKSMLRKINVAVISVSETIDDSPFAPLIERIIEFMDEYYSTRLSQEVTRGMTEKASRGEVMTIAPFGYDLKNKTYIPNDNAKTVNYIYDSYLAGKGYRAIAQELSAMGIRTKRGNIPDNRFVEYVLQNPVYIGKIRWSPEGKQSKQRYKGDNSNVMIIDGKHEAIIDTDKFERVQDMIADQKKRYGKYQRREQPVQFMLKGLMRCGNCGATLVYVGTQSPAMQCHQYARGVCKVSHSLSIAKANRVVIDKIEETLKTLDFNIIYKTQNNPQENIDYDKLIKQEKEKIRRASEAYDAGFDTLEEYGVKKRTYQSRIDEYEKAKSKVPQKENKAVPKEFVDKVASVLKTIKSPETDEAVKNEALRSVIDHITYEKEDNNLAIYFYL

SEQ ID NO: 7151 - protein, 478 aa, Unknown
  Description of Unknown: Integrase B7152 sequence
  PTHR30461:SF3,IPR036162,PS51737,IPR011109,PTHR30461, PS00397,PF00239,G3DSA:1.10.10.2600,IPR006119,SSF53041, cd00338,SM00857,IPR025827,IPR038109,PS51736, IPR006118,PF13408,G3DSA:3.40.50.1390,PF07508,Coil
MLIGAAYIRVSTDDQLDLSPDSQLDEIKKYAAANDIVLSPDYIFMEQEGRSGKKAENRPEFQRMISTAKVKPKPFDCILVWKFSRFARNQDESTFYKGMLRKKLGIDVVSVSEPIMEGMYGRLIEMIIEWQDEFYSYNLGVEVKRGMTKKAELKGYQIVPCLGYAAVGNGKPFVIVEDEYKIVEDIFRMYALENLDRTAIARRLNAQGKKAKRGNPFEQRTITRILTNPFYNGTVSWNGISFQGSHETRQSVTGLYDICQERLKQEFRPVKRRSISTCRHWLSGILKCSVCGATMSYNGGGKSRPDAVFACWKYAKGLHKESCSVTVAKAERIVIRSLEKILETGNFEYDRIPRPASEQDSSQKATIEVKLERLALKEERIRAAYENGIDSLEEYRTRKEQLLKERTELEAELASLEPADCSPALSREELLERVKTVHDLLCSPDVDFETKGTALRSILKFIVFDRKADRFEFHYYIS

SEQ ID NO: 7152 - protein, 478 aa, Unknown
  Description of Unknown: Integrase B7153 sequence
  PTHR30461:SF3,IPR036162,PS51737,IPR011109,PTHR30461, PS00397,PF00239,G3DSA:1.10.10.2600,IPR006119,SSF53041, SM00857,IPR025827,IPR038109,PS51736,cd03768, IPR006118,PF13408,G3DSA:3.40.50.1390,PF07508,Coil
MPKIKVGIYIRVSTQEQANEGYSIDAQTDRLTSYCKSRDWAIYNTYIDGGFSGSNTNRPALHQLMQDIQDKKLNCVLVYKLDRLSRSQKDTLYLIEDVFLKNKIDFVSLNENFDTSSPFGRAMIGILSVFAQLEREQIKERSLMGRIERAKNGLWHGGGFEPFGYNYINGQLIVNEYEANIVREAFELFLQKLPIHRINRIISEKYGKEFHETVLRSILSTRLYTGKISYLGGIYDGQHQAIITEDTFKAAETLLAYRKKKFSNSNPFKATRLLGGILYCAHCGARYLAKGNYSGHGNKKVYRPYYTCYSRAKCTKKYILDPNCKNPSYAVVVLDEIIINEIRKLFINKEYLYSAKNATAATNTINKQKSILKQIDSIQSQISRLLDLYQIEGISIDDIQDRIKKLQHEKDVLEETFSNLKTNQKKKLTTTEVLSMEASFNEIMENGTDMEKQAIVRTLIDKIIVHEELNSFEIIWNF

SEQ ID NO: 7153 - protein, 478 aa, Unknown
  Description of Unknown: Integrase B7154 sequence
  PTHR30461:SF3,SM00857,IPR006118,G3DSA:1.10.10.2600,IPR036162, PS51737,G3DSA:3.40.50.1390,Coil,IPR006119,IPR038109, PF07508,IPR011109,SSF53041,PTHR30461,PS00397, PS51736,cd00338,PF00239
MKIAAAYVRVSTDDQLEYSPDSQLQAIRDYAKSHDLILSEEYIFREEDGRSGRQAEKRPEFMRMISTAKQQPPPFEVILCWKYSRFARNQEESIVYKSMLKKDGIEVLSISEPLIDGPFGSLIERIIEWMDEYYSIRLSGEVKRGMTEKVSRGEPVTIPPLGYLMENKQLVPDPEMAPVISMLFDEFAAGTPMLQLARRLNEMGIRTRRGNKIENRTINYILQNPIYIGKIRWTPTGRASNNRYRDAQDTVIVNGNHQPIVTIEQWEKAQAKIADNKQKFARYQRNTVSKVMLRGLVRCSNCGSTLVFLPPSSMQCHLYSKGVCTVSHCISVTRLESAVLQGLEHDALDMGGNLKIEYRTQPAPVATVTIKAQIKKEQNKLQRCKEAYQGGVDTLAEYRNNKEAILSTIADLENQLNTAPTATPAPDPQALRDKIIAAIPVLKDPSVTPTAKNDLLRCFISKIIYTKSGEEIEIYYYM

SEQ ID NO: 7154 - protein, 478 aa, Unknown
  Description of Unknown: Integrase B7155 sequence
  PTHR30461:SF3,SM00857,G3DSA:1.10.10.2600,IPR036162,PF13408, IPR025827,PS51737,G3DSA:3.40.50.1390,IPR006119,IPR038109, PF07508,IPR011109,SSF53041,PTHR30461,Coil, PS51736,cd00338,PF00239
MKYAAAYIRVSDDRQDEYSPYSQLKLIRQYAKNNDYIVPDEYVFYDDGISGRSVKKRKAFNSMIGYAKSKEHPFDAILVWKFSRFARNQEESIVYKSMLRKINVAVISVSETIDDSPFAPLIERIIEFMDEYYSTRLSQEVTRGMTEKASRGEVMTIAPFGYDLKNKTYIPNDNAKTVNYIYDSYLAGKGYRAIAQELAAMGIRTKRGNIPDNRFVEYILQNPVYIGKIRWSPEGKQSKQRYKGDNSNVMIIDGKHEAIIDTDKFERVQDMIADQKKRYGKYQRREQPVQFMLKGLMRCGNCGATLVYVGTQSPAMQCHQYARGVCKVSHSLSVAKANRVVIDKIEETLKTLDFNIIYKTQNNPQENIDYDKLIKQEKEKIRRASEAYDAGFDTLEEYGVKKRTYQSRIDEYEKAKSKVPPKESKAVPKEFVDKVASVLKTIKSPETDEAVKNEALRSIIDHITYEKEANNLAIYFYL

SEQ ID NO: 7155 - protein, 478 aa, Unknown
  Description of Unknown: Integrase B7156 sequence
  PTHR30461:SF3,IPR036162,PS51737,IPR011109,PTHR30461, PS00397,PF00239,G3DSA:1.10.10.2600,IPR006119,SSF53041, SM00857,IPR025827,IPR038109,PS51736,cd03768, IPR006118,PF13408,G3DSA:3.40.50.1390,PF07508,Coil
MNKVALYVRVSTTSQLEEGYSIEEQKAKLESYCDIKDWHIYKVYTDGGFSGSTTERPALEQLIKDAQSKLFDTVLVYKLDRLSRSQKDTLYLIEDIFLKNNIEFVSLLENFDTSTPFGRAVIGLLSVFAQLEREQIKERMQLGKLGRAKSGKSMMWAKTSYGYNYDKETGSMTVNEYEALAVKEIFTSYLAGMSITKLRDKINEEYPKQPAWSYRTIRGILANPVYCGLNQYKGQTFQGTHKPIISLDDFEQTQRELAKRQQTAKELSNPRPFQAKYMLSGLAQCGYCHAPLKVILGQKRKDGSRFKRYECYQRHPRKTRGVTVYNDNKKCESGYYDMELLEHYVLTRIAQLQNDPDKIQELFSDDTSPAVDKQAIQKQIDSLTLKLSKLNDLYLDDRITLDELRTKSADFIKQRNALEDEIKKASNDKQAGKREKIEKMLDASSVLEMSYDNQKVIVRELIDKVQVTSDKIVIRWKI

SEQ ID NO: 7156 - protein, 478 aa, Unknown
  Description of Unknown: Integrase B7157 sequence
  IPR036162,PS51737,IPR011109,PTHR30461,PS00397, PF00239,G3DSA:1.10.10.2600,IPR006119,SSF53041,cd00338, SM00857,IPR025827,IPR038109,PS51736,IPR006118, PF13408,G3DSA:3.40.50.1390,PF07508,Coil
MKTVCAYIRVSTDSQEEYSPDAQIRLLKEYAASHDMTIIDIYQDLGISGRNADKRPQFQDMIAMAKSKEHPYDAILVWKFSRFARNQEESIVYKSLLKKNHVDVVSVSEPLPDGVIGELVERIFEWMDEYYSIRLSGEVRRGMTQKALAGGYNSNVPIGYTKERGPDTIPQIDEYYGPMVQRCFHMFAIEHIPMTKIAATINNLGYRTRTGKRWETRNITDMFQNPFYIGKIRWNSASSRRTTPRVGEEIIRDGKHQPLIDQELWDATQERYAKITARMGHGKRQDIYKHWLSGLLKCPNCGGTLAYQNGLDTKTGKHYPYFVCWKNVKGMCATRNSISAGKAAQYVLDGLLNIVEDKDIKTIAPIVQFNQDEAAIAKQIASVKAKLGRVKEAYVNGIDTLEEYKANKEKLEAEIAHLKELVVPEVKPKTVTVDVIRTVHDTIMNAQSDSEKATAINSIVDHIIYDKEADTMEFFFIP

SEQ ID NO: 7157 - protein, 478 aa, Unknown
  Description of Unknown: Integrase B7158 sequence
  PTHR30461:SF3,IPR036162,PS51737,IPR011109,PTHR30461, PS00397,PF00239,G3DSA:1.10.10.2600,IPR006119,SSF53041, SM00857,IPR025827,IPR038109,PS51736,cd03768, IPR006118,PF13408,G3DSA:3.40.50.1390,PF07508,Coil
MHKVAIYVRVSTTSQVDEGYSIDEQKAKLTSYCDIKDWNIYEIYTDGGFSGSNTERPALEQLIRDAKRKLFDTVLVYKLDRLSRSQKDTLYLIEDVFLENDIEFVSLLENFDTSTPFGKAMIGLLSVFAQLEREQIKERMQLGKLGRAKSGKSMQWAKTSFGYDYIKETGTLSINPYQALIVRKMFEWYLSGMSITKLRDTLNEQYGQDKEWNYRTVRVILSNPVYCGYNQFKGQIFPGTHEPIISEEDFNKTQEEIKTRQRTAAQRFNPRPFQAKYMLSGIAQCGYCSAPLAIKLGMKRKDGTRLVKYECKQRHPRKTKGVTVYNNNEKCDSGFYFKDDIEHFVLTEISKLQTDSDYIDKLFSNTGKETIDRDSYQKQIDNLTAKISRLNDLYIDDRISLEELQKRSSDFMAERTALEKELDADSSVKAVERKEDIKRVLDTKDVFSLDYDQQKAIARALISKVRVTSETIVILWKL

SEQ ID NO: 7158 - protein, 478 aa, Unknown
  Description of Unknown: Integrase B7159 sequence
  PTHR30461:SF3,IPR036162,PS51737,IPR011109,PTHR30461, PS00397,PF00239,G3DSA:1.10.10.2600,IPR006119,SSF53041, cd00338,SM00857,IPR025827,IPR038109,PS51736, IPR006118,PF13408,G3DSA:3.40.50.1390,PF07508,Coil
MKRKMVVAIYIRVSTQEQALEGYSIDEQQKRLLSFCEAKNWTVYKIYVDPGYSGSNLDRPAVQQLIKDAERHCFDMVLIYKLDRLSRSQKDTMHLLEDVFLVNNVDLVAMNESFDTSTPFGRAMIGILSVFAQLERENIKERTSMGRKARISKGYFHGSHPPLGYQFKPGGNDLEINQYESVIVREIFDKFLSGATIYSIAEDMEKTYGNNVRGWNNTMIRRILRNPVYFGKVRYGGETFDGLHEPLISEKDFAKVQAVLTRNKELDRRTYDYRTSTGKTADHLLTGLLYCGDCGARMAYNKVSKNVSRYSCYSVSRKNKVLIRSDYCTNRLNPYSAHELEELILGEIAKLAKDPNHVVETIETTLPDDKSTPIRNRLDEVNTQVSKLLDLYQLGFTDLSQISEKLEALKDEKNKLENQLENLKVIPTIDVNAVYETLEDFDDLLEYGTPQEIHAVVHTLIDKIVILNDDIKIYWSFC

SEQ ID NO: 7159 - protein, 478 aa, Unknown
  Description of Unknown: Integrase B7160 sequence
  PTHR30461:SF3,SM00857,G3DSA:1.10.10.2600,IPR036162,PF13408, PS51737,G3DSA:3.40.50.1390,IPR025827,IPR006119,IPR038109, PF07508,IPR011109,SSF53041,PTHR30461,PS51736, cd00338,PF00239
MKYAAAYIRVSDDRQDEYSPDSQLKLIRQYAKNNDYIVPDEYVFYDDGISGRSVKKRKAFNSMIGYAKSKEHPFDAILVWKFSRFARNQEESIVYKSMLRKINVTVISVSETIDDSPFAPLIERIIEFMDEYYSTRLSQEVTRGMTEKASRGEAMSAAPFGYDSQGKSFIPNDDAKIVNYIYDSYLSGKGYRAIAQELGTMGIRTKRGNIPDNRFVEYILRNPVYIGKIRWSPECKGSKSRYKGDNSSVMIVDGKHEAIIDTAKFEQVQDMIADQKKRYGKYQRKEQPVQFMLKGLVRCGNCGATLVYVGTKYPALQCHQYARGVCKVSHSLSIAKANRVVIDKIEETLKTLDFNIIYKTQSDLQENIDYDKLIKQEKEKIRRASEAYDAGFDTLEEYGIKKRTYQSRISEYESAKIQQPKKKNDTIPNEFLEKCQNVLKIIKSPEADEAAKSEALRTIIDHITYEKEDNNLAIYFYL

SEQ ID NO: 7160 - protein, 478 aa, Unknown
  Description of Unknown: Integrase B7161 sequence
  PTHR30461:SF3,IPR036162,PS51737,IPR011109,PTHR30461, PS00397,PF00239,G3DSA:1.10.10.2600,IPR006119,SSF53041, cd00338,SM00857,IPR025827,IPR038109,PS51736, IPR006118,PF13408,G3DSA:3.40.50.1390,PF07508,Coil
MLIGAAYVRVSTDDQLDLSPDSQLDEIKKYAAANDIVLSPDYIFMEQEGRSGKKAENRPEFQRMISTAKVKPKPFDCILVWKFSRFARNQDESTFYKGMLRKKLGIDVISVSEPIMEGMYGRLIEMIIEWQDEFYSYNLGVEVKRGMTKKAELQGYQIVPCLGYAAVGNGKPFVIVEDEYKIVEDIFRMYALENLDRTAIARRLNAQGKKAKRGNPFEQRTITRILTNPFYNGTVSWNGISFQGSHETRQSVTDLYDICQERLKQEFRPVKRRSISTCRHWLSGILKCSVCGATMSYNGGGKSRPDAVFACWKYAKGLHKESCSVTVAKAERIVIRSLEKILETGNFEYDRIPRPASEQDSSQKVAIEVKLERLALKEERIRSAYENGIDSLEEYRTRKEQLLKERAELEAELASLEPADCSPALSREELLERVKTVHDLLCSPDVDFETKGTALRSILKFIVFDRKADRFEFHYYIS

SEQ ID NO: 7161 - protein, 478 aa, Unknown
  Description of Unknown: Integrase B7162 sequence
  PTHR30461:SF3,cd00338,SM00857,IPR006118,IPR036162, PF13408,IPR025827,G3DSA:3.40.50.1390,IPR006119,SSF53041, PTHR30461,PS00397,PS51736,Coil,PF00239
MTNQAERTSYIENVAAYIRVSTQEQKLHGISIEAQEEKLNEYADSHGMKIVKFYKDEGVSGRKLIRKRPALQAMIQDAEKGNFRRIIFIKLDRFFRSVAEYHECMKRLAAGGVIWTATEEKYDLSTPSGEAFVNMKLTMAQFEADQVGERIRMINEYKVKSGQPLYGSQALPFCYQVKQSGDGDRRKYIAKRDEIIMEDLIDHFCKNRSVRAALHYINAKYSRAFSYSTIKNALTSELICGTYRGNPAYCEGYMTPAAFETMQKYIQHNPRTSQREHSYIFGGLIRCPCCGNMLVGSPTVLNRIGKSGQKLSYKYYGYRCYRGNLEKKCDFRTMAFEHRLEAIMLSEVEAVMRGKQMYLLRLQNAPQRVAQHDLAELQQELARLNYAWQKGRIKTAADYDRQYDDLMTRIDAANAERQELAANPDYRKISRILSDGWKQLYISLDNDHKRAFWRAFIEEIQLEWTKDVKRIRDITFFT

SEQ ID NO: 7162 - protein, 478 aa, Unknown
  Description of Unknown: Integrase B7163 sequence
  PTHR30461:SF3,cd00338,SM00857,IPR006118,IPR036162, PF13408,IPR025827,G3DSA:3.40.50.1390,IPR006119,SSF53041, PTHR30461,PS00397,PS51736,Coil, PF00239
MTNQAEKTSYIENVAAYIRVSTQEQKLHGISIEAQEEKLTEYADSHGMKIVKFYKDEGVSGRKLIRKRPALQAMIQDAEKGNFRRIIFIKLDRFFRSVAEYHECMKRLAAGSVIWTATEEKYDLSTPSGEAFVNMKLTMAQFEADQVGERIRMINEYKVKSGQPLYGSQALPFCYQVKQSGDGDRRKYIAKRDEIIMEDLIDHFCKNRSVRAALHYINAKYSRAFSYSTIKNALTSELICGTYRGNPAYCEGYMTPAAFETMQKYIQHNPRTSQREHSYIFGGLIRCPCCGNMLVGSPTVLNRIGKSGQKLSYKYYGYRCYRGNLEKKCDFRTMAFEHRLEAIMLSEVEAVMRGKQMYLLRLQNAPQRVAQHDLAELQQELARLNYAWQKGRIKTAADYDRQYDDLMARIDAANAERQELAANPDYRKISRILSDGWKQLYISLDNDHKRAFWRAFIEEIQLEWTKDVKRIRDITFFT

SEQ ID NO: 7163 - protein, 478 aa, Unknown
  Description of Unknown: Integrase B7164 sequence
  PTHR30461:SF3,IPR036162,PS51737,IPR011109,PTHR30461, PS00397,PF00239,G3DSA:1.10.10.2600,IPR006119,SSF53041, SM00857,IPR025827,IPR038109,PS51736,cd03768, IPR006118,PF13408,G3DSA:3.40.50.1390,PF07508,Coil
MNKVAIYVRVSTQEQANEGYSIQEQTERLTKYCEAHGWIVAKVYSDPGFSGANRNRPALQLLCSDITKSVFDTVLVYKLDRLSRSQKDTLYMIEDIFLKNNIAFISMSENFDTGTPFGRAMIGILSVFAQLERDQIRERMQMGLDARAKDGYFHGGGYAPVGYDYDNGLLTVNEYEATIVRKAYDLFLGGMPIHSTWVSLCREYPAGTRFGQLTYSTVASMLTSILYAGFISWKGETYPGKHEAIIPYERFQEAQRLIQRRRIEEPQRLSAFLHTSILGGLIFCGYCGARYYCKTNTASKKSHIIQRYYTCYSRGKSNARMIRDPNCKNKSWNTKKLDSIILAEISKLELSRDFDSYNIAPDNSGRIASLTAALANTDKKLEKLIDLYAADTIPVNLLNTRIAKLNAEKEALEAELTSLQTAPEPDLSVEKANEILDGFQTVLDSGDDNLLRDLVRSLIDSIVIRSEEIEIHWKFSAF

SEQ ID NO: 7164 - protein, 478 aa, Unknown
  Description of Unknown: Integrase B7165 sequence
  PTHR30461:SF3,cd00338,SM00857,IPR006118,IPR036162, PF13408,IPR025827,G3DSA:3.40.50.1390,IPR006119,SSF53041, PTHR30461,PS00397,PS51736,Coil,PF00239
MTNQAEKTSYIENVAAYIRVSTQEQKLHGISIEAQEEKLNEYADSHGMKIVKFYKDEGVSGRKLIRKRPALQAMIQDAEKGNFRRIIFIKLDRFFRSVAEYHECMKRLAAGGVIWTATEEKYDLSTPSGEAFVNMKLTMAQFEADQVGERIRMINEYKVKSGQPLYGSQALPFCYQVKQSGDGDRRKYIAKRDEIIMEDLIDHFCKNRSVRAALHYINAKYSRAFSYSTIKNALTSELICGTYRGNPAYCEGYMTPAAFETMQKYIQHNPRTSQREHTYIFGGLIRCPCCGNMLVGSPTVLNRIGKSGQKLSYKYYGYRCYRGNLEKKCDFRTMAFEHRLEAIMLSEVEAVMREKHMYLLRLQSAPQRVAQHDLAELQQELARLNYAWQKGRIKTAADYDRQYDDLMARIDAANAERQELNAKPDYRKISRILSEGWKQLYISLDNDHKRAFWRAFIEEIQLEWTKDVKRIRDITFFT

SEQ ID NO: 7165 - protein, 478 aa, Unknown
  Description of Unknown: Integrase B7166 sequence
  PTHR30461:SF3,SM00857,G3DSA:1.10.10.2600,IPR036162,PF13408, PS51737,IPR025827,G3DSA:3.40.50.1390,IPR006119,IPR038109, PF07508,IPR011109,SSF53041,PTHR30461, PS51736,cd00338,PF00239
MKYAAAYIRVSDDRQDEYSPDSQLKLIRQYAKNNDYIVPDEYVFYDDGISGRSVKKRKAFNSMIGYAKSKEHPFDAILVWKFSRFARNQEESIVYKSMLRKINVAVISVSETIDDSPFAPLIERIIEFMDEYYSTRLSQEVTRGMTEKASRGEAMSAAPFGYDSQGKSFIPNDDAKIVNYIYDSYLSGKGYRAIAQELGTMGIRTKRGNIPDNRFVEYILQNPVYIGKIRWSPECKGSKSRYKGDNSSVMIVDGKHEAIIDTAKFEQVQDMIADQKKRYGKYQRKEQPVQFMLKGLVRCGNCGATLVYVGTKYPAMQCHQYARGVCKVSHSLSIAKANRVVIDKIEETLKTLDFNIIYKTQNNPQENIDYDKLIKQEKEKIRRASEAYDAGFDTLEEYGIKKRTYQSRISEYESAKIQQPKKKNDTIPNEFLEKCQNVLKIIKSPEADEAAKNEALRTIIDHITYEKEDNNLAIYFYL

SEQ ID NO: 7166 - protein, 478 aa, Unknown
  Description of Unknown: Integrase B7167 sequence
  PTHR30461:SF3,SM00857,G3DSA:1.10.10.2600,IPR036162,PS51737, G3DSA:3.40.50.1390,IPR006119,IPR038109,PF07508,IPR011109, SSF53041,PTHR30461,Coil,PS51736,cd00338, PF00239
MKYAAAYIRVSDDRQDEYSPYSQLKLIRQYAKNNDYIVPDEYVFYDDGISGRSVKKRKAFNSMIGYAKSKEHPFDAILVWKFSRFARNQEESIVYKSMLRKINVAVISVSETIDDSPFAPLIERIIEFMDEYYSTRLSQEVTRGMTEKASRGEVMTIAPFGYDLKNKTYIPNDNAKTVNYIYDSYLAGKGYRAIAQELAAMGIRTKRGNIPDNRFVEYILQNPVYIGKIRWSPEGKQSKQRYKGDNSNVMIIDGKHEAIIDTDKFERVQDMIADQKKRYGKYQRREQPVQFMLKGLMRCGNCGATLVYVGTQSPAMQCHQYARGVCKVSHSLSIAKANRVVIDKIEETLKTLDFNIIYKTQNNPQENIDYDKLIKQEKEKIRRASEAYDAGFDTLEEYGVKKRTYQSRIDEYEKAKSKVPPKESKAVPKEFVDKVASVLKTIKSPETDEAVKNEALRSVIDHITYEKEANNLAIYFYL

SEQ ID NO: 7167 - protein, 478 aa, Unknown
  Description of Unknown: Integrase B7168 sequence
  PTHR30461:SF3,SM00857,G3DSA:1.10.10.2600,IPR036162,PF13408, PS51737,IPR025827,G3DSA:3.40.50.1390,IPR006119,IPR038109, PF07508,IPR011109,SSF53041,PTHR30461,Coil, PS51736,cd00338,PF00239
MKYAAAYIRVSDDRQDEYSPDSQLKLIRQYAKNNDYIVPDEYVFYDDGISGRSVKKRKAFNNMIGYAKSKEHPFNAILVWKFSRFARNQEESIVYKSMLRKINVAVISVSETIDDSPFAPLIERIIEFMDEYYSTRLSQEVTRGMTEKASRGEAMSAAPFGYDSQGKSFIPNDDAKIVNYIYDSYLSGKGYRAIAQELGTMGIRTKRGNIPDNRFIEYILQNPVYIGKIRWSPECKGSKSRYKGDNSSVMIVDGKHEAIIDTAKFEQVQDMIADQKKRYGKYQRKEQPVQFMLKGLVRCGNCGATLVYVGTKYPALQCHQYARGVCKVSHSLSIAKANRVVIDKIEETLKTLDFNIIYKTQSDLQENIDYDKLIKQEKEKIRRASEAYDAGFDTLEEYGIKKRTYQSRISEYESAKIQQPQKKNDTIPNEFLEKCQNVLKIIKSPEADEAAKNEALRTIIDHITYEKEDNNLAIYFYL

SEQ ID NO: 7168 - protein, 478 aa, Unknown
  Description of Unknown: Integrase B7169 sequence
  PTHR30461:SF3,IPR036162,PS51737,IPR011109,PTHR30461, PS00397,PF00239,PS50942,IPR013809,G3DSA:1.10.10.2600, IPR006119,SSF53041,SM00857,IPR025827,IPR038109,PS51736 ,cd03768,IPR006118,PF13408,G3DSA:3.40.50.1390,PF07508,Coil
MNKVALYVRVSTTSQLEEGYSIEEQKAKLESYCDIKDWHVYKVYTDGGFSGSTTERPALEQLIKDAQSKLFDTVLVYKLDRLSRSQKDTLYLIEDIFLKNNIEFVSLLENFDTSTPFGRAVIGLLSVFAQLEREQIKERMQLGKLGRAKSGKSMMWAKTSYGYNYNKDTGTMTVNEYEALAVKEIFTSYLAGMSITKLRDKINGEYPKQPAWSYRTIRGILANPVYCGLNQYKGQTFQGTHKAIISLDDFEQTQRELAKRQQTAKELSNPRPFQAKYMLSGLAQCGYCHAPLKVILGAVRKDGTRFKRYECYQRHPRKTRGVTVYNDNKKCESGYYDMELLEHYVLTRIAQLQNDPDKIKELFSDDASPAVDRQAIQKQIDSLTLKLSKLNDLYLDDRITLDELRTKSADFIKQRSSLEAEIKKASNDEQAGQREKIEKLLDASSVLDMSYDNQKVIVRELIDKVQVTSDKIVIRWKI

SEQ ID NO: 7169 - protein, 478 aa, Unknown
  Description of Unknown: Integrase B7170 sequence
  PTHR30461:SF3,SM00857,G3DSA:1.10.10.2600,IPR036162,PF13408, IPR025827,G3DSA:3.40.50.1390,PS51737,IPR006119,IPR038109, PF07508,IPR011109,SSF53041,PTHR30461,Coil, PS51736,cd00338,PF00239
MKYAAAYIRVSDDRQDEYSPDSQLKLIRQYAKSNDYIVPDEYVFYDDGISGRSVKKRKAFNSMIGYAKSKEHPFDAILVWKFSRFARNQEESIVYKSMLRKINVAVISVSETIDDSPFAPLIERIIEFMDEYYSTRLSQEVTRGMTEKASRGEVMTIAPFGYDLKNKTYVPNDNAKNVNYIYDSYLAGKGYRAIAQELAAMGIRTKRGNIPDNRFVEYILQNPVYIGKIRWSPEGKQSKQRYKGDNSNVMIIDGKHEAIIDTDKFERVQDMIADQKKRYGKYQRREQPVQFMLKGLMRCGNCGATLVYVGTQSPAMQCHQYARGVCKVSHSLSVAKANRVVIDKIEETLKTLDFNIIYKTQNNPQENIDYDKLIKQEKEKIRRASEAYDAGFDTLEEYGVKKRTYQSRIDEYENAKSKVPPKESKAVPKKFVDKVASVLKTIKSPETDETVKNEALRSVIDHITYEKEANNLAIYFYL

SEQ ID NO: 7170 - protein, 478 aa, Unknown
  Description of Unknown: Integrase B7171 sequence
  PTHR30461:SF3,IPR036162,PS51737,IPR011109,PTHR30461, PS00397,PF00239,G3DSA:1.10.10.2600,IPR006119,SSF53041, cd00338,SM00857,IPR025827,IPR038109,PS51736, IPR006118,PF13408,G3DSA:3.40.50.1390,PF07508,Coil
MLIGAAYIRVSTDDQLDLSPDSQLDEIKKYAAANDIVLSPDYIFMEQDGRSGKKAENRPEFQRMISTAKVKPKPFDCILVWKFSRFARNQDESTFYKGMLRKKLGIDVVSVSEPIMEGMYGRLIEMIIEWQDEFYSYNLGVEVKRGMTKKAELKGYQIVPCLGYAAVGNGKPFVIVEDEYKIVEDIFRMYALENLDRTAIARRLNAQGKKAKRGNPFEQRTITRILTNPFYNGTVSWNGISFQGSHETRQSVTDLYDICQERLKQEFRPVKRRSISTCRHWLSGILKCSVCGATMSYNGGGKSRPDAVFACWKYAKGLHKESCSVTVAKAERIVIRSLEKILETGNFEYDLIPRPASEQDSSQKVAIGVKLERLALKEERIRAAYENGIDSLEEYRTRKEQLLKERAELEAELASLEPADCSPALSREELLERVKTVHDLLCSPDVDFETKGTALRSILKFIVFDRKADRFEFHYYIS

SEQ ID NO: 7171 - protein, 478 aa, Unknown
  Description of Unknown: Integrase B7172 sequence
  PTHR30461:SF3,SM00857,G3DSA:1.10.10.2600,IPR036162,PF13408, PS51737,G3DSA:3.40.50.1390,IPR025827,IPR006119,IPR038109, PF07508,IPR011109,SSF53041,PF00239,PTHR30461, PS51736,Coil,cd00338
MTIIGEYCDRAISGKTDNRPNFQRLIKDSEKGQFEAVIMYTLDRFARNRYDSAIYKAKLKKNGVRVYYAKQPMPDTPEGIILESVLEGYAEYYSENLSRNIKRGMKENALQCLANGGAGMPLGYIVGEDRKYKIDPVGAKIVQEIFQMYADGMSATQIINECNKRGYKTSRGNAFNKNSLRTMLKNDRYIGIYRFADVIVENGIPPIISRELFDKVQAMLKHNYSARARKKAKDDYLLTTKLFCGHCGSAMVGESGTSKSGKLHHYYKCIDRKRNRKCKKAVEKKDWIEELVVRFTVQKVLTDENIERISARAMEIIEKESTDTTYIDGLQNELKDIKKKIKNLMNAIEQGIITSTTKERMNELELEKNEVEGKIAREEMKKPLLTKERIMYWLYSFKSGDIDDIEYRRRVIDTLVNSVYVYDDGEKGRRIVFTFNISGQNTATLSCSDIACAAPPRKAVKFHISQLFATIWRDFRGY

SEQ ID NO: 7172 - protein, 478 aa, Unknown
  Description of Unknown: Integrase B7173 sequence
  PTHR30461:SF3,IPR036162,PS51737,IPR011109,PTHR30461, PS00397,PF00239,G3DSA:1.10.10.2600,IPR006119,SSF53041, SM00857,IPR025827,IPR038109,PS51736,cd03768, IPR006118,PF13408,G3DSA:3.40.50.1390,PF07508
MQKRCFIYIRVSTQRQAEEGYSIPEQKERLEKYADAMDWKIMHTYIDGGYSGGNTDRPALQDMLREVERGNTDIILVDKIDRFARNLVDTVNILENVLNPHGVAFVSRAEAFDSSSQIGKFCLYILAMFAEMERTRIKERMADGKTGRAKEGKYKGGGHIPIGYDYDQESGALVPNEYEAAQVREIFDLFNSRTAIHTIMVQMNKKGYRTKYGEWGEGTIRYMVSNRVYLGEISHKGEWYAGLHKPIIERAVFDHAQQVLKEREKTWERYRPGKRYRSPLGGLIWCERCMAKYQLRNNGHNKDGAMRAYYMCYSRAKSDPKMVKDPNCKNKTYRDRDLEKIVYEEIRKLKTDPSYYPTITQSRDNAPQRKMLEKRVAQIDGQISRLMDLYMLGTIDVQAIQSKTTPLNNEKNALLAQIENLKDAAPKMSLERVLELVNMFETELAANDRTSGKLHDTIAEIIEHIGIDGEEVHIHWAF

SEQ ID NO: 7173 - protein, 478 aa, Unknown
  Description of Unknown: Integrase B7174 sequence
  PTHR30461:SF3,SM00857,G3DSA:1.10.10.2600,IPR036162,PS51737, G3DSA:3.40.50.1390,IPR006119,IPR038109,PF07508,IPR011109, SSF53041,PTHR30461,Coil,PS51736,cd00338, PF00239
MKYAAAYIRVSDDRQDEYSPDSQLKLIRQYAKNNDYIVPDEYVFYDDGISGRSVKKRKAFNNMIGYAKSKEHPFDAILVWKFSRFARNQEESIVYKSMLRKINVAVISVSETIDDSPFAPLIERIIEFMDEYYSTRLSQEVTRGMTEKASRGEVMTIAPFGYDLKNKTYIPNDNAKTVNYIYDSYLAGKGYRAIAQELATMGIRTKRGNIPDNRFVEYVLQNPVYIGKIRWSPEGKQSKQRYKGDNSNVMIIDGKHEAIIDTDKFERVQDMIADQKKRYGKYQRREQPVQFMLKGLMRCGNCGATLVYVGTKSPAMQCHQYARGVCKVSHSLSIAKANRVVIDKIEETLKTLDFNIIYKTQNNPQENIDYDKLIKQEKEKIRRASEAYDAGFDTLEEYGVKKRTYQSRIDEYEKAKSKVPSKENKAVPKEFVDKVASVLKTIKSPETDEAVKNEALRSVIDHITYEKEDNNLAIYFYL

SEQ ID NO: 7174 - protein, 478 aa, Unknown
  Description of Unknown: Integrase B7175 sequence
  PTHR30461:SF3,IPR036162,PS51737,IPR011109,PTHR30461, PS00397,PF00239,G3DSA:1.10.10.2600,IPR006119,SSF53041, SM00857,IPR025827,IPR038109,PS51736,cd03768, IPR006118,PF13408,G3DSA:3.40.50.1390,PF07508,Coil
MNKVAIYVRVSTTNQAEEGYSIEEQIDKLKAYCMIKDWSVYDVYVDAGFSGSNIKRPAIQKLIKDTKRKVFDTVLVYKLDRLSRSQKDTLYLIEDVFLENKIDFVSLLENFDTSTAFGKAMVGILSVFAQLDREQIKERMQLGKLGRAKSGKPMMWAKVAYGYTYHIGTGKMTVNQSEAIIVKEVFSSYLNGRSITKLRDDLNEKYPKTPAWSYRTIRQMLDNPVYCGYNKYKGQVYPGNHAPIISKEIYNQVQDELKIRQQKAYEHNNNYRPFQSKYMLSGIAQCGYCKAPLKITLGTIRKDGTRFKRYQCVQRTPRKTKGATIYNNNEKCNSGFYEKDDIEAYVLESISKLQTDSNCIDDLFNDEPEKLDRDALNKEIEALSNKISRLNDLYINNLIALDDLKTKTDTLQSKIDILKERLEKDPALERQKNKQKMLKTLDTKDIFKMDYEEQKMLVRALINKVQVTADSIKILWKI

SEQ ID NO: 7175 - protein, 478 aa, Unknown
  Description of Unknown: Integrase B7176 sequence
  IPR036162,PS51737,IPR011109,PTHR30461,PS00397, PF00239,G3DSA:1.10.10.2600,IPR006119,SSF53041,cd00338, SM00857,IPR025827,IPR038109,PS51736,IPR006118, PF13408,G3DSA:3.40.50.1390,PF07508,Coil
MKTVCAYIRVSTDSQEEYSPDAQIRLLKEYAASHDMTIIDIYQDLGISGRNADKRPQFQDMIAMAKSKEHPYDAILVWKFSRFARNQEESIVYKSLLKKNHVDVVSVSEPLPDGVIGELVERIFEWMDEYYSIRLSGEVRRGMTQKALAGGYNSNVPIGYTKERGPDAIPQIDEYYGPMVQRCFHMFAIEHIPMTKIAATINNLGYRTRTGKRWETRNITDMFQNPFYIGKIRWNSASSRRTTPRVGKEIIRDGKHQPLIDQELWDATQERYAKITARMGHGKRPDIYKHWLSGLLKCPNCGGTLAYQNGLDTKTGKHYPYFVCWKNVKGMCATRNSISAGKAAQYVLDGLLNIVEDKDIKTIAPIVQFNQDEAAIAKQIASVKAKLGRVKEAYVNGIDTLEEYKANKEKLEAEIAHLKELVVPEVKPKTVTVDVIRTVHDTIMNAQSDSEKATAINSIVDHIIYDKEADTMEFFFIP

SEQ ID NO: 7176 - protein, 478 aa, Unknown
  Description of Unknown: Integrase B7177 sequence
  PTHR30461:SF3,IPR036162,PS51737,IPR011109,PTHR30461, PS00397,PF00239,G3DSA:1.10.10.2600,IPR006119,SSF53041, SM00857,IPR025827,IPR038109,PS51736,cd03768, IPR006118,PF13408,G3DSA:3.40.50.1390,PF07508,Coil
MKKAAIYVRVSTQEQATEGYSIQEQTERLTKYCEAHGWIVAKVYTDPGFSGANRNRPALQLLCSDVTKSVFDTVLVYKLDRLSRSQKDTLYIIEDVFLKNNISFVSMNENFDTGTPFGRAMIGILSVFAQLERDQIRERMQMGHDARAKEGYFHGGGYAPIGYDYNNGLLTINEYEATIVRRAYDLYLGDMPVHSIYLTLSKEFPAGSRFGPITYSTVESMLKTILYAGFISWKGNIYPGKHEAIIPYERFQEVQNIIKRRRIEEPQRLSAFLHTTILSGIVFCGYCGARYYCKNNSPSRKSRIVQKYYTCYSRGKSNKLMIRDPNCRNKSWNVKKLDAIILEEISKLDLSRDFESYNTAPDYSARIESLSAALDATDKKLEKLIDLYTSDAIPVHVLNERITKLNAEKETLETELASLLEVPEPDLSIEKANEILDGFQTVLASGDHDLIRGLVRSLIDSIIIRDEEIEIHWKFTVF

SEQ ID NO: 7177 - protein, 478 aa, Unknown
  Description of Unknown: Integrase B7178 sequence
  PTHR30461:SF3,IPR036162,PS51737,IPR011109,PTHR30461, PS00397,PF00239,G3DSA:1.10.10.2600,IPR006119,SSF53041, cd00338,SM00857,IPR025827,IPR038109,PS51736, IPR006118,PF13408,G3DSA:3.40.50.1390,PF07508,Coil
MLIGAAYIRVSTDDQLDLSPDSQLDEIKKYAAANDIVLSPDYIFMEQEGRSGKKAENRPEFQRMISTAKVKPKPFDCILVWKFSRFARNQDESTFYKGMLRKKLGIDVVSVSEPIMEGMYGRLIEMIIEWQDEFYSYNLGVEVKRGMTKKAELKGYQIVPCLGYAAVGNGKPFVIVEDEYKIVEDIFRMYALENLDRTSIARRLNAQGKKAKRGNPFEQRTITRILTNPFYNGTVSWNGISFQGSHETRQSVTGLYDICQERLKQEFRPVKRRSISTCRHWLSGILKCSVCGATMSYNGGGKSRPDAVFACWKYAKGLHKESCSVTVAKAERIVIRSLEKILETGNFEYDRIPRPASEQDSSQKAAIEVKLERLALKEERIRSAYENGIDSLEEYRTRKEQLLKERAELEAELASLEPADCSPVLSREELLERVKTVHDLLCSPDVDFETKGTALRSILKFIVFDRKADRFEFHYYIS

SEQ ID NO: 7178 - protein, 478 aa, Unknown
  Description of Unknown: Integrase B7179 sequence
  PTHR30461:SF3,IPR036162,PS51737,IPR011109,PTHR30461, PS00397,PF00239,G3DSA:1.10.10.2600,IPR006119,SSF53041, SM00857,IPR025827,IPR038109,PS51736,cd03768, IPR006118,PF13408,G3DSA:3.40.50.1390,PF07508,Coil
MKKVAIYVRVSSQEQANEGYSIQEQTERLTKYCEAHGWILVKTYTDPGFTGANRNRPALQMLCADVTKSLFDTVLVYKLDRLSRSQKDTLYIIEDIFLKNGISFVSMNENFDTGTPFGRAMIGILSVFAQLERDQIRERVQMGLDARAKEGYFHGGGYAPIGYDYNNGILTVNEYEASLVRKAYSLFLDGLPIHSIYFILEKEYPAGTRFGAVTYSSVKSMLTTILYAGYIRWKGALYPGKHEAIIPYEQFQEVQRLIKRRQIDEPQRLTAFQHTTILGGIMFCGYCGARYYCKNNTASRVSRITQRYYTCYSRGKTSKRMIRDPNCKNKSWNVHKLDAIVLDEIAKLEFSRDFASYDTAPDQSGRIQSIKAALTAANKKLEKLIDLYTDDTIPVHILSERISRLNAEKETLESELSELQEAPEPDLSFDQANKILDSFKDIIATGDNDLIRNMVCSLIDSIIIRGEDIEIHWKFTSF

SEQ ID NO: 7179 - protein, 478 aa, Unknown
  Description of Unknown: Integrase B7180 sequence
  PTHR30461:SF3,IPR036162,PS51737,IPR011109,PTHR30461, PS00397,PF00239,G3DSA:1.10.10.2600,IPR006119,SSF53041, SM00857,IPR025827,IPR038109,PS51736,cd03768, IPR006118,PF13408,G3DSA:3.40.50.1390,PF07508,Coil
MNKVAVYVRVSTTSQLEEGYSIEEQKAKLESYCDIKDWNIYKIYTDGGFSGSTTDRPALEQLVQDAQSKLFDTVLVYKLDRLSRSQKDTLYLIEDIFLKNDIEFVSLLENFDTSTPFGRAVIGLLSVFAQLEREQIKERMQLGKLGRAKSGKSMMWAKTSYGYDYDKETGSMTVNEFEALAVKEIYASYLSGISITKLRDKMNAEYPKKPAWSYRTIRGILANPVYCGLNQYKGQTFQGTHKAIISLDDFEETQRELKKRQQTAQERLNPRPFQAKYMLSGLAQCGYCHAPLKVVLGQKRKDGTRTKRYECYQRHPRTTRGVTVYNDNKKCNSGYYYMDILEHYVLTRIAMLQNDPDKIQEIFSGGTSPVIDKQAIQKQIDSLSLKLSKLNDLYLDDRITLDELRSKSSDFIKQRAILEEEIKKASTDKQVGRRKKIEKLLDASSVFEMSYDNQKVIVRELIEKVQVTSDKIVIRWKI

SEQ ID NO: 7180 - protein, 478 aa, Unknown
  Description of Unknown: Integrase B7181 sequence
  IPR036162,PS51737,IPR011109,PTHR30461,PS00397, PF00239,G3DSA:1.10.10.2600,IPR006119,SSF53041,cd00338, SM00857,IPR025827,IPR038109,PS51736,IPR006118, PF13408,G3DSA:3.40.50.1390,PF07508,Coil
MKTAIYVRVSTNEQAEEGYSIDEQIDKLKKFCEVKDWQVANIYKDPGFTGSNIDRPGLKKLINDVENKKIETVLVYKLDRLSRSQKDTLFLIEDVFGINNTNFVSLNENFDTSTPFGKAMIGILAVFAQLEREQIKERMTMGKIGRAKAGKAMSWHWAPFGYTHKDDSYEVVDLEAQIVKQIFHDYLSGISITKLRDKMNDEGHIGKDIAWSYRTIRQTLDNPTYAGYTKYKDQIFPGNHEAIVSKEVYDEVQKQLEIRQKEAYKKNNNPRPFQAKYLVSGLVRCGHCGAALGLHQYAKKKDGTRTKIYKCHSRTGKKKNVTMVKADNCPSCDYPKEELENVVLSEIEKIRINPQLIQKSSHSAQEIDDTPLIKRLEELDRKLEKLVSLYLDETLSLEMLNDKKELIQKEKTAIEGKLNKTNKQKPELKISEAADILKNLKGSILKLDYEKQKIIVRKLIKQITLKDDEMVIQWRFAV

SEQ ID NO: 7181 - protein, 478 aa, Unknown
  Description of Unknown: Integrase B7182 sequence
  PTHR30461:SF3,SM00857,IPR006118,G3DSA:1.10.10.2600,IPR036162, PS51737,G3DSA:3.40.50.1390,Coil,IPR006119,IPR038109, PF07508,IPR011109,SSF53041,PTHR30461,PS00397, PS51736,cd00338,PF00239
MKIAAAYIRVSTEDQVEYSPASQLEKIQEYAKRNGYILPAEFVYTDEGISGRTAEKRPAFNAMIGVAKTKPKPFDAILLWKFSRFARNREDSIVYKSMLRKQCGIDVISISENIGDDKMSVLIEAMIEAMDEYYSINLAEEVKRGMTEKVNRGEAVTIPSFGYDIKDGIYIPNPKTAPIVKEIFSKYLSGIPMRTISIELNEQGIKTRRGNMFENRNIEYILNNPVYIGKIRWTPTGKVRRDYHNPNTVIIDGHHEPIIDIETWNAVQKKLHESNKKTKYMRDGASKRPFMLQGLVRCNACGATLCMASLTLKSLQCCGYSHGKCNISHSITIKKLDKMVLESIEQSIIMDTFKLNMRNKSDDSNKDNAISSKIAKEVKKLERAKEAYEDGVYTLEEYKASKISITAQIEKLKSQLSVVKTTNPEEKREALRNKVLNILPALRSPATPETEKNQLIKSFLERVIFYKPSGDIDLFFYI

SEQ ID NO: 7182 - protein, 478 aa, Unknown
  Description of Unknown: Integrase B7183 sequence
  PTHR30461:SF3,IPR036162,PS51737,IPR011109,PTHR30461, PS00397,PF00239,G3DSA:1.10.10.2600,IPR006119,SSF53041, SM00857,IPR025827,IPR038109,PS51736,cd03768, IPR006118,PF13408,G3DSA:3.40.50.1390,PF07508,Coil
MKKVAIYVRVSTQEQAAEGYSIQEQTERLTKYCEAHGWVIVKVYTDPGFSGANRDRPALQMLCSDVKKSMFDTVLVYKLDRLSRSQKDTLYIIEDVFEKNHIAFVSMLENFDTGTPFGRAMIGILSVFAQLERDQIRERSQMGHDARAKEGYFHGGGYAPIGYNYENGLLSINEYEATIVRRAYELFLDGLPVHSIYLTMEKEFPAGTRFGRITYSSVESMLKTILYAGFITWKGNIYPGKHEALIPYETFQEVQAIMKRRQIEEPQRLTAFQHTTILGGIVFCGYCGARYFCKTNTASKKSRIVQKYYTCYSRGKCNKKMIRDPNCQNKSWNSKKLDAVILEEISKLNLSRDFASYENAPDNSDRIASITAALSATDKKLEKLVDLYASDTIPVQILNERVAKLNAEKETLEAELDALQNAPVPDLSTEKANEILDGFQAVLASGDRDMLRNFIRSLIDSIIIRGNDIEIHWKFTVF

SEQ ID NO: 7183 - protein, 478 aa, Unknown
  Description of Unknown: Integrase B7184 sequence
  PTHR30461:SF3,IPR036162,PS51737,IPR011109,PTHR30461, PS00397,PF00239,G3DSA:1.10.10.2600,IPR006119,SSF53041, SM00857,IPR025827,IPR038109,PS51736,cd03768, IPR006118,PF13408,G3DSA:3.40.50.1390,PF07508,Coil
MKKVAIYVRVSSQEQANEGYSIQEQTERLTKYCEAHGWILAKTYTDPGFTGANRNRPALQMLCADVTKSLFDTVLVYKLDRLSRSQKDTLYIIEDIFLKNGISFVSMNENFDTGTPFGRAMIGILSVFAQLERDQIRERVQMGLDARAKEGYFHGGGYAPIGYDYNNGILTVNEYEASLVRKAYSLFLDGLPIHSIYLILEKEYPAGTRFGAVTYSSVKSMLTTILYAGYIRWKGALYPGKHEAIIPYEQFQEVQRLIKRRQIDEPQRLTAFQHTTILGGIMFCGYCGARYYCKNNTASRVSRITQRYYTCYSRGKTSKRMIRDPNCKNKSWNVHKLDAIVLDEIAKLEFSRDFASYDTAPDQSGRIQSIKAALTAANKKLEKLIDLYTDDTIPVHILSERISRLNAEKETLESELSELQEAPEPDLSFDQANKILDSFKDIIATGDNDLIRNMVRSLIDSIIIRGEDIEIHWKFTSF

SEQ ID NO: 7184 - protein, 478 aa, Unknown
  Description of Unknown: Integrase B7185 sequence
  PTHR30461:SF3,SM00857,G3DSA:1.10.10.2600,IPR036162,PF13408, IPR025827,G3DSA:3.40.50.1390,PS51737,IPR006119,IPR038109, PF07508,IPR011109,SSF53041,PTHR30461,PS51736, cd00338,PF00239
MKYAAAYIRVSDDRQDEYSPDSQLKLIRQYAKSNDYIVPDEYVFYDDGISGRSVKKRKAFNNMIGYAKSKEHPFDAILVWKFSRFARNQEESIVYKSMLRKINVAVISVSETIDDSPFAPLIERIIEFMDEYYSTRLSQEVTRGMTEKASRGEAMSAAPFGYDLQAKTFIPNDDAKIVNYIYDSYLSGKGYRAIAQELGSMGIRTKRGNIPDNRFVEYILQNPVYIGKIRWSPECKGSKSRYKGDNSSVMIVDGKHEAIIDTAKFEQVQDMIADQKKRYGKYQRKEQPVQFMLKGLVRCGNCGATLVYVGTKYPALQCHQYARGVCKVSHSLSISKANRVVIDTIEETLKTLDFNIIYKTQNNPQENIDYDKLIKQEKEKIRRASEAYDAGFDTLEEYGIKKRTYQSRISEYESAKIQQPKKKNDTIPNEFLEKCQNVLKIIKSPEADEAAKNEALRTIIDHITYEKEDNNLAIYFYL

SEQ ID NO: 7185 - protein, 478 aa, Unknown
  Description of Unknown: Integrase B7186 sequence
  PTHR30461:SF3,SM00857,G3DSA:1.10.10.2600,IPR036162,PS51737, G3DSA:3.40.50.1390,IPR006119,IPR038109,PF07508,IPR011109, SSF53041,PTHR30461,Coil,PS51736,cd00338, PF00239
MKYAAAYIRVSDDRQDEYSPDSQLKLIRQYAKNNDYIVPDEYVFYDDGISGRSVKKRKAFNNMIGYAKSKEHPFDAILVWKFSRFARNQEESIVYKSMLRKINVAVISVSETIDDSPFAPLIERIIEFMDEYYSTRLSQEVTRGMTEKASRGEVMTIAPFGYDLKNKTYIPNDNAKTVNYIYDSYLAGKGYRAIAQELAAMGIRTKRGNIPDNRFVEYILQNPVYIGKIRWSPEGKQSKQRYKGDNSNVMIIDGKHEAIIDTDKFERVQDMIADQKKRYGKYQRREQPVQFMLKGLMRCGNCGATLVYVGTQSPAMQCHQYARGVCKISHSLSIAKANRVVIDKIEETLKTLDFNIIYKTQNNPQENIDYDKLIKQEKEKIRRASEAYDAGFDTLEEYGIKKRTYQSRIDEYEKAKSKVTPKESKAVPKEFVDKVASVLKTIKSPETDEAVKNEALRSIIDHITYEKEANNLAIYFYL

SEQ ID NO: 7186 - protein, 478 aa, Unknown
  Description of Unknown: Integrase B7187 sequence
  IPR036162,PS51737,IPR011109,PTHR30461,PS00397, PF00239,G3DSA:1.10.10.2600,IPR006119,SSF53041,cd00338, SM00857,IPR025827,IPR038109,PS51736,IPR006118, PF13408,G3DSA:3.40.50.1390,PF07508,Coil
MKTVCAYIRVSTDSQEEYSPDAQIRLLKEYAASHDMTIIDIYQDLGISGRNADKRPQFQDMIAMAKSKEHPYDAILVWKFSRFARNQEESIVYKSLLKKNHVDVVSVSEPLPDGVIGELVERIFEWMDEYYSIRLSGEVRRGMTQKALAGGYNSNVPIGYTKERGPDTIPQIDEYYGPMVQRCFHMFAIEHIPMTKIAATINNLGYRTRTGKRWETRNITDMFQNPFYIGKIRWNSASSRRTTPRVGEEIIRDGKHQPLIDQELWDATQERYAKITARMGHGKRPDIYKHWLSGLLKCPNCGGTLAYQNGLDTKTGKHYPYFVCWKNVKGMCATRNSISAGKAAQYVLDGLLNIVEDKDIKTIAPIVQFNQDEAAIAKQIASVKAKLGRVKEAYVNGIDTLEEYKANKEKLEAEIAHLKELVVPEVKPKTVTVDVIRTVHDTIMNAQSDSEKATAINSIVDHIIYDKEADTMEFFFIP

SEQ ID NO: 7187 - protein, 478 aa, Unknown
  Description of Unknown: Integrase B7188 sequence
  PTHR30461:SF3,IPR036162,PS51737,IPR011109,PTHR30461, PS00397,PF00239,G3DSA:1.10.10.2600,IPR006119,SSF53041, cd00338,SM00857,IPR025827,IPR038109,PS51736, IPR006118,PF13408,G3DSA:3.40.50.1390,PF07508,Coil
MLIGAAYIRVSTDDQLDLSPDSQLDEIKKYATANDIVLSPDYIFMEQEGRSGKKAENRPEFQRMISTAKVKPKPFDCILVWKFSRFARNQDESTFYKGMLRKKLGIDVISVSEPIMEGMYGRLIEMIIEWQDEFYSYNLGVEVKRGMTKKAQLNGYQIVPCLGYAAVGNGRPFVIVEDEYKIVEDIFRMYALENLDRTAIARRLNAQGKTAKRGNPFEQRTITRILTNPFYNGTVSWNGISFQGSHETRRSVTDLYDICQERLKREFRPVKRRSVSACRHWLSGLLKCSVCGATMSYNGGGKSRPDAVFACWKYAKGLHKESCSVTVAKAERIVIRSLEKILETGNFKYDRIPQPVSEQAAGQKAAVEEKLERLSLKEERIRAAYENGIDSLEEYRERKERLAAERKELEEELASLEPASCSPAPSREELLKRVKTVHDLLCSPDVDFETKGTALRSILKFIVFDRKAERFEFHYYIS

SEQ ID NO: 7188 - protein, 478 aa, Unknown
  Description of Unknown: Integrase B7189 sequence
  PTHR30461:SF3,IPR036162,PS51737,IPR011109,PTHR30461, PS00397,PF00239,G3DSA:1.10.10.2600,IPR006119,SSF53041, SM00857,IPR025827,IPR038109,PS51736,cd03768, IPR006118,PF13408,G3DSA:3.40.50.1390,PF07508,Coil
MNKVALYVRVSTTSQLEEGYSIEEQKAKLESYCDIKDWHVYKVYTDGGFSGSTTERPALEQLIKDAQSKLFDTVLVYKLDRLSRSQKDTLYLIEDIFLKNNIEFVSLLENFDTSTPFGRAVIGLLSVFAQLEREQIKERMQLGKLGRAKSGKSMMWAKTSYGYNYDKETGSMTVNEYEALAVKEIFTSYLAGMSITKLRDKINGEYPKQPAWSYRTIRGILANPVYCGLNQYKGQTFQGTHKAIISLDDFEQTQRELAKRQQTAKELSNPRPFQAKYMLSGLAQCGYCHAPLKVILGAVRKDGTRFKRYECYQRHPRKTRGVTVYNDNKKCESGYYDMDLLEHYVLTRIAQLQNDPDKIKELFSDDTSPAVDKQAIQKQIDSLTLKLSKLNDLYLDDRITLDELRSKSADFIKQRATLEEEIKKAVTDKQAGKREKIEKLLDASSVLDMSYDNQKVIVRELIEKVQVTSDKVVIRWKI

SEQ ID NO: 7189 - protein, 477 aa, Unknown
  Description of Unknown: Integrase B7190 sequence
  PTHR30461:SF3,IPR036162,PS51737,IPR022019,IPR011109,PTHR30461 ,PS00397,PF00239,PF12207,G3DSA:1.10.10.2600,IPR006119,SSF53041 ,cd00338,SM00857,IPR038267,IPR025827,IPR038109,PS51736, IPR006118,PF13408,G3DSA:3.40.50.1390,G3DSA:1.10.3950.10,Coil
MSIIEEQVKRNQYIEEVAAYIRVSTQEQKLHGISIEAQIEKLTEYAEKHGMKIVEWYKDEGVSGRKLIKKRPELQRMIQDAEKGKFKRIIFIKLDRFFRSVAEYHECMKRLAVGGVIWTATEEKYDLSTPSGEAFVNMKLTMAQFEADQAGERIRMVNEYKIKSGQPLFGAQCLPFGYTVSAPENGERHKYIAKEHEEIAMDLINHALTHGAIRGAMSYVNNKYGMNLSYNACINMLKNEMICGEYKGNPNYCEPYISREEFDRLQKLISRTPRDTGEKRTYIFSGLILCPNCGRRLTGGTHSPNKGIRNVTYKTYRCNSKLRDKKCDYGNTVFEETLEKVLLDKIESIVDRKMIEINAIEAESEKTGKYNVAELQAELDRLNYSWQKNRIKSAEEYDRKYDAIVEKIEAAQAEQQQMGHVDYERIQCLFQSGWRDLYNSLDDEHKRSFWRSFIEEIEIDWGKGRYGKRDIKDITFF

SEQ ID NO: 7190 - protein, 477 aa, Unknown
  Description of Unknown: Integrase B7191 sequence
  PTHR30461:SF3,cd00338,SM00857,G3DSA:1.10.10.2600,IPR036162, PF13408,IPR025827,G3DSA:3.40.50.1390,PS51737,IPR006119, IPR038109,PF07508,IPR011109,SSF53041,PTHR30461, PS51736,Coil,PF00239
MKYAAAYIRVSDDRQDEYSPDSQLKLIREYAGRNGYCVPDEYVFYDDGISGRSVKKRKAFNDMIAFAKSKEHPFQAILVWKFSRFARNQEESIVYKSMLRRIGVSVISISETIDDSPFAPLIERIIEFMDEYYSPRLSQEVTRGMTEKASRGEAMSAGAFGYDLQNKVFTPNEDAPTVRYIFNAFLSGKGYRKIAMELDAMGVKTYRGNPPDNRFVEYVLMNPVYAGKIRWSTDGRASRDRYKGDNSKVMYVDGKHQPIIDQDTFDQVQEKIMEQKRRYGKWQRKEQPVTFMLKGLLRCDTCGATLTYIAARDPAVQCHNYARGKCKVSHYLSIRKANAAVIAAIEKSLETLEFNVLPKEQLQNEVVDYSLLIRKEEEKIKRASDAYDAGYDTLEEYGRKKRAFQNKIEALKAEQTKTEEAQSSEIPPQFVQQASFVLNLIKSPDTAESVKNEALRSIVDHITFKKPDNTLEIFYYI

SEQ ID NO: 7191 - protein, 477 aa, Unknown
  Description of Unknown: Integrase B7192 sequence
  PTHR30461:SF3,SM00857,IPR006118,G3DSA:1.10.10.2600,IPR036162, PS51737,G3DSA:3.40.50.1390,Coil,IPR006119,IPR038109, PF07508,SSF53041,IPR011109,PTHR30461,PS00397, PS51736,cd00338,PF00239
MKIAAAYIRVSTDDQIEYSPDSQRKAILDYAKRNDYIVPQEYIFVDEGISGRSTKRPAFQQMIGTAKQKSHPFDAILVWKFSRFARNREDSVVYKSMLRKQCGVEVVSISEQIGEDKTSILIEALLEAMDEYYSINLSEEVVRGMSEKARRGGTLGRAPFGYTAKNGELLPNEDAKTVQWIFNAFLNGTGMRTIATQLNSSGIRTAYGKPWENRTVEYVLRNITYAGHQHWTPGGTKDMKHAEKIKRNTIVKNNAHTAIVSEEQFAAVQEKIAENKRKYKKHEQPEVGIPFLGKGLLRCSDCGGALCMLGRGNGIQCHNYAHGKCNVSHYIKLEYIDKMIVDKIKSDVEAQNFRTILIPENAAESQEMQDNKRALERARKKLARVREAYENGIDTIEEYRQNKARIQKEIEELEAKPAPPKETQESAAEKLRQRILSNVTLLESDAPAGLKNDMLHTFVSRIVFDRKSTRVKVEYHG

SEQ ID NO: 7192 - protein, 477 aa, Unknown
  Description of Unknown: Integrase B7193 sequence
  PTHR30461:SF3,SM00857,IPR006118,G3DSA:1.10.10.2600,IPR036162, PS51737,G3DSA:3.40.50.1390,Coil,IPR006119,IPR038109, PF07508,IPR011109,SSF53041,PTHR30461,PS00397, PS51736,cd00338,PF00239
MKIAAAYIRVSTDDQIEYSPDSQRKAILDYAKRNDYIVPQEYIFVDEGISGRSTKRPAFQQMIGTAKQKSHPFDAILVWKFSRFARNREDSVVYKSMLRKQCGVEVVSISEQIGEDKTSILIEALLEAMDEYYSINLSEEVVRGMSEKARRGGTLGRAPFGYTAKNGELLPNDDAKTVQWIFNAFLNGTGMRTIATQLNSSGIRTAYGKPWENRTVEYVLRNITYAGHQHWTPGGTKDMKHAEKIKGNTIVKNNAHTAIVSEEQFAAVQEKIAENKRKYKKHEQPEVGIPFLGKGLLRCSDCGGALCMLGRGNGIQCHNYAHGKCNVSHYIKLEYIDKMIVDKIKSDVEAQNFRTILIPENAAESQEMQDNKRALERARKKLARVKEAYENGIDTIEEYRQNKARIQKEIEELEAKPAPPKETQESAAEKLRQRILSNVTLLESDAPAGLKNDMLHTFVSRIVFDRKNTRVEVEYHG

SEQ ID NO: 7193 - protein, 477 aa, Unknown
  Description of Unknown: Integrase B7194 sequence
  PTHR30461:SF3,SM00857,G3DSA:1.10.10.2600,IPR036162,PF13408, IPR025827,G3DSA:3.40.50.1390,PS51737,IPR006119,IPR038109, PF07508,IPR011109,SSF53041,PTHR30461,Coil, PS51736,cd00338,PF00239
MKDSKSKTVIIYNRVSTIMQDKNESLTEQTDECIRYCKTNGYEIYKILKDVKSGTKDDRAGYLELKKHIKRRDFDILVVLETSRIARKMKELVLFFSLLNENNIEYISIREPNYNTTTPDGKFAMNIRLGLIQFERDNTAERVTDRLYFKASKGQWVNGKPPIGYKLVNKRLEIDEEKAEIVRNIYDDFLNGYSLNQINNKLQFSWGSKQVKRILTNPTYKGYIRYGARSNRKKNNREAFIVKGWHEAIIPEDKWEKVQEMYKSLNRKASNTKPTLLSGLLKCKECGNNYIRKRGGSYDKNLYYGCNLNNLRYSDKFFYKDIPECSSATIKGDLLEKAVIDTLKKQINDLNFNDIEIDKKRQVNIKQIDNSINKFKNRLNKIYELYIEDEIPKDKYLKDKKDIEARIISLEKQKKSFGEIEVEKSNNEMIQEYFSKIDLSNIEEANRILKIIVNKIVVYKKKKTPKDDFEVEIYLNI

SEQ ID NO: 7194 - protein, 477 aa, Unknown
  Description of Unknown: Integrase B7195 sequence
  PTHR30461:SF3,SM00857,G3DSA:1.10.10.2600,IPR036162,PF13408, PS51737,IPR025827,G3DSA:3.40.50.1390,IPR006119,IPR038109, PF07508,IPR011109,SSF53041,PTHR30461,Coil, PS51736,cd00338,PF00239
MKDSKSKTVIIYNRVSTIMQDKNESLTEQTDECIRYCKTNGYEIYKILKDVKSGTKDDRAGYLELKKHIKRKDFDILVVLETSRIARKMKELVLFFSLLNENNIEYISIREPNYNTTTPDGKFAMNIRLGLIQFERDNTAERVTDRLYFKASKGQWVNGKPPIGYKLVNKRLEIDEEKAEIVRNIYEDFLNGYSLNQINNKLQFSWGSKQVKRILTNPTYKGYIRYGTRSNRKKNNREAFIVKGWHEAIIPEEKWEKVQEMYKSLNRKASNTKPTLLSGLLKCKECGNNYIRKRGGSYDKNLYYGCNLNNLRYSDKFFYKDIPECSSATIKGDLLEKAVIDTLKKQINDLNFNDIEVDKKRQVNIKQIDSSINKFKNRLNKIYELYIEDEIPKDKYLKDKKDIEARIISLEKQKKSFGEIEVEKSNNEMIQEYFSKIDLSNIEEANRILKIIVNKIVVYKKKKTPKDDFEVEIYLNI

SEQ ID NO: 7195 - protein, 477 aa, Unknown
  Description of Unknown: Integrase B7196 sequence
  PTHR30461:SF3,cd00338,SM00857,G3DSA:1.10.10.2600,IPR036162, PF13408,IPR025827,G3DSA:3.40.50.1390,PS51737,IPR006119, IPR038109,PF07508,IPR011109,SSF53041,PTHR30461, PS51736,Coil,PF00239
MKYAAAYIRVSDDRQDEYSPDSQLKLIREYAGRNGYCVPDEYVFYDDGISGRSVKKRKAFNDMIAFAKSKEHPFQAILVWKFSRFARNQEESIVYKSMLRRIGVSVISISETIDDSPFAPLIERIIEFMDEYYSTRLSQEVTRGMTEKASRGEAMSAGAFGYDLQNKVFTPNEDAPTVRYIFNAFLSGKGYRKIAMELDAMGVKTYRGNPPDNRFVEYILMNPVYAGKIRWSTDGRASRDRYKGDNSKVMYVDGKHQPIIDQDTFDQVQEKIMEQKRRYGKWQRKEQPVTFMLKGLLRCDTCGATLTYIAARDPAVQCHNYARGKCKVSHYLSIRKANAAVIAAIEKSLETLEFNVLPKEQLQNEVVDYSLLIRKEEEKIKRASDAYDAGYDTLEEYGRKKRAFQNKIEALKAEQAKVEKSQSGEIPPQFVQQASFVLDLIKSPDTAESVKNEALRSIVDHITFKKPDNTLEIFYYI

SEQ ID NO: 7196 - protein, 477 aa, Unknown
  Description of Unknown: Integrase B7197 sequence
  PTHR30461:SF3,IPR036162,PS51737,IPR022019,IPR011109,PTHR30461 ,PS00397,PF00239,PF12207,G3DSA:1.10.10.2600,IPR006119,SSF53041 ,cd00338,SM00857,IPR038267,IPR025827,IPR038109,PS51736, IPR006118,PF13408,G3DSA:3.40.50.1390,G3DSA:1.10.3950.10,Coil
MSIIEEQVKRNQYIEEVAAYIRVSTQEQKLHGISIEAQIEKLTEYAEKHGMKIVEWYKDEGVSGRKLIKKRPELQRMIQDAEKGKFKRIIFIKLDRFFRSVAEYHECMKRLAVGGVIWTATEEKYDLSTPSGEAFVNMKLTMAQFEADQAGERIRMVNEYKIKSGQPLFGAQCLPFGYTVSAPENGERHKYIAKEHEEIAMDLINHALTHGAIRGAMSYVNNKYGMSLSYNACINMLKNEMICGEYKGNPNYCEPYISREEFDRLQKLISRTPRDTGEKRTYIFSGLILCPNCGRRLTGGTHSPNKGIRNVTYKTYRCNAKLRDKKCDYGNTVFEETLEKVLLDKIESIVDRKMIEVNAIEAESEKTSKYNVAELQAELDRLNYSWQKNRIKSAEEYDRKYDAIVEKIEAAQAEQQQMGHVDYERIQCLFQSGWRDLYNSLDDEHKRSFWRSFIEEIEIDWGKGRYGKRDIKDITFF

SEQ ID NO: 7197 - protein, 477 aa, Unknown
  Description of Unknown: Integrase B7198 sequence
  cd00338,SM00857,IPR006118,G3DSA:1.10.10.2600,IPR036162, PS51737,G3DSA:3.40.50.1390,IPR006119,IPR038109,PF07508, IPR011109,SSF53041,PTHR30461,PS00397,PS51736, Coil,PF00239
MENLKIAAAYIRVSTHDQEEYSPESQIKLIRDYAKNNGFILPEEFIFRDDGISGRRADKRPEFQRMISKAKETPAPFQVILVWKYSRFARNQEESIVYKALLKKENKIDVVSISEPLVEGPFGSLIERIIEWTDEYYSIRLSGEVKRGMTEKASRGEPVSIPAFGYDIKNKQYIPNEKEAPFVQMIFDDFISGMGTREIAMKLNTMEVRTHRGNFFENRNIDYILNNPVYIGKIRWTPTGRMKRNYDLEDSMIVDGEHQPLISNETWEQAQALLKKRKKMYAKYARKSNPKKPFMLQGIVRCSNCGSTLCMGVSGSLQCHSYAHGQCNKSHSITLNKINTLVISALETDLESGDITLIKKSGSRENQQEFIKRQIQAEKIKLRRVKEAYENGVDTLEEYKSNKRKIMERLEELQAKQEPVQDLEKEKKEFCMKHKEAPAYLQNASISIEDKNHYIRTFIDHIVFNRASGTVDVIYYN

SEQ ID NO: 7198 - protein, 477 aa, Unknown
  Description of Unknown: Integrase B7199 sequence
  PTHR30461:SF3,SM00857,G3DSA:1.10.10.2600,IPR036162,PF13408, IPR025827,G3DSA:3.40.50.1390,PS51737,IPR006119,IPR038109, PF07508,IPR011109,SSF53041,PTHR30461,Coil, PS51736,cd00338,PF00239
MRDSKSKTVIIYNRVSTIMQDKNESLTEQTDECIRYCKTNGYEIYKILKDVKSGTKDDRAGYLELKKHIKRKDFGILVVLETSRIARKMKELVLFFSLLNENNIEYISIREPNYNTTTPDGKFAMNIRLGLIQFERDNTAERVTDRLYFKASKGQWVNGKPPIGYKLVNKRLEIDEEKAEIVRNIYEDFLNGYSLNQINNKLQFSWGSKQVKRILTNPTYKGYIRYGTRSNRKKNNREAFIVKGWHEAIIPEEKWEKVQEMYKNLNRKASNTKPTLLSGLLKCKECGNNYIRKRGGSYDKNLYYGCNLNNLRYSDKFFYKDIPECSSATIKGDLLEKAVIDTLKKQINDLNFNDIEIDKKRQVNIKQIDSSINKFKNRLNKIYELYIEDEIPKDKYLKDKKDIEARIISLEKQKKSFGEIEVEKSNNEMIQEYFSKIDLSNIEEANRILKIIVNKIVVYKKKKTPKDDFEVEIYLNI

SEQ ID NO: 7199 - protein, 477 aa, Unknown
  Description of Unknown: Integrase B7200 sequence
  PTHR30461:SF3,cd00338,SM00857,G3DSA:1.10.10.2600,IPR036162, PF13408,PS51737,G3DSA:3.40.50.1390,IPR025827,IPR006119, IPR038109,PF07508,IPR011109,SSF53041,PTHR30461, PS51736,Coil,PF00239
MKYAAAYIRVSDDRQDEYSPDSQLKLIREYAVRNGYCVPDEYVFYDDGISGRSVKKRKAFNDMIAFAKSKEHPFQAILVWKFSRFARNQEESIVYKSMLRRIGVSVISISETIDDSPFAPLIERIIEFMDEYYSTRLSQEVTRGMTEKASRGEAMSAGAFGYDLQNKVFTPNEDAPTVRYIFNAFLSGKGYRKIAMELNAMGVKTYRGNPPDNRFVEYILMNPVYAGKIRWSTDGRASRDRYKGDNSKVMYVDGKHQPIIDQDTFDQVQEKIMEQKRRYGKWQRKEQPVTFMLKGLLRCDTCGATLTYIAARDPAVQCHNYARGKCKVSHYLSIRKANAAVIAAIEKSLETLEFNVLPKEQLQNEVVDYSLLIRKEEEKIKRASDAYDAGYDTLEEYGRKKRAFQNKIEALKAEQAKVEKSQSGEIPPQFVQQASFVLDLIKSPDTAESVKNEALRSIVDHITFKKPDNTLEIFYYI

SEQ ID NO: 7200 - protein, 477 aa, Unknown
  Description of Unknown: Integrase B7201 sequence
  PTHR30461:SF3,cd00338,SM00857,G3DSA:1.10.10.2600,IPR036162, PF13408,IPR025827,G3DSA:3.40.50.1390,PS51737,IPR006119, IPR038109,PF07508,IPR011109,SSF53041,PTHR30461, PS51736,Coil,PF00239
MKYAAAYIRVSDDRQDEYSPDSQLKLIREYAGRNGYCVPDEYVFYDDGISGRSVKKRKAFNDMIAFAKSKEHPFQAILVWKFSRFARNQEESIVYKSMLRRIGVSVISISETIDDSPFAPLIERIIEFMDEYYSTRLSQEVTRGMTEKASRGEAMSAGAFGYDLQNKVFTPNEDAPTVRYIFNAFLSGKGYRKIAMELDAMGIKTYRGNPPDNRFVEYILMNPVYAGKIRWSTDGRASRDRYKGDNSKVMYVDGKHQPIIDQDTFDQVQEKIMEQKRRYGKWQRKEQPVAFMLKGLLRCDTCGATLTYIAARDPAVQCHNYARGKCKVSHYLSIRKANAAVIAAIEKSLETLEFNVLPKEQLQNEVVDYSLLIRKEEDKIKRASDAYDAGYDTLEEYGRKKRAFQNKIEALKAEQAKVEAQQSSEIPPRFVQQASFVLDLIKSPDTAESVKNEALRSIVDHITFKKPDNTLEIFYYI

SEQ ID NO: 7201 - protein, 477 aa, Unknown
  Description of Unknown: Integrase B7202 sequence
  PTHR30461:SF3,cd00338,SM00857,G3DSA:1.10.10.2600,IPR036162, PF13408,PS51737,G3DSA:3.40.50.1390,IPR025827,IPR006119, IPR038109,PF07508,IPR011109,SSF53041,PTHR30461, PS51736,Coil,PF00239
MSKSKIYCLKYLYTITFSKGVIIMEIIVKKAACYCRVSHEEQKLHGLSIEAQKEDLKQYCKRNNYKIYKFYIDEGLTAKNTKRQGLQNLLSDLDKFDIVLFTKLDRLSRNIIDANLLDQQFKSNNVCMKAIFEDDIDTSTADGKFTFNLKLSLAERELDKTSERIKDIFRYKIERNEVISGSVPKGYKIVDKKLAIDENTAWIVKKSFDLVEELMSARAAFIQINTVYNQPTSLRSFSKLLKNVIYTGTYKSKNYYKENYCEPIISLEQFNNVQRILKNNKQYTSNNRKETYIFSGLLRCSHCGYKIVGHYSNRSGKNVIKTYRCNRYSIYKDCDQKKSINEKKLEKVLLSCIVEEYKNYLYSFDVSSKKSSSTDISQNKAKIQKKIDKLRELYLNDLISLEDYKKDYAIFNQALEEIKNKEVAKVAPKDADKLLSILDNIEDIYYNLDATERKRFWTSFIDVITIDGNYNIDIKFL

SEQ ID NO: 7202 - protein, 477 aa, Unknown
  Description of Unknown: Integrase B7203 sequence
  PTHR30461:SF3,IPR036162,PS51737,IPR011109,PTHR30461, PS00397,PF00239,G3DSA:1.10.10.2600,IPR006119,SSF53041, SM00857,IPR025827,IPR038109,PS51736,cd03768, IPR006118,PF13408,G3DSA:3.40.50.1390,PF07508,Coil
MNRVAIYVRVSTNEQAAEGYSIAEQTERCRKYCEAMKYTVSRIYTDPGFSGASLDRPAMQQMIEDAKEGRFDTVLVYKLDRLSRSQKDTLYLIEDVLLAHNVSFISMSENFDTSSPFGRAMIGILSVFAQLEREQIKERMEMGRIGAAKEGRWRGGSGVPIGYTYTAGDEGILKIDPYEAMQIKELYDLWLQGISTNEICKRFRAKGYTTKYGGWSYAGSIPCIITNPVYIGMQRYDGKVFPGLQEPIITQEVYDAAVADLERRRSQMSDNQRIAWRGKSLLSGLIFCGQCGARYFVSTCVRTNRQTHEKKTYRYYICYSRDGNSSMKKSDNCTNKRWGKEELEHVVLDQILKMSYDVDKIKPRKPKTDGQKAIASRIKVIDKQISSLLDLYQVGGIPIDQIGTRVKALTDEKDRLELSTAKETGKPVSLSEARKILSAAPQIIECGSDDDRRFLVSKLISKITIDGDDIAITWTFT

SEQ ID NO: 7203 - protein, 477 aa, Unknown
  Description of Unknown: Integrase B7204 sequence
  IPR036162,PS51737,IPR011109,PTHR30461,PS00397, PF00239,G3DSA:1.10.10.2600,IPR006119,SSF53041,cd00338, SM00857,IPR025827,IPR038109,PS51736,IPR006118, PF13408,G3DSA:3.40.50.1390,PF07508,Coil
MQQAAAYVRVSTDDQTEYSPESQLKELKDYAARHDLMIDPEHIYIDAGISGRKAAKRPQFQKMIAAAKAKPSAFGTILVWKFSRFARNQEESILYKSLLRRECDVEVISVTEETGDSMFGSLIERIIEWMDEFYSIRLGQEVRSKMTFVAEKGLPQTVAPFGYSKKPDEAIMIVQKEADWVRFMAENLLRGRSLRWISNQLNDHGIRTHRGNKFEPRTIEYILRNVTNAGAVHWTPNQDDHDNRIPYSENTIIVRDVCPAIYSYEYYESLVAELDRRAKTHKKHQKSDTVKRHWLSGFLKCSNCGSSMVYQRANNGFQCYKYGKSLCNVSHFISAPKIENAIIDAISHVTITDDFIRSITRPVTSKNSNYKKDIKRLEKMLDRAKLAYVEGIDTVEEYAENKKRIISEIEILKSKEKEQAEAITYKTKEEVCRQFKSAQELIASDADNDTKRAAFGSIVEKVVYSKPDDSVSIFFYL

SEQ ID NO: 7204 - protein, 477 aa, Unknown
  Description of Unknown: Integrase B7205 sequence
  PTHR30461:SF3,cd00338,SM00857,G3DSA:1.10.10.2600,IPR036162, PF13408,PS51737,G3DSA:3.40.50.1390,IPR025827,IPR006119, IPR038109,PF07508,IPR011109,SSF53041,PTHR30461, PS51736,Coil,PF00239
MSKSKIYCLKYLYTITFSKGVIIMETIVKKAACYCRVSHEEQKLHGLSIEAQKEDLKQYCKRNNYKIYKFYIDEGLTAKNTKRQGLQNLLSDLDKFDIVLFTKLDRLSRNIIDANLLDEKFKNNNVCMKAIFEDDIDTSTADGKFTFNLKLSLAERELDKTSERIKDIFRYKIERNEVISGSVPKGYKIVDKKLAIDENTAWVVKKSFDLVEELMSARAAFIQINTVYNQPTSLRSFSKLLKNVIYTGTYKSKNYYKENYCEPIISLEQFNNVQRILKNNKQYTSNNRKETYIFSGLLRCSHCGYKIVGHYSNRSGKNVIKTYRCNRYSIYKDCDQKKSINEKKLEKMLLSCIVEEYKNYLYSFDVSSKKTNSIDVSQNKSKIQKKIDKLRELYLNDLISLEDYKKDYAIFTQALKEIESKEVTKVAPKDADKVLSILDNIETIYYNLDATERKRFWSSFIDVITIDGNYNIDIKFL

SEQ ID NO: 7205 - protein, 477 aa, Unknown
  Description of Unknown: Integrase B7206 sequence
  PTHR30461:SF3,SM00857,G3DSA:1.10.10.2600,IPR036162,PF13408, IPR025827,G3DSA:3.40.50.1390,PS51737,IPR006119,IPR038109, PF07508,IPR011109,SSF53041,PF00239,PTHR30461, PS51736,Coil,cd00338
MKYAAAYIRVSDDRQDEYSPDSQLKLIREYASRNGYCVPDEYVFYDDGISGRSVKKRKAFNDMIAFAKSKEHPFQAILVWKFSRFARNQEESIVYKSMLRRIGVSVISISETIDDSPFAPLIERIIEFMDEYYSTRLSQEVTRGMTEKASRGEAMSAGAFGYDLQNKVFTPNEDAPTVRYIFNAFLSGKGYRKIAMELDAMGVKTYRGNPPDNRFVEYVLMNPVYAGKIRWSTDGRASRDRYKGDNSKVMYVDGKHQPIIDQDTFDQVQEKIMEQKRRYGKWQRKEQPVTFMLKGLLRCDTCGATLTYIAARDPAVQCHNYARGKCKVSHYLSIRKANTAVIAAIEKSLETLEFNVLPKEQLQNEVVDYSLLIRKEEDKIKRASDAYDAGYDTLEEYGRKKRAFQNKIETLKAEQAKVEKSQSGEIPPQFVQQASFVLDLIKSPETAESVKNEALRSIVDHITFKKPDNTLEIFYYI

SEQ ID NO: 7206 - protein, 477 aa, Unknown
  Description of Unknown: Integrase B7207 sequence
  PTHR30461:SF3,IPR036162,PS51737,IPR011109,PTHR30461, PS00397,PF00239,G3DSA:1.10.10.2600,IPR006119,SSF53041, cd00338,SM00857,IPR025827,IPR038109,PS51736, IPR006118,PF13408,G3DSA:3.40.50.1390,PF07508,Coil
MSIIKAALYVRVSTMEQVTDGYSIGEQKDKLLHYASAQGYAVVDTYSDEGFSGKDLLRPNMERMLNDIQHGRINTVLVYKLDRLSRHVKDVLELVETFDKCNVTLYSLSENFDLASPFGRAALKMMATFAELERETIVERMEMGKIARAKEGKYTCPGTRCPFGYRHDKKNDRLLIEESEAEIIRKIFDLYVNHGYTFRKLYDYCREAYPDVKYFNNQMCCKPIIERPLYAGYFRYRGGELTKGTNFEAIISYELFLQAQAQVDRNRTKRLSDSSPYLLTGLLICGRCGNRYVGKMYERYTKKPDGTHTKHYRYRDYGCAARLKRDKNYHPAKCDNDIYRAEELEKIVEDYVLNLNIDDYNKADFSPGLIDKMMSEIGAIKRSQSKLLDLYLSGDIDKDTFLIRKIEYDSKIAELQNLIEKETESVQSAPTNAEAIKKSIAEYSMLNRRQKRTLLEYLIKNIIVDGSRITVNLRLKK

SEQ ID NO: 7207 - protein, 477 aa, Unknown
  Description of Unknown: Integrase B7208 sequence
  cd00338,SM00857,IPR006118,G3DSA:1.10.10.2600,IPR036162, PS51737,G3DSA:3.40.50.1390,IPR006119,IPR038109,PF07508, IPR011109,SSF53041,PTHR30461,PS00397,PS51736, Coil,PF00239
MENLKIAAAYIRVSTHDQEEYSPESQIKLIRDYAKNNGFILPEEFIFRDDGISGRRADKRPEFQRMISKAKETPAPFQVILVWKYSRFARNQEESIVYKALLKKENKIDVVSISEPLVEGPFGSLIERIIEWTDEYYSIRLSGEVKRGMTEKASRGEPVSIPAFGYDIKNKQYIPNEKEAPFVQMIFDDFISGMGTREIAMKLNTMEVRTHRGNFFENRNIDYILNNPVYIGKIRWTPTGRMKRNYDLEDSMIVDGEHQPLISNETWEQAQALLKKRKKMYAKYARKSNPKKPFMLQGIVRCSNCGSTLCMGVSGSLQCHSYAHGQCNKSHSITLNKINTLVISALETDLESGDITLIKKSGSRENQQEFIKRQIQAEKIKLRRVKEAYENGVDTLEEYKSNKQKIMERLEELQAKQEPVQDLEKEKKEFCMKHKEAPAYLQNASISIEDKNHYIRTFIDHIVFNRASGTVDVIYYN

SEQ ID NO: 7208 - protein, 477 aa, Unknown
  Description of Unknown: Integrase B7209 sequence
  PTHR30461:SF3,IPR036162,PS51737,IPR022019,IPR011109,PTHR30461 ,PS00397,PF00239,PF12207,G3DSA:1.10.10.2600,IPR006119,SSF53041, cd00338,SM00857,IPR038267,IPR025827,IPR038109,PS51736,IPR006118 ,PF13408,G3DSA:3.40.50.1390,G3DSA:1.10.3950.10,Coil
MSIIEEQVKRNQYIEEVAAYIRVSTQEQKLHGISIEAQIEKLTEYAEKHGMKIVEWYKDEGVSGRKLIKKRPELQRMIQDAEKGKFKRIIFIKLDRFFRSVAEYHECMKRLAVGGVIWTATEEKYDLSTPSGEAFVNMKLTMAQFEADQAGERIRMVNEYKIKSGQPLFGAQCLPFGYTVSAPENGERHKYIAKEHEEIAMDLINHALTHGAIRGAMSYVNNKYGMSLSYNACINMLKNEMICGEYKGNPNYCEPYISREEFDRLQKLISRTPRDTGEKRTYIFSGLILCPNCGRRLTGGTHSPNKGIRNVTYKTYRCNSKLRDKKCDYGNTVFEETLEKVLLDKIESIVDRKMIEVNAIEAESEKTSKYNVAELQAELDRLNYSWQKNRIKSAEEYDRKYDAIVEKIEAAQAEQQQMGHVDYERIQCLFQSGWRDLYNSLDDEHKRSFWRSFIEEIEIDWGKGRYGKRDIKDITFF

SEQ ID NO: 7209 - protein, 477 aa, Unknown
  Description of Unknown: Integrase B7210 sequence
  cd00338,SM00857,IPR006118,G3DSA:1.10.10.2600,IPR036162, PS51737,G3DSA:3.40.50.1390,IPR006119,IPR038109,PF07508, IPR011109,SSF53041,PTHR30461,PS00397,PS51736, Coil,PF00239
MENLKIAAAYIRVSTHDQEEYSPESQIKLIRDYAKNNGFILPEEFIFRDDGISGRRADKRPEFQRMISKAKETPAPFQVILVWKYSRFARNQEESIVYKALLKKENKIDVVSISEPLVEGPFGSLIERIIEWTDEYYSIRLSGEVKRGMTEKASRGEPVSIPAFGYDIKNKQYIPNEKEAPFVQMIFDDFISGMGTREIAIKLNTMEVRTHRGNFFENRNIDYILNNPVYIGKIRWTPTGRMKRNYDLEDSMIVDGEHQPLISNETWEQAQALLKKRKKMYAKYARKSNPKKPFMLQGMVRCSNCGSTLCMGVSGSLQCHSYAHGQCNKSHSITLNKINTLVISALETDLESGDITLIKKSGSRENQQEFIKRQIQAEKIKLRRVKEAYENGVDTLEEYKSNKQKIMERLEELQAKQEPVQDLEKEKKEFCMKHKEAPAYLQNASISIEDKNHYIRTFIDHIVFNRASGTVDVIYYN

SEQ ID NO: 7210 - protein, 477 aa, Unknown
  Description of Unknown: Integrase B7211 sequence
  cd00338,SM00857,G3DSA:1.10.10.2600,IPR036162,PS51737, G3DSA:3.40.50.1390,IPR006119,IPR038109,PF07508,IPR011109, SSF53041,PTHR30461,PS51736,Coil,PF00239
MSNSSSFPAKISAIYCRESTEKQNIQSLIDMCKKAAKKINLQNIKVYYDVASGYNKDREQYSKLKEDIQNNLVDTLVLYESSRLTRDELEHHIFYGLLRVHNVKVYTVTHGWLDLQDADDTFLTNLLNLLDSREGRKTAKRSKDRMTELAEQGRWTGGPAPLGYKLVNKELVIVPEDAEKVKTIFKLFLDGKTRQSIANFFGYEVKKVRRLLENSVYIGKLKFHSVEIINKKKILHKDYKVLNGIHEPIIDESTFSLVQGKLKNIKVERNTDVYIFKDLIKCTCGRKMYRVVNKYNYLKKSTNEISRKTENLYYCRTSDKYKSLGCGAIGIHEEELFEEVMASLKKIIFSLEVENIDTKFDDYQSQLVLYKKELASLSRKEELLARQLLNSLISEEVFEKLMKELKEKKAFLEEKIKNLTTLITNKKNTNKNSEILKKYFFKLEKEKAPEKINNFLKLIIDEIEMVNDYRFYIHLKF

SEQ ID NO: 7211 - protein, 477 aa, Unknown
  Description of Unknown: Integrase B7212 sequence
  PTHR30461:SF3,IPR036162,PS51737,IPR011109,PTHR30461, PS00397,PF00239,G3DSA:1.10.10.2600,IPR006119,SSF53041, cd00338,SM00857,IPR025827,IPR038109, PS51736,IPR006118,PF13408,G3DSA:3.40.50.1390,PF07508
MKSVAIYCRVSTQEQAAEGYSIGEQQSRLTKFCEAHDWKVAHIYSDPGYSGAKLQRPAIQQLIRDCSYGLFDAVLVYKLDRLSRSQKDTLYLIEDVFNASHIGLVSMCENFDTQSPFGRAMIGILSVFAQLERDQITERMTMGRIGRAKAGYFSGGSRPPIGYTYAKAPGSDKQILIVDDYEAAQVRKIFSMFLDGSTLKEICHYMHDHYKTRYGDWSHVSTISRILRDRIYIGEVSFSGKWYRGAHEAIIDHDTFDRVQRKYDLYLGTVAGTFSQNFKGSQLLTGMVFCGQCGARCHTKSWRNHGKHSAPDAPMKRVYRCSHGDGVRVPVQELDQLVTAEVRKLSVDPELIRRAAPAAASASSSEDAEAIRSRLADLRRQESKLVDLYQIGGIDLQMVKSRMDDLHQEQEKLSASLAEESPSRAALSADDAIDALASFPSVFSSGTLQEKRQILRTLIDRIVIYPDHIDIHWTFTA

SEQ ID NO: 7212 - protein, 477 aa, Unknown
  Description of Unknown: Integrase B7213 sequence
  PTHR30461:SF3,cd00338,SM00857,G3DSA:1.10.10.2600,IPR036162, PF13408,IPR025827,G3DSA:3.40.50.1390,PS51737,IPR006119, IPR038109,PF07508,IPR011109,SSF53041,PTHR30461, PS51736,Coil,PF00239
MKYAAAYIRVSDDRQDEYSPDSQLKLIREYASRNGYCVPDEYVFYDDGISGRSVKKRKAFNDMIAFAKSKEHPFQAILVWKFSRFARNQEESIVYKSMLRRIGVSVISISETIDDSPFAPLIERIIEFMDEYYSTRLSQEVTRGMTEKASRGEAMSAGAFGYDLQNKVFTPNKDAPTVRYIFNAFLSGKGYRKIAMELDAMGVKTYRGNPPDNRFVEYVLMNPVYAGKIRWSTDGRASRDRYKGDNSKVMYVDGKHQPIIDQDTFDQVQEKIMEQKRRYGKWQRKEQPVTFMLKGLLRCDTCGATLTYIAARDPAVQCHNYARGKCKVSHYLSIRKANAAVIAAIEKSLETLEFNVLPKEQLQNEVVDYSLLIRKEEEKIKRASDAYDAGYDTLEEYGRKKRAFQNKIEALKAEQAKVEKSQSGEIPPQFVQQASFVLDLIKSPDTAESVKNEALRSIVDHITFKKPDNTLEIFYYI

SEQ ID NO: 7213 - protein, 477 aa, Unknown
  Description of Unknown: Integrase B7214 sequence
  PTHR30461:SF3,cd00338,SM00857,G3DSA:1.10.10.2600,IPR036162, PF13408,IPR025827,PS51737,G3DSA:3.40.50.1390,IPR006119, IPR038109,PF07508,IPR011109,SSF53041,PTHR30461, PS51736,Coil,PF00239
MKYAAAYIRVSDDRQDEYSPDSQIKLIREYAGRNGYCVPDEYVFYDDGISGRSVKKRKAFNDMIAFAKSKEHPFQAILVWKFSRFARNQEESIVYKSMLRRIGVSVISISETIDDSPFAPLIERIIEFMDEYYSTRLSQEVTRGMTEKASRGEAMSAGAFGYDLQNKVFTPNEDAPTVRYIFNAFLSGKGYRKIAMELNAMGVKTYRGNPPDNRFVEYVLMNPVYAGKIRWSTDGRASRDRYKGDNSKVMYVDGKHQPIIDQDTFDQVQEKIMEQKRRYGKWQRKEQPVTFMLKGLLRCDTCGATLTYIAARDPAVQCHNYARGKCKVSHYLSIRKANAAVIAAIEKSLETLEFNVLPKEQLQNEVVDYSLLIRKEEEKIKRASDAYDAGYDTLEEYGRKKRAFQNKIEALKAEQVKVEKSQSGEIPPQFVQQASFVLNLIKSPDTAESVKNEALRSIVDHITFKKPDNTLEIFYYI

SEQ ID NO: 7214 - protein, 477 aa, Unknown
  Description of Unknown: Integrase B7215 sequence
  PTHR30461:SF3,cd00338,SM00857,G3DSA:1.10.10.2600,IPR036162, PF13408,IPR025827,G3DSA:3.40.50.1390,PS51737,IPR006119, IPR038109,PF07508,IPR011109,SSF53041,PTHR30461, PS51736,Coil,PF00239
MKYAAAYIRVSDDRQDEYSPDSQLKLIREYAGRNGYCVPDEYVFYDDGISGRSVKKRKAFNDMIAFAKSKEHPFQAILVWKFSRFARNQEESIVYKSMLRRIGVSVISISETIDDSPFAPLIERIIEFMDEYYSTRLSQEVTRGMTEKASRGEAMSAGAFGYDLQNKVFTPNEDAPTVRYIFNAFLSGKGYRKIAMELNAMGVKTYRGNPPDNRFVEYVLMNPVYAGKIRWSTDGRASRDRYKGDNSKVMYVDGKHQPIIDQDTFDQVQEKIMEQKRRYGKWQRKEQPVTFMLKGLLRCDTCGATLTYIAARDPAVQCHNYARGKCKVSHYLSIRKANAAVIAAIEKSLETLEFNVLPKEQLQNEVVDYSLLIRKEEEKIKRASDAYDAGYDTLEEYGRKKRAFQNKIETLKAEQTKTEEAQSSEIPPQFVQQASFVLNLIKSPDTAESVKNEALRSIVDHITFKKPDNTLEIFYYI

SEQ ID NO: 7215 - protein, 477 aa, Unknown
  Description of Unknown: Integrase B7216 sequence
  IPR036162,PS51737,IPR011109,PTHR30461,PS00397, PF00239,G3DSA:1.10.10.2600,IPR006119,SSF53041,cd00338, SM00857,IPR025827,IPR038109,PS51736,IPR006118, PF13408,G3DSA:3.40.50.1390,PF07508,Coil
MPENYRDGALYIRVSTDKQEELSPDAQKRLLLDYAKKNKILVNPDYIFIENGISGRKAQKRPEFQKMISLAKSTPSPFQVILVWKFSRFARNQEESIVYKSMLKKQCGIDVISTSEPLIDGPFGSLIERIIEWMDEYYSINLSGEVIRGMTEKALRGGYQSTPPLGYKAIGEGKPFVVVPEEAKLVTYIFQQYCQYHREPTAIARQINDMGIHTKRGGLFENRTISYILQNKFYIGDLEWNGISTKGQHETFISPELFEKAQQITAATYKPKKRRSVSTCKHWLSGLVKCSICGASLSYNTGKYPYFVCWRYAKGFHKGSSSISENRLIKAVIEYLEQILDGMDFSISYVEKDTPELTEQEQWEKDLENLSVREKRIRTAYETGVDSLEEYKENKERLKKEREELEAKKVNLIKTAAAPGTKEQFLDKVQTVFDILKNDEISNETKGVFIRSIVEEIIYDKENDTLIFHLYTPRKAA

SEQ ID NO: 7216 - protein, 477 aa, Unknown
  Description of Unknown: Integrase B7217 sequence
  PTHR30461:SF3,IPR036162,PS51737,IPR022019,IPR011109,PTHR30461 ,PS00397,PF00239,PF12207,G3DSA:1.10.10.2600,IPR006119,SSF53041 ,cd00338,SM00857,IPR038267,IPR025827,IPR038109,PS51736,IPR006118 ,PF13408,G3DSA:3.40.50.1390,G3DSA:1.10.3950.10,Coil
MSIIEEQVKRNQYIEEVAAYIRVSTQEQKLHGISIEAQIEKLTEYAEKHGMKIVEWYKDEGVSGRKLIKKRPELQRMIQDAEKGKFKRIIFIKLDRFFRSVAEYHECMKRLAIGGVIWTATEEKYDLSTPSGEAFVNMKLTMAQFEADQAGERIRMVNEYKIKSGQPLFGAQCLPFGYTVSAPENGERHKYIAKEHEEIAMDLINHALTHGAIRGAMSYVNNKYGMSLSYNACINMLKNEMICGEYKGNPNYCEPYISREEFDRLQKLISRTPRDTGEKRTYIFSGLILCPICGRRLTGGTHSPNKGIRNVTYKTYRCNSKLRDKKCDYGNTVFEETLEKVLLDKIESIVDRKMIEVNAIEAESEKTSKYNVAELQAELDRLNYSWQKNRIKSAEEYDRKYDAIVEKIEAAQAEQQQMGHVDYERIQCLFQSGWRDLYNSLDDEHKRSFWRSFIEEIEIDWGKGRYGKRDIKDITFF

SEQ ID NO: 7217 - protein, 477 aa, Unknown
  Description of Unknown: Integrase B7218 sequence
  PTHR30461:SF3,IPR036162,PS51737,IPR011109,PTHR30461, PS00397,PF00239,G3DSA:1.10.10.2600,IPR006119,SSF53041, SM00857,IPR025827,IPR038109,PS51736,cd03768, IPR006118,PF13408,G3DSA:3.40.50.1390,PF07508,Coil
MIRAGIYARVSTREQAEEGYSIGSQIDKLTAYCQLHDYELVDQYIDPGFSGASLERPAMQRLLKNVKEKKLDVVIVRKLDRLSRSQKDILTLIEDVFLPNNCNFVSTTESFDTQTPMGRAMIGILSVFAQLERETIRERNQDGKNERAKTGKAMAWSNPPLGYNYVDKHYEVSEYEAAIVRTAYNLCLQGLSMNKIKKYIDEKFDYSLTKYKTKDGKIHLATIKRILRNPLYYGVITWKGNLYLGEHEALITEEMFNAVQKQLQLNAKNALGHSKNPFRSTRLLTGLLWCGDCGARMHAQSRKRVNNDRWYYMCYSVSKKSAKYITGECHSGNFDGETLDQIVYDQIRALSDNTKLLEQTMLSKESSVSEEFFEAKLTSIESKQQKLVDLYLDDKLDKAMLESKNKALEEEKQKILDTMERNKQNQNKPTKREVRKNLKQFIDIYETGELDTKKAILRTLIDRITVTGDDVRIDWTF

SEQ ID NO: 7218 - protein, 477 aa, Unknown
  Description of Unknown: Integrase B7219 sequence
  PTHR30461:SF3,cd00338,SM00857,G3DSA:1.10.10.2600,IPR036162, PF13408,IPR025827,G3DSA:3.40.50.1390,PS51737,IPR006119, IPR038109,PF07508,IPR011109,SSF53041,PTHR30461, PS51736,Coil,PF00239
MKYAAAYIRVSDDRQDEYSPDSQLKLIREYAGRNGYCVPDEYVFYDDGISGRSVKKRKAFNDMIAFAKSKEHPFQAILVWKFSRFARNQEESIVYKSMLRRIGVSVISISETIDDSPFAPLIERIIEFMDEYYSTRLSQEVTRGMTEKASRGEAMSAGAFGYDLQNKVFTPNEDAPTVRYIFNAFLSGKGYRKIAMELDAMGVKTYRGNPPDNRFVEYILMNPVYAGKIRWSTDGRASRDRYKGDNSKVMYVDGKHQPIIDQDTFDQVQEKIMEQKRRYGKWQRKEQPVAFMLKGLLRCDTCGATLTYIAARDPAVQCHNYARGKCKVSHYLSIRKANAAVIAAIEKSLETLEFNVLPKEQLQNEVVDYSLLIRKEEEKIKRASDAYDAGYDTLEEYGRKKRAFQNKIEALKAEQAKVEKSQSNEIPPQFVQQASFVLDLIKSPDTAESVKNEALRSIVDHITFKKPDNTLEIFYYI

SEQ ID NO: 7219 - protein, 477 aa, Unknown
  Description of Unknown: Integrase B7220 sequence
  cd00338,SM00857,G3DSA:1.10.10.2600,IPR036162,PS51737, G3DSA:3.40.50.1390,IPR006119,IPR038109,PF07508,IPR011109, SSF53041,PTHR30461,PS51736,Coil,PF00239
MSNSSSFPAKISAIYCRESTEKQNIQSLIDMCKKAAKKINLQNIKVYYDVASGYNKDREQYSKLKEDIQNNLVDTLVLYESSRLTRDELEHHIFYGLLRVHNVKVYTVTHGWLDLQDADDTFLTNLLNLLDAREGRKTAKRSKDRMTELAEQGRWTGGPAPLGYKLVNKELVIVPEDAEKVKTIFKLFLDGKTRQSIANFFGYEVKKVRRLLENPVYIGKLKFHSVEIINKKKILHKDYKVLNGIHEPIIDESTFSLVQGKLKNIKVERNTDVYIFKDLIKCTCGRKMYRVVNKYNYLKKSTNEISRKTENLYYCRTSDKYKSLGCGAIGIHEEELFEEVMASLKKIIFSLEVENIDTKFDDYQSQLVLYKKELASLSGKEELLARQLLNSLISEEVFEKLMKELKEKKAFLEEKIKNLTTLITNKKNTNKNSEILKKYFFKLEKEKAPEKINNFLKLIIDEIEMVNDYRFYIHLKF

SEQ ID NO: 7220 - protein, 477 aa, Unknown
  Description of Unknown: Integrase B7221 sequence
  PTHR30461:SF3,IPR036162,PS51737,IPR022019,IPR011109, PTHR30461,PS00397,PF00239,PF12207,G3DSA:1.10.10.2600, IPR006119,SSF53041,cd00338,SM00857, IPR038267,IPR025827,IPR038109,PS51736,IPR006118,PF13408,
  CONT. FROM ABOVE: G3DSA:3.40.50.1390,G3DSA:1.10.3950.10,Coil
MSIIEEQVKRNQYIEEVAAYIRVSTQEQKLHGISIEAQIEKLTEYAEKHGMKIVEWYKDEGVSGRKLIKKRPELQRMIQDAEKGKFKRIIFIKLDRFFRSVAEYHACMKRLAVGGVIWTATEEKYDLSTPSGEAFVNMKLTMAQFEADQAGERIRMVNEYKIKSGQPLFGAQCLPFGYTVSAPENGERHKYIAKEHEEIAMDLINHALTHGAIRGAMSYVNNKYGMSLSYNACINMLKNEMICGEYKGNPNYCEPYISREEFDRLQKLISRTPRDTGEKRTYIFSGLILCPNCGRRLTGGTHSPNKGIRNVTYKTYRCNSKLRDKKCDYGNTVFEETLEKVLLDKIESIVDRKMIEVNAIEAESEKTSKYNVAELQAELDRLNYSWQKNRIKSAEEYDRKYDAIVEKIEAAQAEQQQMGHVDYERIQCLFQSGWRDLYNSLDDEHKRSFWRSFIEEIEIDWGKGRYGKRDIKDITFF

SEQ ID NO: 7221 - protein, 477 aa, Unknown
  Description of Unknown: Integrase B7222 sequence
  PTHR30461:SF3,cd00338,SM00857,G3DSA:1.10.10.2600,IPR036162, PF13408,IPR025827,G3DSA:3.40.50.1390,PS51737,IPR006119, IPR038109,PF07508,IPR011109,SSF53041,PTHR30461, PS51736,Coil,PF00239
MKYAAAYIRVSDDRQDEYSPDSQLKLIREYAGRNGYCVPDEYVFYDDGISGRSVKKRKAFNDMIAFAKSKEHPFQAILVWKFSRFARNQEESIVYKSMLRRIGVSVISISETIDDSPFAPLIERIIEFMDEYYSTRLSQEVTRGMTEKASRGEAMSAGAFGYDLQNKVFTPNEDAPTVRYIFNAFLSGKGYRKIAMELDAMGVKTYRGNPPDNRFVEYVLMNPVYAGKIRWSTDGRASRDRYKGDNSKVMYVDGKHQPIIDQDTFDQVQEKIMEQKRRYGKWQRKEQPVTFMLKGLLRCDACGATLTYIAARDPAVQCHNYARGKCKVSHYLSIRKANAAVIAAIEKSLETLEFNVLPKEQLQNEVVDYSLLIRKEEEKIKRASDAYDAGYDTLEEYGRKKRAFQNKIETLKAEQAKAEKQQSSEIPPQFVQQASFVLDLIKSPDTAESVKNEALRSIVDHITFKKPDNTLEIFYYI

SEQ ID NO: 7222 - protein, 477 aa, Unknown
  Description of Unknown: Integrase B7223 sequence
  IPR036162,PS51737,IPR011109,PTHR30461,PS00397, PF00239,G3DSA:1.10.10.2600,IPR006119,SSF53041,cd00338, SM00857,IPR025827,IPR038109,PS51736,IPR006118, PF13408,G3DSA:3.40.50.1390,PF07508,Coil
MPKDYRDGALYIRVSTDKQEELSPDAQKRLLLDYAKKNKILVNPEHIFMENGISGRKAQKRPEFQKMISLAKAKPAPFQVILVWKFSRFARNQEESIVYKSMLKKQCGIDVVSTSEPLIDGPFGSLIERIIEWMDEYYSINLSGEVVRGMTEKALRGGYQCTPPLGYKAVGEGKPFVVVPEEAKLVAYIFQQYCQYHKEPTAIARQINEMGIRTKRGGLFEKRTVSYILQNKFYIGDLEWNGITSKGQHETFISPELFEQARQIAAATFKPKKRRCVSSCKHWLSGLVKCSICGASLSYNTGKYPYFVCWRYAKGFHKVNSSISENRLIKAVLEYLEGLLNGMDFTVSYVEKDAPEITEHEQWEKDFQNLAVREQRIKIAYETGVDTLEEYKENKARLKQEREELERKKEQFIDVPAASDAKEQFLRKVRNVFDILKSDEVGNDTKGVFIRSIVEEIIYDKESDTLTFRLYSPKKAA

SEQ ID NO: 7223 - protein, 477 aa, Unknown
  Description of Unknown: Integrase B7224 sequence
  PTHR30461:SF3,SM00857,G3DSA:1.10.10.2600,IPR036162,PF13408, IPR025827,PS51737,G3DSA:3.40.50.1390,IPR006119,IPR038109, PF07508,SSF53041,IPR011109,PTHR30461,Coil, PS51736,cd00338,PF00239
MRDSKSKTVIIYNRVSTIMQDKNESLTEQTDECIRYCKTNGYEIYKILKDVKSGTKDDRAGYLELKKHIKRKDFDILVVLETSRIARKMKELVLFFSLLNENNIEYISIREPNYNTTTPDGKFAMNIRLGLIQFERDNTAERVTDRLYFKASKGQWVNGKPPIGYKLVNKRLEIDEEKAEIVRNIYEDFLNGYSLNQINNKLQFSWGSKQVKRILTNPTYKGYIRYGTRSNRKKNNREAFIVKGWHEAIIPEEKWEKVQEMYKNLNRKASNTKPTLLSGLLKCKECGNNYIRKRGGSYDKNLYYGCNLNNLRYSDKFFYKDIPECSSATIKGDLLEKAVIDTLKKQINDLNFNDIEIDKKRQVNIKQIDSSINKFKNRLNKIYELYIEDEIPKDKYLKDKKDIEARIISLEKQKKSFGEIEVEKSNNEMIQEYFSKIDLSNIEEANRILKIIVNKIVVYKKKKTPKDDFEVEIYLNI

SEQ ID NO: 7224 - protein, 477 aa, Unknown
  Description of Unknown: Integrase B7225 sequence
  PTHR30461:SF3,SM00857,IPR006118,G3DSA:1.10.10.2600,IPR036162, PS51737,G3DSA:3.40.50.1390,PS00397,IPR006119,IPR038109, PF07508,SSF53041,IPR011109,PTHR30461,Coil, PS51736,cd00338,PF00239
MKIAAAYLRVSTEEQDEYSLDSQLKLIREYAKNNDFLVPDEFVFTDDGVSGRNARKRESFQRMIALAKQKEPPFDSILLWKFSRFARNQEEAIVYKSLLKKAGIGVISISEPLPDGPFASLIERIIEWMDEYYSIRLAGEVKRGMIEKVSRGEPVCHPAFGYDLKEKRYYPNSDADWVRWVFSSFSSGMGMRQIAAHLADHGVRTGRGGLPDNRFVEYMLNNPLYIGKIRWSPEGRKASRRKYDDPSNMIVDGLHDAIIDMETWEKTQGRLKQLKAAYRKHQRPGQPVQFMLKGLVHCSSCGATLVYQSLACPSLQCHNYNRGKCKTSHSLSVSKANAAVISALEYSVDNLDFALDPDENTTKRASERDYKKLISAEQTKLGRVQQAYEAGIDTLEEYAEKKRRILEEIESLRQQANEEKNVQKFDPIEYAKKVSAVLELIKNPTVAENAKNEALRSILSRIVYEKKKQNLALYFYI

SEQ ID NO: 7225 - protein, 477 aa, Unknown
  Description of Unknown: Integrase B7226 sequence
  SM00857,IPR006118,G3DSA:1.10.10.2600,IPR036162,PF13408, IPR025827,PS51737,G3DSA:3.40.50.1390,IPR006119,IPR038109, PF07508,IPR011109,SSF53041,PF00239,PTHR30461, PS00397,Coil,cd00338
MRIGAAYIRVSTDDQLDISPESQLDEIQRYAKSHDILIPEEYIFMERTGRSGKRADNRPEFQRMIATAKEKPQPFEVILVWKFSRFARNQDESTFYKGMLRKKLKIDIESVSEPIMEGMYGRLIEMIIEWQDEFYSYNLGVEVKRGMAKKAELKGYQLVPPLGYAAVGNGKPYVIREDEYKIVEMIFRKYAVDRIDMTAIARQLNASGYLTRRGNPFEKRTIDRIIQNRFYVGTVEWNGFSFEGTHETRASVTDLFEQCQERRKAEFRPMRHRNVSTCKHWLSGLMRCSVCGATLSYTGSGAVPYFTCWKYSKGLHPESCSISVKKMERIVLRSLDGILESGHFEYTPAAASASGSPTDPSNEIQSIHTQLDRLRHQEERARIAYENEVYTLDEYKESKARLRSEIQRLSDELQRLLEQPAESAPPQKELLDRVRNVRDLLASPSVGFETKGNALRSILKCIVFDRKTEHFDFQYYA

SEQ ID NO: 7226 - protein, 477 aa, Unknown
  Description of Unknown: Integrase B7227 sequence
  PTHR30461:SF3,cd00338,SM00857,G3DSA:1.10.10.2600,IPR036162, PF13408,PS51737,G3DSA:3.40.50.1390,IPR025827,IPR006119, IPR038109,PF07508,IPR011109,SSF53041,PTHR30461, PS51736,Coil,PF00239
MKYAAAYIRVSDDRQDEYSPDSQLKLIREYAGRNGYCVPDEYVFYDDGISGRSVKKRKAFNDMIAFAKSKEHPFQAILVWKFSRFARNQEESIVYKSMLRRIGVSVISISETIDDSPFAPLIERIIEFMDEYYSTRLSQEVTRGMTEKASRGEAMSAGAFGYDLQNKVFTPNEDAPTVRYIFNAFLSGKGYRKIAMELNAMGVKTYRGNPPDNRFVEYILMNPVYAGKIRWSTDGRASRDRYKGDNSKVMYVDGKHQPIIDQDTFDQVQEKIMEQKRRYGKWQRKEQPVTFMLKGLVRCDTCGATLTYIAARDPAVQCHNYARGKCKVSHYLSIRKANAAVIAAIEKSLETLEFNVLPKEQLQNEAVDYSLLIRKEEEKIKRASDAYDAGYDTLEEYGRKKRAFQNKIEALKAEQAKVEKSQSGEIPPQFVQQASFVLDLIKSPDTAESVKNEALRSIVDHITFKKPDNTLEIFYYI

SEQ ID NO: 7227 - protein, 477 aa, Unknown
  Description of Unknown: Integrase B7228 sequence
  PTHR30461:SF3,SM00857,IPR006118,IPR036162,PF13408, PS51737,IPR025827,G3DSA:3.40.50.1390,PS00397,IPR006119, IPR011109,SSF53041,PTHR30461,Coil,PS51736, cd00338,PF00239
MKTALYCRVSTEEQARTGESILDQRQALERWARDHGHEIIGVYEDEGFSAHKSYKSRPGLSRLLDDVRAGKVELIAFTKFDRWTRRAADYYELQEVLDQNHVPWTAILEDYETVTADGRFKVGIMLSVNQHEAERTSERIKFTFAEKRRRGEIISGNMPKGYKLVDKKPVKDPETETGMNAFWRIYLSGAGLKPSIMAAESRGVRFSTSTGSFILRNAEAYTGKIQGVSCEPYITEEEAARVLATRKIKAKASGYTYLFTGLLYCGECAHRMGGHRNFWEHKDGSRGFQVYYNCSHRYRTNQRECSNSVNIYESDIERALVFGLSDAIEAEAVKMEAQIAEMRRQREAAQDVQPVREKLERRKRRAWEAYLDEIIDKKAYQREAEKIDAELAKIVQVPQIDEDAPRKIRETMPEGWRELYFKLDAQHRREFWLQTLQRIDVYPDRSISIAVKPGENPFITRIQRPDGYWIEIVKEKE

SEQ ID NO: 7228 - protein, 477 aa, Unknown
  Description of Unknown: Integrase B7229 sequence
  PTHR30461:SF3,SM00857,IPR006118,G3DSA:1.10.10.2600,IPR036162, PS51737,G3DSA:3.40.50.1390,PS00397,IPR006119,IPR038109, PF07508,IPR011109,SSF53041,PTHR30461,Coil, PS51736,cd00338,PF00239
MKIAAAYIRVSTDDQIEYSPDSQRKAILDYAKRNDYIVPQEYIFVDEGISGRSTKRPAFQQMIGTAKQKSHPFDAILVWKFSRFARNREDSVVYKSMLRKQCGVEVVSISEQIGEDKTSILIEALLEAMDEYYSINLSEEVVRGMSEKARRGGTLGRAPFGYTAKDGELLPNDDAKTVQWIFNAFLSGTGMRTIATQLNNNGIRTAYGKPWENRTVEYVLRNITYAGHQHWTPGGTKDMKHAEKIKGNTIVKNNAHTAIVSEEQFAAVQEKIAENKRKYKKHEQPEVGIPFLGKGLLRCSDCGGALCMLGRGNGIQCHNYAHGKCNVSHYIKLEYIDKMIVDKIKSDVEAQNFRTILIPENAAEGQEMQDNQKALERARKKLARVREAYENGIDTIEEYRQNKARIQKEIEELEAKPAPPKETQESVAEKLRQRILSNVTLLESDAPAGLKNDMLHTFVSKIVFDRKNTRVEVEYHG

SEQ ID NO: 7229 - protein, 477 aa, Unknown
  Description of Unknown: Integrase B7230 sequence
  PTHR30461:SF3,SM00857,G3DSA:1.10.10.2600,IPR036162,PF13408, PS51737,IPR025827,G3DSA:3.40.50.1390,IPR006119,IPR038109, PF07508,IPR011109,SSF53041,PF00239,PTHR30461, PS51736,Coil,cd00338
MRIALYPRVSTQEQALNGHSIDEQIERMNKYCEAMGWQVYKTYTDAGYSGANTDRPALKRMIKDIEAGKIDKVLVYKLDRLSRSQLDTLYLIEKVFLANNTDFVSMSENFDTSTPFGRAMIGILAVFAQLEREQIKERMMMGKEARAKKGLYHGSNCYPIGYDYIDGHLVPLEFEAIQIKMIFEMYAEGKAPLTIAEYLNNNGYKTRYGRWNDITVRKILRRKTYLGYIKYHDDWYKGEHEALISEDLFNTVQKIFDQRTEDYSYYKRREGRVNSYLGGMLFCDCCGGKYSKIISNSTKNGKKYRNTYYKCNSRTFKKRTLVRDPNCKNKTWKMDVLDNLVFDEIKKLALDPDYLKKIKTPQENDNRQSVIENQIESIKIQINKLMDLYTIGGMPVDLLQEKIHDLNNQQKKLEAEIEKIEDEKKEKITNADAMKMITSFSDVLERGDYSEIRASLTALIEKIVIKGEDIKIYWRFV

SEQ ID NO: 7230 - protein, 477 aa, Unknown
  Description of Unknown: Integrase B7231 sequence
  IPR036162,PS51737,IPR011109,PTHR30461,PS00397, PF00239,G3DSA:1.10.10.2600,IPR006119,SSF53041,cd00338, SM00857,IPR025827,IPR038109,PS51736,IPR006118, PF13408,G3DSA:3.40.50.1390,PF07508,Coil
MEMKVGAAYIRVSTDGQLDLSPDAQKREILKYAKANGIIIPEEFIFVENSGISGKKASRRPEFQRMIATARQRPTPFEAVLVWKFSRFARNQDESTFYKSMLRKKCGVDVISVTEPIMEGMYGRLIETIIEWSDEFYSYNLAQEVRRGMTEKAMRGGYQCKPPIGYAPTPDGVPVIVPDRAAIVQRIFQEFDQGYDRTGIARRLNADGFRTDRGNTFENRVVTYILQNPFYIGKIRWNYAAHGSRIANPEEEIILVNGQHEPIIDADLFDRVQKRLAAVPHVTRSRAPSTCSHWLSGVVRCSSCGSTLALGGPAGGRYFQCHAYAKGKCSVSHSIMAKKLEASLLDELQSTLQSGDFDFRMQPPKTPDRDVRTALKRIEQKEKKAREAYMAGIDTLDEYREIRNALRAEREALDVKPEIISREEARRILLGRIRELAQMLQSGDFTDEQKGMAVRSVFEKIVFDRPHNALHYFYRYS

SEQ ID NO: 7231 - protein, 477 aa, Unknown
  Description of Unknown: Integrase B7232 sequence
  PTHR30461:SF3,SM00857,G3DSA:1.10.10.2600,IPR036162,PF13408, PS51737,G3DSA:3.40.50.1390,IPR025827,IPR006119,IPR038109, PF07508,IPR011109,SSF53041,PF00239,PTHR30461, PS51736,Coil,cd00338
MKYAAAYIRVSDDRQDEYSPDSQLKLIREYAGRNGYCVPDEYVFYDDGISGRSVKKRKAFNDMIAFAKSKEHPFQAILVWKFSRFARNQEESIVYKSMLRRIGVSVISISETIDDSPFAPLIERIIEFMDEYYSTRLSQEVTRGMTEKASRGEAMSAGAFGYDLQNKVFTPNEDAPTVRYIFNAFLSGKGYRKIAMELNAMGVKTYRGNPPDNRFVEYILMNPVYAGKIRWSTDGRASRDRYKGDNSKVMYVDGKHQPIIDQDTFDQVQEKIMEQKRRYGKWQRKEQPVTFMLKGLLRCDTCGATLTYIAARDPAVQCHNYARGKCKVSHYLSIRKANAAVIAAIEKSLKTLEFNVLPKEQLQNEVVDYSLLIRKEEEKIKRASDAYDAGYDTLEEYGRKKRAFQNKIEALKAEQVKVEKSQSGEIPPQFVQQASFVLNLIKSPDTAESVKNEALRSIVDHITFKKPDNTLEIFYYI

SEQ ID NO: 7232 - protein, 477 aa, Unknown
  Description of Unknown: Integrase B7233 sequence
  PTHR30461:SF3,cd00338,SM00857,G3DSA:1.10.10.2600,IPR036162, PF13408,IPR025827,G3DSA:3.40.50.1390,PS51737,IPR006119, IPR038109,PF07508,IPR011109,SSF53041,PTHR30461, PS51736,Coil,PF00239
MKYAAAYIRVSDDRQDEYSPDSQLKLIREYAGKNGYCVPDEYVFYDDGISGRSVKKRKAFNDMIAFAKSKEHPFQAILVWKFSRFARNQEESIVYKSMLRRIGVSVISISETIDDSPFAPLIERIIEFMDEYYSTRLSQEVTRGMTEKASRGEAMSAGAFGYDLQNKVFTPNEDAPTVRYIFNAFLSGKGYRKIAMELDAMGVKTYRGNPPDNRFVEYILMNPVYAGKIRWSTDGRASRDRYKGDNSKVMYVDGKHQPIIDQDTFDQVQEKIMEQKRRYGKWQRKEQPVTFMLKGLLRCDTCGATLTYIAARDPAVQCHNYARGKCKVSHYLSIRKANAAVIAAIEKSLETLEFNVLPKEQLQNEVVDYSLLIRKEEEKIKRASDAYDAGYDTLEEYGRKKRAFQNKIEALKAEQAKVEKSQSGEIPPQFVQQASFVLDLIKSPDTAESVKNEALRSIVDHITFKKPDNTLEIFYYI

SEQ ID NO: 7233 - protein, 477 aa, Unknown
  Description of Unknown: Integrase B7234 sequence
  PTHR30461:SF3,SM00857,G3DSA:1.10.10.2600,IPR036162,PF13408, PS51737,IPR025827,G3DSA:3.40.50.1390,IPR006119,IPR038109, PF07508,IPR011109,SSF53041,PF00239,PTHR30461, PS51736,Coil,cd00338
MKYAAAYIRVSDDRQDEYSPDSQLKLIREYAGRNGYCVPDEYVFYDDGISGRSVKKRKAFNDMIAFAKSKEHPFQAILVWKFSRFARNQEESIVYKSMLRRIGVSVISISETIDDSPFAPLIERIIEFMDEYYSTRLSQEVTRGMTEKASRGEAMSAGAFGYDLQNKVFTPNEDAPTVRYIFNAFLSGKGYRKIAMELDAMGIKTYRGNPPDNRFVEYILMNPVYAGKIRWSTDGRASRDRYKGDNSKVMYVDGKHQPIIDQDTFDQVQEKIMEQKRRYGKWQRKEQPVAFMLKGLLRCDTCGATLTYIAARDPAVQCHNYARGKCKVSHYLSIRKANAAVIAAIEKSLETLEFNVLPKEQLQNEVVDYSLLIRKEEDKIKRASDAYDAGYDTLEEYGRKKRAFQNKIEALKAEQAKVEAQQSSEIPPRFVQQASFVLDLIKSPETAESVKNEALRSIVDHITFKKPDNTLEIFYYI

SEQ ID NO: 7234 - protein, 477 aa, Unknown
  Description of Unknown: Integrase B7235 sequence
  SM00857,G3DSA:1.10.10.2600,IPR036162,PS51737,G3DSA:3.40.50.1390, IPR006119,IPR038109,PF07508,IPR011109,SSF53041, PF00239,PTHR30461,PS51736,Coil,cd00338
MSNSSSFPAKISAIYCRESTEKQNIQSLIDMCKKAAKKINLQNIKVYYDVASGYNKDREQYSKLKEDIQNNLVDTLVLYESSRLTRDELEHHIFYGLLRVHNVKVYTVTHGWLDLQDADDTFLTNLLNLLDAREGRKTAKRSKDRMTELAEQGRWTGGPAPLGYKLVNKELVIVPEDAEKVKTIFKLFLDGKTRQSIANFFGYEVKKVRRLLENPVYIGKLKFHSVEIINKKKIHHKDYKVLDGIHEPIIDESTFSLVQGKLKNIKVERNTDVYIFKDLIKCTCGRKMYRVVNKYNYLKKSTNEISQKTENLYYCRTSDKYKSIGCGAIGIHEEELFEEVMASLQKIIFSLEVENIDTKFDDYQSQLALYKKELASLSRKEELLARQLLNSLISEEVFEKLMKELKEKKAFLEEKIKNLTTLITNKKNTNKNSEILKKYFFKLEKEKAPEKINNFLKLIIDEIEMVNDYRFYIHLKF

SEQ ID NO: 7235 - protein, 477 aa, Unknown
  Description of Unknown: Integrase B7236 sequence
  SM00857,IPR006118,G3DSA:1.10.10.2600,IPR036162, PS51737,G3DSA:3.40.50.1390,IPR006119,IPR038109, PF07508,SSF53041,IPR011109,PF00239, PTHR30461,PS00397,PS51736,Coil,cd00338
MENLKIAAAYIRVSTHDQEEYSPESQIKLIRDYAKNNGFILPEEFIFRDDGISGRRADIRPEFQRMISKAKETPAPFQVILVWKYSRFARNQEESIVYKALLKKENKIDVVSISEPLVEGPFGSLIERIIEWTDEYYSIRLSGEVKRGMTEKASRGEPVSIPAFGYDIKNKQYIPNEKEAPFVQMIFDDFISGMGTREIAIKLNTMEVRTHRGNFFENRNIDYILNNPVYIGKIRWTPTGRMKRNYDLEDSMIVDGEHQPLISNETWEQAQALLKKRKKMYAKYARKSNPKKPFMLQGIVRCSNCGSTLCMGVSGSLQCHSYAHGQCNKSHSITLNKINTLVISALETDLESGDITLIKKSGSRENQQEFIKRQIQAEKIKLRRVKEAYENGVDTLEEYKSNKQKIMERLGELQAKQEPVQDLEKEKKEFCMKHKEAPAYLQNASISIEDKNHYIRTFIDHIVFNRASGTVDVIYYN

SEQ ID NO: 7236 - protein, 477 aa, Unknown
  Description of Unknown: Integrase B7237 sequence
  PTHR30461:SF3,cd00338,SM00857,G3DSA:1.10.10.2600,IPR036162, PF13408,IPR025827,G3DSA:3.40.50.1390,PS51737,IPR006119, IPR038109,PF07508,IPR011109,SSF53041,PTHR30461, PS51736,Coil,PF00239
MKYAAAYIRVSDDRQDEYSPDSQLKLIREYAVRNGYCVPDEYVFYDDGISGRSVKKRKAFNDMIAFAKSKEHPFQAILVWKFSRFARNQEESIVYKSMLRRIGVSVISISETIDDSPFAPLIERIIEFMDEYYSTRLSQEVTRGMTEKASRGEAMSAGAFGYDLQNKVFTPNEDAPTVRYIFNAFLSGKGYRKIAMELDAMGVKTYRGNPPDNRFVEYILMNPVYAGKIRWSTDGRASRDRYKGDNSKVMYVDGKHQPIIDQDTFDQVQEKIMEQKRRYGKWQRKEQPVTFMLKGLLRCDTCGATLTYIAARDPAVQCHNYARGKCKVSHYLSIRKANAAVIAAIEKSLETLEFNVLPKEQLQNEVVDYSLLIRKEEEKIKRASDAYDAGYDTLEEYGRKKRAFQNKIETLKAEQAKVEKSQSGEIPPQFVQQASFVLNLIKSPDTAESVKNEALRSIVDHITFKKPDNTLEIFYYI

SEQ ID NO: 7237 - protein, 477 aa, Unknown
  Description of Unknown: Integrase B7238 sequence
  PTHR30461:SF3,IPR036162,PS51737,IPR011109,cd16903, PTHR30461,PS00397,PF00239,G3DSA:1.10.10.2600,IPR006119, SSF53041,cd00338,SM00857,IPR025827,IPR038109, PS51736,IPR006118,PF13408,G3DSA:3.40.50.1390,PF07508,Coil
MRCAIYARVSTEEQAVEGYSISAQKKKLTAYCEAQDWNVVGYYVDEGISAKNTNRPELIRMIDHIKKGLIDCVLVYRLDRLTRSVLDLYNLLDVFEKYDCKFKSATEVYDTTTAIGRLFITIIAALAQWERENIGERVRVGQQEKVRQGKYTSGRKPYGYDADHKEGVLTVIEEEAKVVRSIFNDYLKGHSAQRICKKLNTIGTPGRNYWNEKAILYILENPLYVGTLRWRKETEHYFEIPNSVPPIIDKELFDNVQKLRESRRESHPRSAYGNYIFSGIIKCPRCGRSLVGNYVTSKKKDGTVTKYKQYFCRGRKLNVCNMGSMSERKLEKVIIPYILSLHIHATDEDVSTGQSNTEDEIIQIKNELKVIEKRRKKWQYAWANEHLKDEEFTELMQEESDREKVLTEELYKLKPAENKKLKNDELKEILNDMKLNWNNLNDEEKKMLMQIILKRIVVERSDEWQAYELKIVEMEFN

SEQ ID NO: 7238 - protein, 477 aa, Unknown
  Description of Unknown: Integrase B7239 sequence
  cd00338,SM00857,IPR006118,G3DSA:1.10.10.2600,IPR036162, PS51737,G3DSA:3.40.50.1390,IPR006119,IPR038109,PF07508, IPR011109,SSF53041,PTHR30461,PS00397,PS51736, Coil,PF00239
MENLKIAAAYIRVSTHDQEEYSPESQIKLIRDYAKNNGFILPEEFIFRDDGISGRRADKRPEFQRMISKAKETPAPFQVILVWKYSRFARNQEESIVYKALLKKENKIDVVSISEPLVEGPFGSLIERIIEWTDEYYSIRLSGEVKRGMTEKASRGEPVSIPAFGYDIKNKQYIPNEKEAPFVQMIFDDFISGMGTREIAIKLNTMEVRTHRGNFFENRNIDYILNNPVYIGKIRWTPTGRMKRNYDLEDSMIVDGEHQPLISNETWEQAQALLKKRKKMYAKYARKSNPKKPFMLQGIVRCSNCGSTLCMGVSGSLQCHSYAHGQCNKSHSITLNKINTLVISALETDLESGDITLIKKSGSRENQQEFIKRQIQAEKIKLRRVKEAYENGVDTLEEYKSNKQKIMERLEELQAKQEPVQDLEKEKKEFCMKHKEAPAYLQNASISIEDKNHYIRTFIDHIVFNRASGTVDVIYYN

SEQ ID NO: 7239 - protein, 477 aa, Unknown
  Description of Unknown: Integrase B7240 sequence
  PTHR30461:SF3,cd00338,SM00857,G3DSA:1.10.10.2600,IPR036162, PF13408,PS51737,G3DSA:3.40.50.1390,IPR025827,IPR006119, IPR038109,PF07508,IPR011109,SSF53041,PTHR30461, PS51736,Coil,PF00239
MKYAAAYIRVSDDRQDEYSPDSQLKLIREYAGRNGYCVPDEYVFYDDGISGRSVKKRKAFNDMIAFAKSKEHPFQAILVWKFSRFARNQEESIVYKSMLRRIGVSVISISETIDDSPFAPLIERIIEFMDEYYSTRLSQEVTRGMTEKASRGEAMSAGAFGYDLQNKVFTPNEDAPTVRYIFNAFLSGKGYRKIAMELDAMGVKTYRGNPPDNRFVEYVLMNPVYAGKIRWSTDGRASKDRYKGDNSKVMYVDGKHQPIIDQDTFDQVQEKIMEQKRRYGKWQRKEQPVTFMLKGLLRCDTCGATLTYIAARDPAVQCHNYARGKCKVSHYLSIRKANAAVIAAIEKSLETLEFNVLPKEQLQNEVVDYSLLIRKEEEKIKRASDAYDAGYDTLEEYGRKKRAFQNKIEALKAEQAKVEKSQSGEIPPQFVQQASFVLDLIKSPDTAESVKNEALRSIVDHITFKKPDNTLEIFYYI

SEQ ID NO: 7240 - protein, 477 aa, Unknown
  Description of Unknown: Integrase B7241 sequence
  IPR036162,PS51737,IPR011109,PTHR30461,PS00397, PF00239,G3DSA:1.10.10.2600,IPR006119,SSF53041,cd00338, SM00857,IPR025827,IPR038109,PS51736,IPR006118, PF13408,G3DSA:3.40.50.1390,PF07508,Coil
MPKDYRDGALYIRVSTDKQEELSPDAQKRLLLDYAKKNKILVNPEHIFMENGISGRKAQKRPEFQKMISLAKAKPAPFQVILVWKFSRFARNQEESIVYKSMLKKQCGIDVVSTSEPLIDGPFGSLIERIIEWMDEYYSINLSGEVVRGMTEKALRGGYQCTPPLGYKAVGEGKPFVVVPEEAKLVAYIFQQYCQCHKEPTAIARQINEMGIRTKRGGLFEKRTVSYILQNKFYIGDLEWNGITSKGQHETFISPELFEQARQIAAATFKPKKRRCVSSCKHWLSGLVKCSICGASLSYNTGKYPYFVCWRYAKGFHKVNSSISENRLIKAVLEYLEGLLNGMDFTVSYVEKDAPEITEHEQWEKDFQNLAVREQRIKIAYETGVDTLEEYKENKARLKQEREELERKKEQFIDVPAASDAKEQFLRKVRNVFDILKSDEVGNDTKGVFIRSIVEEIIYDKESDTLTFRLYSPKKAA

SEQ ID NO: 7241 - protein, 477 aa, Unknown
  Description of Unknown: Integrase B7242 sequence
  PTHR30461:SF3,SM00857,G3DSA:1.10.10.2600,IPR036162,PF13408, PS51737,G3DSA:3.40.50.1390,IPR025827,IPR006119,IPR038109, PF07508,IPR011109,SSF53041,PTHR30461,Coil, PS51736,cd00338,PF00239
MRDSKSKTVIIYNRVSTIMQDKNESLTEQTDECIRYCKTNGYEIYKILKDVKSGTKDDRAGYLELKKHIRRRDFDILVVLETSRIARKMKELVLFFSLLNENNIEYISIREPNYNTTTPDGKFAMNIRLGLIQFERDNTAERVTDRLYFKASKGQWVNGKPPIGYKLVNKRLEIDEEKAEIVKNIYEDFLNGYSLNQINNKLQFSWGSKQVKRILTNPTYKGYIRYGTRSNRKKNNREAFIVKGWHEAIIPEDKWEKVQEMYKSLNRKASNTKPTLLGGLLKCKECGNNYIRKRGGSYDKNLYYGCNLNNLRYSDKFFYKDILECSSATIKGDLLEKAVIDTLKKQINNLNFNDIEIEKKRQVNIKQIDSSINRFKNRLNKIYELYIEDEIPKDKYLKDKKDIEARIISLEKQKKSFGEIEVEKSNNEMIQEYFSKIDLSNIEEANRILKIIVNKIVVYKKKKTPKDDFEVEIYLNI

SEQ ID NO: 7242 - protein, 477 aa, Unknown
  Description of Unknown: Integrase B7243 sequence
  PTHR30461:SF3,SM00857,G3DSA:1.10.10.2600,IPR036162,PF13408, IPR025827,G3DSA:3.40.50.1390,PS51737,IPR006119,IPR038109, PF07508,IPR011109,SSF53041,PTHR30461,Coil, PS51736,cd00338,PF00239
MRDSKSKTVIIYNRVSTIMQDKNESLTEQTDECIRYCKTNGYEIYKILKDVKSGTKDDRAGYLELKKHIRRRDFDILVVLETSRIARKMKELVLFFSLLNENNIEYISIREPNYNTTTPDGKFAMNIRLGLIQFERDNTAERVTDRLYFKASKGQWVNGKPPIGYKLVNKRLEIDEEKAEIVRNIYEDFLNGYSLNQINNKLQFSWGSKQVKRILTNPTYKGYIRYGTRSNRKKNNREAFIVKGWHEAIIPEDKWEKVQEMYKSLNRKASNTKPTLLSGLLKCKECGNNYIRKRGGSYDKNLYYGCNLNNLRYSDKFFYKDIPECSSATIKGDLLEKAVIDTLKKQINDLNFNDIEIDKKRQVNIKQIDSSINKFKNRLNKIYELYIEDEIPKDKYLKDKKDIEARIISLEKQKKSFGEIEVEKSNNEMIQEYFSKIDLSNIEEANRILKIIVNKIVVYKKKKTPKDDFEVEIYLNI

SEQ ID NO: 7243 - protein, 477 aa, Unknown
  Description of Unknown: Integrase B7244 sequence
  cd03768,PTHR30461:SF3,SM00857,IPR006118,G3DSA:1.10.10.2600, IPR036162,PS51737,G3DSA:3.40.50.1390,IPR006119,IPR038109, PF07508,IPR011109,SSF53041,PTHR30461,PS00397, PS51736,Coil,PF00239
MISYFRRGEAGRLENMAVACYVRVSTENQLENYSIEEQTERLKLYCKSKDYEIYDMYIDGGYSGGNMERPALQKLLSDVQGGRIHAVLVYKLDRLSRSQKDTLNIIEDHFLKNGVDFISLNENFDTSTPFGKAMIGILSVFAQLEKDQITERFTMGRIGRSKAGYYHGGSTAPTGYDYKDGKLIVNPVTSQQVQEVYREFLNGKSINSIQRQMHEKYGGWSSAALVLNVLKNSVYIGMVKFKGVAYPGLHTPIISREQFERVQQYLNSEERESRKTTAQKTPFKAGFTLSGLVFCKRCGAKFSAEHGNYTCYSRSKSSPKRVVDPNCKNDKWKIADLDELIFDEIEHMSIDDDRLNQVVSSVKQPSAVDEASFQAEIEKTDQQIKRLLDLYQIGTLPISEISERVHSLQAEKEKLENQAKENRRQMSVKERIERFKQLVSQIQYMRTQSVEKKRIYVAELIETIYIDGKEVSINWRI

SEQ ID NO: 7244 - protein, 477 aa, Unknown
  Description of Unknown: Integrase B7245 sequence
  PTHR30461:SF3,SM00857,G3DSA:1.10.10.2600,IPR036162,PF13408, PS51737,G3DSA:3.40.50.1390,IPR025827,IPR006119,IPR038109, PF07508,IPR011109,SSF53041,PTHR30461,Coil, PS51736,cd00338,PF00239
MRDSKSKTVIIYNRVSTIMQDKNESLTEQTDECIRYCKTNGYEIYKILKDVKSGTKDDRAGYLELKKHIRRRDFDILVVLETSRIARKMKELVLFFSLLNENNIEYISIREPNYNTTTPDGKFAMNIRLGLIQFERDNTAERVTDRLYFKASKGQWVNGKPPIGYKLVNKRLEIDEEKAEIVKNIYEDFLNGYSLNQINNKLQFSWGSKQVKRILTNPTYKGYIRYGTRSNRKKNNREAFIVKGWHEAIIPEDKWEKVQEMYKSLNRKASNTKPTLLGGLLKCKECGNNYIRKRGGSYDKNLYYGCNFNNLRYSDKFFYKDILECSSATIKGDLLEKAVIDTLKKQINDLNFNDIEIEKKRQVNIKQIDSSINRFKNRLNKIYELYIEDEIPKDKYLKDKKDIEARIISLEKQKKSFGEIEVEKSNNEMIQEYFSKIDLSNIEEANRILKIIVNKIVVYKKKKTPKDDFEVEIYLNI

SEQ ID NO: 7245 - protein, 477 aa, Unknown
  Description of Unknown: Integrase B7246 sequence
  PTHR30461:SF3,IPR036162,PS51737,IPR011109,PTHR30461, PS00397,PF00239,G3DSA:1.10.10.2600,IPR006119,SSF53041, cd00338,SM00857,IPR025827,IPR038109,PS51736, IPR006118,PF13408,G3DSA:3.40.50.1390,PF07508,Coil
MSALKNGALYIRVSTADQTELSPDAQQRLLLDYAKKNGIVIAKEFIFEESVSGRHADRRPKFQEMIALAKQDSHPIDVILVWKYSRFARNQEESIVYKSLLKKNNIDVISISEPLIDGPFGTLIERIIEWMDEYYSIRLSGEVMRGMKEKALKHGYQATPSLGYRAVGGGKPFVIDEAEYQIVKYIMDQYDLENHDPTAIARSCNELGYHTKRGNLMERRSVERILRNPFYAGTVIWNGISFEGAHEARLDRERFNNRIKRMDARRRTPKSRNPSACKHWLSGLLKCPVCGATLTVTAGNTSCPYFQCWKYAKGLHKVSNSITVAKAERTVFRYFDEIILAGADFSYTVRNKTLDVEKDDTVARLQQALDHLSMRESRIKLAFENGIDTLEEYGANKKRLAEERQSLQEELDRVLTPAAPPETISKEDFRKEIKNINDILKNPEEPAEKKGLLLRSIVDRIVYEKASGTMYFDFFVS

SEQ ID NO: 7246 - protein, 477 aa, Unknown
  Description of Unknown: Integrase B7247 sequence
  PTHR30461:SF3,cd00338,SM00857,G3DSA:1.10.10.2600,IPR036162, PF13408,PS51737,IPR025827,G3DSA:3.40.50.1390,IPR006119, IPR038109,PF07508,SSF53041,IPR011109,PTHR30461, PS51736,Coil,PF00239
MKYAAAYIRVSDDRQDEYSPDSQLKLIREYAGRNGYCVPDEYVFYDDGISGRSVKKRKAFNDMIAFAKSKEHPFQAILVWKFSRFARNQEESIVYKSMLRRIGVSVISISETIDDSPFAPLIERIIEFMDEYYSTRLSQEVTRGMTEKASRGEAMSAGAFGYDLQNKVFTPNEDAPTVRYIFNAFLSGKGYRKIAMELDAMGVKTYRGNPPDNRFVEYILMNPVYAGKIRWSTDGRASRDRYKGDNSKVMYVDGKHQPIIDQDTFDQVQEKIMEQKRRYGKWQRKEQPVTFMLKGLVRCDTCGATLTYIAARDPAVQCHNYARGKCKVSHYLSIRKANAAVIAAIEKSLETLEFNVLPKEQLQNEVVDYSLLIRKEEEKIKRASDAYDAGYDTLEEYGRKKRAFQNKIEVLKAEQAKVEKSQSGEIPPQFVQQASFVLDLIKSPDTAESVKNEALRSIVDHITFKKPDNTLEIFYYI

SEQ ID NO: 7247 - protein, 477 aa, Unknown
  Description of Unknown: Integrase B7248 sequence
  SM00857,G3DSA:1.10.10.2600,IPR036162,PS51737,G3DSA:3.40.50.1390, IPR006119,IPR038109,PF07508,IPR011109,SSF53041, PF00239,PTHR30461,PS51736,Coil,cd00338
MSNSSSFPAKISAIYCRESTEKQNIQSLIDMCKKAAKKINLQNIKVYYDVASGYNKDREQYSKLKEDIQNNLVDTLVLYESSRLTRDELEHHIFYGLLRVHNVKVYTVTHGWLDLQDADDTFLTNLLNLLDAREGRKTAKRSKDRMTELAEQGRWTGGPAPLGYKLVNKELVIVPEDAEKVKTIFKLFLDGKTRQSIANFFGYEVKKVRRLLENSVYIGKLKFHSVEIINKKKILHKDYKVLNGIHEPIIDESTFSLVQGKLKNIKVERNTDVYIFKDLIKCTCGRKMYRVVNKYNYLKKSTNEISRKTENLYYCRTSDKYKSLGCGAIGIHEEELFEEVMASLKKIIFSLEVENIDTKFDDYQSQLVLYKKELASLSRKEELLARQLLNSLISEEVFEKLMKELKEKKAFLEEKIKNLTTLITNKKNTNKNSEILKKYFFKLEKEKAPEKINNFLKLIIDEIEMVNDYRFYIHLKF

SEQ ID NO: 7248 - protein, 477 aa, Unknown
  Description of Unknown: Integrase B7249 sequence
  IPR036162,PS51737,IPR011109,PTHR30461, PS00397,PF00239,G3DSA:1.10.10.2600,IPR006119, SSF53041,cd00338,SM00857,IPR025827,IPR038109,PS51736 ,IPR006118,PF13408,G3DSA:3.40.50.1390,PF07508,Coil
MEMKIGAAYVRVSTDGQLDLSPDAQKREILKYAKANGIIVPEEFIFIENSGISGKKASRRPEFQRMIATARQRPAPFEAVLVWKFSRFARNQDESTFYKSMLRKKCGVDVISVTEPIMEGMYGRLIETIIEWSDEFYSYNLAQEVRRGMTEKAMRGGYQCKPPIGYAPTPDSVPVIVPDRAAIVQRIFQEFDQGYDRTGIARRLNADGFRTDRGNTFENRVVTYILQNPFYIGKIRWNHAAHGSRIANPEEDIILVNGRHEPIIDTDLFDRVQKRLAAVPHVTRSRAPSTCSHWLSGVVRCSSCGSTLALGGPADGRYFQCHAYAKGKCSVSHSIMAKKLEASLLDELQSTLQTGDFDFRMQPPKTPDRDVRTALKRIEQKEKKAREAYMAGIDTLDEYREIRNALRAEREALDVKPETISREEARRILLGRIRELAQMLQSGDFTDEQKGMAVRSVFEKIVFDRPHNALHYFYHYS

SEQ ID NO: 7249 - protein, 477 aa, Unknown
  Description of Unknown: Integrase B7250 sequence
  PTHR30461:SF3,SM00857,G3DSA:1.10.10.2600,IPR036162,PS51737, G3DSA:3.40.50.1390,IPR006119,IPR038109,PF07508,SSF53041, IPR011109,PF00239,PTHR30461,PS51736,Coil, cd00338
MAGVKNITVIPAKKRVGNTVTAEDKPKLKVVAYCRVGTDSEEQATSHDAQVTHYTEFIRKNPEWEFAGIYADDGISGTNTKKREEFNRMIEDTMAGKIDMIITKSISRFARNTLDCLKCIRQLKEKNVPVFFEKENINTMDSKGEVLLTIMASLAQQESESLSKNVKMGIQFRYQNGEVQVNHNWFLGYTKDENGHLIIDEDQTIIVRRIFREYLQGASLKTIADGLMADGIPTATGNKKWRGDGIRKILTNEKYMGDALLQKTYTVDVLTKKRVSNNGIVPQYYVENNHEAIIPRQLFMQVQEELFRRAHLKTEGGKTKRVYSSKYALSSIVYCGKFGDLFRRVAWKARGASYNKWRCASRIEKGPKEGCDADAISETEILNAVVRAINKTLGGREQFLVQLQHNIEDVLNGDSTATLEYIDKRMAELQEKLVMCVNKNAEYDVIANEIDALREKKAAVVTRDGEQEMLRKRIDEM

SEQ ID NO: 7250 - protein, 477 aa, Unknown
  Description of Unknown: Integrase B7251 sequence
  PTHR30461:SF3,SM00857,G3DSA:1.10.10.2600,IPR036162,PF13408, IPR025827,G3DSA:3.40.50.1390,PS51737,IPR006119,IPR038109, PF07508,IPR011109,SSF53041,PTHR30461,Coil, PS51736,cd00338,PF00239
MKYAAAYIRVSDDRQDEYSPDSQLKLIREYAGRNGYCVPDEYVFYDDGISGRSVKKRKAFNDMIAFAKSKEHPFQAILVWKFSRFARNQEESIVYKSMLRRIGVSVISISETIDDSPFAPLIERIIEFMDEYYSTRLSQEVTRGMTEKASRGEAMSAGAFGYDLQNKVFTPNEDAPTVRYIFNAFLSGKGYRKIAMELNAMGVKTYRGNPPDNRFVEYILMNPVYAGKIRWSTDGRASRDRYKGDNSKVMYVDGKHQPIIDQDTFDQVQEKIMEQKRRYGKWQCKEQPVTFMLKGLLRCDTCGATLTYIAARDPAVQCHNYARGKCKVSHYLSIRKANAAVIAAIEKSLKTLEFNVLPKEQLQNEVVDYSLLIRKEEEKIKRASDAYDAGYDTLEEYGRKKRAFQNKIEALKAEQVKVEKSQSGEIPPQFVQQASFVLNLIKSPDTAESVKNEALRSIVDHITFKKPDNTLEIFYYI

SEQ ID NO: 7251 - protein, 477 aa, Unknown
  Description of Unknown: Integrase B7252 sequence
  PTHR30461:SF3,IPR036162,PS51737,IPR022019,IPR011109,PTHR30461 ,PS00397,PF00239,PF12207,G3DSA:1.10.10.2600,IPR006119,SSF53041 ,cd00338,SM00857,IPR038267,IPR025827,IPR038109,PS51736, IPR006118,PF13408,G3DSA:3.40.50.1390,G3DSA:1.10.3950.10,Coil
MSIIEEQVKRNQYIEEVAAYIRVSTQEQKLHGISIEAQIEKLTEYAEKHGMKIVEWYKDEGVSGRKLIKKRPELQRMIQDAEKGKFKRIIFIKLDRFFRSVAEYHECMKRLAIGGVIWTATEEKYDLSTPSGEAFVNMKLTMAQFEADQAGERIRMVNEYKIKSGQPLFGAQCLPFGYTVSAPENGERHKYIAKEHEEIAMDLINHALTHGAIRGAMSYVNNKYGMSLSYNACINMLKNEMICGEYKGNPNYCEPYISREEFDRLQKLISRTPRDTGEKRTYIFSGLILCPNCGRRLTGGTHSPNKGIRNVTYKTYRCNSKLRDKKCDYGNTVFEETLEKVLLDKIESIVDRKMIEVNAIEAESEKTSKYNVAELQAELDRLNYSWQKNRIKSAEEYDRKYDAIVEKIEAAQAEQQQMGHVDYERIQCLFQSGWRDLYNSLDDEHKRSFWRSFIEEIEIDWGKGRYGKRDIKDITFF

SEQ ID NO: 7252 - protein, 477 aa, Unknown
  Description of Unknown: Integrase B7253 sequence
  PTHR30461:SF3,SM00857,IPR006118,G3DSA:1.10.10.2600,IPR036162, PS51737,G3DSA:3.40.50.1390,PS00397,IPR006119,IPR038109, PF07508,IPR011109,SSF53041,PTHR30461,Coil, PS51736,cd00338,PF00239
MKIAAAYIRVSTDDQIEYSPDSQRKAILDYAKRNDYIVPQEYIFVDEGISGRSTKRPAFQQMIGTAKQKSHPFDAILVWKFSRFARNREDSVVYKSMLRKQCGVEVVSISEQIGEDKTSILIEALLEAMDEYYSINLSEEVVRGMSEKARRGGTLGRAPFGYTAKNGELLPNDDAKTVQWIFNAFLNGTGMRTIATQLNSSGIRTAYGKPWENRTVEYVLRNITYAGHQHWTPGGTKDMKHAEKIKGNTIVKNNAHTAIVSEEQFAAVQEKIAENKRKYKKHEQPEVGIPFLGKGLLRCSDCGGALCMLGRGNGIQCHNYAHGKCNVSHYIKLEYIDKMIVDKIKSDVEAQNFRTILIPENAAESQEMQDNKRTLERARKKLARVREAYENGIDTIEEYRQNKARIQKEIEELEAKPAPPKETQESAAEKLRQRILSNVTLLESDAPAGLKNDMLHTFVSRIVFDRKNTRVEVEYHG

SEQ ID NO: 7253 - protein, 477 aa, Unknown
  Description of Unknown: Integrase B7254 sequence
  cd00338,SM00857,G3DSA:1.10.10.2600,IPR036162,PF13408, PS51737,G3DSA:3.40.50.1390,IPR025827,IPR006119,IPR038109, PF07508,IPR011109,SSF53041,PTHR30461,PS51736, Coil,PF00239
MKRQVLYEMIKKIAVLYMRMSTDMQEHSIESQERVLMEYAKRNGYIVIRKYIDRGISGQHASKRPDFMKMIDDSETGEFQYVLIYDSSRFARNLVESLTYKSILKENCVRLISMTEPNLEDDEMSLYIDAMQGAANEIYVRKLSKSTKRGHNERALRGDLPGNAHFGVKLLPDKSIVLDEVKAPIMRWMYEAIYHDDATYYSISETLAAKGIKSQRGNIIDSRQVKRMLMNIKNKAYHWAERDGKPVLIKGNYPAVIEEELFDAVQEIIAERAKHYKKHEKPAEFRKHWLSGLLVCPYCGGGYSYNTRKPPQHDAFRCGNQTRGACKKGSQILVDAAVEMVLDKMSEVYTGPLAPYVKNITVSQPEPQIDYDKEIRLLEAQLKRAKQAYLAEIDTIEEYAQNKRRISSNIKELQEAKCQAQEGATLNEPQFKVKLLNVITLLKSDCPMSEKIPAARSIIEKILVDPRNKTMDIYFFA

SEQ ID NO: 7254 - protein, 476 aa, Unknown
  Description of Unknown: Integrase B7255 sequence
  PTHR30461:SF3,SM00857,IPR006118,G3DSA:1.10.10.2600,IPR036162, PS51737,G3DSA:3.40.50.1390,PS00397,IPR006119,IPR038109, PF07508,IPR011109,SSF53041,PTHR30461,Coil, PS51736,cd00338,PF00239
MKIAAAYVRVSTDDQLEYSPDSQLQAIRDYAKSHDLILAEEYIFREEDGRSGRQAEKRPEFMRMISTAKQQPPPFEVILCWKYSRFARNQEESIVYKSMLKKDGIEVVSISEPLIDGPFGSLIERIIEWMDEYYSIRLSGEVKRGMTEKVSRGEPVTIPPLGYLMENKQLVPDPEMAPVISMLFDEFAAGTPMLQLARRLNEMGIRTRRGCKIEYRTLNYIMQNPVYIGKIRWTPTGRANRYYKTDDTLIVDGNHQPIITTEQWEKAQAKIAENKQKFPRYQRDTASKFMLRGLVHCSNCGATLVTSTPGSLQCNHYAKGLCSISHSITITKLDKAVMQGLEHDALDMGGNLKIEYRTQSAPVATATIKAQIKKEQNKLQRCKEAYQGGVDTLAEYRSNKEAILSTIADLEKQLNTAPTAIPAPDPQALRDKIIAAIPTLKDPDVTPTVKNNLLRCFISKIVYTKSNEEIEMYYYM

SEQ ID NO: 7255 - protein, 476 aa, Unknown
  Description of Unknown: Integrase B7256 sequence
  PTHR30461:SF3,SM00857,IPR006118,IPR036162,PF13408, IPR025827,G3DSA:3.40.50.1390,Coil,IPR006119,SSF53041, PTHR30461,PS00397,PS51736,cd00338,PF00239
MKIALYCRVSTEEQARTGESILDQRQALERWARDRGHEIIGVYEDEGFSAHKSYKSRPGLSRLLDDVRDGKVELIAFTKFDRWTRRAADYYELQEVLDRHHVPWTAILEDYETVTADGRFKVGIMLSVNQHEAERTSERIKFTFAEKRRRGEIISGNMPKGYKLVDKKPAKDPETEDGMNVFWRTYLSGAGLKPAIMAAESRGVRLSTSTGSFILRNAEAYTGKIQGVSCEAYITEEEAARVLATRKIKAKASGYTYLFTGLLYCGECAHRMGGHRNFWEHKDGSRGFQVFYNCSHRYRTNQRECSNSVNIYESDIERALVFGLSDAIEAEAVKMEAQIAEMRRQREAAQDVQPVREKLERRKRRAWEAYLDEIIDKKAYQREAAKIDAELAKIVQVPQIDEDAPRKIRETMPEGWRELYFKLDAQHRREFWMQTLQRIDVYPDRSISITVKPGENPFITRIQQPDGYWIEIVPEK

SEQ ID NO: 7256 - protein, 476 aa, Unknown
  Description of Unknown: Integrase B7257 sequence
  PTHR30461:SF3,cd00338,SM00857,G3DSA:1.10.10.2600,IPR036162, PF13408,PS51737,G3DSA:3.40.50.1390,IPR025827,IPR006119, IPR038109,PF07508,IPR011109,SSF53041, PTHR30461,PS51736,Coil,PF00239
MKRAVFYGRYSSDRQTEQSIEGQRRVCEEFAKAEQIQIVGEYIDRATSGTSTEHREQFQKMLKDSKNGGWNYVLVYKLDRFARSRYDSAISKQQLKKNGVKVLSATERITDSPEGILIEGLLESMDEYFSRELSRKCKRGIRESIIKGHNFGGRVLYGYDRKDKRFVVNEEQAVNVRRIFKSYLSGCTIQSIADQLNADGYRTNYGNEFKRYTVSDILHNDKYTGIHYIDGIEEPETCPAIISQTTFERVKEKLNQSAHRSREHTTGHTYALSGLLQCGVCGRYVCGSSVERKYFYYACRSREHAENSVHIHADKLEQVVIDALQTFFTEEQVSTLAERLYQIYTTDMDGKPDRSKRLNEIEKQIQGTVNALIACPSSKALQEKLTQLEEQKAEIEKMPILQPQLKKEHFENYFHWLALRLEHIEDRQTFFHTVIHKVLVYPEKAVIILNMTDEMADPPKREQVEAFMSNVGEVSL

SEQ ID NO: 7257 - protein, 476 aa, Unknown
  Description of Unknown: Integrase B7258 sequence
  SM00857,IPR006118,G3DSA:1.10.10.2600,IPR036162,PF13408, IPR025827,PS51737,G3DSA:3.40.50.1390,IPR006119,IPR038109, PF07508,IPR011109,SSF53041,PF00239,PTHR30461, PS00397,Coil,cd00338
MRIGAAYIRVSTDDQLDISPESQLDEIQRYAKSHDILIPEEYIFMERTGRSGKRADNRPEFQRMIATAKEKPQPFEVILVWKFSRFARNQDESTFYKGMLRKKLKIDIESVSEPIMEGMYGRLIEMIIEWQDEFYSYNLGVEVKRGMAKKAELKGYQLVPPLGYAAVGNGKPYVIREDEYKIVEMIFHMYAVDRLDMTAIARQLNASGYLTRRGNPFEKRSIDRIIQNRFYVGTVEWNGFSFEGTHKTRASVTELFEQCQERRKAEFRPMRHRNVSTCKHWLSGLMRCSVCGATLSYTGSGAVPYFTCWKYSKGLHPESCSISVKKMERIVLRSLDGILESGHFEYTPAASASGSPADPSNEIQSIHTQLDRLRHQEERARIAYENEVYTLDEYKESKARLRSEIQRLSDELQRLLEQPAESAPPQKELLDRVRNVRDLLASPSVGFETKGNALRSILKCIIFDRKTEHFDFQYYA

SEQ ID NO: 7258 - protein, 476 aa, Unknown
  Description of Unknown: Integrase B7259 sequence
  PTHR30461:SF3,IPR036162,PS51737,IPR011109,PTHR30461, PS00397,PF00239,G3DSA:1.10.10.2600,IPR006119,SSF53041, SM00857,IPR025827,IPR038109,PS51736,cd03768, IPR006118,PF13408,G3DSA:3.40.50.1390,PF07508,Coil
MKVALYVRVSTLEQAEEGYSIGEQKDKLKKYCEIKDWTITKIYSDPGFSGSNINRPSIQQLIKDAGTGLYDAVLVYKLDRLSRSQKDTLYLIEDVFQKNNIHFISLSENFDTSTAFGKAMIGILSVFAQLEREQIKERMMMGKTGRAKAGKITAWSNIPFGYIKDNDTYKIDPLRADVVKDIYKRYLSGQSITRIYQQLNEEGHIGKDTKWSYRTVRQTLDNATYTGMVNYRGKTYQGKHKAIITKETFDTVQQQLKLRQIEAEKKFYAHPFQSKYMLSGLLKCGYCGSTLAINKSHRKNKAPRWRYNCPVTHSRNHSKTYARRADNCQFKFIYRDVVENIVIDEIRKLSLNPKSVLVRPKQNDKTETVNVEAIKKELSGIKKKQDRLVDLYLIADSLSLEELNKRSKELKRQQEALESKLKPVQNESSNIVEFEELLLKAKNIEELNYQQQTHLVRQLIKSIDVTNEELTINWNI

SEQ ID NO: 7259 - protein, 476 aa, Unknown
  Description of Unknown: Integrase B7260 sequence
  SM00857,IPR006118,G3DSA:1.10.10.2600,IPR036162,PF13408, IPR025827,G3DSA:3.40.50.1390,IPR006119,IPR038109,PF07508, SSF53041,IPR011109,PF00239,PTHR30461,PS00397, PS51736,Coil,cd00338
MAKLRNGALYIRVSTADQTELSPDAQQRLLLDYAKKNGIIISKDYVFEESVSGRHADKRPKFQEMIGIAKQESHPIDVILVWKYSRFARNQEESIVYKSLLKKSDVDVISISEPLIDGPFGTLIERIIEWMDEYYSIRLSGEVIRGMKEKALKHGYQSTPCLGYDAVGGGRPFVINESEYRIVQYIMDQYDLYDQDETAIARKCNDLGFRSKRGNLFEQRNVDLILKNPFYTGTVVWNGISFEGSHETRLSKERFEKRIALMRARRRPAKARNISTCKHWLSGLLRCSVCGATLSLAGSGSYRYFQCWKYSKGFHKGSQSLSAAKAEAAVCDYFDRILAGADFTYTVRNIPDQKESDELDLLRQELDQIAVKEARVKLAYENGIDTLEEYKENRRRLKESREELQEKIDVATATTQPDDSDSHARETLLKEIRSVSEILKDPAESYERKGLLLRSIVDGITYDKEKKRLYFNFFIS

SEQ ID NO: 7260 - protein, 476 aa, Unknown
  Description of Unknown: Integrase B7261 sequence
  PTHR30461:SF3,SM00857,G3DSA:1.10.10.2600,IPR036162,PS51737, G3DSA:3.40.50.1390,IPR006119,IPR038109,PF07508,SSF53041, IPR011109,PTHR30461,Coil,PS51736,cd00338, PF00239
MNIAAAYIRVSDDRQDEYSPDSQLKLVREFAKKNDFYVPDEFVFYDDGISAKTAKRRPEFNKMISIAKQKNPPFSKIYVWKFSRFARNQEESIVFKSLLRKNGVEVVSISEPLIDGVFGSLVERIIEWMDEYYLIRLSGEVKRGMTEKASRGEAMCGQVFGYDYINKTYQPNSESQYVVKMFEDYANGKKERQIARELALMGIKTKRGNAPDNRFVNYILHNPVYVGKIRWSTDGRAASKRDYDNDNIMVVQGSHKPLIDEELWNKVQKMLKENERKYKKYQRPSQSVEFMLKGLLRCDNCGSTLVMQSTKCPSVQCHKYAKGSCGISHSISIAKANRIVIEALENAVGTLNFNIETEKTKNETKIDFDKFISAEKNKLEKAKEAYLNGVDTVEEYAKNKKEILANIEDLEKQKNKVNTSATDFDKQQYAKKVADVLEIINSPDTSEQVKNDVLRTVISKIVFNKAKNSLDLFFYL

SEQ ID NO: 7261 - protein, 476 aa, Unknown
  Description of Unknown: Integrase B7262 sequence
  PTHR30461:SF3,cd00338,SM00857,G3DSA:1.10.10.2600,IPR036162, PF13408,PS51737,G3DSA:3.40.50.1390,IPR025827,IPR006119, IPR038109,PF07508,IPR011109,SSF53041,PTHR30461, PS51736,Coil,PF00239
MKRAVFYGRYSSDRQTEQSIEGQRRVCEEFAKAEQIQIVGEYIDRATSGTSTEHREQFQKMLKDSKNGGWDYVLVYKLDRFARSRYDSAISKQQLKKNGVKVLSATERITDSPEGILIEGLLESMDEYFSRELSRKCKRGIRESIIKGHNFGGRVLYGYDRKDKRFVINEEQAVNVRRIFKSYLSGCTIQSIADQLNADGYRTNYGNEFKRYTVSDILHNDKYTGIHYIDGIEEPETCPAIISQTTFERVKEKLNQSAHRSREHATGHTYALSGLLQCGVCGRYVCGSSVERKYFYYACRSREHAENSVHIHADKLEQVVIDALQTFFTEEQVSTLAERLYQIYTTDMDGKPDRSKRLNEIEKQIQGTVNALIACPSSKALQEKLTQLEEQKAEIEKMPILQPQLKKEHFENYFRWLALRLEHIEDRQTFFHTVIHKVLVYPEKAVIILNMTDEMADPPKREQVEAFMSNVGEVSL

SEQ ID NO: 7262 - protein, 476 aa, Unknown
  Description of Unknown: Integrase B7263 sequence
  PTHR30461:SF3,IPR036162,PS51737,IPR011109,PTHR30461, PS00397,PF00239,G3DSA:1.10.10.2600,IPR006119,SSF53041, cd00338,SM00857,IPR025827,IPR038109,PS51736, IPR006118,PF13408,G3DSA:3.40.50.1390,PF07508,Coil
MSALKNGALYIRVSTADQTELSPDAQQRLLLDYAKKNGIVIAKEFIFEESVSGRHADRRPKFQEMIALAKQESHPIDVILVWKYSRFARNQEESIVYKSLLKKSNVDVISISEPLIDGPFGTLIERIIEWMDEYYSIRLSGEVLRGMKEKALQHGYQTTPCLGYQAAGGGKPFVIDEAEYQIVKYIMDQYDLEHLDPTAIARKCNDLGYRTRRGNRMERRSIERVLRNPFYAGTVIWNGISFDGTHETRLDPARYQERIKRMDARRRSPKSRNPSTCRHWLSGLLKCPICGATMTVTAGNTSCPYFQCWKYAKGFHKGSNSITVAKAERTVYRYFDDILAGADFSFTVRDRKQEQEDDETIQRLQHALDHLAVREARVKMAYENGIDTLEEYGANKKRLAEERQSLQEELDRMLTPAAPLETISKEDFRKEIKNINDILKNPEEPAEKKGLLLRSIVDRIVYEKASGTMYFDFFVS

SEQ ID NO: 7263 - protein, 476 aa, Unknown
  Description of Unknown: Integrase B7264 sequence
  PTHR30461:SF3,IPR036162,PS51737,IPR011109,PTHR30461, PS00397,PF00239,G3DSA:1.10.10.2600,IPR006119,SSF53041, cd00338,SM00857,IPR025827,IPR038109,IPR006118, PF13408,G3DSA:3.40.50.1390,PF07508,Coil
MRIGAAYIRVSTDDQLDISPESQLDEIQRYAKSHDILIPEEYIFMERTGRSGKRADNRPEFQRMIATAKEKPQPFEVILVWKFSRFARNQDESTFYKGMLRKKLGIDIESVSEPIMEGMYGRLIEMIIEWQDEFYSYNLGVEVKRGMAKKAELKGYQLVPPLGYAAVGNGKPYVIREDEYKIVEMIFHMYAVDRLDMTAIARQLNASGYLTRRGNPFEKRSIDRIIQNRFYLGTVEWNGFSFEGTHETRASVTELFEQCQERRKAEFRPMRHRNVSTCKHWLSGLMRCSVCGATLSYTGSGAVPYFTCWKYSKGLHPESCSISVKKMERIVLRSLDGILESGHFEYTPAASASGSPADLSNEIQSIHTQLDRLRHQEERARIAYENEVYTLDEYKESKARLRSEIQRLSDELQHLLEQPAESAPPQKELLDRVRNVRDLLASPSVGFETKGNALRSILKCIVFDRKTEHFDFQYYA

SEQ ID NO: 7264 - protein, 476 aa, Unknown
  Description of Unknown: Integrase B7265 sequence
  IPR036162,PS51737,IPR011109,PTHR30461,PS00397, PF00239,G3DSA:1.10.10.2600,IPR006119,SSF53041,cd00338, SM00857,IPR025827,IPR038109,PS51736,IPR006118, PF13408,G3DSA:3.40.50.1390,PF07508,Coil
MSALKNGALYIRVSTADQTELSPDAQQRLLLDYAKKNGIVIAEDFIFEESVSGRHADRRPKFQEMIAIAKQESHPIDVILVWKYSRFARNQEESIVYKSLLKKSGVDVISISEPLIDGPFGTLIERIIEWMDEYYSIRLSGEVIRGMKEKALKHGYQTSPCLGYDAAGSGKPFVINEAEYSIVKFIMDQYDLENHDPTAIARSCNELGYHTKRGNLMERRSVERILRNPFYAGTVIWNGISFEGAHETRLDRERFNNRIKRMDARRKTPKSRNPSACKHWLSGLLKCPVCGATLTVTAGNTSCPYFQCWKYAKGFHKGSNSITVAKAERTVFRYFDEILAGADFSYTVRNTTLDVEKDDTVARIRQALDHLSMRESRIKLAFENGIDTLEEYGANKKRLLEERQHLQQELDRTLAPAALPVEMSKEDFRKEICNVNDVLKDPNESSETKGLLLRSIVDSIVYNKDSGTMFFDFFVS

SEQ ID NO: 7265 - protein, 476 aa, Unknown
  Description of Unknown: Integrase B7266 sequence
  cd00338,SM00857,IPR006118,G3DSA:1.10.10.2600,IPR036162, PF13408,IPR025827,PS51737,G3DSA:3.40.50.1390,IPR006119, IPR038109,PF07508,IPR011109,SSF53041,PTHR30461, PS00397,Coil,PF00239
MRIGAAYIRVSTDDQLDISPESQLDEIQRYAKAHDILIPEEYIFMERTGRSGKRADNRPEFQRMIATAKEKPQPFEVILVWKFSRFARNQDESTFYKGMLRKKLKIDIESVSEPIMEGMYGRLIEMIIEWQDEFYSYNLGVEVKRGMAKKAELKGYQLVPPLGYAAVGNGKPYVIREDEYKIVEMIFHMYAVDRLDMTAIARQLNASGYLTRRGNPFEKRSIDRIIQNHFYVGTVEWNGFSFEGTHETKASVTELFEQCQERRKAEFRPMRHRNVSTCKHWLSGLMRCSVCGATLSYTGSGAVPYFTCWKYSKGLHPESCSISVKKMERIVLRSLDGILESGHFEYTPAASASGSPANLSNEIQSIHTQLDRLRHQEERARIAYENEVYTLDEYKESKARLRSEIQRLSDELQRLLEQPAESAPPQKELLDRVRNVRDLLASPSVGFETKGNALRSILKCIVFDRKTEHFDFQYYA

SEQ ID NO: 7266 - protein, 476 aa, Unknown
  Description of Unknown: Integrase B7267 sequence
  PTHR30461:SF3,SM00857,G3DSA:1.10.10.2600,IPR036162,PF13408, PS51737,G3DSA:3.40.50.1390,IPR025827,IPR006119,IPR038109, PF07508,SSF53041,IPR011109,PF00239,PTHR30461, PS51736,Coil,cd00338
MKRAVFYGRYSSDRQTEQSIEGQRRVCEEFAKAEQIQIVSEYIDRATSGTSTEHREQFQKMLKDSKYGGWDYVLVYKLDRFARSRYDSAISKQQLKKNGVKVLSATERITDSPEGILIEGLLESMDEYFSRELSRKCKRGIRESIIKGHNFGGRVLYGYDRKDKRFVINEEQAVNVRRIFKSYLSGCTIQSIADQLNADGYRTNYGNEFKRYTVSDILHNDKYTGIHYIDGIEEPETCPAIISQTTFERVKEKLNQSAHRSREHTTGHTYALSGLLQCGVCGRYVCGSSVERKYFYYACRSREHAENSVHIHADKLEQVVIDALQTFFTEEQVSTLAERLYQIYTTDMDGKPDRSKRLNEIEKQIQGTVNALIACPSSKALQEKLTQLEEQKAEIEKMPILQPQLKKEHFENYFRWLALRLEHIEDRQTFFHTVIHKVLVYPEKAVIILNMTDEMADPPKREQVEAFMSNVGEVSL

SEQ ID NO: 7267 - protein, 476 aa, Unknown
  Description of Unknown: Integrase B7268 sequence
  PTHR30461:SF3,SM00857,G3DSA:1.10.10.2600,IPR036162,PF13408, PS51737,IPR025827,G3DSA:3.40.50.1390,IPR006119,IPR038109, PF07508,IPR011109,SSF53041,PTHR30461,Coil, cd00338,PF00239
MTIIGEYCDRAISGKTDNRPNFQRLIKDSEKGQFEAVIMYTLDRFARNRYDSAIYKAKLKKNGVKVYYAKQPMPDTPEGIILESVLEGYAEYYSENLSRNIKRGLKENALQCLAVGGAGMPLGYTVGEDRKYKIDPVGAKIVQEIFQMYADGMSATQIINECNRRGYKTSRGNAFNKNSLRTMLKNDRYIGVYRFADVVVEDGVPPIISRELFEKVQTTLRHNYSARARNKAKDDYLLTTKLFCGHCGSSMVGESGTSRSGKLHHYYKCIDRKRNRKCKKAVEKKDWIEELVVRFTVQNVLNDETIERIARKTMEIIEKESADTSYLNGLQNELKGIKKKIKNLMNAIEQGIITPTTKERMDELEAEKNDLEGKIAREEMKKPLLTKERIMHWLNSFKSGNVNDIEYRRRVIDTLVNSVYIYDDGDKGRRIVFTFNMSGQNTATLSCSDIACVAPPDGYYTNTYFFKGGFAVRVWL

SEQ ID NO: 7268 - protein, 476 aa, Unknown
  Description of Unknown: Integrase B7269 sequence
  PTHR30461:SF3,IPR036162,PS51737,IPR011109,PTHR30461, PS00397,PF00239,G3DSA:1.10.10.2600,IPR006119,SSF53041, cd00338,SM00857,IPR025827,IPR038109,PS51736, IPR006118,PF13408,G3DSA:3.40.50.1390,PF07508,Coil
MSALKNGALYIRVSTADQTELSPDAQQRLLLDYAKKNGIVIAKEFIFEESVSGRHADRRPKFQEMIALAKQESHPIDVILVWKYSRFARNQEESIVYKSLLKKSNVDVISISEPLIDGPFGTLIERIIEWMDEYYSIRLSGEVLRGMKEKALQHGYQTTPCLGYQAAGGGKPFVIDEAEYQIVKYIMDQYDLEHLDPTAIARKCNDLGYRTRRGNRMERRSIERVLRNPFYAGTVIWNGISFDGTHETRLDPARYQERIKRMDARRRSPKSRNPSTCRHWLSGLLKCPICGATMTVTAGNTSCPYFQCWKYAKGFHKGSNSITVAKAERTVYRYFDDILAGADFSFTVRDRKQEQEDDETIQRLQHALDHLAVREARVKMAYENGIDTLEEYGANKKRLAEERQSLQKELDRVLTPAAPPETISKEDFRKEIKNINDILKNPEEPAEKKGLLLRSIVDRIVYEKASGTMYFDFFVS

SEQ ID NO: 7269 - protein, 476 aa, Unknown
  Description of Unknown: Integrase B7270 sequence
  PTHR30461:SF3,IPR036162,PS51737,IPR011109,PTHR30461, PS00397,PF00239,G3DSA:1.10.10.2600,IPR006119,SSF53041, cd00338,SM00857,IPR025827,IPR038109,PS51736, IPR006118,PF13408,G3DSA:3.40.50.1390,PF07508,Coil
MSALKNGALYIRVSTADQTELSPDAQQRLLLDYAKKNGIVIAKEFIFEESVSGRHADRRPKFQEMIALAKQDSHPIDVILVWKYSRFARNQEESIVYKSLLKKSNVDVISISEPLIDGPFGTLIERIIEWMDEYYSIRLSGEVLRGMKEKALQHGYQATPCLGYRAVSGGKPFVIDETEYQIVKYIMDQYDFEHLDPTAIARRCNDLGYRTRRGNLMERRSIERVLRNPFYAGTVVWNGISFDGTHETRLDPARYQERIKRMDARRRSPKSRNPSTCRHWLSGLLKCPICGATMTVTAGNTSCPYFQCWKYAKGFHKGSNSITVAKAERTVYRYFDDILAGADFSFAVRDRKQEQEDDETIQRLQQALEHLAARESRVKMAFENGIDTLEEYGANKKRLAEERQSLQEELDRVLTPAAPPETISKEDFRKEIKNINDILKNPEEPAEKKGLLLRSIVDRIVYEKASGTMYFDFFVS

SEQ ID NO: 7270 - protein, 476 aa, Unknown
  Description of Unknown: Integrase B7271 sequence
  IPR036162,PS51737,IPR011109,PTHR30461,PS00397, PF00239,G3DSA:1.10.10.2600,IPR006119,SSF53041,cd00338, SM00857,IPR025827,IPR038109,PS51736,IPR006118, PF13408,G3DSA:3.40.50.1390,PF07508,Coil
MAKLRNGALYIRVSTADQTELSPDAQQRLLLDYAKKNGIIISKDFIFEESVSGRHADKRPKFQEMIGIAKQESHPLDVILVWKYSRFARNQEESILYKSLLKKSNVDVISISEPLIDGPFGTLIERIIEWMDEYYSIRLSGEVIRGMKEKALKHGYQTTPCLGYDAVGGGKPFVINQEEYKIVQYIMDQYDLYDQDATAIARKCNDLGFRSKRGNLFEQRNVDLILKNPFYAGTVVWNGISFEGSHETRLSKERFEKRRALMRARRRPAKARNISTCKHWLSGLLRCSVCGATLSLAGSGSYRYFQCWKYSKGFHKGSQSLSAAKAEAAVCDYFDRILAGADFTYTVRNIPDQKESDELDLLRQELDQIAVKEARVKLAYENGIDTLEEYKENRRRLKESREELQEKIDDATAATQPEDSDSVAREALLKEIRSVSEILKDPAESYERKGLLLRSIVDGITYDKEKNRLYFNFFIS

SEQ ID NO: 7271 - protein, 476 aa, Unknown
  Description of Unknown: Integrase B7272 sequence
  IPR036162,PS51737,IPR011109,PTHR30461,PS00397, PF00239,G3DSA:1.10.10.2600,IPR006119,SSF53041,cd00338, SM00857,IPR025827,IPR038109,PS51736,IPR006118, PF13408,G3DSA:3.40.50.1390,PF07508,Coil
MAKLRNGALYIRVSTADQTELSPDAQQRLLLDYAKKNGIIISKDFIFEESVSGRHADKRPKFQEMIGIAKQESHPLDVILVWKYSRFARNQEESIVYKSLLKKSNVDVISISEPLIDGPFGTLIERIIEWMDEYYSIRLSGEVIRGMKEKALKHGYQTTPCLGYDAVGGGKPFVINEEEYKIVQYIMDQYDLYDQDATAIARKCNDLGFRSKRGNLFEQRNVDLILKNPFYAGTVVWNGISFEGSHETRLSKERFEKRRALMRARRRPAKARNISTCKHWLSGLLRCSVCGATLSLAGSGSYRYFQCWKYSKGFHKGSQSLSAAKAEAAVCDYFDRILAGADFTYTVRNIPDQKESDELDLLRQELDQIAVKEARVKLAYENGIDTLEEYKENRRRLKESREELQEKIDDATAATQPEDSDSVAREALLKEIRSVSEILKDPAESYERKGLLLRSIVDGITYDKEKNRLYFNFFIS

SEQ ID NO: 7272 - protein, 476 aa, Unknown
  Description of Unknown: Integrase B7273 sequence
  SM00857,IPR006118,G3DSA:1.10.10.2600,IPR036162,PF13408, IPR025827,G3DSA:3.40.50.1390,PS51737,IPR006119,IPR038109, PF07508,IPR011109,SSF53041,PF00239,PTHR30461, PS00397,Coil,cd00338
MRIGAAYIRVSTDDQLDISPESQLDEIQRYAKSHDILIPEEYIFMERTGRSGKRADNRPEFQRMIATAKEKPQPFEVILVWKFSRFARNQDESTFYKGMLRKKLKIDIESVSEPIMEGMYGRLIEMIIEWQDEFYSYNLGVEVKRGMAKKAELKGYQLVPPLGYAAVGNGKPYVIREDEYKIVEMIFHMYAVDRLDMTAIARQLNASGYLTRRGNPFEKRSIDRIIQNRFYVGTVEWNGFSFEGTHKTRASVTELFEQCQERRKAEFRPMRHRNVSTCKHWLSGLMRCSVCGATLSYTGSGAVPYFTCWKYSKGLHPESCSISVKKMERIVLRSLDGILESGHFEYTPAASASGSPADPPNEIQSIHTQLDRLRHQEERARIAYENEVYTLDEYKESKARLRSEIQRLSDELQRLLEQPAESAPPQKELLDRVRNVRDLLASPSVSFETKGNALRSILKCIVFDRKTEHFDFQYYA

SEQ ID NO: 7273 - protein, 476 aa, Unknown
  Description of Unknown: Integrase B7274 sequence
  SM00857,IPR006118,G3DSA:1.10.10.2600,IPR036162,PF13408, PS51737,IPR025827,G3DSA:3.40.50.1390,IPR006119,IPR038109, PF07508,IPR011109,SSF53041,PF00239,PTHR30461, PS00397,Coil,cd00338
MRIGAAYIRVSTDDQLDISPESQLDEIQRYAKAHDILIPEEYIFMERTGRSGKRADNRPEFQRMIATAKEKPQPFEVILVWKFSRFARNQDESTFYKGMLRKKLKIDIESVSEPIMEGMYGRLIEMIIEWQDEFYSYNLGVEVKRGMAKKAELKGYQLVPPLGYAAVGNGKPYVIREDEYKIVEMIFHMYAVDRLDMTAIARQLNASGYLTRRGNPFEKRSIDRIIQNRFYVGTVEWNGYSFEGTHKTRASVTDLFEQCQERRKAEFRPMRHRNVSTCKHWLSGLMRCSVCGATLSYTGSGAVPYFTCWKYSKGLHPESCSISVKKMERIVLRSLDGILESGHFEYTPAASASGSPADPSNEIQSIHTQLDRLRHQEERARIAYENEVYTLDEYKESKARLRSEIQRLSDELQRLLEQPAESAPPQKELLDRVRNVRDLLASPSVGFETKGNALRSILKCIVFDRKTEHFDFQYYA

SEQ ID NO: 7274 - protein, 476 aa, Unknown
  Description of Unknown: Integrase B7275 sequence
  IPR036162,PS51737,IPR011109,PTHR30461,PS00397, PF00239,G3DSA:1.10.10.2600,IPR006119,SSF53041,cd00338, SM00857,IPR025827,IPR038109,PS51736,IPR006118, PF13408,G3DSA:3.40.50.1390,PF07508,Coil
MAKLRNGALYIRVSTADQTELSPDAQQRLLLDYAKKNGIIISKDYVFEESVSGRHADKRPKFQEMIGIAKQESHPIDVILVWKYSRFARNQEESIVYKSLLKKSDVDVISISEPLIDGPFGTLIERIIEWMDEYYSIRLSGEVIRGMKEKALKQGYQTTPCLGYDAVGGGKPFVINEEEYKIVQYIMDQYDLYDQDATAIARKCNDLGFRSKRGNLFEQRNVDLILKNPFYAGTVVWNGISFEGSHETRLSKERFEKRIALMRARRRPAKARNISTCKHWLSGLLRCSVCGATLSLAGSGSYRYFQCWKYSKGFHKGSQSLSAAKAEAAVCDYFDRILTGADFTYTVRNIPDQKESDELDLLRQELDQIAVKEARVKLAYENGIDTLEEYKENRRRLKESREELLEKIDVATAATQPDDSDSHAKETLLKEIRSVSEILKDPAESYERKGLLLRSIVDGITYDKEKNRLYFNFFIS

SEQ ID NO: 7275 - protein, 476 aa, Unknown
  Description of Unknown: Integrase B7276 sequence
  PTHR30461:SF3,IPR036162,PS51737,IPR011109,PTHR30461, PS00397,PF00239,G3DSA:1.10.10.2600,IPR006119,SSF53041, cd00338,SM00857,IPR025827,IPR038109,PS51736, IPR006118,PF13408,G3DSA:3.40.50.1390,PF07508,Coil
MSALKNGALYIRVSTADQTELSPDAQQRLLLDYAKKNGIVIAKEFIFEESVSGRHADRRPKFQEMIALAKQDSHPIDVILVWKYSRFARNQEESIVYKSLLKKNNIDVISISEPLIDGPFGTLIERIIEWMDEYYSIRLSGEVLRGMKEKALQHGYQTTPCLGYQAAGGGKPFVIDEAEYQIVKYIMDQYDFEHLDPTAIARRCNDLGYRTRRGNLMERRSIERVLRNPFYAGTVVWNGISFDGTHETRLDPARYRERIKRMDARRRSPKSRNPSTCHHWLSGLLKCPICGATMTVTAGNTSCPYFQCWKYAKGFHKGSNSITVAKAERTVYRYFDDILAGANFSFTVRDRKQEQEDDETIQRLQQALAHLSVRESRVKMAFENGIDTLEEYGANKKRLAEERQSLQEELDRVLTPAAPPETISKEDFRKEIKNINDILKNPEEPAEKKGLLLRSIVDRIVYEKASGTMYFDFFVS

SEQ ID NO: 7276 - protein, 476 aa, Unknown
  Description of Unknown: Integrase B7277 sequence
  PTHR30461:SF3,SM00857,IPR036162,G3DSA:3.40.50.1390,IPR006119, SSF53041,PF00239,PTHR30461,Coil,cd00338
MQALQVKIAVKYSRVSTNKQDLRGSKDGQEAEVDKFAITNGFTIIDSFTDTDHGDIAKRKGLTSMKEYLRLNQAVKYVLVYHSDRFTRNFQDGMRDLFFLEDLGIKLISVLEGEILADGTFNSLPSLVRLIGAQEDKAKIIKKTTDASYKYAKTNRYLGGNILPWFKLESGYVYGKKCKVIVKNETTWEYYRGFFLTIIKYKNILRAAKEYNLNRFTAAEWLAKQELIGYRTYGKKGKIDQYHNKGRRKNYQTTEEKVFPAILTEDEFLILNEMRKHNRVKYNKDIYTYLYSIISYHSCGGKLEGERIKKKDSFIYYYKCSCCKKRFNQKKLELAIAENILSNPGLQIINDINFRLADIYDEIKNINNTIEEENSSEKRILSLVSKNVVGIDSAEEELLKIKKQKNFLKKLLEEKMKLIEEENKKEITEDHISLLKNLLEYSQEEDDDFREKLKEIINLIIKKIEVFSLDKINIIF

SEQ ID NO: 7277 - protein, 476 aa, Unknown
  Description of Unknown: Integrase B7278 sequence
  cd00338,SM00857,IPR006118,G3DSA:1.10.10.2600, IPR036162,PF13408,PS51737,IPR025827, G3DSA:3.40.50.1390,IPR006119,IPR038109,PF07508, IPR011109,SSF53041,PTHR30461,PS00397,Coil,PF00239
MRIGAAYIRVSTDDQLDISPESQLDEIQRYAKSHDILIPEEYIFMERTGRSGKRADNRPEFQRMIATAKEKPQPFEVILVWKFSRFARNQDESTFYKGMLRKKLKIDIESVSEPIMEGMYGRLIEMIIEWQDEFYSYNLGVEVKRGMAKKAELKGYQLVPPLGYAAVGNGKPYVIREDEYKIVEMIFHMYAVDRLDMTAIARQLNASGYLTRRGNPFEKRSIDRIIQNRFYVGTVEWNGFSFEGTHKTRASVTELFEQCQERRKAEFRPMRHRNVSTCKHWLSGLMRCSVCGATLSYTGSGAAPYFTCWKYSKGLHPESCSISVKKMERIVLRSLDGILESGHFEYTPAASASGSPADPSNEIQSIHTQLDRLRHQEERARIAYENEVYTLDEYKESKARLRSEIQRLSDELQRLLEQPAESAPPQKELLDRVRNVRDLLASPSVGFETKGNALRSILKCIVFDRKTEHFDFQYYA

SEQ ID NO: 7278 - protein, 476 aa, Unknown
  Description of Unknown: Integrase B7279 sequence
  PTHR30461:SF3,IPR036162,PS51737,IPR011109,PTHR30461, PS00397,PF00239,G3DSA:1.10.10.2600,IPR006119,SSF53041, cd00338,SM00857,IPR025827,IPR038109,PS51736, IPR006118,PF13408,G3DSA:3.40.50.1390,PF07508,Coil
MSALKNGALYIRVSTADQTELSPDAQQRLLLDYAKKNGIVIAKEFIFEESVSGRHADRRPKFQEMIALAKQESHPIDVILVWKYSRFARNQEESIVYKSLLKKSNVDVISISEPLIDGPFGTLIERIIEWMDEYYSIRLSGEVLRGMKEKALQHGYQTTPCLGYQAAGGGKPFVIDEAEYQIVKYIMDQYDLEHLDPTAIARKCNDLGYRTRRGNRMERRSIERVLRNPFYAGTVIWNGISFDGTHETRLDPARYQERIKRMDARRRSPKSRNPSTCRHWLSGLLKCPICGATMTVTAGNTSCPYFQCWKYAKGFHKGSNSITVAKAERTVYRYFDDILAGADFSFTVRDRKQEQEDDETIQRLQHALDHLAVREARVKMAYENGIDTLEEYGANKKRLAEERQSLQEELNRVLTPAAPPETISKEDFRKEIKNINDILKNPEEPTEKKGLLLRSIVDRIVYEKSSGTMYFDFFVS

SEQ ID NO: 7279 - protein, 476 aa, Unknown
  Description of Unknown: Integrase B7280 sequence
  PTHR30461:SF3,cd00338,SM00857,G3DSA:1.10.10.2600,IPR036162, PF13408,PS51737,G3DSA:3.40.50.1390,IPR025827,IPR006119, IPR038109,PF07508,SSF53041,IPR011109,PTHR30461, PS51736,Coil,PF00239
MKRAVFYGRYSSDRQTEQSIEGQRRVCEEFAKAEQIQIVGEYIDWATSGTSTEHREQFQKMLKDSKNGGWDYVLVYKLDRFARSRYDSAISKQQLKKNGVKVLSATERITDSPEGILIEGLLESMDEYFSRELSRKCKRGIRESIIKGHNFGGRVLYGYDRKDKRFVINEEQAVNVRRIFKSYLSGCTIQSIADQLNADGYRTNYGNEFKRYTVSDILHNDKYTGIHYIDGIEEPETCPAIISQTTFERVKEKLNQSAHRSREHATGHTYALSGLLQCGVCGRYVCGSSVERKYFYYACRSREHAENSVHIHADKLEQVVIDALQTFFTEEQVSTLAERLYQIYTTDMDGKPDRSKRLNEIEKQIQGTVNALIACPSSKALQEKLTQLEEQKAEIEKMPILQPQLKKEHFENYFRWLALRLEHIEDRQTFFHTVIHKVLVYPEKAVIILNMTDEMADPPKREQVEAFMSNVGEVSL

SEQ ID NO: 7280 - protein, 476 aa, Unknown
  Description of Unknown: Integrase B7281 sequence
  PTHR30461:SF3,cd00338,SM00857,IPR036162,G3DSA:3.40.50.1390, IPR006119,SSF53041,PTHR30461,Coil,PF00239
MQALPVKIAVKYSRVSTNKQDLRGSKDGQEAEIDKFASTNGFTIIDSFTDTDHGDIAKRKGLTSMKEYLRLNQAVKYVLVYHSDRFTRNFQDGMRDLFFLEDLGIKLISVLEGEILADGTFNSLPSLVRLIGAQEDKAKIIKKTTDASYKYAKTNRYLGGNILPWFKLESGYVYGKKCKVIVKNETTWEYYRGFFLAIIKYKNILRAAKEYNLNRFTAAEWLVKQELIGYRTYGKKGKIDQYHNKGRRKNYQTTEEKVFPAILTEDEFLILNEMRKHNKVKYNKDIYTYLYSIISYHSCGGKLEGERIKKKDSFIYYYKCSCCKKRFNQKKLEVAIAENILSNPGLQIINDINFRLADIYDEIKNINNMIEEENSSEKRILSLVSKNVVGIESAEEELLKIKKQKNFLKKLLEEKMKLIEEENKKEITEDHISLLKNLLEYSQEEDDDFREKLKEIINLIIKKIEVSSLDKINIIF

SEQ ID NO: 7281 - protein, 476 aa, Unknown
  Description of Unknown: Integrase B7282 sequence
  SM00857,IPR006118,IPR036162,PF13408, IPR025827,G3DSA:3.40.50.1390,PS00397,IPR006119, SSF53041,PTHR30461,Coil,PS51736, cd00338,PF00239
MKTALYCRVSTEEQARTGESILDQRQALERWARDYEHEIIGVYEDEGFSAHKSYKSRPGLSRLLDDVRAGKVELIAFTKFDRWTRRAADYYELQEVLDRHHVPWTAILEDYETVTADGRFKVGIMLSVNQHEAERTSERIKFTFAEKRRRGEIISGNMPKGYKLIDKKPVKDPETEAGMNAFWRTYLSGAGLKPSILAAESRGVHLSTSTGSFILRNAEAYTGKIQGVSCEAYITEEDAARVLATRKIKAKASGYTYLFTGLLYCGECAHRMGGHRNFWEHKDGSRGFQVYYNCSHRYRTSRRECSNSVNIYESDIERALVFGLSDAIEAEAVKMEAQIAEMRRQREAAQDVQPVREKLERRKRRAWEAYLDEIIDKKAYQREAAKIDAELAKIVQVPQIDEDAPRKIRETMPEGWRELYFKLDAQHRREFWLQTLQRIDVYPDRSISITVKPGENPFITRIQRPDGYWIEIVPEK

SEQ ID NO: 7282 - protein, 476 aa, Unknown
  Description of Unknown: Integrase B7283 sequence
  SM00857,IPR006118,G3DSA:1.10.10.2600,IPR036162,PS51737, G3DSA:3.40.50.1390,Coil,IPR006119,IPR038109,PF07508, SSF53041,IPR011109,PTHR30461,PS00397,PS51736, cd00338,PF00239
MKTAAAYIRVSTDDQVEYSPDSQIKLIRDYAKRNDYILPDEFIFRDDGISGKSAKHRPEFTKMIALAKSPEHPFDAILVWKFSRFARNQEESIVFKNILRKIGVEVRSVSEPISEDPFGSLVERIIEWTDEYYIINLSGEVKRGMLEKISRGQPVVPPPVGYKMENGQYIPDENAHFIKEIFEAYAAGEGARHIAQRLAAQGCITKRGNPIDNRFVDYVLHNPVYIGKLRWSVNSHAASSRHYDSADIIVFDGTHEPLISSELWDSVQKRLHEVKTLYPKYQRREQPVSFMLKGLVRCSSCGSTLCYCRTSEPSLQCHSYARGSCRQSHSINIATANEAVIKGLQLAVDKLDFAIAPAKPHYSADAPGTNKLLAAEYKKMERIKAAYANGTDTLEEYAANKKKISAEIARLEAELQQESNVKPINKKAFAKRVSEIIKYISDPYNSEAAKNQALRTVISYIIFDRAATTFNIVFHF

SEQ ID NO: 7283 - protein, 476 aa, Unknown
  Description of Unknown: Integrase B7284 sequence
  cd00338,SM00857,G3DSA:1.10.10.2600,IPR036162,PS51737, G3DSA:3.40.50.1390,IPR006119,IPR038109,PF07508,IPR011109, SSF53041,PTHR30461,PS51736,Coil,PF00239
MPTLSLGKYIIDIGSDSMTTFDMNNVTSKALDMDVYAIYLRKSRADLEAEKLGEGETLARHRKMLEELAARKGFYIGEIYTELESGESIAGRPKIQKLLEDCYKGKYKGILIVEVTRLSRGNQGDAQTIMDCLKYSNMNNGVLVVTPTKTYDVAHSQEDEEYMEFELFMSRREYKMIHKRMDRGRRQAVVEGNYMGAYRPYGYNIVKTKTKRTLVPNEIEAPYIKKIFEWSVKDNLSTNDIAKRLTAMGAPTYRGDTDWTKDSVKTYLTNPVYMGKVRWNNRMRIKTMVNGELKITRPRYHSDQYMLYDGKHMNDALVDEETFREAQKKFYKDRTRSGLQLKNPLAGLVYCKKCGKSMHLQPYKENRNNRIVHKSNTTGCKVKSAIASDVIAAVTQALRTYVDDFEVKIENSPDIDENDIQKQIDRLVKEKRKIEKKKSKLFDSWENDDITNNEFVERKAIHNQRLEVLEKQIEDL

SEQ ID NO: 7284 - protein, 476 aa, Unknown
  Description of Unknown: Integrase B7285 sequence
  PTHR30461:SF3,cd00338,SM00857,G3DSA:1.10.10.2600,IPR036162, PF13408,PS51737,G3DSA:3.40.50.1390,IPR025827,IPR006119, IPR038109,PF07508,IPR011109,SSF53041, PTHR30461,PS51736,Coil,PF00239
MKRAVFYGRYSSDRQTEQSIEGQRRVCEEFAKAEQIQIVGEYIDRATSGTSTEHREQFQKMLKDSKNGGWDYVLVYKLDRFARSRYDSAISKQQLKKNGVKVLSATERITDSPEGILIEGLLESMDEYFSRELSRKCKRGIRESIIKGHNFGGRVLYGYDRKDKRFVINEEQAVNVRRIFKSYLSGCTIQSIADQLNADGYRTNYGNEFKRYTVSDILHNDKYTGIHYIDGIEEPETCPAIISQTTFERVKEKLNQSAHRSREHATGHTYALSGLLQCGVCGRYVCGSSVERKYFYYACRSREHAENSVHIHADKLEQVVIDALQTFFTEEQVSTLAERLYQIYTTDMDGKPDRSKRLNEIEKQIQGTVNALIACPSSKALQEKLTQLEEQKAEIEKMPILQPQLKKEHFENYFHWLALRLEHIEDRQTFFHTVIHKVLVYPEKAVIILNMMDEMADPPKREQVEAFMSNVGEVSL

SEQ ID NO: 7285 - protein, 476 aa, Unknown
  Description of Unknown: Integrase B7286 sequence
  PTHR30461:SF3,IPR036162,PS51737,IPR011109,PTHR30461, PS00397,PF00239,G3DSA:1.10.10.2600,IPR006119,SSF53041, cd00338,SM00857,IPR025827,IPR038109,PS51736, IPR006118,PF13408,G3DSA:3.40.50.1390,PF07508,Coil
MSALKNGALYIRVSTADQTELSPDAQQRLLLDYAKKNGIVIAKEFIFEESVSGRHADRRPKFQEMIALAKQDSHPIDVILVWKYSRFARNQEESIVYKSLLKKSNVDVISISEPLIDGPFGTLIERIIEWMDEYYSIRLSGEVLRGMKEKALQHGYQTTPCLGYQAAGDGKPFVIDEAEYRIVKYIMDQYDFEHLDPTAIARRCNDLGYRTRRGNLMERRSIERVLRNPFYAGTVIWNGISFDGTHETRLDPARYQDRIKRMDARRRSPKSRNPSTCRHWLSGLLKCPICGATMTVTAGNTSCPYFQCWKYAKGFHKGSNSITVAKAERTVYRYFDDILAGADFSFAVRDRKQEQEDDETIQRLQQALEHLAARESRVKMAFENGIDTLEEYGANKKRLAEERQSLQEELDRVLTPAAPPETISKEDFRKEIKNINDILKNPEEPAEKKGLLLRSIVDRIVYEKASGTMYFDFFVS

SEQ ID NO: 7286 - protein, 476 aa, Unknown
  Description of Unknown: Integrase B7287 sequence
  PTHR30461:SF3,cd00338,SM00857,G3DSA:1.10.10.2600,IPR036162, PF13408,PS51737,G3DSA:3.40.50.1390,IPR025827,IPR006119, IPR038109,PF07508,IPR011109,SSF53041,PTHR30461, PS51736,Coil,PF00239
MKRAVFYGRYSSDRQTEQSIEGQRRVCEEFAKAEQIQIVGEYIDRATSGTSTDHREQFQKMLKDSKNGGWDYVLVYKLDRFARSRYDSAISKQQLKKNGVKVLSATERITDSPEGILIEGLLESMDEYFSRELSRKCKRGIRESIIKGHNFGGRVLYGYDRKDKRFVINEEQAVNVRRIFKSYLSGCTIQSIADQLNADGYRTNYGNEFKRYTVSDILHNDKYTGIHYIDGIEEPETCPAIISQTTFERVKEKLNQSAHRSREHATGHVYALSGLLQCGVCGRYVCGSSVERKYFYYACRSREHAENSIHIHADKLEQVVIDALQTFFTEEQVSTLAERLYQIYTTDMDGKPDRSKRLNEIEKQIQGTVNALIACPSSKALQEKLTQLEEQKAEIEKMPILQPQLKKEHFENYFRWLALRLEHIEDRQTFFHTVIHKVLVYPEKAVIILNMTDEMADPPKREQVEAFMSNVGEVSL

SEQ ID NO: 7287 - protein, 476 aa, Unknown
  Description of Unknown: Integrase B7288 sequence
  PTHR30461:SF3,IPR036162,PS51737,IPR011109,PTHR30461, PS00397,PF00239,G3DSA:1.10.10.2600,IPR006119,SSF53041, cd00338,SM00857,IPR025827,IPR038109,PS51736, IPR006118,PF13408,G3DSA:3.40.50.1390,PF07508,Coil
MSALKNGALYIRVSTADQTELSPDAQQRLLLDYAKKNGIVIAKEFIFEESVSGRHADRRPKFQEMIALAKQDSHPIDVILVWKYSRFARNQEESIVYKSLLKKSNVDVVSISEPLIDGPFGTLIERIIEWMDEYYSIRLSGEVLRGMKEKALQNGYQATPCLGYRAVGGGKPFVIDEAEYQIVKYIMDQYDFEHLDPTAIARKCNELGYRTRRGNLMERRSIERVLRNPFYAGTVVWNGISFDGTHETRLDSARYQERIKRMDARRRSPKSRNPSTCRHWLSGLLKCPICGATMTVTAGNTSCPYFQCWKYAKGFHNGSNSITVAKAERTVYRYFDDILAGADFSFTVRDRKQDQEVDETIQRLQQALDHLAVRESRVKMAFENGIDTLEEYGANKKRLAEERQSLQEELDRVLTPAALPETISKEDFREEIKNINDILKNPEEPAEKKGLLLRSIVDRIVYEKSSGTMYFDFFVS

SEQ ID NO: 7288 - protein, 476 aa, Unknown
  Description of Unknown: Integrase B7289 sequence
  cd00338,SM00857,IPR006118,G3DSA:1.10.10.2600,IPR036162, PF13408,IPR025827,PS51737,G3DSA:3.40.50.1390,IPR006119, IPR038109,PF07508,IPR011109,SSF53041,PTHR30461, PS00397,Coil,PF00239
MRIGAAYIRVSTDDQLDISPESQLDEIQRYAKSHDILIPEEYIFMERTGRSGKRADNRPEFQRMIATAKEKPQPFEVILVWKFSRFARNQDESTFYKGMLRKKLKIDIESVSEPIMEGMYGRLIEMIIEWQDEFYSYNLGVEVKRGMAKKAELKGYQLVPPLGYAAVGNGKPYVIREDEYKIVEMIFHMYAVDRLDMTAIARQLNASGYLTRRGNPFEKRSIDRIIQNRFYVGTVEWNGFSFEGTHKTRASVTELFEQCQERRKAEFRPMRHRNVSTCKHWLSGLMRCSVCGATLSYTGSGAVPYFTCWKYSKGLHPESCSISVKKMERIVLRSLDGILESGHFEYTPAASASGSPADPSNEIQSIHTQLDRLRHQEERARIAYENEVYTLDEYKESKARLRSEIQRLSDELQRLLEQPAESAPPQKELLDRVRNVRDLLASPSVGFETKGNALRSILKCIVFDRKTEHFDFQYYA

SEQ ID NO: 7289 - protein, 476 aa, Unknown
  Description of Unknown: Integrase B7290 sequence
  SM00857,IPR006118,G3DSA:1.10.10.2600,IPR036162,PS51737, G3DSA:3.40.50.1390,Coil,IPR006119,IPR038109,PF07508, SSF53041,IPR011109,PTHR30461,PS00397,PS51736, cd00338,PF00239
MKTAAAYIRVSTDDQVEYSPDSQIKLIRDYAKRNDYILPDEFIFRDDGISGKSAKHRPEFTKMIALAKSSEHPFDAILVWKFSRFARNQEESIVFKNILRKIGIEVRSVSEPISEDPFGSLVERIIEWTDEYYIINLSGEVKRGMLEKISRGQPVVPPPVGYKMENGQYIPDENAHFIKEIFEAYAAGEGARHIAQRLAAQGCITKRGNPIDNRFVDYVLHNPVYIGKLRWSVNSHAASSRHYDSADIIVFDGTHEPLISSELWDSVQKRLHEVKTLYPKYQRREQPVSFMLKGLVRCSSCGSTLCYCRTSEPSLQCHSYARGSCRRSHSINIATANEAVIKGLQLAVDKLDFAIAPAKPHYSADAPGTNKLLAAEYKKMERIKAAYANGTDTLEEYAANKKKISAEIARLEAELQQESNVKPINKKAFAKRVSEIIKYISDPHNSEAAKNQALRTVISYIIFDRAATTFNIVFHF

SEQ ID NO: 7290 - protein, 476 aa, Unknown
  Description of Unknown: Integrase B7291 sequence
  PTHR30461:SF3,IPR036162,PS51737,IPR011109,PTHR30461, PS00397,PF00239,G3DSA:1.10.10.2600,IPR006119,SSF53041, cd00338,SM00857,IPR025827,IPR038109,PS51736, IPR006118,PF13408,G3DSA:3.40.50.1390,PF07508,Coil
MSALKNGALYIRVSTADQTELSPDAQQRLLLDYAKKNGIVIAKEFIFEESVSGRHADRRPKFQEMIALAKQDSHPIDVILVWKYSRFARNQEESIVYKSLLKKNNIDVISISEPLIDGPFGTLIERIIEWMDEYYSIRLSGEVMRGMKEKALKHGYQTTPCLGYQAAGGGKPFVIDEAEYQIVKYIMDQYDLEHLDPTAIARKCNDLGYRTRRGNRMERRSIERVLRNPFYAGTVVWNGISFDGTHETRLDPARYQERIKRMDARRRSPKSRNPSTCRHWLSGLLKCPICGATMTVTAGNTSCPYFQCWKYAKGFHKGSNSITVAKAERTVYHYFDDILAGADFSFAVRDRKQEQEDDETIQRLQQALDHLAAREARVKMAYENGIDTLEEYGANKKRLAEERQSLQEELDRVLTPAAPPETISKEDFRKEIKNINDILKNPEEPAEKKGLLLRSIVDRIVYEKSSGTMYFDFFVS

SEQ ID NO: 7291 - protein, 476 aa, Unknown
  Description of Unknown: Integrase B7292 sequence
  PTHR30461:SF3,cd00338,SM00857,G3DSA:1.10.10.2600,IPR036162, PF13408,PS51737,G3DSA:3.40.50.1390,IPR025827,IPR006119, IPR038109,PF07508,IPR011109,SSF53041,PTHR30461, PS51736,Coil,PF00239
MKRAVFYGRYSSDRQTEQSIEGQRRVCEEFAKAEQIQIVGEYIDRATSGTSTEHREQFQKMLKDSKNGGWDYVLVYKLDRFARSRYDSAISKQQLKKNGVKVLSATERITDSPEGILIEGLLESMDEYFSRELSRKCKRGIRESIIKGHNFGGRVLYGYDRKDKRFVINEEQAVNVQRIFKSYLSGCTIQSIADQLNADGYRTNYGNEFKRYTVSDILHNDKYTGIHYIDGIEEPETCPAIISQTTFERVKEKLNQSAHRSREHATGHTYALSGLLQCGVCGRYVCGSSVERKYFYYACRSREHAENSVHIHADKLEQVVIDALQTFFTEEQVSTLAERLYQIYTTDMDGKPDRSKRLNEIEKQIQGTVNALIACPSSKALQEKLTQLEEQKAEIEKMPILQPQLKKEHFENYFRWLALRLEHIEDRQTFFHTVIHKVLVYPEKAVIILNMTDEMADPPKREQVEAFMSNVGEVSL

SEQ ID NO: 7292 - protein, 476 aa, Unknown
  Description of Unknown: Integrase B7293 sequence
  cd00338,SM00857,IPR006118,G3DSA:1.10.10.2600,IPR036162, PF13408,IPR025827,PS51737,G3DSA:3.40.50.1390,IPR006119, IPR038109,PF07508,IPR011109,SSF53041,PTHR30461, PS00397,Coil,PF00239
MRIGAAYIRVSTDDQLDISPESQLDEIQRYAKSHDILIPEEYIFMERTGRSGKRADNRPEFQRMIATAKEKPQPFEVILVWKFSRFARNQDESTFYKGMLRKKLKIDIESVSEPIMEGMYGRLIEMIIEWQDEFYSYNLGVEVKRGMAKKAELKGYQLVPPLGYAAVGNGKPYVIREDEYKIVEMIFHMYAVDRLDMTAIARQLNASGYLTRRGNPFEKRSIDRIIQNHFYVGTVEWNGFSFEGTHETKASVTELFEQCQERRKAEFRPMRHRNVSTCKHWLSGLMRCSVCGATLSYTGSGAVPYFTCWKYSKGLHPESCSISVKKMERIVLRSLDGILESGHFEYTPAASASGSPANLSNEIQSIHTQLDRLRHQEERARIAYENEVYTLDEYKESKARLRSEIQRLSDELQHLLEQPAESAPPQKELLDRVRNVRDLLASPSVGFETKGNALRSILKCIVFDRKTEHFDFQYYA

SEQ ID NO: 7293 - protein, 476 aa, Unknown
  Description of Unknown: Integrase B7294 sequence
  PTHR30461:SF3,cd00338,SM00857,G3DSA:1.10.10.2600,IPR036162, PF13408,IPR025827,G3DSA:3.40.50.1390,PS51737,IPR006119, IPR038109,PF07508,IPR011109,SSF53041,PTHR30461, PS51736,Coil,PF00239
MKRAVFYGRYSSDRQTEQSIEGQRRVCEEFAKAEQIQIVGEYIDRATSGTSTEHREQFQKMLKDSKNGGWDYVLVYKLDRFARSRYDSAISKQQLKKNGVKVLSATERITDSPEGILIEGLLESMDEYFSRELSRKCKRGIRESIIKGHNFGGRVLYGYDRKDKRFVINEEQAVNVRRIFKSYLSGCTIQSIADQLNADGYRTNYGNEFKRYTVSDILHNDKYTGIHYIDGIEEPETCPAIISQTTFDRVKEKLNQSAHRSREHATGHTYALSGLLQCGVCGRYVCGSSVERKYFYYACRSREHAENSVHIHADKLEQVVIDALQTFFTEEQVSTLAERLYQIYTTDMDGKPDRSKRLNEIEKQVQGTVNALIACPSSKALQEKLTQLEEQKAEIEKMPILQPQLKKEHFENYFRWLALRLEHIEDRQTFFHTVIHKVLVYPEKAVIILNMTDEMADPPKREQVEAFMSNVGEVSL

SEQ ID NO: 7294 - protein, 476 aa, Unknown
  Description of Unknown: Integrase B7295 sequence
  IPR036162,PS51737,IPR011109,PTHR30461,PS00397, PF00239,G3DSA:1.10.10.2600,IPR006119,SSF53041,cd00338, SM00857,IPR025827,IPR038109,PS51736,IPR006118, PF13408,G3DSA:3.40.50.1390,PF07508,Coil
MAKLRNGALYIRVSTADQTELSPDAQQRLLLDYAKKNGIIISKDFIFEESVSGRHADKRPKFQEMIGIAKQESHPLDVILVWKYSRFARNQEESIVYKSLLKKSNVDVISISEPLIDGPFGTLIERIIEWMDEYYSIRLSGEVIRGMKEKALKHGYQTTPCLGYDAVGGGKPFVINEEEYKIVQYIMDQYDLYDQDATAIARKCNDLGFRSKRGNLFEQRNVDLILKNPFYAGTVVWNGISFEGSHETRLSKERFEKRRALMRARRRPAKARNISTCKHWLSGLLRCSVCGATLSLAGSGSYRHFQCWKYSKGFHKGSQSLSAAKAEAAVCDYFDRILAGADFTYTVRNIPDQKESDELDLLRQELDQIAVKEARVKLAYENGIDTLEEYKENRRRLKESREELQEKIDDATAATQPEDSDSVAREALLKEIRSVSEILKDPAESYERKGLLLRSIVDGITYDKEKNRLYFNFFIS

SEQ ID NO: 7295 - protein, 476 aa, Unknown
  Description of Unknown: Integrase B7296 sequence
  PTHR30461:SF3,IPR036162,PS51737,IPR011109,PTHR30461, PS00397,PF00239,G3DSA:1.10.10.2600,IPR006119,SSF53041, cd00338,SM00857,IPR025827,IPR038109,PS51736, IPR006118,PF13408,G3DSA:3.40.50.1390,PF07508,Coil
MSALKNGALYIRVSTADQTELSPDAQQRLLLDYAKKNGIVIAKEFIFEESVSGRHADRRPKFQEMIALAKQDSHPIDVILVWKYSRFARNQEESIVYKSLLKKSNVDVISISEPLIDGPFGTLIERIIEWMDEYYSIRLSGEVLRGMKEKALQHGYQTTPCLGYQAAGGGKPFVIDESEYQIVKYIMDQYDFEHLDPTAIARRCNDLGYRTRRGNRMERRSIERVLRNPFYAGTVVWNGISFDGTHETRLDPARYQDRIKRMDVRRRSPKSRNPSTCRHWLSGLLKCPICGATMTVTAGNTSCPYFQCWKYAKGFHKGSNSITVAKAERTVYRYFDDILAGADFSFAVRDRKQEQEDDETIQRLQQALEHLATRESRVKMAFENGIDTLEEYGANKKRLAEERQSLQEELDRVLTPAAPPETISKEDFRKEIKNINDILKNPEEPAEKKGLLLRSIVDRIVYEKASGTMYFDFFVS

SEQ ID NO: 7296 - protein, 476 aa, Unknown
  Description of Unknown: Integrase B7297 sequence
  cd00338,SM00857,IPR006118,G3DSA:1.10.10.2600,IPR036162, PF13408,IPR025827,PS51737,G3DSA:3.40.50.1390,IPR006119, IPR038109,PF07508,IPR011109,SSF53041,PTHR30461, PS00397,Coil,PF00239
MRIGAAYIRVSTDDQLDISPESQLDEIQRYAKSHDILIPEEYIFMERTGRSGKRADNRPEFQRMIATAKEKPQPFEVILVWKFSRFARNQDESTFYKGMLRKKLKIDIESVSEPIMEGMYGRLIEMIIEWQDEFYSYNLGVEVKRGMAKKAELKGYQLVPPLGYAAVGNGKPYVIREDEYKIVEMIFHMYAVDRLDMTAIARQLNASGYLTRRGNPFEKRSIDRIIQNRFYVGTVEWNGFSFEGTHKTRASVTELFEQCQERRKAEFRPMRHRNVSTCKHWLSGLMRCSVCGATLSYTGSGAVPYFTCWKYSKGLHPESCSISVKKMERIVLRSLDGILESGHFEYTPAASASGSPAEPSNEIQSIHTQLDRLRHQEERARIAYENEVYTLDEYKESKARLRSEIQRLSDELQHLLEQPAESAPPQKELLDRVRNVRDLLASPSVGFETKGNALRSILKCIVFDRKTEHFDFQYYA

SEQ ID NO: 7297 - protein, 476 aa, Unknown
  Description of Unknown: Integrase B7298 sequence
  cd00338,SM00857,IPR006118,G3DSA:1.10.10.2600,IPR036162, PF13408,IPR025827,PS51737,G3DSA:3.40.50.1390,IPR006119, IPR038109,PF07508,IPR011109,SSF53041,PTHR30461, PS00397,Coil,PF00239
MRIGAAYIRVSTDDQLDISPESQLDEIQRYAKSHDILIPEEYIFMERTGRSGKRADNRPEFQRMIATAKEKPQPFEVILVWKFSRFARNQDESTFYKGMLRKKLKIDIESVSEPIMEGMYGRLIEMIIEWQDEFYSYNLGVEVKRGMAKKAELKGYQLVPPLGYAAVGNGKPYVIREDEYKIVEMIFHMYAVDRLDMTAIARQLNASGYLTRRGNPFEKRSIDRIIQNRFYVGTVEWNGFSFEGTHKTRASVTELFEQCQERRKAEFRPMRHRNVSTCKHWLSGLMRCSVCGATLSYTGSGAVPYFTCWKYSKGLHPESCSISVKKMERIVLRSLDGILESGHFEYTPATSASGSPADPSNEIQSIHTQLDRLRHQEERARIAYENEVYTLDEYKESKARLRSEIQRLSDELQRLLEQPAESAPPQKELLDRVRNVRDLLASPSVGFETKGNALRSILKCIVFDRKTEHFDFQYYA

SEQ ID NO: 7298 - protein, 476 aa, Unknown
  Description of Unknown: Integrase B7299 sequence
  IPR036162,PS51737,IPR011109,PTHR30461,PS00397, PF00239,G3DSA:1.10.10.2600,IPR006119,SSF53041,cd00338, SM00857,IPR025827,IPR038109,PS51736,IPR006118, PF13408,G3DSA:3.40.50.1390,PF07508,Coil
MAKLRNGALYIRVSTADQTELSPDAQQRLLLDYAKKNGIIISKDYVFEESVSGRHADKRPKFQEMIGIAKQESHPIDVILVWKYSRFARNQEESIVYKSLLKKSDVDVISISEPLIDGPFGTLIERIIEWMDEYYSIRLSGEVIRGMKEKALKHGYQTTPCLGYDAVGGGKPFVINEEEYKIVQYIMDQYDLYDQDATAIARKCNDLGFRSKRGNLFEQRNVDLILKNPFYAGTVVWNGISFEGSHETRLSKERFEKRLALMRARKRPAKARNVSACKHWLSGLLRCSVCGATLSLAGSGSYKYFQCWKYSKGFHKGSQSLSAAKAEAAVCDYFDRILAGADFSYTVRNLPDQKESDELDLLRQELDQIAVKETRVKLAYENGIDTLEEYKENRRRLKESREELLEKIDVATTATQPDDSDSHTRETLLKEIRSVSEILKDPAESYERKGLLLRSIVDGITYDKEKNRLYFNFFIS

SEQ ID NO: 7299 - protein, 476 aa, Unknown
  Description of Unknown: Integrase B7300 sequence
  cd00338,SM00857,IPR006118,G3DSA:1.10.10.2600,IPR036162, PF13408,IPR025827,G3DSA:3.40.50.1390,IPR006119,IPR038109, PF07508,SSF53041,IPR011109,PTHR30461,PS00397, PS51736,Coil,PF00239
MAKLRNGALYIRVSTADQTELSPDAQQRLLLDYAKKNGIIISKDYVFEESVSGRHADKRPKFQEMIGIAKQESHPIDVILVWKYSRFARNQEESIVYKSLLKKSDVDVISISEPLIDGPFGTLIERIIEWMDEYYSIRLSGEVIRGMKEKALKHGYQSTPCLGYDAVGGGRPFVINESEYRIVQYIMDQYDLYDQDATAIARKCNDLGFRSKRGNLFEQRNVDLILKNPFYAGTVVWNGISFEGSHETRLSKERFEKRIALMRARRRPAKARNISTCKHWLSGLLRCSVCGATLSLAGSGSYRYFQCWKYSKGFHKGSQSLSAAKAEAAVCDYFDRILAGADFTYAVRNIPDQKESDELDLLRQELDQIAVKEARVKLAYENGIDTLEEYKENRRRLKESREELQEKIDAATAATQPDDSDSNARETLLKEIRSVSEVLKDPAESYERKGLLLRSIVDGITYDKEKNRLYFNFFIS

SEQ ID NO: 7300 - protein, 476 aa, Unknown
  Description of Unknown: Integrase B7301 sequence
  cd00338,SM00857,IPR006118,G3DSA:1.10.10.2600,IPR036162, PF13408,IPR025827,G3DSA:3.40.50.1390,IPR006119,IPR038109, PF07508,IPR011109,SSF53041,PTHR30461,PS00397, PS51736,Coil,PF00239
MAKLRNGALYIRVSTADQTELSPDAQQRLLLDYAKKNGIIISKDFIFVESVSGRHADKRPKFQEMIGIAKQDSHPIDVILVWKYSRFARNQEESIVYKSLLKKSGVDVISISEPLIDGPFGTLIERIIEWMDEYYSIRLSGEVIRGMKEKALKHGYQSTPCLGYDAVGGGRPFVINENEYRIVQYIMDQYDLYDQDETAIARKCNDLGFRSKRGNLFEQRNVDLILKNPFYTGTVVWNGISFEGSHETRLSKERFEKRIALMRARRRPAKARNISTCKHFLSGLLRCSVCGATLSLAGSGSYKYFQCWKYSKGFHKGSQTLSMTKAEAAVCDYFDRILAGANFSYTVRNLPDQKESDELDLLRQELDQIAVKEARVKLAYENGIDTLEEYKENRRRLKESREELLEKIDVATAATQPDDSDSRARETLLKEIRSVSEILKDPAESYERKGLLLRSIVDGITYDKEKNRLYFNFFIS

SEQ ID NO: 7301 - protein, 476 aa, Unknown
  Description of Unknown: Integrase B7302 sequence
  PTHR30461:SF3,cd00338,SM00857,G3DSA:1.10.10.2600,IPR036162, PF13408,IPR025827,G3DSA:3.40.50.1390,PS51737,IPR006119, IPR038109,PF07508,IPR011109,SSF53041,PTHR30461, PS51736,Coil,PF00239
MKRAVFYGRYSSDRQTEQSIEGQRRVCEEFAKAEQIQIVGEYIDRATSGTSTEHREQFQKMLKDSKNGGWDYVLVYKLDRFARSRYDSAISKQQLKKNGVKVLSATERITDSPEGILIEGLLESMDEYFSRELSRKCKRGIRESIIKGHNFGGRVLYGYDRKDKRFVINEEQAVNVRRIFKSYLSGCTIQSIADQLNADGYRTNYGNEFKRYTVSDILHNDKYTGIHYIDGIEEPETCPAIISQTTFERVKEKLNQSAHRSREHTTGHTYALSGLLQCGVCGRYVCGSSVERKYFYYACRSREHAENSVHIHADKLEQVVIDALQTFFTEEQVSTLAERLYQIYTTDMDGKPDRSKRLNEIEKQVQGTVNALIACPSSKALQEKLTQLEEQKAEIEKMPILQPQLKKEHFENYFHWLALRLEHIEDRQTFFHTVIHKVLVYPEKAVIILNMTDEMADPPKREQVEAFMSNVGEVSL

SEQ ID NO: 7302 - protein, 476 aa, Unknown
  Description of Unknown: Integrase B7303 sequence
  PTHR30461:SF3,IPR036162,PS51737,IPR011109,PTHR30461, PS00397,PF00239,G3DSA:1.10.10.2600,IPR006119,SSF53041, cd00338,SM00857,IPR025827,IPR038109,PS51736, IPR006118,PF13408,G3DSA:3.40.50.1390,PF07508,Coil
MSALKNGALYIRVSTADQTELSPDAQQRLLLDYAKKNGIVIAKEFIFEESVSGRRADRRPKFQEMIALAKQDSHPIDVILVWKYSRFARNQEESIVYKSLLKKSNVDVISISEPLIDGPFGTLIERIIEWMDEYYSIRLSGEVLRGMKEKALQHGYQTTPCLGYQAAGDGKPFVIDEAEYQIVKYIMDQYDFEHLDPTAIARRCNDLGYRTRRGNLMERRSIERVLRNPFYAGTVVWNGISFDGTHETRLDPARYQDRIKRMDARRRSPKSRNPSTCRHWLSGLLKCPICGATMTVTAGNTSCPYFQCWKYAKGFHKGSNSITVAKAERTVYRYFDDILAGADFSFSVRDRKQEQKDDETIQRLQQALDHLAVREARVKMAYENGIDTLEEYGANKKRLAEERQSLQEELDRVLTPAAPPETISKEDFRKEIKNINDILKNPEEPAEKKGLLLRSIVDRIVYEKASGTMYFDFFVS

SEQ ID NO: 7303 - protein, 476 aa, Unknown
  Description of Unknown: Integrase B7304 sequence
  PTHR30461:SF3,SM00857,IPR006118,G3DSA:1.10.10.2600,IPR036162, PS51737,G3DSA:3.40.50.1390,PS00397,IPR006119,IPR038109, PF07508,IPR011109,SSF53041,PTHR30461,Coil, PS51736,cd00338,PF00239
MKIAAAYVRVSTDDQLEYSPDSQLQAIRDYAKFHDLILAEEYIFREEDGRSGRQAEKRPEFMRMISTAKQQPPPFEVILCWKYSRFARNQEESIVYKSMLKKDGIEVVSISEPLIDGPFGSLIERIIEWMDEYYSIRLSGEVKRGMTEKVSRGEPVTIPPLGYLMENKQLVPDPEMAPVISMLFDEFAAGTPMLQLARRLNEMGIRTRRGCKIEYRTLNYIMQNPVYIGKIRWTPTGRANRYYKTDDTLIVDGNHQPIITTEQWEKAQAKIAENKQKFPRYQRDTASKFMLRGLVHCSNCGATLVTSTPGSLQCNHYAKGLCSISHSITITKLDKAVMQGLEHDALDMGGNLKIEYRTQSAPVATATIKAQIKKEQNKLQRCKEAYQGGVDTLAEYRSNKEAILSTIADLEKQLNTAPTAIPAPDPQALRDKIIAAIPTLKDPDVTPTVKNNLLRCFISKIVYTKSNEEIEMYYYM

SEQ ID NO: 7304 - protein, 476 aa, Unknown
  Description of Unknown: Integrase B7305 sequence
  PTHR30461:SF3,IPR036162,PS51737,IPR011109,PTHR30461, PS00397,PF00239,G3DSA:1.10.10.2600,IPR006119,SSF53041, cd00338,SM00857,IPR025827,IPR038109,PS51736, IPR006118,PF13408,G3DSA:3.40.50.1390,PF07508,Coil
MSALKNGALYIRVSTADQTELSPDAQQRLLLDYAKKNGIVIAKEFIFEESVSGRHADRRPKFQEMIALAKQDSHPIDVILVWKYSRFARNQEESIVYKSLLKKSNVDVISISEPLIDGPFGTLIERIIEWMDEYYSIRLSGEVMRGMKEKALKHGYQATPSLGYRAVGGGKPFVIDEAEYQIVKYIMDQYDLEHLDPTAIARKCNDLGYRTRRGNRMERRSIERVLRNPFYVGTVVWNGISFDGTHETRLDPVRYQERIKHMDARKRSPKSRNPSTCRHWLSGLLKCPICGATMTVTAGNTSCPYFQCWKYAKGFHKGSNSITVAKAERTVYRYFDDILAGADFSFTVRDRKQEQEDDETIQRLQQALAHLSVRESRVKMAFENGIDTLEEYGANKKRLAEERQSLQEELDRVLTPAAPPETISKEDFRKEIKNINDILKNPEEPAEKKGLLLRSIVDRIVYEKASGTMYFDFFVS

SEQ ID NO: 7305 - protein, 476 aa, Unknown
  Description of Unknown: Integrase B7306 sequence
  IPR036162,PS51737,IPR011109,PTHR30461,PS00397, PF00239,G3DSA:1.10.10.2600,IPR006119,SSF53041,cd00338, SM00857,IPR025827,IPR038109,PS51736,IPR006118, PF13408,G3DSA:3.40.50.1390,PF07508,Coil
MTKLRNGALYIRVSTADQTELSPDAQQRLLLDYAKKNGIIISKDYVFEESVSGRHADKRPKFQEMIGIAKQESHPLDVILVWKYSRFARNQEESIVYKSLLKKSNVDVISISEPLIDGPFGTLIERIIEWMDEYYSIRLSGEVIRGMKEKALKHGYQTTPCLGYDAVGGGKPFVINEEEYKIVQYIMDQYDLYDQDATAIARKCNDLGFRSKRGNLFEQRNVDLILKNPFYAGTVVWNGISFEGSHETRLSKERFEKRRALMGARRRPAKARNISTCKHWLSGLLRCSVCGATLSLAGSGSYRYFQCWKYSKGFHTGSQSLSAAKAEAAVCDYFDRILSGADFTYTVRNIHDQKESDELDLLRQELDQIAVKEARVKLAYENGIDTLEEYKENRRRLKESREELQEKIDDATAATQPKDSDSVAREALLKEIRSVSEILKDPAESYERKGLLLRSIVDGITYDKEKNRLYFNFFIS

SEQ ID NO: 7306 - protein, 476 aa, Unknown
  Description of Unknown: Integrase B7307 sequence
  cd00338,SM00857,G3DSA:1.10.10.2600,IPR036162,PF13408, IPR025827,G3DSA:3.40.50.1390,PS51737,IPR006119,IPR038109, PF07508,SSF53041,IPR011109,PTHR30461,PS51736, Coil,PF00239
MKRAVFYGRYSSDRQTEQSIEGQRRVCEEFAKAEQIQIVGEYIDRATSGTSTEHREQFQKMLKDSKNGGWDYVLVYKLDRFARSRYDSAISKQQLKKNSVKVLSATERITDSPEGILIEGLLESMDEYFSRELSRKCKRGIRESIIKGHNFGGRVLYGYGRKDKRFVINEEQAVNVRRIFKSYLSGCTIQSIADQLNADGYRTNYGNEFKRYTVSDILHNDKYTGIHYIDGIEEPETCPAIISQTTFDRVKEKLNQSAHRSREHATGHTYALSGLLQCGVCGRYVCGSSVERKYFYYACRSREHAENSVHIHADKLEQVVIDALQTFFTEEQVSTLAERLYQIYTTDMDGKPDRSKRLNEIEKQVQGTVNALIACPSSKALQEKLTQLEEQKAEIEKMPILQPQLKKEHFENYFHWLALRLEHIEDRQTFFHTVIHKVLVYPEKAVIILNMTDEMADPPKREQVEAFMSNVGEVSL

SEQ ID NO: 7307 - protein, 476 aa, Unknown
  Description of Unknown: Integrase B7308 sequence
  IPR036162,PS51737,IPR011109,PTHR30461,PS00397, PF00239,G3DSA:1.10.10.2600,IPR006119,SSF53041,cd00338, SM00857,IPR025827,IPR038109,PS51736,IPR006118, PF13408,G3DSA:3.40.50.1390,PF07508,Coil
MSALKNGALYIRVSTADQTELSPDAQQRLLLDYAKKNGIVIAKEFIFEESVSGRHADRRPKFQEMIALAKQDSHPIDVILVWKYSRFARNQEESIVYKSLLKKSNVDVISISEPLIDGPFGTLIERIIEWMDEYYSIRLSGEVIRGMKEKALKHGYQTSPCLGYDAAGSGKPFVINEAEYSIVKFIMDQYDLENHDPTAIARSCNELGYHTKRGNLMERRSVERILRNPFYAGTVIWNGISFEGAHETRLDRERFNSRIKRMDARRRTPKSRNPSSCKHWLSGLLKCPVCGATLTITAGNTSCPYFQCWKYAKGFHKGSNSITVAKAERTVYRYFDDILAGADFFFTVRDRKQEQEDDETIQRLQQALEHLAAREARVKMAYENGIDTLEEYGANKKRLAEERQSLQEELDRVLTPATPPETISKEDFRKEIKNINDILKNPEEPAEKKGLLLRSIVDRIVYEKASGTMYFDFFVS

SEQ ID NO: 7308 - protein, 476 aa, Unknown
  Description of Unknown: Integrase B7309 sequence
  IPR036162,PS51737,IPR011109,PTHR30461,PS00397, PF00239,G3DSA:1.10.10.2600,IPR006119,SSF53041,cd00338, SM00857,IPR025827,IPR038109,PS51736,IPR006118, PF13408,G3DSA:3.40.50.1390,PF07508,Coil
MSALKNGALYIRVSTADQTELSPDAQQRLLLDYAKKNGIVIAKEFIFEESVSGRHADRRPKFQEMIAIAKQESHPIDVILVWKYSRFARNQEESIVYKSLLKKSGVDVISISEPLIDGPFGTLIERIIEWMDEYYSIRLSGEVIRGMKEKALKHGYQTSPCLGYDAAGSGKPFVINEAEYSIVKFIMDQYDLENHDPTAIARSCNELGYHTKRGNLMERRSVERILRNPFYAGTVIWNGISFEGAHEARLDRERFNNRIKRMDARRRTPKSRNPSSCKHWLSGLLKCPVCGATMTVTAGSTSCPYFQCWKYAKGFHKGSNSITVAKAERTVYHYFDDILAGADFSFAVRDRKQEQEDDETIQRLQQALEHLAAREARVKMAYENGIDTLEEYGANKKRLAEERQSLQEELDRVLTPAAPPETISKEDFRKEIKNINDILKNPEEPAEKKGLLLRSIVDRIVYEKASGTMYFDFFVS

SEQ ID NO: 7309 - protein, 476 aa, Unknown
  Description of Unknown: Integrase B7310 sequence
  PTHR30461:SF3,IPR036162,PS51737,IPR011109,PTHR30461, PS00397,PF00239,G3DSA:1.10.10.2600,IPR006119,SSF53041, cd00338,SM00857,IPR025827,IPR038109,PS51736, IPR006118,PF13408,G3DSA:3.40.50.1390,PF07508,Coil
MSALKNGALYIRVSTADQTELSPDAQQRLLLDYAKKNGIVIAKEFIFEESVSGRHADRRPKFQEMIALAKQDSHPIDVILVWKYSRFARNQEESIVYKSLLKKNNIDVISISEPLIDGPFGTLIERIIEWMDEYYSIRLSGEVLRGMKEKALQHGYQATPCLGYQAAGGGKPFVIDEAEYQIVKYIMDQYDFEHLDPTAIARRCNDLGYRTRRGNLMERRSIERVLRNPFYAGAVVWNGISFDGTHETRLDPARYQERIKRMDARRRSPKSRNPSTCRHWLSGLLKCPICGATMTVTAGNTSCPYFQCWKYAKGFHKGSNSITVAKAERTVYRYFDDILAGADFSFTVRDRKQEQEDDETIQRLQQALEHLAVREARVKMAYENGIDTLEEYGANKKRLAEERQSLQKELDRVLTPAAPPETISKEDFRKEIKNINDILKNPEEPTEKKGLLLRSIVDRIVYEKSSGTMYFDFFVS

SEQ ID NO: 7310 - protein, 476 aa, Unknown
  Description of Unknown: Integrase B7311 sequence
  PTHR30461:SF3,SM00857,G3DSA:1.10.10.2600,IPR036162,PF13408, PS51737,G3DSA:3.40.50.1390,IPR025827,IPR006119,IPR038109, PF07508,IPR011109,SSF53041,PF00239,PTHR30461, PS51736,Coil,cd00338
MKRAVFYGRYSSDRQTEQSIEGQRRVCEEFAKAEQIQIVSEYIDRATSGTSTEHREQFQKMLKDSKYGGWDYVLVYKLDRFARSRYDSAISKQQLKKNGVKVLSATERITDSPEGILIEGLLESMDEYFSRELSRKCKRGIRESIIKGHNFGGRVLYGYDRKDKRFVINEEQAVNVRRIFKSYLSGCTIQSIADQLNADGYRTNYGNEFKRYTVSDILHNDKYTGIHYIDGIEEPETCPAIISQTTFERVKEKLNQSAHRSREHTTGHTYALSGLLQCGVCGRYVCGSSVERKYFYYACRSREHAENSVHIHADKLEQVVIDALQTFFTEEQVSTLAERLYQIYTTDMDGKPDRSKRLNEIEKQIQGTVNALIACPSSKALQEKLTQLEEQKAEIEKMPILQPQLKKEHFENYFHWLALRLEHIEDCQTFFHTVIHKVLVYPEKAVIILNMTDEMADPPKREQVEAFMSNVGEVSL

SEQ ID NO: 7311 - protein, 476 aa, Unknown
  Description of Unknown: Integrase B7312 sequence
  cd00338,SM00857,G3DSA:1.10.10.2600,IPR036162,PS51737, G3DSA:3.40.50.1390,IPR006119,IPR038109,PF07508,IPR011109, SSF53041,PTHR30461,PS51736,Coil,PF00239
MNGKLATKTAVIYARFSCSKQREASIEDQLRICREWCAREGYGIVAEYCDYAISGKTDERPEFQRMVANAGESGIVLVYMMDRFSRDEYDAPIYKRQLRKAGVEVFSATETLPDGPERILVEKIYEGLAAVESEKISVRTKRGMEGNALKCMANGVHIFGYDIDEESSRYMINEEQAALVREAFSRRIMREPYKSIADDFAERGVLSAQGRPCSYNMIRKLLTNERYTGVYIFGDVRIEGGIPAIIDRQDYVKVQNIRGTKVRSEEEWGRFRLTGRAICSECGRDLSGVSGRGRHNVKYEYYACKRCGGIKPVRRDWLEKTIAESLRDMLADDATARRVASIVAAGGDRDGETMRKQAQKALREAENGLRNIMAAIERGILMDDIQERIDQLQAQKARAEEDLAGARSGKIDEELFVKFLKSGTTLTDEDLVDAFVYQAAVSTEDVIVTLNFDNEKGEPARLDVERVLPEASWLPG

SEQ ID NO: 7312 - protein, 476 aa, Unknown
  Description of Unknown: Integrase B7313 sequence
  IPR036162,PS51737,IPR011109,PTHR30461, PS00397,PF00239,G3DSA:1.10.10.2600,IPR006119, SSF53041,cd00338,SM00857,IPR025827,IPR038109,PS51736 ,IPR006118,PF13408,G3DSA:3.40.50.1390,PF07508,Coil
MTKLRNGALYIRVSTADQTELSPDAQQRLLLDYAKKNGIIISKDYVFEESVSGRHADKRPKFQEMIGIAKQESHPLDVILVWKYSRFARNQEESIVYKSLLKKSNVDVISISEPLIDGPFGTLIERIIEWMDEYYSIRLSGEVIRGMKEKALKHGYQTTPCLGYDAVGGGKPFVINEEEYKIVQYIMDQYDLYDQDATAIARKCNDLGFRSKRGNLFEQRNVDLILKNPFYAGTVVWNGISFEGSHETRLSKERFKKRRALMRARRRPVKARNISTCKHWLSGLLRCSVCGATLSLAGSGSYRYFQCWKYSKGFHTGSQSLSAAKAEAAVCDYFDRILAGADFSYTVRNLPDQKESDELDLLRQELDQIAVKETRVKLAYENGIDTLEEYKENRRRLKESREELQKKIDAATATTQPEDSDSNARETLLKEILSVSEILKDPAESYERKGLLLRSIVDGITYDKEKNRLYFNFFIS

SEQ ID NO: 7313 - protein, 476 aa, Unknown
  Description of Unknown: Integrase B7314 sequence
  PTHR30461:SF3,cd00338,SM00857,G3DSA:1.10.10.2600,IPR036162, PF13408,PS51737,G3DSA:3.40.50.1390,IPR025827,IPR006119, IPR038109,PF07508,IPR011109,SSF53041,PTHR30461, PS51736,Coil,PF00239
MKRAVFYGRYSSDRQTEQSIEGQRRVCEEFAKAEQIQIVGEYIDRATSGTSTEHREQFQKMLKDSKNGGWNYVLVYKLDRFARSRYDSAISKQQLKKNGVKVLSATERITDSPEGILIEGLLESMDEYFSRELSRKCKRGIRESIIKGHNFGGRVLYGYDRKDKRFVVNEEQAVNVRRIFKSYLSGCTIQSIADQLNADGYRTNYGNEFKRYTVSDILHNDKYTGIHYIDGIEEPETCPAIISQTTFERVKEKLNQSAHRSREHATGHTYALSGLLQCGVCGRYVCGSSVERKYFYYACRSREHAENSVHIHADKLEQVVIDALQTFFTEEQVSTLAERLYQIYTTDMDGKPDRSKRLNEIEKQIQGTVNALIACPSSKALQEKLTQLEEQKAEIEKMPILQPQLKKEHFENYFHWLALRLEHIEDRQTFFHTVIHKVLVYPEKAVIILNMTDEMADPPKREQVEAFMSNVGEVSL

SEQ ID NO: 7314 - protein, 476 aa, Unknown
  Description of Unknown: Integrase B7315 sequence
  IPR036162,PS51737,IPR011109,PTHR30461,PS00397, PF00239,G3DSA:1.10.10.2600,IPR006119,SSF53041,cd00338, SM00857,IPR025827,IPR038109,PS51736,IPR006118, PF13408,G3DSA:3.40.50.1390,PF07508,Coil
MSALKNGALYIRVSTADQTELSPDAQQRLLLDYAKKNGIVIAKEFIFEESVSGRHADRRPKFQEMIALAKQESHPIDVILVWKYSRFARNQEESIVYKSLLKKSNVDVISISEPLIDGPFGTLIERIIEWMDEYYSIRLSGEVLRGMKEKALQHGYQTTPCLGYRAVSGGKPFVIDETEYQIVKYIMDQYDFEHLDPTAIARRCNDLGYRTRRGNLMERRSIERVLRNPFYAGTVVWNGISFDGTHETRLDPARYQERIKRMDARRRSPKSRNPSTCRHWLSGLLKCPICGATMTVTAGNTSCPYFQCWKYAKGFHKGSNSITVAKAERTVYRYFDDILAGADFSFTVRDRKQEQEDDETIQRLQKALDHLSVREARVKMAFENGIDTLEEYGANKKRLAEERQSLQEELDRVLTPAALPETISKEDFREEIKNINDILKNPEEPAEKKGLLLRSIVDRIVYEKSSGTMYFDFFVS

SEQ ID NO: 7315 - protein, 476 aa, Unknown
  Description of Unknown: Integrase B7316 sequence
  PTHR30461:SF3,IPR036162,PS51737,IPR011109,PTHR30461, PS00397,PF00239,G3DSA:1.10.10.2600,IPR006119,SSF53041, cd00338,SM00857,IPR025827,IPR038109,PS51736, IPR006118,PF13408,G3DSA:3.40.50.1390,PF07508,Coil
MSALKNGALYIRVSTADQTELSPDAQQRLLLDYAKKNGIVIAKEFIFEESVSGRHADRRPKFQEMIALAKQDSHPIDVILVWKYSRFARNQEESIVYKSLLKKNNIDVISISEPLIDGPFGTLIERIIEWMDEYYSIRLSGEVLRGMKEKALQHGYQATPCLGYQAAGGGKPFVIDEAEYQIVKYIMDQYDFEHLDPTAIARRCNDLGYRTRRGNLMERRSIERVLRNPFYAGAVVWNGISFDGTHETRLDPARYQERIKRMDARRRSPKSRNPSTCRHWLSGLLKCPICGATMTVTAGNTSCPYFQCWKYAKGFHKGSNSITVAKAERTVYRYFDDILAGADFSFTVRDRKQEQEDDETIQRLQQALEHLAVREARVKMAYENGIDTLEEYGANKKRLAEERQSLQKELDRVLTPAAPPETISKEDFRKEIKNINDILKNPEEPAEKKGLLLRSIVDRIVYEKASGTMYFDFFVS

SEQ ID NO: 7316 - protein, 476 aa, Unknown
  Description of Unknown: Integrase B7317 sequence
  PTHR30461:SF3,SM00857,IPR006118,G3DSA:1.10.10.2600,IPR036162, PS51737,G3DSA:3.40.50.1390,IPR006119,IPR038109,PF07508, IPR011109,SSF53041,PF00239,PTHR30461,PS00397, PS51736,Coil,cd00338
MKIAAAYVRVSTDDQLEYSPDSQLQAIRDYAKSHDLILAEEYIFREEDGRSGRQAEKRPEFMRMISTAKQQPPPFEVILCWKYSRFARNQEESIVYKSMLKKDGIEVVSISEPLIDGPFGSLIERIIEWMDEYYSIRLSGEVKRGMTEKVSRGEPVTIPPLGYLMENKQLVPDPEMAPVISMLFDEFAAGTPMLQLARRLNEMGIRTRRGCKIEYRTLNYIMQNPVYIGKIRWTPTGRANRYYKTDDTLIVDGNHQPIITTEQWEKAQAKIAENKQKFPRYQRDTASKFMLRGLVHCSNCGATLVTSTPGSLQCNHYAKGLCSISHSITITKLDKAVMQGLEHDALDMNGNLKIEYRTQSAPVATATIKAQIKKEQNKLQRCKEAYQGGVDTLAEYRSNKEAILSTIADLEKQLNTAPTVIPAPDPQALRDKIIAAIPTLKDPDVTPTVKNNLLRCFISKIVYTKSNEEIEMYYYM

SEQ ID NO: 7317 - protein, 476 aa, Unknown
  Description of Unknown: Integrase B7318 sequence
  PTHR30461:SF3,IPR036162,PS51737,IPR011109,PTHR30461, PS00397,PF00239,G3DSA:1.10.10.2600,IPR006119,SSF53041, cd00338,SM00857,IPR025827,IPR038109,PS51736, IPR006118,PF13408,G3DSA:3.40.50.1390,PF07508,Coil
MSALKNGALYIRVSTADQTELSPDAQQRLLLDYAKKNGIVIAKEFVFEESVSGRHADRRPKFQEMIALAKQDSHPIDVILVWKYSRFARNQEESIVYKSLLKKSNVDVISISEPLIDGPFGTLIERIIEWMDEYYSIRLSGEVLRGMKEKALQHGYQTTPCLGYQAAGGGKPFVIDEAEYQIVKYIMDQYDLEHLDPTAIARKCNDLGYRTRRGNRMERRSIERVLRNPFYAGTVVWNGISFDGTHETRLDPARYQDRIKRMDARRRSPKSRNPSTCRHWLSGLLKCPICGATMTVTAGSTSCPYFQCWKYAKGFHKGSNSITVAKAERTVYRYFDDILAGADFSFSVRDRKQEQKDDETIQRLQQALDHLAVREARVKMAYENGIDTLEEYGANKKRLAEERQSLQKELDRVLTPAAPPETISKEDFRKEIKNINDILKNPEEPSEKKGLLLRSIVDRIVYEKASGTMYFDFFVS

SEQ ID NO: 7318 - protein, 476 aa, Unknown
  Description of Unknown: Integrase B7319 sequence
  SM00857,IPR006118,G3DSA:1.10.10.2600,IPR036162,PS51737, G3DSA:3.40.50.1390,Coil,IPR006119,IPR038109,PF07508, SSF53041,IPR011109,PTHR30461,PS00397,PS51736, cd00338,PF00239
MKTAAAYIRVSTDDQVEYSPDSQIKLIRDYAKRNDYILPDEFIFRDDGISGKSAKHRPEFTKMIALAKSPEHPFDAILVWKFSRFARNQEESIVFKNILRKIGVEVRSVSEPISEDPFGSLVERIIEWTDEYYIINLSGEVKRGMLEKISRGQPVVPPPVGYKMENGQYIPDENAHFIKEIFEAYAAGEGARHIAQRLAAQGCLTKRGNPIDNRFVDYVLHNPVYIGKLRWSVNSHAASSRHYDSADIIVFDGTHEPLISSELWESVQKRLHEVKTLYPKYQRREQPVSFMLKGLVRCSSCGSTLCYCRTSEPSLQCHSYARGSCRQSHSINIATANEAVIKGLQLAVDKLDFAIAPAKPHYSADAPGTNKLLAAEYKKMERIKAAYANGTDTLEEYAANKKKISAEIARLEAELQQESNVKPINKKAFAKRVSEIIKYISDPHNSEAAKNQALRTVISYIIFDRAATTFNIIFHF

SEQ ID NO: 7319 - protein, 476 aa, Unknown
  Description of Unknown: Integrase B7320 sequence
  cd03768,SM00857,IPR006118,G3DSA:1.10.10.2600,IPR036162, PS51737,G3DSA:3.40.50.1390,IPR006119,IPR038109,PF07508, IPR011109,SSF53041,PTHR30461,PS00397,PS51736, Coil,PF00239
MIKKRVGLYIRVSTEEQAMEGYSISGQRERLKAFCVAQSWETIKFYVDEGISGRSTERPALKKMMKDIEDGLIDVLLVYRLDRLTRSVRDLHDILDFLEKHNCQFRSATEVYDTSTAMGRMFITIVAAIAEWESANLGERVRLGQIEKARQGEWSAPAPYGFRKNDQKRLEVNPDEIEAVKLMVRKVKEGYSFRQLSMYMQNTSYKPRRGYKWHIASLLDLLHNPVLYGAMQWNDEVYEGTHKGIMSKEDFMQLQNIIKSRQIQKKRETNYNFIYQTKIVCPSCGNRLSSECSRWKNKNGMERSANRYRCQSCALDGREPVSISEYKLTLQLIQHMNALTFDENDHEELEAEKDNLQLIENEMRRIEREREKYQRAWASDLISDTEFKNRMDDTRKRYSDLERQLNASQDETTFGNVNPEYIKQLSNEFNQNYEYLTDEEKRTFVQQFIESIELVEASSPTASVKKVYDVKLVRFF

SEQ ID NO: 7320 - protein, 476 aa, Unknown
  Description of Unknown: Integrase B7321 sequence
  cd00338,SM00857,G3DSA:1.10.10.2600,IPR036162,PS51737, G3DSA:3.40.50.1390,IPR006119,IPR038109,PF07508,IPR011109, SSF53041,PTHR30461,PS51736,Coil,PF00239
MNGKLATKTAVIYARFSCSKQREASIEDQLRICREWCAREGYGIVAEYCDYAISGKTDERPEFQRMVANAGESGIVLVYMMDRFSRDEYDAPIYKRQLRKAGVEVFSATETLPDGPERILVEKIYEGLAAVESEKISVRTKRGMEGNALKCMANGVHIFGYDIDEESSRYMINEEQAALVREAFSRRIMREPYKSIADDFAQRGVLSAQGRPCSYNMIRKLLTNERYTGVYIFGDVRIEGGIPAIIDRQDYVKVQNIRGTKVRSEEEWGRFRLTGRAICSECGRDLSGVSGRGRHNVKYEYYACKRCGGIKPVRRDWLEKTIAESLRDMLADDATARRVASIVAAGGDRDGETMRKQAQKALREAENGLRNIMAAIERGILMDDIQERIDQLQAQKARAEEDLASARSGKIDEELFVKFLKSGTTLTDEGLVDAFVYQAAVSTEDVIVTLNFDNEKGEPVRLDIERVLPEASWLPG

SEQ ID NO: 7321 - protein, 476 aa, Unknown
  Description of Unknown: Integrase B7322 sequence
  SM00857,IPR006118,G3DSA:1.10.10.2600,IPR036162, PF13408,IPR025827,G3DSA:3.40.50.1390,Coil, IPR006119,IPR038109,PF07508,IPR011109, SSF53041,PTHR30461,PS00397,PS51736,cd00338,PF00239
MAKLRNGALYIRVSTADQTELSPDAQQRLLLDYAKKNGIIISKDYVFEESVSGRHADKRPKFQEMIGIAKQESHPLDVILVWKYSRFARNQEESIVYKSLLKKSDVDVISISEPLIDGPFGTLIERIIEWMDEYYSIRLSGEVIRGMKEKALKHGYQSTPCLGYDAVGGGRPFVINENEYRIVQYIMDQYDLYDQDETAIARKCNDLGFRSKRGNLFEQRNVDLILKNPFYTGTVVWNGISFEGSHETRLSKERFEKRIALMRARRRPAKARNISTCKHWLSGLLRCSVCGATLSLAGSGSYRYFQCWKYSKGFHKGSQSLSAAKAEAAVCDYFDRILSGADFTYTVRNIPDQKESDELDLLRQELDQIAVKEARVKLAYENGIDTLEEYKENRRRLKESQEELLEKIDTTTAATQPEDSDSNARETLLKEIRSVSEVLKDPAESYERKGLLLRSIVDGITYDKEKNRLYFNFFIS

SEQ ID NO: 7322 - protein, 476 aa, Unknown
  Description of Unknown: Integrase B7323 sequence
  IPR036162,PS51737,IPR011109,PTHR30461,PS00397, PF00239,G3DSA:1.10.10.2600,IPR006119,SSF53041,cd00338, SM00857,IPR025827,IPR038109,PS51736,IPR006118, PF13408,G3DSA:3.40.50.1390,PF07508,Coil
MAKLRNGALYIRVSTADQTELSPDAQQRLLLDYAKKNGIIISKDYVFEESVSGRHADKRPKFQEMIGIAKQESHPLDVILVWKYSRFARNQEESIVYKSLLKKSNVDVISISEPLIDGPFGTLIERIIEWMDEYYSIRLSGEVIRGMKEKALKHGYQTTPCLGYDAVGGGKPFVINEEEYKIVQYIMDQYDLYDQDATAIARKCNDLGFRSKRGNLFEQRNVDLILKNPFYAGTVVWNGISFEGSHETRLSKERFEKRRALMRARRRPVKARNISTCKHWLSGLLRCSVCGATLSLAGSGSYRYFQCWKYSKGFHKGSQSLSAAKAEAAVCDYFDRILAGADFTYAVRNIPDQKESDELDLLRQELDQIAVKEARVKLAYENGIDTLEEYKENRRRLKESREELQEKIDAATAATQPDDSDSHARETLLKEIRSVSEVLKDPAESYERKGLLLRSIVDGITYDKEKNRLYFNFFIS

SEQ ID NO: 7323 - protein, 476 aa, Unknown
  Description of Unknown: Integrase B7324 sequence
  PTHR30461:SF3,IPR036162,PS51737,IPR011109,PTHR30461, PS00397,PF00239,G3DSA:1.10.10.2600,IPR006119,SSF53041, cd00338,SM00857,IPR025827,IPR038109,PS51736, IPR006118,PF13408,G3DSA:3.40.50.1390,PF07508,Coil
MSALKNGALYIRVSTADQTELSPDAQQRLLLDYAKKNGIVIAKEFIFEESVSGRHADRRPKFQEMIALAKQDSHPIDVILVWKYSRFARNQEESIVYKSLLKKNNIDVISISEPLIDGPFGTLIERIIEWMDEYYSIRLSGEVIRGMKEKALKHGYQTSPCLGYDAAGGGKPFVINEAEYSIVKFIMDQYDLEHHDPTAIARSCNELGYHTKRGNLMERRSVERILRNPFYAGTVIWNGISFEGAHEARLDRERFNNRIKRMDARRRTPKSRNPSSCKHWLSGLLKCPVCGATLTITAGNTSCPYFQCWKYAKGLHKVSNSITVAKAERTVFRYFDEILAGADFSYTVRNKTLDVEKDDTVARLQQALDHLSMRESRIKLAFENGIDTLEEYGANKKRLAEERQSLQEELDRVLTPAAPPETISKEDFRKEIKNINDILKNPEEPAEKKGLLLRSIVDRIVYEKASGTMYFDFFVS

SEQ ID NO: 7324 - protein, 476 aa, Unknown
  Description of Unknown: Integrase B7325 sequence
  PTHR30461:SF3,cd00338,SM00857,G3DSA:1.10.10.2600,IPR036162, PF13408,PS51737,IPR025827,G3DSA:3.40.50.1390,IPR006119, IPR038109,PF07508,IPR011109,SSF53041,PTHR30461, PS51736,Coil,PF00239
MKRAVFYGRYSSDRQTEQSIEGQRRVCEEFAKAEQIQIVGEYIDRATSGTSTEHREQFQKMLKDSKNCGWDYVLVYKLDRFARSRYDSAISKQQLKKNGVKVLSATERITDSPEGILIEGLLESMDEYFSRELSRKCKRGIRESIIKGHNFGGRVLYGYDRKDKRFVINEEQAVNVRRIFKSYLSGCTIQSIADQLNADGYRTNYGNEFKRYTVSDILHNDKYTGIHYIDGIEEPETCPAIISQTTFERVKEKLNQSAHRSREHTTGHTYALSGLLQCGVCGRYVCGSSVERKYFYYACRSREHAENSVHIHADKLEQVVIDALQTFFTEEQVSTLAERLYQIYTTDMDGKPDRSKRLNEIEKQIQGTVNALIACPSSKALQEKLTQLEEQKAEIEKMPILQPQLKKEHFENYFRWLALRLEHIEDRQTFFHTVIHKVLVYPEKAVIILNMTDEMADPPKREQVEAFMSNVGEVSL

SEQ ID NO: 7325 - protein, 476 aa, Unknown
  Description of Unknown: Integrase B7326 sequence
  PTHR30461:SF3,SM00857,G3DSA:1.10.10.2600,IPR036162,PF13408, IPR025827,PS51737,G3DSA:3.40.50.1390,IPR006119,IPR038109, PF07508,IPR011109,SSF53041,PTHR30461,Coil, PS51736,cd00338,PF00239
MTIIGEYCDKAISGKTDNRPSFQRLIKDSEKGQFEAVIMYTLDRFARNRYDSAIYKAKLKKNGVRVYYAKQPMPDTPEGIILESVLEGYAEYYSENLSRNIKRGMKENALQCIANGGAGMPLGYTVGEDRRYKIDPVGARIVQEIFQMYADGMSATQIINECNKRGYKTARGNAFNKNSLRTMLKNDRYIGVYRFADVVVEGGVPPIISRELFDKVQATLKHNYSARARNKAKDDYLLTAKLFCGHCGSSMVGESGTSKSGKLHHYYKCIERKRKHKCNKAVEKKDWMEELVVRFTVQKVLTDENIERIAVKAMEIIEKESADTTYIDGLRNELKEVKKKIKNLMTAIEQGIITPSTKERMDELELEKNEIEGRIASEEMKKPHLTKERIMYWLYSFKSGNIDDVEYKRRVIDTLVNSVYVYDEGDKGRRIVFTFNISGRNTATLSCSDIACFAPPKPRLRSRLRTEFCSILSAIQ

SEQ ID NO: 7326 - protein, 476 aa, Unknown
  Description of Unknown: Integrase B7327 sequence
  PTHR30461:SF3,IPR036162,PS51737,IPR011109,PTHR30461, PS00397,PF00239,G3DSA:1.10.10.2600,IPR006119,SSF53041, cd00338,SM00857,IPR025827,IPR038109,PS51736, IPR006118,PF13408,G3DSA:3.40.50.1390,PF07508,Coil
MSALKNGALYIRVSTADQTELSPDAQQRLLLDYAKKNGIVIAKEFIFEESVSGRHADRRPKFQEMIALAKQESHPIDVILVWKYSRFARNQEESIVYKSLLKKSNVDVISISEPLIDGPFGTLIERIIEWMDEYYSIRLSGEVLRGMKEKALQHGYQTTPCLGYQAAGGGKPFVIDEAEYQIVKYIMDQYDLEHLDPTAIARKCNDLGYRTRRGNRMERRSIERVLRNPFYAGTVIWNGISFDGTHETRLDPARYQERIKRMDARRRSPKSRNPSTCRHWLSGLLKCPICGATMTVTAGNTSCPYFQCWKYAKGFHKGSNSITVAKAERTVYRYFDDILAGADFSFTVRDRKQEQEDDETIQRLQHALDHLAVREARVKMAYENGIDTLEEYGANKKRLAEERQSLQEELDRVLTPAAPPKTISKEDFRKEIKNINDILKNPEEPAEKKGLLLRSIVDRIVYEKSSGTMYFDFFVS

SEQ ID NO: 7327 - protein, 476 aa, Unknown
  Description of Unknown: Integrase B7328 sequence
  PTHR30461:SF3,IPR036162,PS51737,IPR011109,PTHR30461, PS00397,PF00239,G3DSA:1.10.10.2600,IPR006119,SSF53041, cd00338,SM00857,IPR025827,IPR038109,PS51736, IPR006118,PF13408,G3DSA:3.40.50.1390,PF07508,Coil
MSALKNGALYIRVSTADQTELSPDAQQRLLLDYAKKNGIVIAKEFIFEESVSGRHADRRPKFQEMIALAKQDSHPIDVILVWKYSRFARNQEESIVYKSLLKKNNIDVISISEPLIDGPFGTLIERIIEWMDEYYSIRLSGEVLRGMKEKALQHGYQATPCLGYQAAGGGKPFVIDEAEYQIVKYIMDQYDFEHLDPTAIARRCNDLGYRTRRGNLMERRSIERVLRNPFYAGAVVWNGISFDGTHETRLDPARYQERIKRMDARRRSPKSRNPSTCRHWLSGLLKCPICGATMTVTAGNTSCPYFQCWKYAKGFHKGSNSITVAKAERTVYRYFDDILAGADFSFTVRDRKQEQEDDETIQRLQQALEHLAVREARVKMAYENGIDTLEEYGANKKRLAEERQSLQEELDRVLTPAAPPETISKEDFRKEIKNINDILKNPEEPAEKKGLLLRSIVDRIVYEKASGTMYFDFFVS

SEQ ID NO: 7328 - protein, 476 aa, Unknown
  Description of Unknown: Integrase B7329 sequence
  IPR036162,PS51737,IPR011109,PTHR30461,PS00397, PF00239,G3DSA:1.10.10.2600,IPR006119,SSF53041,cd00338, SM00857,IPR025827,IPR038109,PS51736,IPR006118, PF13408,G3DSA:3.40.50.1390,PF07508,Coil
MSALKNGALYIRVSTADQTELSPDAQQRLLLDYAKKNGIVIAKEFIFEESVSGRHADRRPKFQEMIALAKQDSHPIDVILVWKYSRFARNQEESIVYKSLLKKNNIDVISISEPLIDGPFGTLIERIIEWMDEYYSIRLSGEVMRGMKEKALKHGYQATPSLGYRAVGGGKPFVIDEAEYQIVKYIMDQYDLENHDPTAIARSCNELGYHTKRGNLMERRSVERILRNPFYAGTVIWNGISFEGAHEARLDRERFNNRIKRMDARRRTPKSRNPSACKHWLSGLLKCPVCGATMTVTAGSTSCPYFQCWKYAKGFHKGSNSITVAKAERTVYHYFDDILAGADFSFAVRDRKQEQEDDETIQRLQQALAHLSVRESRVKMAFENGIDTLEEYGANKKRLAEERQSLQEELDRVLTPAAQPETISKEDFRKEIKNINDILKNPEEPAEKKGLLLRSIVDRIVYEKASGTMYFDFFVS

SEQ ID NO: 7329 - protein, 476 aa, Unknown
  Description of Unknown: Integrase B7330 sequence
  PTHR30461:SF3,IPR036162,PS51737,IPR011109,PTHR30461, PS00397,PF00239,G3DSA:1.10.10.2600,IPR006119,SSF53041, cd00338,SM00857,IPR025827,IPR038109,PS51736, IPR006118,PF13408,G3DSA:3.40.50.1390,PF07508,Coil
MSALKNGALYIRVSTADQTELSPDAQQRLLLDYAKKNDIVIAKEFIFEESVSGRHADRRPKFQEMIALAKQDSHPIDVILVWKYSRFARNQEESIVYKSLLKKNNIDVISISEPLIDGPFGTLIERIIEWMDEYYSIRLSGEVLRGMKEKALQHGYQTTPCLGYQAAGGGKPFVIDEAEYQIVKYIMDQYDLEHLDPTAIARKCNDLGYRTRRGNLMERRSIERVLRNPFYAGTVVWNGISFDGTHETRLDPARYQDRIKRMDARRRSPKSRNPSTCRHWLSGLLKCPICGATMTVTAGSTSCPYFQCWKYAKGFHKGSNSITVAKAERTVYRYFDDILAGADFSFSVRDRKQEQKDDETIQRLQQALDHLAVREARVKMAYENGIDTLEEYGANKKRLAEERQSLQEELDRVLTPAALPETISKEDFRKEIKNINDILKNPEEPAEKKGLLLRSIVDRIVYEKASGTMYFDFFVS

SEQ ID NO: 7330 - protein, 476 aa, Unknown
  Description of Unknown: Integrase B7331 sequence
  PTHR30461:SF3,IPR036162,PS51737,IPR011109,PTHR30461, PS00397,PF00239,G3DSA:1.10.10.2600,IPR006119,SSF53041, cd00338,SM00857,IPR025827,IPR038109,PS51736, IPR006118,PF13408,G3DSA:3.40.50.1390,PF07508,Coil
MSALKNGALYIRVSTADQTELSPDAQQRLLLDYAKKNGIVIAKEFIFEESVSGRHADRRPKFQEMIALAKQDSHPIDVILVWKYSRFARNQEESIVYKSLLKKNNIDVISISEPLIDGPFGTLIERIIEWMDEYYSIRLSGEVMRGMKEKALKHGYQATPSLGYRAVGGGKPFVIDEAEYQIVKYIMDQYDLENHDPTAIARSCNELGYHTKRGNLMERRSVERILRNPFYAGTVIWNGISFEGAHEARLDRERFNNRIKRMDARRRTPKSRNPSACKHWLSGLLKCPVCGATLTVTAGNTSCPYFQCWKYAKGLHKVSNSITVAKAERTVFRYFDEILAGADFSYTVRNKTLDVEKDDTVARLQQALDHLSMRESRIKLAFENGIDTLEEYGANKKRLAEERQSLQEELDRVLTPAAPPETISKEDFRKEIKNINDILKNPEEPAEKKGLLLRSIVDRIVYEKASGTMYFDFFVS

SEQ ID NO: 7331 - protein, 476 aa, Unknown
  Description of Unknown: Integrase B7332 sequence
  PTHR30461:SF3,IPR036162,PS51737,IPR011109,PTHR30461, PS00397,PF00239,G3DSA:1.10.10.2600,IPR006119,SSF53041, cd00338,SM00857,IPR025827,IPR038109,PS51736, IPR006118,PF13408,G3DSA:3.40.50.1390,PF07508,Coil
MSALKNGALYIRVSTADQTELSPDAQQRLLLDYAKKNGIVIAKEFIFEESVSGRHADRRPKFQEMIALAKQDSHPIDVILVWKYSRFARNQEESIVYKSLLKKNNIDVISISEPLIDGPFGTLIERIIEWMDEYYSIRLSGEVIRGMKEKALKHGYQTSPCLGYDAAGSGKPFVINEAEYSIVKFIMDQYDLENHDPTAIARSCNELGYHTKRGNLMERRSVERILRNPFYAGTVIWNGISFEGAHETRLDRERFNNRIKRMDARRRSPKSRNPSTCRHWLSGLLKCPICGATMTVTAGNTSCPYFQCWKYAKGFHKGSNSITVAKAERTVYRYFDDILAGADFSFTVRDRKQEQEDDETIQRLQQALEHLAARKARVKMAYENGIDTLEEYGANKKRLAEERQSLQEELDRVLTPAAPPETISKEDFRKEIKNINDILKNPEEPAEKKGLLLRSIVDRIVYEKASGTMYFDFFVS

SEQ ID NO: 7332 - protein, 476 aa, Unknown
  Description of Unknown: Integrase B7333 sequence
  cd00338,SM00857,IPR006118,G3DSA:1.10.10.2600,IPR036162, PF13408,IPR025827,PS51737,G3DSA:3.40.50.1390,IPR006119, IPR038109,PF07508,IPR011109,SSF53041,PTHR30461, PS00397,Coil,PF00239
MRIGAAYIRVSTDDQLDISPESQLDEIQRYAKSHDILIPEEYIFMERTGRSGKRADNRPEFQRMIATAKEKPQPFEVILVWKFSRFARNQDESTFYKGMLRKKLKIDIESVSEPIMEGMYGRLIEMIIEWQDEFYSYNLGVEVKRGMAKKAELKGYQLVPPLGYAAVGNGKPYVIREDEYKIVEMIFHMYAVDRLDMTAIARQLNASGYLTRRGNPFEKRSIDRIIQNRFYVGTVEWNGFSFEGTHKTRASVTELFEQCQERRKAEFRPMRHRNVSTCKHWLSGLMRCSVCGATLSYTGSGAVPYFTCWKYSKGLHPESCSISVKKMERIVLRSLDGILESGHFEYTPAASASGSPADPSNEIQSIHTQLDRLRHQEERARIAYENEVYTLDEYKESKARLRSEIQRLSDELQRLLEQPAESAPPQKELLDRVRNVRDLLASPSVSFETKGNALRSILKCIVFDRKTEHFDFQYYA

SEQ ID NO: 7333 - protein, 476 aa, Unknown
  Description of Unknown: Integrase B7334 sequence
  cd00338,SM00857,IPR006118,G3DSA:1.10.10.2600,IPR036162, PF13408,IPR025827,G3DSA:3.40.50.1390,IPR006119,IPR038109, PF07508,IPR011109,SSF53041,PTHR30461,PS00397, PS51736,Coil,PF00239
MAKLRNGALYIRVSTADQTELSPDAQQRLLLDYAKKNGIIISKDFIFEESVSGRHADKRPKFQEMIGIAKQDSHPIDVILVWKYSRFARNQEESIVYKSLLKKSDVDVISISEPLIDGPFGTLIERIIEWMDEYYSIRLSGEVIRGMKEKALKHGYQSTPCLGYDAVGGGRPFVINENEYRIVQYIMDQYDLYDQDETAIARKCNDLGFRSKRGNLFEQRNVDLILKNPFYTGTVVWNGISFEGSHETRLSKERFEKRIALMRARRRPAKARNISTCKHWLSGLLRCSVCGATLSLAGSGSYRYFQCWKYSKGFHKGSQSLSAAKAEAAVCDYFDRILAGADFTYTVRNISDQKESDELDLLRQELDQIAVKEARVKLAYENGIDTLEEYKENRRRLKESREELLEKIDVATAATQSEDSDIVARETLLKEIQSVSEILKDPAESYERKGLLLRSIVDGITYDKEKNRLYFNFFIS

SEQ ID NO: 7334 - protein, 476 aa, Unknown
  Description of Unknown: Integrase B7335 sequence
  PTHR30461:SF3,IPR036162,PS51737,IPR011109,PTHR30461, PS00397,PF00239,G3DSA:1.10.10.2600,IPR006119,SSF53041, cd00338,SM00857,IPR025827,IPR038109,PS51736, IPR006118,PF13408,G3DSA:3.40.50.1390,PF07508,Coil
MSALKNGALYIRVSTADQTELSPDAQQRLLLDYAKKNGIVIAKEFIFEESVSGRYAGRRPKFQEMIALAKQDSHPIDVILVWKYSRFARNQEESIVYKSLLKKNNIDVISISEPLIDGPFGTLIERIIEWMDEYYSIRLSGEVMRGMKEKALQHGYQTTPCLGYQAAGGGKPFVIDEAEYQIVKYIMDQYDLEHLDPTAIARKCNDLGYRTRRGNRMERRSIERVLRNPFYAGTVIWNGISFDGTHETRLDPARYQERIKRMDARRRSPKSRNPSTCRHWLSGLLKCPICGATMTVTAGSTSCPYFQCWKYAKGFHKGSNSITVAKAERTVYRYFDDILAGADFSFSVRDRKQEQKDDETIQRLQQALDHLAVREARVKMAYENGIDTLEEYGANKKRLAEERQSLQEELDRVLTPAALPETISKEDFRKEIKNINDILKNPEEPAEKKGLLLRSIVDRIVYEKASGTMYFDFFVS

SEQ ID NO: 7335 - protein, 476 aa, Unknown
  Description of Unknown: Integrase B7336 sequence
  SM00857,IPR006118,G3DSA:1.10.10.2600,IPR036162,PF13408, IPR025827,PS51737,G3DSA:3.40.50.1390,IPR006119,IPR038109, PF07508,IPR011109,SSF53041,PF00239,PTHR30461, PS00397,Coil,cd00338
MRIGAAYIRVSTDDQLDISPESQLDEIQRYAKSHDILIPEEYIFMERTGRSGKRADNRPEFQRMIATAKEKPQPFEVILVWKFSRFARNQDESTFYKGMLRKKLKIDIESVSEPIMEGMYGRLIEMIIEWQDEFYSYNLGVEVKRGMAKKAELKGYQLVPPLGYAAVGNGKPYVIREDEYKIVEMIFHMYAVDRLDMTAIARQLNASGYLTRRGNPFEKRSIDRIIQNRFYVGTVEWNGFSFEGTHKTRASVTELFEQCQERRKAEFRPMRHRNVSTCKHWLSGLMRCSVCGATLSYTGSGAVPYFTCWKYSKGLHPESCSISVKKMERIVLRSLDGILESGHFEYTPAASASGSPADPSNEIQSIHTQLDRLRHQEERARIAYENEVYTLDEYKESKARLRSEIQRLSDELQHLLEQPAEPAPPQKELLDRVRNVRDLLASPSVGFETKGNALRSILKCIVFDRKTEHFDFQYYA

SEQ ID NO: 7336 - protein, 476 aa, Unknown
  Description of Unknown: Integrase B7337 sequence
  PTHR30461:SF3,SM00857,IPR006118,G3DSA:1.10.10.2600,IPR036162, PS51737,PS00397,G3DSA:3.40.50.1390,IPR006119,IPR038109, PF07508,IPR011109,SSF53041,PTHR30461,Coil, PS51736,cd00338,PF00239
MKIAAAYVRVSTDDQLEYSPDSQLQAIRDYAKSHDLILAEEYIFREEDGRSGRQAEKRPEFMRMISTAKQQPPPFEVILCWKYSRFARNQEESIVYKSMLKKDGIEVVSISEPLIDGPFGSLIERIIEWMDEYYSIRLSGEVKRGMTEKVSRGEPVTIPPLGYLMENKQLVPDPEMAPVISMLFDEFAAGTPMLQLARRLNEMGIRTRRGCKIEYRTLNYIMQNPVYIGKIRWTPTGRANRYYKTDDTLIVDGNHQPIITTEQWEKAQAKIAENKQKFPRYQRDTASKFMLRGLVHCSNCGATLVTSTPGSLQCNHYAKGLCSISHSITITKLDKAVMQGLEHDALDMGGNLKIEYRTQSAPVATATIKAQIKKEQNKLLRCKEAYQGGVDTLAEYRSNKEAILSAIADLEKQLNTAPTAIPAPDPQALRDKIIAAIPTLKNPDVTPTVKNNLLRCFISKIVYTKSNEEIEMYYYM

SEQ ID NO: 7337 - protein, 476 aa, Unknown
  Description of Unknown: Integrase B7338 sequence
  PTHR30461:SF3,IPR036162,PS51737,IPR011109,PTHR30461, PS00397,PF00239,G3DSA:1.10.10.2600,IPR006119,SSF53041, cd00338,SM00857,IPR025827,IPR038109,PS51736, IPR006118,PF13408,G3DSA:3.40.50.1390,PF07508,Coil
MSALKNGALYIRVSTADQTELSPDAQQRLLLDYAKKNGIVIAKEFIFEESVSGRHADRRPKFQEMIALAKQDSHPIDVILVWKYSRFARNQEESIVYKSLLKKSNVDVISISEPLIDGPFGTLIERIIEWMDEYYSIRLSGEVLRGMKEKALQHGYQATPCLGYRAVSGGKPFVIDETEYQIVKYIMDQYDFEHLDPTAIARRCNDLGYRTRRGNLMERRSIERVLRNPFYAGTVVWNGISFDGTHETRLDPARYQERIKRMDARRRSPKSRNPSTCRHWLSGLLKCPICGATMTVTAGNTSCPYFQCWKYAKGFHKGSNSITVAKAERTVYRYFDDILAGADFSFTVRDRKQEQEDDETIQRLQQALEHLAAREARVKMAYENGIDTLEEYGANKKRLAEERQSLQEELDRVLTPAAPPETISKEDFRKEIKNINDILKNPEEPAEKKGLLLRSIVDRIVYEKASGTMYFDFFVS

SEQ ID NO: 7338 - protein, 476 aa, Unknown
  Description of Unknown: Integrase B7339 sequence
  PTHR30461:SF3,cd00338,SM00857,IPR006118,G3DSA:1.10.10.2600, IPR036162,PS51737,G3DSA:3.40.50.1390,IPR006119,IPR038109, PF07508,IPR011109,SSF53041,PTHR30461,PS00397, PS51736,Coil,PF00239
MKIAAAYLRVSTEEQDEYSLDSQLKLIREYANKNDYIVPDELVFVDDGISGRTVRKRTAFQTMIARAKEKDRQFEAILLWKFSRFARNQEESIVYKTALRKLGVSVVSISEPLPEGPFASLIERIIEWMDEFYSIRLSGEVKRGMLEKASRGEPVSIAPFGYCLEDGKLLPSADSAVVQGVFADYATGTPMRVIAGQLADRGIRTRRGNAPDNRFVEYMLNNPAYIGKIRWSKDGRAASLRDYDNENILIYDGNHEPIIDLELWNTVQKRLEETKKKYRRYARKNEQVSYMLKGLVRCSSCGSTLVMQSTACPSLQCHSYARGVCKTSHSISVAKANNAVIAALENAVETQSFNIEAPARMTAARGTDYDKLIRAEQRKLERVKEAYENGIDTLAEYAEKKRKVLAAIARLESEAAGEQPAPVFDVAAYAKRVANVLVQVRDPSLSEQSKNDILRSILSKIVYDKAFQRLVLYFYA

SEQ ID NO: 7339 - protein, 475 aa, Unknown
  Description of Unknown: Integrase B7340 sequence
  PTHR30461:SF3,SM00857,IPR006118,G3DSA:1.10.10.2600,IPR036162, PS51737,G3DSA:3.40.50.1390,Coil,IPR006119,IPR038109, PF07508,SSF53041,IPR011109,PTHR30461,PS00397, PS51736,cd00338,PF00239
MTTAAAYIRVSSERQDEYSPDSQKKLIREYAKKNNIEVPEELIFFDDGISAKTATKRTQFNRMIALAKEKEPPFNAILVWKFSRFARNQEESIVYKNILRKKGIQVISISEPIIDSPFGDLIERIIEWMDEYYLINLSTEVKRGMTEKLSRGEALCPPAYGYDIQDGKYIINSDEAPHIIEIFNDFLSGLPMRQIALKCAAKGLRTHRGNPFEARTIRYILYNPVYVGKIRWSTDGRASSLRDFSNPSTVIVDGIHEPIISQEVWDATQAKLTKIQTMYGKNQRPDQQVEWMLKGLMRCECGATLTMLGTSCPSMQCYAYTKGTGKCVTSHCLSISKANKLVIANLERLVNNKQFNFVPAENITQTVDYDTLIKKEYARLARAKEAFLAEIDTVDEYRENKARITKAIKQLERERNSHKAEEIDVDEFSERIRQVLRTVTDASVSEKAKNETLRTVIAKIVYEKSKKRLVFFFHT

SEQ ID NO: 7340 - protein, 475 aa, Unknown
  Description of Unknown: Integrase B7341 sequence
  PTHR30461:SF3,IPR036162,PS51737,IPR011109,PTHR30461, PS00397,PF00239,G3DSA:1.10.10.2600,IPR006119,SSF53041, SM00857,IPR025827,IPR038109,PS51736,cd03768, IPR006118,PF13408,G3DSA:3.40.50.1390,PF07508,Coil
MKTTNKVAIYVRVSTSYQAEEGYSIDEQKDKLEAYCKIKDWKIYDFYIDGGFSGSNTKRPELERLIDDAKRKRFDIVLVYKLDRLSRSQKDTLFLIEDVFLKNDVAFISLQENFDTSTPFGKASIGMLSVFAQLEREQIKERMILGKEGRAKKGKTMAWTTIPFGYDYSKETGILSVNPTQALIVKRIYEEYLNGKSVVKIIRDLNAEGHVGRKRPWGETITKYLLKNETYLGIVKYRGQKYEGQHEPIISQELFDLVQLELKKRQIDALKRNNNPRPFQAKYMLSGLLKCGYCGGSLGLYVTSKNRKGKAYQRYQCRHRFDKDKSKRCNSKWYDKQELEEKVIERLSKIKLEPKYRKETLAKNDETMKVEEIKEQLKKLNNRLEKLTELYLDEIITRKELNAKNEKLKTEKAFLEEQLKSKKKNTINLRQRKLARLLKDFNPEKLSYEDASKIVKSVINEIVVTKEEMTITLDF

SEQ ID NO: 7341 - protein, 475 aa, Unknown
  Description of Unknown: Integrase B7342 sequence
  IPR036162,PS51737,IPR011109,PTHR30461,PS00397, PF00239,G3DSA:1.10.10.2600,IPR006119,SSF53041,cd00338, SM00857,IPR025827,IPR038109,PS51736,IPR006118, PF13408,G3DSA:3.40.50.1390,PF07508,Coil
MTEQKSDDLRMGALYIRVSTHEQDELSPDAQKRLLLDYAKSNGIVVQKDAVFVESVSGRNVKKRKEFQRMIAQAKSPEHPYDVILVWKFSRFARNQEESIVYKSMLKKDRVDVISVSEPVIDGPFGSLIERIIEWMDEYYSIRLSGEVLRGMGEKALKQGYQISPPLGYDAVGDGKPYKINEKEFKIVSYIMSQYDDYCQDTTAIARKCNDLGYRTKRGNLFERRNIDYILRNPFYAGIVNWNGQTFEGTHEARYTTEQLDKRIKLMDARRRPAKHRNASTCKHWLSGLIKCSICGATLSYTGSGACPYFQCWKYAKGYHKTSVAISVKKMEQLVIDYLKQLLDGADFQYVPKTTAPAQNEELEQLKQELARLSTRELRIKLAYENEIDTLEEYKENKIRLQKQRESLLENIKELEAQKPEDPSRDNVLSQIRSVYDVLLDPAAESSTKGNFIRTIVDQIVFDKEAEMVYFDIII

SEQ ID NO: 7342 - protein, 475 aa, Unknown
  Description of Unknown: Integrase B7343 sequence
  PTHR30461:SF3,SM00857,G3DSA:1.10.10.2600,IPR036162,PF13408, IPR025827,G3DSA:3.40.50.1390,PS51737,IPR006119,IPR038109, PF07508,SSF53041,IPR011109,PTHR30461,Coil, PS51736,cd00338,PF00239
MNAVIYARYSSSNQREESIEGQIRECTKYAEQQGYTIINHYIDRAITGKTDNRPAFQQMIKESNSRTFNIVLCYKVDRFARNRYASAIYKSKLKKNGITVEYAKEHIPDTPEGIILESMLEGFAEYYSANLGVNTKRGKYENALKKKSNGGVTPIGYKKIDGSLVIDETKAPVVQFAFQSYIDGISYANIIKKARERYGIKLSMSGLKLILQNEVYTGKYIYNTYDGETFVYKDNHEPIVSQETFEKANEKRLKNKRSPNAGKGKRKYALSGLIKCGECGGHIIVSHSYKNGEPAFFRLYCLNRKEHKNCNNPTRKMEIVENAVIEAIKNKILDRKTIKILAEKACSLQEDNSLDKLKELQTELKNVQKSKNNIIAAIEQGIITPTTKDRLQELEHLESDLQIKIATEKKAENGNLTAPQIEKFLKKYCSGNMQDETFRFELTHTFVKEILLFKDRFEITLKLSDMEIKETVEFE

SEQ ID NO: 7343 - protein, 475 aa, Unknown
  Description of Unknown: Integrase B7344 sequence
  IPR036162,PS51737,IPR011109,PTHR30461,PS00397, PF00239,G3DSA:1.10.10.2600,IPR006119,SSF53041,cd00338, SM00857,IPR025827,IPR038109,PS51736,IPR006118, PF13408,G3DSA:3.40.50.1390,PF07508,Coil
MEELKYAYGYIRVSTGKQDELSPESQERLLKDYAKQNNIIILDTFFEHGISGRRADKRPEFQKMIGMAKSKEHPVDLILVWKFSRFARNQEESIVYKSLLRKQHNVDVVSISEPIIDGPFGSLIERIIEWMDEYYSIRLSGEVLRGMTEKALKEGYQTAPPLGYQAAGHGAPFTIDEEKYKIVDYIFEQFDQYNIDCTKIARNLNEMGYLTQRGNPFESRSVKRILENPFYYGLVKWNDISFIGPHEARLPKEQFEKRMEKIRKNFKPARRRDVSSCKHWLSGLIKCGYCGATLAWNGGNPHSPGFQCYKYSKGLHKESCSLSASKATAAVYEYFEKILDGMEFEYRYHAPDSPQQTDKRAHLEEELKKLSTREERIKLAYENEVDTLEEYKENKKRLKAVRVDLEQQLMSLDTNTTSVAIPSKEDVLNKVRTVYDVIRDDTVDYETKGFFMRSLVEDIVYDKKNGKMIFTLYIS

SEQ ID NO: 7344 - protein, 475 aa, Unknown
  Description of Unknown: Integrase B7345 sequence
  PTHR30461:SF3,SM00857,IPR006118,G3DSA:1.10.10.2600,IPR036162, PS51737,G3DSA:3.40.50.1390,Coil,IPR006119,IPR038109, PF07508,IPR011109,SSF53041,PTHR30461,PS00397, PS51736,cd00338,PF00239
MTTAAAYIRVSSERQDEYSPDSQKKLIREYAKKNNIEVPEELIFFDDGISAKTATKRTQFNRMIALAKEKEPPFDAILVWKFSRFARNQEESIVYKNILRKKGIQVISISEPIIDSPFGDLIERIIEWMDEYYLINLSTEVKRGMTEKLSRGEALCPPAYGYDIQDGKYIINSDEAPHIIEIFNDFLSGLPMRQIALKCAAKGLRTHRGNPFEARTIRYILYNPVYVGKIRWSTDGRASSLRDFSNPSTVIVDGIHEPIISQEVWDATQAKLTKIQTMYGKNQRPDQQVEWMLKGLMRCECGATLTMLGTSCPSMQCHAYTKGTGKCVTSHCLSISKANKLVIANLEKLVNNKQFNFVPAENITQTVDYDALIKKEYARLARAKEAFLAEIDTVDEYRENKARITKAIKQLERERNSHKTEEIDVDEFSEKIRQVLRTITDASVSEKAKNETLRTVIAKIVYEKSKKRLVFFFHT

SEQ ID NO: 7345 - protein, 475 aa, Unknown
  Description of Unknown: Integrase B7346 sequence
  IPR036162,PS51737,IPR011109,PTHR30461,PS00397, PF00239,G3DSA:1.10.10.2600,IPR006119,SSF53041,cd00338, SM00857,IPR025827,IPR038109,PS51736,IPR006118, PF13408,G3DSA:3.40.50.1390,PF07508,Coil
MKVGAAYIRVSSDDQTEYSPDSQVKEIKNYAARHDIFLPPENIFIDAGISGRKANKRPEFQRMVSAAKNKPKPFDVILVWKFSRFARNQEESILYKSLLKRECGIEVTSITEETGDNMFGSLIERIIEWMDEFYSIRLGEEVRAKMTFVAEQGKMQTTASFGYSKKPDEELKILPDEANWVRFMAEQFLNKKSLRSIANHLNANGIRTHRGNKFEARTVEYILKNMTNAGAVHWTPNQAAHDSRHPYSDNTIIVKDVLPAIYSFEQYEEIMKEFDRRTKSRTKYAKSDTVKKHWLSGYLKCSNCGATLIYSKAHNGFQCYKYGKSLCSVSHYVSASKIEVAVIEALSEVTVTDTFIKAITKPTAKDSIDYTKDIERLENMLVRAKKAYVEGIDSIEEYAVNKERISKEISQLKQKESERIVEYPPKTDVVNKFKTIIDLIKSDADNDAKRAAFGEIVEKVIYSKPEESVKIFFYL

SEQ ID NO: 7346 - protein, 475 aa, Unknown
  Description of Unknown: Integrase B7347 sequence
  PTHR30461:SF3,SM00857,G3DSA:1.10.10.2600,IPR036162,PF13408, IPR025827,PS51737,G3DSA:3.40.50.1390,IPR006119,IPR038109, PF07508,IPR011109,SSF53041,PF00239,PTHR30461, Coil,cd00338
MQEELSPDAQLRLIREYCDRHNYILPEEYIFMDIGISGKKAEKRNDFMRMISLAKQKQGSPFEAILVWKFNRFARNQEESIVYKSMLRNKCNVDVISITQTITEDIYGGLIERIIEWTDEFYSIQLAEDVTRGMTENALRGNFQASPALGYRVIQKGVPPIVDEDQAAIVRTIFKLYTSSTMGFYEIARHLNSLGYKTRNKREFEARGIKYILQNPIYKGYLRWNYSDSSNKEIKPESEWIIRKGNIKPIVSEEIWTLANDRIKTEYRPRGGKPITQKRHWLSGLIKCSSCGASLSTSVHRDKRYGRIYTNFQCYRYVKGKCLVSHGISEKKLVPLVLSALEEDMNKSSIECEYIPPESVTNDLDILKSQLKKLDAKEDRIKEAYQSGIDTLEEYKENKLKLKKDREKLSVEIQKQEEQKPEVIDMPDRIRGVYNILTSDQCNKDEKYAAIRSIVKKIVFDRENKLIDIYYYTSV

SEQ ID NO: 7347 - protein, 475 aa, Unknown
  Description of Unknown: Integrase B7348 sequence
  IPR036162,PS51737,IPR011109,PTHR30461,PS00397, PF00239,G3DSA:1.10.10.2600,IPR006119,SSF53041,cd00338, SM00857,IPR025827,IPR038109,PS51736,IPR006118, PF13408,G3DSA:3.40.50.1390,PF07508,Coil
MTEQKSDDLRMGALYIRVSTHEQDELSPDAQKRLLLDYAKSNGIVVQKDAVFVESVSGRNVKKRKEFQRMIAQAKSPEHPYDVILVWKFSRFARNQEESIVYKSMLKKDRVDVISVSEPVIDGPFGSLIERIIEWMDEYYSIRLSGEVLRGMGEKALKQGYQISPPLGYDAVGDGKPYKINEKEFKIVSYIMSQYDDYCQDTTAIARKCNDLGYRTKRGNLFERRNIDYILRNPFYAGIVNWNGQTFEGTHEARYTTEQLDKRIKLMDARRRPAKHRNASTCKHWLSGLIKCSICGATLSYTGSGACPYFQCWKYAKGYHKTSVAISVKKMEQLVIDYLKQLLDGADFQYVPKTTAPVKNEELEQLKQELARLSTRELRIKLAYENEIDTLEEYKENKIRLQKQRESLLENIKELEAQKPEDPSRDNVLSQIRSVYDVLLDPAAESSTKGNFIRTIVDQIVFDKEAEMVYFDIII

SEQ ID NO: 7348 - protein, 475 aa, Unknown
  Description of Unknown: Integrase B7349 sequence
  IPR036162,PS51737,IPR011109,PTHR30461,PS00397, PF00239,G3DSA:1.10.10.2600,IPR006119,SSF53041,cd00338, SM00857,IPR025827,IPR038109,PS51736,IPR006118, PF13408,G3DSA:3.40.50.1390,PF07508,Coil
MEELKYAYGYIRVSTGKQDELSPESQERLLKDYAKQNNIIILDTFFEHGISGRRADKRPEFQKMIGMAKSKERPVDLILVWKFSRFARNQEESIVYKSLLRKQHNVDVVSISEPIIDGPFGSLIERIIEWMDEYYSIRLSGEVLRGMTEKALKEGYQTAPPLGYQAAGHGAPFTIDEEKYKIVDYIFEQFDQYNIDCTKIARNLNEMGYLTQRGNPFESRSVKRILENPFYYGLVKWNDISFIGPHEARLPKEQFEKRMEKIRKNFKPARRRDVSSCKHWLSGLIKCGYCGATLAWNGGNPHSPGFQCYKYSKGLHKESCSLSASKATAAVYEYFEKILDGMEFEYRYHAPDSPQQTDKRAHLEEELKKLSTREERIKLAYENEVDTLEEYKENKKRLKAVRVDLEQQLMSLDTNTTSVAIPSKEDVLNKVRTVYDVIRDDTVDYETKGFFMRSLVEDIVYDKKNGKMIFTLYIS

SEQ ID NO: 7349 - protein, 475 aa, Unknown
  Description of Unknown: Integrase B7350 sequence
  PTHR30461:SF3,IPR036162,PS51737,IPR011109,PTHR30461, PS00397,PF00239,G3DSA:1.10.10.2600,IPR006119,SSF53041, cd00338,SM00857,IPR025827,IPR038109,PS51736, IPR006118,PF13408,G3DSA:3.40.50.1390,PF07508,Coil
MKLAAAYIRVSTDDQIEYSPESQLKSIREYAKHHDFIVPDDYVFIDEGISGKNTKKRPEFNRMIGIAKSKPKPFDAILLWKFSRFARNREDSIVYKSMLRKQLGIEVISISEALGDDKMSVLIEALIEAMDEYYSINLAEEVKRGMTEKASRGEPLSIAPFGYRMEQKQLVVHPQESQIVQMIFQEFLNGHGMRELATTINAMGIRTHRGNLFENRTIEYILNNPVYIGKIRWNPTGKTRRDYHNENVMIVDGTHTPIISTELWENVQKYLCENKQIYRRRDRATVNNNLFQGILKCGNCGKSLSLSRKGYLQCIGYSHGQCTVSHTLKYDTAHRIILNQIQKDLISGNIHITQKRQNMSDQSMPLIYQIKNEYTKLERVKAAYENGIDTISEYQNNKQRISTTIQALEQKLASLKTQKPKETLVAELRQTYHNAIDIIQDEAVPTSEKNRLLRSFIDKIVYDKKKNQLQIFYFA

SEQ ID NO: 7350 - protein, 475 aa, Unknown
  Description of Unknown: Integrase B7351 sequence
  IPR036162,PS51737,IPR011109,PTHR30461,PS00397, PF00239,G3DSA:1.10.10.2600,IPR006119,SSF53041,cd00338, SM00857,IPR025827,IPR038109,PS51736,IPR006118, PF13408,G3DSA:3.40.50.1390,PF07508,Coil
MTEQKSDDLCMGALYIRVSTHDQDELSPDAQKRLLLDYAKSNGIVVQKDAVFVESVSGRNVKKRKEFQRMIAQAKSPEHPYDVILVWKFSRFARNQEESIVYKSMLKKDRVDVISVSEPVIDGPFGSLIERIIEWMDEYYSIRLSGEVLRGMGEKALKQGYQISPPLGYDAVGDGKPYKINEKEFKIVSYIMSQYDDYCQDTTAIARKCNDLGYRTKRGNLFERRNIDYILRNPFYAGIVNWNGQTFEGTHEARYTTEQLDKRIKLMDARRRPAKHRNASTCKHWLSGLIKCSICGATLSYTGSGACPYFQCWKYAKGYHKTSVAISVKKMEQLVIDYLKQLLDGADFQYVPKTTAPVQNGELEQLKQELARLSTRELRIKLAYENEIDTLEEYKENKIRLQKQRESLLENIKKLEAQKPEDPSRDNILSQIRSVYDVLLDPAAESSTKGNFIRTIVDQIVFDKEAEMVYFDIII

SEQ ID NO: 7351 - protein, 475 aa, Unknown
  Description of Unknown: Integrase B7352 sequence
  PTHR30461:SF3,SM00857,IPR006118,G3DSA:1.10.10.2600,IPR036162, PS51737,G3DSA:3.40.50.1390,Coil,IPR006119,IPR038109, PF07508,SSF53041,IPR011109,PTHR30461,PS00397, PS51736,cd00338,PF00239
MTTAAAYIRVSSERQDEYSPDSQKKLIREYAKKNNIEVPEELIFFDDGISAKTATKRTQFNRMIALAKEKEPPFNAILVWKFSRFARNQEESIVYKNILRKKGIQVISISEPIIDSPFGDLIERIIEWMDEYYLINLSTEVKRGMTEKLSRGEALCPPAYGYDIQDGKYIINSDEAPHIIEIFNDFLSGLPMRQIALKCAAKGLRTHRGNPFEARTVRYILYNPVYVGKIRWSTDGRASSLRDFSNPSTVIVDGIHEPIISQEVWDAAQAKLTKIQTMYGKNQRPDQQVEWMLKGLMRCECGATLTMLGTSCPSMQCYAYTKGTGKCVTSHCLSISKANKLVIANLERLVNNKQFNFVPAENIAQTVDYDTLIKKEYARLARAKEAFLAEIDTVDEYRENKARITKAIKQLESERNSQKIEEIDVDEFSEKIRQVLRTVTDASVSEKAKNETLRTVIAKIVYEKSKKRLVFFFHT

SEQ ID NO: 7352 - protein, 475 aa, Unknown
  Description of Unknown: Integrase B7353 sequence
  PTHR30461:SF3,SM00857,IPR006118,G3DSA:1.10.10.2600,IPR036162, PS51737,G3DSA:3.40.50.1390,Coil,IPR006119,IPR038109, PF07508,SSF53041,IPR011109,PTHR30461,PS00397, PS51736,cd00338,PF00239
MTTAAAYIRVSSERQDEYSPDSQKKLIREYAKKNNIEVPEELIFFDDGISAKTATKRTQFNRMIALAKEKEPPFNAILVWKFSRFARNQEESIVYKNILRKKGIQVISISEPIIDSPFGDLIERIIEWMDEYYLINLSTEVKRGMTEKLSRGEALCPPAYGYDIQDGKYIINSDEAPHIIEIFNDFLSGLPMRQIALKCAAKGLRTHRGNPFEARTVRYILYNPVYVGKIRWSTDGRASSLRDFSNPSTVIVDGIHEPIISQEVWDATQAKLTKIQTMYGKNQRPDQQVEWMLKGLMRCECGATLTMLGTSCPSMQCYAYTKGTGKCVTSHCLSISKANKLVIANLERLVNNKQFNFVHAENITQTVDYDALIKKEYARLARAKEAFLAEIDTVDEYRENKARITKAIKQLERERNSHKAEEIDVDEFSEKIRQVLRTVTDASVSEKAKNETLRTVIAKIVYEKSKKRLVFFFHT

SEQ ID NO: 7353 - protein, 475 aa, Unknown
  Description of Unknown: Integrase B7354 sequence
  PTHR30461:SF3,IPR036162,PS51737,IPR011109,PTHR30461, PS00397,PF00239,G3DSA:1.10.10.2600,IPR006119,SSF53041, SM00857,IPR025827,IPR038109,PS51736,cd03768, IPR006118,PF13408,G3DSA:3.40.50.1390,PF07508,Coil
MKVALYVRVSTLEQAEEGYSISEQKDKLKKYCEIKDWKITRIYSDPGFSGSNLNRPSMQQLIKDAGTGLYDAVLVYKLDRLSRSQKDTLHLIEDIFQKNNIHFISLSENFDTSTAFGKAMIGILSVFAQLEREQIKERMMMGKAGRAKAGKIMAWSNIPFGYVKDNDTYKIDPLRANIVKKIYSMYLAGDSITRIFNRLNEEGHVGKDIKWSYRTVRQILGNASYTGVVTYHGKSYPGKHQPIIAKDIFDEVQRQLKVRQIEAEKKFYAHPFQSKYMLSGLLKCGYCGATLVINKSHRKNKPPRWRYNCPNTLSRKHVRTYAHKDIDCLFKFIYRDEIEELVISEVKKLALNPQSITEDYEQHDEEQIDVEAIKKELASIKRKQDKLVDLYLIADTLNIDELNNRSTKLKEQQKALETKLRPTQKDDNKIIDFQKNLAKAKDIENLDYDKQKFIINQLVSSIDVTNENVTINWDF

SEQ ID NO: 7354 - protein, 475 aa, Unknown
  Description of Unknown: Integrase B7355 sequence
  cd00338,SM00857,IPR006118,G3DSA:1.10.10.2600,IPR036162, PF13408,IPR025827,G3DSA:3.40.50.1390,PS51737,IPR006119, IPR038109,PF07508,IPR011109,SSF53041,PTHR30461, PS00397,Coil,PF00239
MRIGAAYIRVSTDDQLDISPESQLDEIQRYAKSHDILIPEEYIFMERTGRSGKRADNRPEFQRMIATAKEKPQPFEVILVWKFSRFARNQDESTFYKGMLRKKLKIDIESVSEPIMEGMYGRLIEMIIEWQDEFYSYNLGVEVKRGMAKRAELKGYQLVPPLGYAAVGNGKPYVIREDEYKIVEMIFHMYAVDRLDMTAIARQLNASGYLTRRGNPFEKRSIDRIIQNRFYVGTVEWNGFSFEGTHKTRASVTELFEQCQERRKAEFRPMRHRNVSTCKHWLSGLMRCSVCGATLSYTGSGAVPYFTCWKYSKGLHPESCSISVKKMERIVLRSLDGILESGHFEYTPAASASGSPADPSNEIQSIHTQLDRLRHQEERARIAYENEVYTLDEYKESKARLRSEIQRLSDELQRLEQPAESAPPQKELLDRVRNVRDLLASPSVGFETKGNALRSILKCIVFDRKTEHFDFQYYA

SEQ ID NO: 7355 - protein, 475 aa, Unknown
  Description of Unknown: Integrase B7356 sequence
  IPR036162,PS51737,IPR011109,PTHR30461,PS00397, PF00239,G3DSA:1.10.10.2600,IPR006119,SSF53041,cd00338, SM00857,IPR025827,IPR038109,PS51736,IPR006118, PF13408,G3DSA:3.40.50.1390,PF07508,Coil
MEELKYAYGYIRVSTGKQDELSPESQERLLKDYAKQNNIIILDTFFEHGISGRRADKRPEFQKMIGMAKSKEHPVDLILVWKFSRFARNQEESIVYKSLLRKQHNVDVVSISEPIIDGPFGSLIERIIEWMDEYYSIRLSGEVLRGMTEKALKEGYQTAPPLGYQAAGHGAPFTIDEEKYKIVDYIFEQFDQHNIDCTKIARNLNKMGYLTQRGNPFESRSVKRILENPFYYGLVKWNDISFIGPHEARLPKEQFEKRMEKIRKNFKPARRRDVSSCKHWLSGLIKCGYCGATLAWNGGNPHSPGFQCYKYSKGVHKESCSLSVSKATAAVFEYFEKILAGMEFEYRYHAPETPQKIDRRAQLKEELEKLSTREARIKLAYENEVDTLEEYKENKKRLKAVRIDLEQQLMELDTSSPSATLPSKEDVLNRVRTVYDIIKDDTVDYETKGFFMRSLVEDIVYDKKNGKMIFTLYIS

SEQ ID NO: 7356 - protein, 475 aa, Unknown
  Description of Unknown: Integrase B7357 sequence
  PTHR30461:SF3,SM00857,IPR006118,G3DSA:1.10.10.2600,IPR036162, PS51737,G3DSA:3.40.50.1390,Coil,IPR006119,IPR038109, PF07508,IPR011109,SSF53041,PTHR30461,PS00397, PS51736,cd00338,PF00239
MTIAAAYIRVSSERQDEYSPDSQKKLIREYAKKNNIEVPEKLIFFDDGISAKTATKRTQFNRMIALAKEKEPPFSAILVWKFSRFARNQEESIVYKNILRKKGIQVISISEPIIDSPFGDLIERIIEWMDEYYLINLSTEVKRGMTEKLSRGEALCPPAYGYDIQDGKYIINSDEAPHIIEIFNDFLSGLPMRQIALKSAAKGLRTHRGNPFEARTVRYILYNPVYVGKIRWSTDGRASSLRDFSNPSTVIVDGIHEPIISQEVWDATQAKLTKIQTMYGKNQRPDQQVEWMLKGLMRCECGATLTMLGTSCPSMQCYAYTKGTGKCVTSHCLSISKANKLVISNLERLVNNKQFNFVPAENITQTVDYDALIKKEYARLARAKEAFLAEIDTVDEYRENKARITKTIKQLEREQNSHKVEEIDVDEFSERIRQVLRTITDASVSEKAKNETLRTVIAKIVYEKSKKRLVFFFHT

SEQ ID NO: 7357 - protein, 475 aa, Unknown
  Description of Unknown: Integrase B7358 sequence
  PTHR30461:SF3,SM00857,IPR006118,G3DSA:1.10.10.2600,IPR036162, PS51737,G3DSA:3.40.50.1390,Coil,IPR006119,IPR038109, PF07508,IPR011109,SSF53041,PTHR30461,PS00397, PS51736,cd00338,PF00239
MTTAAAYIRVSSERQDEYSPDSQKKLIREYAKKNNIEVPDELIFFDDGISAKTATKRTQFNRMIALAKEKEPPFNAILVWKFSRFARNQEESIVYKNILRKKGIQVISISEPIIDSPFGDLIERIIEWMDEYYLINLSTEVKRGMTEKLSRGEALCPPAYGYDIQDGKYIINSDEAPHIIEIFNDFLSGLPMRQIALKCAAKGLRTHRGNPFEARTIRYILYNPVYVGKIRWSTDGRASSLRDFSNPSTVIVDGIHEPIISQEVWDATQAKLTKIQTMYGKNQRPDQQVEWMLKGLMRCECGATLTMLGTSCPSMQCYAYTKGTGKCVTSHCLSISKANKLVIANLERLVNNKQFNFVPAENITQTVDYDTLIKKEYARLARAKEAFLAEIDTVDEYRENKARITKAIKQLERERNSHKAEEIDVDEFSERIRQVLRTVTDASVSEKAKNETLRTVIAKIVYEKSKKRLVFFFHT

SEQ ID NO: 7358 - protein, 475 aa, Unknown
  Description of Unknown: Integrase B7359 sequence
  PTHR30461:SF3,SM00857,IPR006118,G3DSA:1.10.10.2600,IPR036162, PS51737,G3DSA:3.40.50.1390,Coil,IPR006119,IPR038109, PF07508,IPR011109,SSF53041,PTHR30461,PS00397, PS51736,cd00338,PF00239
MTIAAAYIRVSSERQDEYSPDSQKKLIREYAKKNNIEVPEDLIFFDDGISAKTATKRTQFNRMIALAKEKEPPFNAILVWKFSRFARNQEESIVYKNILRKKGIQVISISEPIIDSPFGDLIERIIEWMDEYYLINLSTEVKRGMTEKLSRGEALCPPAYGYDIQDGKYIINSDEAPHIIEIFNDFLSGLPMRQIALKCAAKGLRTHRGNPFEARTIRYILYNPVYVGKIRWSTDGRASSLRDFSNPSTVIVDGIHEPIISQEVWDATQAKLTKIQTMYGKNQRPDQQVEWMLKGLMRCECGATLTMLGTSCPSMQCHAYTKGTGKCATSHCLSISKANKLVIANLEKLVNNRQFNFVPAENITQTVDYDALIKKEYARLARAKEAFLAEIDTVDEYRENKARITKSIKQLESERNSQKIEEIDVDEFSEKIRQVLRTITDASVSEKAKNETLRTVIAKIVYEKSKKRLVFFFHT

SEQ ID NO: 7359 - protein, 475 aa, Unknown
  Description of Unknown: Integrase B7360 sequence
  PTHR30461:SF3,SM00857,IPR006118,G3DSA:1.10.10.2600,IPR036162, PS51737,G3DSA:3.40.50.1390,Coil,IPR006119,IPR038109, PF07508,IPR011109,SSF53041,PTHR30461,PS00397, PS51736,cd00338,PF00239
MTTAAAYIRVSSERQDEYSPDSQKKLIREYAKKNNIEVPEELIFFDDGISAKTATKRTQFNRMIALAKEKEPPFSAILVWKFSRFARNQEESIVYKNILRKKGIQVISISEPIIDSPFGDLIERIIEWMDEYYLINLSTEVKRGMTEKLSRGEALCPPAYGYDIQDGKYIINSDEAPHIIEIFNDFLSGLPMRQIALKCAAKGLRTHRGNPFEARTVRYILYNPVYVGKIRWSTDGRASSLRDFSNPSTVIVDGIHEPIISQEVWEATQAKLSKIQTMYGKNQRPDQQVEWMLKGLMRCECGATLTMLGTSCPSMQCYAYTKGTGKCVTSHCLSISKANKLVIANLERLVNNKQFNFVPAENITQTVDYDTLIKKEYARLARAKEAFLAEIDTVDEYRENKARITKTIKQLEREKSSHKVEEIDVDEFSERIRQVLRTITDASVSEKAKNETLRTVIAKIVYEKSKKRLVFFFHT

SEQ ID NO: 7360 - protein, 475 aa, Unknown
  Description of Unknown: Integrase B7361 sequence
  IPR036162,PS51737,IPR011109,PTHR30461,PS00397, PF00239,G3DSA:1.10.10.2600,IPR006119,SSF53041,cd00338, SM00857,IPR025827,IPR038109,PS51736,IPR006118, PF13408,G3DSA:3.40.50.1390,PF07508,Coil
MKTGAAYIRVSSDDQTEYSPDSQVREIKNYAARHDIFLPPENIFIDAGISGRKASKRPEFQKMVSFAKSKPKPFEVILVWKFSRFARNQEESILYKSLLKRECGIEVTSITEETGDSMFGSLIERIIEWMDEFYSIRLGEEVRTKMAFVAEKGKIQTIASFGYGKKPDEDLFIIPDEARWVMFMAEQFLNKKSLRSIANHLNANGIRTHRGNKFEARTVEYILKNMTNAGAVHWTPDQAAHDSRHPYSDNTIIVKDVLPAIYSFEYYEEIMKEFERREEARSKYSKPDTVKKHWLSGFLKCGNCGATLVYSKAHDGFQCYKYGKSLCTISHYVSAPKIEAAVIEALSEVTVTDAFIKAIAKPVKKDFVNHKKEVERLENMLERAKKAYVEGIDSIEEYASNKERIGKEMSRIKKEESEQVIELPTKATVDNKFKAVTELIKSDADNDVKRAAFGEIVEKVIYSKPEESVKIFFYL

SEQ ID NO: 7361 - protein, 475 aa, Unknown
  Description of Unknown: Integrase B7362 sequence
  IPR036162,PS51737,IPR011109,PTHR30461,PS00397, PF00239,G3DSA:1.10.10.2600,IPR006119,SSF53041,cd00338, SM00857,IPR025827,IPR038109,PS51736,IPR006118, PF13408,G3DSA:3.40.50.1390,PF07508,Coil
MTEQKSDDLRMGALYIRVSTHEQDELSPDAQKRLLLDYAKSNGIVVQKDAVFVESVSGRNVKKRKEFQRMIAQAKSPEHPYDVILVWKFSRFARNQEESIVYKSMLKKDRVDVISVSEPVIDGPFGSLIERIIEWMDEYYSIRLSGEVLRGMGEKALKQGYQISPPLGYDAVGDGKPYKINEKEFKIVSYIMSQYDDYCQDTTAIARKCNDLGYRTKRGNLFERRNIDYILRNPFYAGIVNWNGQTFEGTHEARYTTKQLDKRIKLMDARRRPAKHRNASTCKHWLSGLIKCSICGATLSYTGSGACPYFQCWKYAKGYHKTSVAISVKKMEQLVIDYLKQLLDGADFQYVPKTTAPVQNGELEQLKQELARLSTRELRIKLAYENEIDTLEEYKENKIRLQKQRETLLENIKELEAQKPEDPSRDNVLSQIRSVYDVLLDPAAESSTKGNFIRTIVDQIVFDKEAEIVYFDIII

SEQ ID NO: 7362 - protein, 475 aa, Unknown
  Description of Unknown: Integrase B7363 sequence
  PTHR30461:SF3,SM00857,IPR006118,G3DSA:1.10.10.2600,IPR036162, PS51737,G3DSA:3.40.50.1390,Coil,IPR006119,IPR038109, PF07508,SSF53041,IPR011109,PTHR30461,PS00397, PS51736,cd00338,PF00239
MTTAAAYIRVSSERQDEYSPDSQKKLIREYAKKNNIEVPEELIFFDDGISAKTATKRTQFNRMIALAKEKEPPFNAILVWKFSRFARNQEESIVYKNILRKKGIQVISISEPIIDSPFGDLIERIIEWMDEYYLINLSTEVKRGMTEKLSRGEALCPPAYGYDIQGGKYIINSDEAPHIIEIFNDFLSGLPMRQIALKCAAKGLRTHRGNPFEARTIRYILYNPVYVGKIRWSTDGRASSLRDFSNPSTVIVDGIHEPIISQKVWDATQAKLTKIQTMYGKNQRPDQQVEWMLKGLMRCECGATLTMLGTSCPSMQCYAYTKGTGKCVTSHCLSINKANKLVIANLERLVNNKQFNFVPAENITQTVDYDTLIKKEYARLARAKEAFLAEIDTVDEYRENKARITKAIKQLERERNSHKAEEIDVDEFSERIRQVLRTVTDASVSEKAKNETLRTVIAKIVYEKSKKRLVFFFHT

SEQ ID NO: 7363 - protein, 475 aa, Unknown
  Description of Unknown: Integrase B7364 sequence
  SM00857,IPR006118,G3DSA:1.10.10.2600,IPR036162,PF13408, IPR025827,PS51737,G3DSA:3.40.50.1390,IPR006119,IPR038109, PF07508,IPR011109,SSF53041,PF00239,PTHR30461, PS00397,Coil,cd00338
MRIGAAYIRVSTDDQLDISPESQLDEIQRYAKSHDILIPEEYIFMERTGRSGKRADNRPEFQRMIATAKEKPQPFEVILVWKFSRFARNQDESTFYKGMLRKKLKIDIESVSEPIMEGMYGRLIEMIIEWQDEFYSYNLGVEVKRGMAKKAELKGYQLVPPLGYAAVGNGKPYVIREDEYKIVEMIFHMYAVDRLDMTAIARQLNASGYLTRRGNPFEKRSIDRIIQNHFYVGTVEWNGFSFEGTHETKASVTELFEQCQERRKAEFRPMRHRNVSTCKHWLSGLMRCSVCGATLSYTGSGAVPYFTCWKYSKGLHPESCSISVKKMERIVLRSLDGILESGHFEYTPAASASGSPADPSNEIQSIHTQLDRLRHQEERARIAYENEVYTLDEYKESKARLRSEIQRLSDELQRLEQPAESAPPQKELLDRVRNVRDLLASPSVGFETKGNALRSILKCIVFDRKTEHFDFQYYA

SEQ ID NO: 7364 - protein, 475 aa, Unknown
  Description of Unknown: Integrase B7365 sequence
  PTHR30461:SF3,SM00857,IPR006118,G3DSA:1.10.10.2600,IPR036162, PS51737,G3DSA:3.40.50.1390,PS00397,IPR006119,IPR038109, PF07508,SSF53041,IPR011109,PTHR30461,Coil, PS51736,cd00338,PF00239
MTTAAAYIRVSSERQDEYSPDSQKKLIREYAKKNNIEVPEELIFFDDGISAKTATKRTQFNRMIALAKEKEPPFNAILVWKFSRFARNQEESIVYKNILRKKGIQVISISEPIIDSPFGDLIERIIEWMDEYYLINLSTEVKRGMTEKLSRGEALCPPAYGYDIQDGKYIINSDEAPHIIEIFNDFLSGLPMRQIALKCAAKGLRTHRGNPFEARTIRYILYNPVYVGKIRWSTDGRASSLRDFSNPSTVIVDGIHEPIISQEVWDATQAKLTKIQTMYGKNQRPDQQVEWMLKGLMRCECGATLTMLGTSCPSMQCYAYTKGTGKCVTSHCLSISKANKLVIANLERLVNNKQFNFVPAENITQTVDYDTLIKKEYARLARAKEAFLAEIDTVDEYRENKARITKAIKQLESERNSHKAEEIDVDEFSERIRQVLRTVTDASVSEKAKNETLRTVIAKIVYEKSKKRLVFFFHT

SEQ ID NO: 7365 - protein, 475 aa, Unknown
  Description of Unknown: Integrase B7366 sequence
  PTHR30461:SF3,IPR036162,PS51737,IPR011109,PTHR30461, PS00397,PF00239,G3DSA:1.10.10.2600,IPR006119,SSF53041, SM00857,IPR025827,IPR038109,PS51736,cd03768, IPR006118,PF13408,G3DSA:3.40.50.1390,PF07508,Coil
MKTTNKVAIYVRVSTSYQAEEGYSIDEQKDKLEAYCKIKDWKIYDVYVDGGFSGSNTKRPELERLINDTKRKRFDIVLVYKLDRLSRSQKDTLFLIEDVFLKNDVAFISLQENFDTSTPFGKASIGMLSVFAQLEREQIKERMILGKEGRAKKGKAMSWTTIPFGYDYSKETGILSVNPTQALIVNRIFTEYLNGKSVVKIIRDLNAEGHVGRKRPWGETITKYLLKNETYLGIVKYRGRKYEGQHEPIISQELFDLVQLELKKRQIDALKRNNNPRPFQAKYMLSGLLKCGYCGGSLGLYVTSKNRKGKAYQRYQCRHRFDKDKSKRCNSKWYDKQELEEKVIERLSKIKLEPKYRKEMLAKNDETMKVEEIKEQLKKLNNRLDKLTELYLDEIITRKELNTKNEKLKVEKAFLEEQLESKKKNTINLRQRKLARLLKDFNPEKLSYEDASKIVKSVINEIVVTKEEMTITLDF

SEQ ID NO: 7366 - protein, 475 aa, Unknown
  Description of Unknown: Integrase B7367 sequence
  IPR036162,PS51737,IPR011109,PTHR30461,PS00397, PF00239,G3DSA:1.10.10.2600,IPR006119,SSF53041,cd00338, SM00857,IPR025827,IPR038109,PS51736,IPR006118, PF13408,G3DSA:3.40.50.1390,PF07508,Coil
MTEQKSDDLRMGALYIRVSTHEQDELSPDAQKRLLLDYAKSNGIVIQKDAVFVESVSGRNVKKRKEFQRMIAQAKSPEHPYDVILVWKFSRFARNQEESIVYKSMLKKDRVDVISVSEPVIDGPFGSLIERIIEWMDEYYSIRLSGEVLRGMGEKALKQGYQISPPLGYDAVGDGKPYKINEKEFKIVSYIMSQYDDYCQDTTAIARKCNDLGYRTKRGNLFERRNIDYILRNPFYAGIVNWNGQTFEGTHEARYTTEQLDKRIKLMDARRRPAKHRNASTCKHWLSGLIKCSICGATLSYTGSGACPYFQCWKYAKGYHKTSVAISVKKMEQLVIDYLKQLLDGADFQYVPKTTAPAQNEELEQLKQELARLSTRELRIKLAYENEIDTLEEYKENKIRLQKQRESLLENIKELEAQKPEDPSRDNVLSQIRSVYDVLLDPAAESSTKGNFIRTIVDQIVFDKEAEMVYFDIII

SEQ ID NO: 7367 - protein, 475 aa, Unknown
  Description of Unknown: Integrase B7368 sequence
  SM00857,G3DSA:1.10.10.2600,IPR036162,PS51737,G3DSA:3.40.50.1390, IPR006119,IPR038109,PF07508,IPR011109,SSF53041, PTHR30461,Coil,PS51736,cd00338,PF00239
MNKKIIADIYIRLSSKSQEDGMSRETQENECRKYCEANGITVRNVYYENKSAMTPYDRPVFYKMIANQQSKDRADVIISFCINRLTRNQYDFYPIEVLVDKFDTKIIFVKENMTISKPFKSHEKFLTSILIASAEFEVKHMNEIRKKGLMERAKTGIRPSRVPFGYRMRNKRIVIIPKEAEIVRKAYELYSTNEYSLSALSEKLFELGYEYKLQKSKKIQKATLSRILKNKFYTGYFDFPDIETPIKGKYKPIVSQELFDKVQKVLKTSANEKQQKHCFLYSNLLRLQETGKIMTGEIKKGRYIYYTAFDNNKIRHSVNETIVTDFVLNYLKEIRLNLIPKNIVQEVLKEELKPIKQKYSNLKRNVSRKYHKELQLNDFIEENGIDDEDFITANQEDIENKYSNLTDKISKTKQEIQYLESKCNEISQKRLYDSFINLNMENQREILKLITNKFELQGDKVKITFKPTFRKIRKR

SEQ ID NO: 7368 - protein, 475 aa, Unknown
  Description of Unknown: Integrase B7369 sequence
  IPR036162,PS51737,IPR011109,PTHR30461, PS00397,PF00239,G3DSA:1.10.10.2600,IPR006119, SSF53041,SM00857,IPR025827,IPR038109, PS51736,cd03768,IPR006118,PF13408,G3DSA:3.40.50.1390,PF07508,Coil
MKIAVYVRVSTLEQAESGYSIGEQTEKLKSYCKIKDWQVAKIYTDPGFSGSSLDRPAMQQLISDCKLGVFDAVLVYKLDRLSRSQKDTLYLIEDVFNAYNIHFMSLSENFDTSTPFGKAMIGLLSVFAQLEREQIKERMQMGKLGRVKAGKISAWSNVPFGYTKVKDSYDVDPLRAGIVKRIYADYLAGKSITKIMKELNREGHIGKGVAWSYRTVRQVLGNVTYTGRIIFKGQVYDGLHTGIISKADWDEVQRVLKIRQLDQAKKSNNPRPFQAQYMLSGLLKCHYCGATLAIAKSHTKNGPLWRYVCPTRHAGKYHRNNAARYRIPPVNCELTYKYKDDLEKEVLREVKKVALNPDAVVASQDDGQQTIDKQAIKAQLAKIKRQQAKLVDLYLLSDDLNVDQLHDRAEKLKVQADALQAQLIHDTKKADAFKKTATDAKQIDQLDYDHQTAIVRMLIDHINVSNTDLDIYWQI

SEQ ID NO: 7369 - protein, 475 aa, Unknown
  Description of Unknown: Integrase B7370 sequence
  PTHR30461:SF3,SM00857,IPR006118,G3DSA:1.10.10.2600,IPR036162, PS51737,G3DSA:3.40.50.1390,Coil,IPR006119,IPR038109, PF07508,SSF53041,IPR011109,PTHR30461,PS00397, PS51736,cd00338,PF00239
MTTAAAYIRVSSERQDEYSPDSQKKLIREYAKKNNIEVPEELIFFDDGISAKTATKRTQFNRMIALAKEKEPPFNAILVWKFSRFARNQEESIVYKNILRKKGIQVISISEPIIDSPFGDLIERIIEWMDEYYLINLSTEVKRGMTEKLSRGEALCPPAYGYDIQDGKYIINSDEAPHIIEIFNDFLSGLPMRQIALKCAAKGLRTHRGNPFEARTIRYILYNPVYVGKIRWSTDGRASSLRDFSNPSTVIVDGIHEPIISQEVWDATQAKLTKIQTMYGKNQRPDQQVEWMLKGLMRCECGATLTMLGTSCPSMQCYAYTKGTGKCVTSHCLSISKANKLVIANLERLVNNKQFNFVPAENITQTVDYDTLIKKEYARLARAKEAFLAEIDTVDEYRENKARITKAIKQLERERNSHKAEEIDVDEFSERIRQVLRTVTDASVSEKAKNETLRTVIAKIVYEKSKKRLVFFFHA

SEQ ID NO: 7370 - protein, 475 aa, Unknown
  Description of Unknown: Integrase B7371 sequence
  IPR036162,PS51737,IPR011109,PTHR30461,PS00397, PF00239,G3DSA:1.10.10.2600,IPR006119,SSF53041,cd00338, SM00857,IPR025827,IPR038109,PS51736,IPR006118, PF13408,G3DSA:3.40.50.1390,PF07508,Coil
MTEQKSDDLRMGALYIRVSTHEQDELSPDAQKRLLLDYAKSNGIVVQKDAVFVESVSGRNVKKRKEFQRMIAQAKSPEHPYDVILVWKFSRFARNQEESIVYKSMLKKDRVDVISVSEPVIDGPFGSLIERIIEWMDEYYSIRLSGEVLRGMGEKALKQGYQISPPLGYDAVGDGKPYKINEKEFKIVSYIMSQYDDYCQDTTAIARKCNDLGYRTKRGNLFERRNIDYILRNPFYAGIVNWNGQTFEGTHEARYTTEQLDKRIKLMDARRRPAKHRNASTCKHWLSGLIKCSICGATLSYTGSGACPYFQCWKYAKGFHPESVSITEKKLVKTVLDNFREILDGKDFSFQYIPSASPKSNELSLLQDELSNLKRRETRIRLAFENEIDTLEEYRENKARIQVERERIISEIDKRKTPNSIPTKEEMLLKIQHVYNIISDPDVDYQSKGVFIRSVLEDIVYDKQNDRLLFHFYCS

SEQ ID NO: 7371 - protein, 475 aa, Unknown
  Description of Unknown: Integrase B7372 sequence
  IPR036162,PS51737,IPR011109,PTHR30461,PS00397, PF00239,G3DSA:1.10.10.2600,IPR006119,SSF53041,cd00338, SM00857,IPR025827,IPR038109,PS51736,IPR006118, PF13408,G3DSA:3.40.50.1390,PF07508,Coil
MTEQKSNDLRMGALYIRVSTHEQDELSPDAQKRLLLDYAKSNGIVVQKDAVFVESVSGRNVKKRKEFQRMIAQAKSPEHPYDVILVWKFSRFARNQEESIVYKSMLKKDRVDVISVSEPVIDGPFGSLIERIIEWMDEYYSIRLSGEVLRGMGEKALKQGYQISPPLGYDAVGDGKPYKINEKEFKIVSYIMSQYDDYCQDTTAIARKCNDLGYRTKRGNLFERRNIDYILRNPFYAGIVNWNGQTFEGTHEARYTTEQLDKRIKLMDARRRPAKHRNASTCKHWLSGLIKCSICGATLSYTGSGACPYFQCWKYAKGYHKTSVAISVKKMEQLVIDYLKQLLDGADFQYVPKTTAPVQNEELEQLKQELARLSTRELRIKLAYENEIDTLEEYKENKIRLQKQRESLLENIKELEAQKPEDPSRDNVLSQIRSVYDVLLDPAAESSTKGNFIRTIVDQIVFDKEAEMVYFDIII

SEQ ID NO: 7372 - protein, 474 aa, Unknown
  Description of Unknown: Integrase B7373 sequence
  PTHR30461:SF3,SM00857,G3DSA:1.10.10.2600,IPR036162,PS51737, G3DSA:3.40.50.1390,IPR006119,IPR038109,PF07508,IPR011109, SSF53041,PTHR30461,Coil,PS51736,cd00338, PF00239
MQIAAAYVRVSDERQDEYSPDSQLKLIRAFAEKNGMVLPQEYIFYDDGISAKSAKKRTQFNNMIALAKDKQHPFDVILVWKFSRFARNQEESIVYKSLLKKVNVQVISVSEPISDDPFGSLIERIIEWMDEYYLTRLSGEVKRGMLEKASRGEPVSAPPFGYDLVNKQLVPNKDAETVRRVFAQYAAGVPVVAIARSAGASGVRTRRGNPPDNRWVDYMLNNPVYIGKIRWSKEGKQASRRNYHGDNVLIVDGSHEPIISADLWQAAQDRIKETKIRYGKYQRPDQSVDWMLKGLCRCDTCGATLVRLSTRCPSMQCHNYARAACPVSHSLSLAKANAAVIHDMQMACKTMNFNIAPTDTPSEDGVEHNKIIADIERRLAKCRDAYLAGVDTLEEYAKQKRELTRQLDKAKKDAAAAAAPSPVDPYELRDRVLAALSVVTSDKASEKSKNDALRSVIDRVIYVKSSGELAVYYR

SEQ ID NO: 7373 - protein, 474 aa, Unknown
  Description of Unknown: Integrase B7374 sequence
  PTHR30461:SF3,SM00857,G3DSA:1.10.10.2600,IPR036162,PF13408, IPR025827,PS51737,G3DSA:3.40.50.1390,IPR006119,IPR038109, PF07508,SSF53041,IPR011109,PF00239,PTHR30461, PS51736,Coil,cd00338
MKVGIYSRVSTQEQAREGYSIGEQVERLKNYCAAKGWILYKTYTDAGFSGANTDRPGMQQLISDVADGKIDMVLVYKLDRLSRSQKDTLFLIEDVFIKNNVNFASITENFDTSTPFGRAMIGILSVFAQLEREQFRERSIMGKDARAKEGLHHGGGAPTGYDYIDGQLIINKEEAELIKEAYRLFLEDDMTMMGIAAKLSVFSEKFKYDHRIRKMLTNPLYAGWTHCRDELYKGQHEAIISQEVFDKVQTKLKIRAENNPHYRNAFNRTSLLAGILWCKKCGARYFKRVRRYEKGSKVYYYNKYQCYSRSSYKNMVRDKSCKNKIWTMDVLDKAVIDEIKALVANPAEVDNIIKLNQSNNNITEKKEFYKKRIKEIEKQMNKLTDLYSIDGIDIDFVAKKITALNTDKKRIESEMNAINEHKPLISAEDAKKRLSGISNILDNGEFTEKVKVITSLINRIEVDDDDIYIYWNFV

SEQ ID NO: 7374 - protein, 474 aa, Unknown
  Description of Unknown: Integrase B7375 sequence
  PTHR30461:SF3,SM00857,G3DSA:1.10.10.2600,IPR036162,PF13408, IPR025827,PS51737,G3DSA:3.40.50.1390,IPR006119,IPR038109, PF07508,IPR011109,SSF53041,PF00239,PTHR30461, PS51736,Coil,cd00338
MKVGIYSRVSTQEQAREGYSIGEQVERLKNYCAAKGWILYKTYTDAGFSGANTDRPGMQQLISDVADGKIDMVLVYKLDRLSRSQKDTLFLIEDVFIKNNVNFASITENFDTSTPFGRAMIGILSVFAQLEREQFRERSIMGKDARAKEGLHHGGGAPTGYDYIDGQLIINKEEAELIKEAYRLFLEDDMTMMGIAAKLSVFSEKFKYDHRIRKMLTNPLYAGWTHCRDELYKGQHEAIISQEVFDKVQTKLKIRAENNPHYRNAFNRTSLLAGILWCKKCGARYFKRVRRYEKGSKVYYYNKYQCYSRSSYKNMVRDKSCKNKIWTMDVLDKTVIDEIKALVANPAEVDNIIKLNQSNNNITEKKEFYKKRIKEIEKQMNKLTDLYSIDGIDIDFVAKKITALNTDKKRIESEMNAINEHKPLISAEDAKKRLSGISNILDNGEFTEKVKVITSLINRIEVDDDDIYIYWNFV

SEQ ID NO: 7375 - protein, 474 aa, Unknown
  Description of Unknown: Integrase B7376 sequence
  PTHR30461:SF3,SM00857,IPR006118,G3DSA:1.10.10.2600,IPR036162, PS51737,G3DSA:3.40.50.1390,IPR006119,IPR038109,PF07508, IPR011109,SSF53041,PF00239,PTHR30461,PS00397, PS51736,Coil,cd00338
MKTAAAYIRVSTEDQVEYSPDSQLKAIRDYARKNDMILPEEFIFVDEGISGRKAAKRPEFMKMIGTAKIKPKQFDVILLWKFSRFARNREDSIVYKSMLRKQCGIEVISISEQLGEDKTSILIEALIEAMDEYYSINLAEEVRRGMTEKAQRGEVVSTPPFGYDVKDNVFVPNPETAPIVKMIFNKYLSGRGCLEIAKELNTMGIRTKYGNKWENRGVEYVLRNVVYTGKLTWTPVKSKTRDYKNEATIITQGKHEPIIEQEIFDKVQEMILEKKKLFPKHSRQSSNEFMLKGFLKCSNCGGALVYALNDRVQCNRYSKGTCEVSHSASLSKLNASVINALKSDLETQNFNIYNIKSAEEQKGSDITPILIEKEKKKLERIKEAYAAGIDTLEEYRSNKEKILKAIEELEKNKKSSVINKEDMHKKLSATIRQSLDILEDPNCSESLKNITLRSFVRQIVYAKKTQSIEILYQV

SEQ ID NO: 7376 - protein, 474 aa, Unknown
  Description of Unknown: Integrase B7377 sequence
  PTHR30461:SF3,IPR036162,PS51737,IPR011109,PTHR30461, PS00397,PF00239,G3DSA:1.10.10.2600,IPR006119,SSF53041, cd00338,SM00857,IPR025827,IPR038109,PS51736, IPR006118,PF13408,G3DSA:3.40.50.1390,PF07508,Coil
MQKRMAALYVRVSTEDQAELSPDAQKRLLLEYAKKNDLITCEEFIFCESVSGRHAQKRPEFQKMIAMAKQSSHPFDVILVWKFSRFARNQEESIVYKSMLKKDDVEVISISEPLVDGPFGSLIERIIEWMDEYYSIRLSGEVKRGMKEKALRHGYQSTPPLGYKAVGGGKPFVIDEASYAIVSYAMNLYDCENMDETAIARKCNDLGYRTKRGNLFERRSIDRILRNPFYCGTVTWNGMEFEGSHEVRISKERFQERQKLIQARMRPAKSRSVSTCRHWLSGLLKCSICGATLAYTGGGKDGYHYFNCWQYAKGYHRGTSSIPVKKAEEAVIEYFDKILEGADFSYVRKSNCSVNNEVTVDQIHKELSRIDMKSKRIHDAYESGIDSLQEYKENKERLNDDRSKLEFELHNLLHKKKEKFTDKSEVLKEIKSVNDVLKDPDVGYEEKGMLIRTIVDQIVWDKENNKMYFDIIVH

SEQ ID NO: 7377 - protein, 474 aa, Unknown
  Description of Unknown: Integrase B7378 sequence
  PTHR30461:SF3,cd00338,SM00857,G3DSA:1.10.10.2600,IPR036162, PF13408,PS51737,G3DSA:3.40.50.1390,IPR025827,IPR006119, IPR038109,PF07508,IPR011109,SSF53041,PTHR30461, PS51736,Coil,PF00239
MKIAIYTRVSTMEQAEEGYSISEQQDKLKKYCDIKDWKVARVYTDPGFSGSNTNRPSLQQLISDCKNNMFDAVLVYKLDRLSRSQKDTLYLIEDVFNKNGVGFISLSENFDTSTAFGKAMIGILSVFAQLEREQITERMTLGRVGRAKAGKAMGWSNCPFGYTIYKEVYEIDPFRAEIVKRIFKDYLAGVSIIKLTQNLNKEGHIGKENNWSYRTVRQVLDNIVYAGYIKYKNEIYPGLHKPIISMSDYKKVQAELKKRKITQAKLHNPRPFRTKYMLSGLMRCGYCNSVLQIATSNLKDGTHLHRYNCPSSRPRKRSTNKRHDFDCGFKFIKKNEIESVVISEIKKLPLNMDKVINNQENKDISKEIKAIKAELQQVEKKQDKMVDLYLLDNINVDELNKKNDELSKQKENLQKRLNSLIDNKNKEKIEDFIKNAKEAKNIDKLDYEKQKVIVRKLISGIKVFNDKVEINWNI

SEQ ID NO: 7378 - protein, 474 aa, Unknown
  Description of Unknown: Integrase B7379 sequence
  cd03768,PTHR30461:SF3,SM00857,G3DSA:1.10.10.2600,IPR036162, PF13408,IPR025827,G3DSA:3.40.50.1390,PS51737,IPR006119, IPR038109,PF07508,SSF53041,IPR011109,PTHR30461, PS51736,Coil,PF00239
MKVAIYTRVSTIEQAEEGYSISEQQDKLKKYCDIKDWKVARVYTDPGFSGSNTNRPSLQQLISDCKNSMFDAVLVYKLDRLSRSQKDTLYLIEDVFNKNGVGFISLSENFDTSTAFGKAMIGILSVFAQLEREQITERMTLGRVGRAKAGKAMSWANCPFGYIIQKEIYEIDPFRAEIVKRIYRDYLSGVSITKITQNLNAEGHIGKNVNWSYRTVRQILGNIVYAGYIKYKNEIYPGLHKPIISMSDYKKVQVELEKRRITQAQLFNPRPFRAKYMLSGLMRCGYCNSVLQIYTTQLKSGVQLHNYKCPSSSPKRSSRYKRHDFDCGFTRVRKNDIESVVISEIKKLPLNMDKVINNQENKDNAKEIKAIKVELQQVEKKQDKIVDLYLLDNINVDELNKKNDELSKQKENLQKRLNSLTDDKKKEKIEDFIKNAKEAKDIDKLDYEKQKVIVRNLISGIKVFNDKVEINWNI

SEQ ID NO: 7379 - protein, 474 aa, Unknown
  Description of Unknown: Integrase B7380 sequence
  PTHR30461:SF3,SM00857,G3DSA:1.10.10.2600,IPR036162,PF13408, PS51737,IPR025827,G3DSA:3.40.50.1390,IPR006119,IPR038109, PF07508,IPR011109,SSF53041,PF00239,PTHR30461, PS51736,Coil,cd00338
MKVGIYSRVSTQEQAREGYSIGEQVERLKNYCAAKGWILYKTYTDAGFSGANTDRPGMQQLISDVADGKIDMVLVYKLDRLSRSQKDTLFLIEDVFIKNNVNFASITENFDTSTPFGRAMIGILSVFAQLEREQFRERSIMGKDARAKEGLHHGGGAPTGYDYIDGQLIINKEEAELIKEAYRLFLEDDMTMMGIAAKLSVFSEKFKYDHRIRKMLTNPLYAGWTHCRDELYKGQHEAIISQEVFDNVQTKLKIRAENNPHYRNAFNRTSLLAGILWCKKCGARYFKRVRRYEKGSKVYYYNKYQCYSRSSYKNMVRDKSCKNKIWTMDVLDKAVIDEIKALVANPAEVDNIIKLNQSNNNITEKKEFYKKRIKEIEKQMNKLTDLYSIDGIDIDFVAKKITALNTDKKRIESEMNAINEHKPLISAEDAKKRLSGISNILDNGEFTEKVKVITSLINRIEVDDDDIYIYWNFV

SEQ ID NO: 7380 - protein, 474 aa, Unknown
  Description of Unknown: Integrase B7381 sequence
  PTHR30461:SF3,cd00338,SM00857,IPR006118,G3DSA:1.10.10.2600, IPR036162,PS51737,G3DSA:3.40.50.1390,IPR006119,IPR038109, PF07508,SSF53041,IPR011109,PTHR30461,PS00397, PS51736,Coil,PF00239
MKTAAAYIRVSTEDQVEYSPDSQLKAIRDYARKNDMILPEEFIFVDEGISGRKAAKRPEFMKMIGTAKIKPKQFDVILLWKFSRFARNREDSIVYKSMLRKQCGIEVISISEQLGEDKTSILIEALIEAMDEYYSINLAEEVRRGMTEKAQRGEVVSTPPFGYDVKDNVFVPNPETAPVVKMIFNKYLSGRGCLEIAKELNTMGIRTKYGNKWENRGVEYVLRNVVYTGKLTWTPVKSKTRDYKNEATIITQGKHEPIIEQEIFDKVQKMILEKKKLFPKHSRQSSNEFMLKGFLKCSNCGGALVYALNDRVQCNRYSKGTCEVSHSASLIKLNASVINALKSDLETQNFNIYNIKSAEEQKGSDITPMLIEKEKKKLERIKEAYAAGIDTLEEYRSNKEKILKAIEELEKNKKSSVITKEDMHKKLSATIRQSLDILEDPNCSESLKNITLRSFVRQIVYAKKTQSIEILYQV

SEQ ID NO: 7381 - protein, 474 aa, Unknown
  Description of Unknown: Integrase B7382 sequence
  PTHR30461:SF3,IPR036162,PS51737,IPR011109,PTHR30461, PS00397,PF00239,G3DSA:1.10.10.2600,IPR006119,SSF53041, cd00338,SM00857,IPR025827,IPR038109,PS51736, IPR006118,PF13408,G3DSA:3.40.50.1390,PF07508,Coil
MQKRMAALYVRVSTEDQAELSPDAQKRLLLEYAKKNNLITCEEFIFCESVSGRHAQKRPEFQKMIATAKQSSHPFDVILVWKFSRFARNQEESIVYKSMLKKDDVEVISISEPLVDGPFGSLIERIIEWMDEYYSIRLSGEVKRGMKEKALRHGYQSTPPLGYKAVGGGKPFVIDEASYAIVSYAMNLYDCENMDETAIARKCNDLGYRTKRGNLFERRSIDRILRNPFYCGTVTWNGMEFEGSHEVRISKERFQERQKLIQARMRPAKSRSVSTCRHWLSGLLKCSICGATLAYTGGGKDGYHYFNCWQYAKGYHRGTSSIPVKKAEEAVIEYFDKILEGADFSYVRKSNCSVNNEVTVDQIHKELSRIDMKSKRIHDAYESGIDSLQEYKENKERLNDDRSKLEFELHNLLHKKKEKFTDKSEVLKEIKSVNDVLKDPDVGYEEKGMLIRTIVDQIVWDKENNKMYFDIIVH

SEQ ID NO: 7382 - protein, 474 aa, Unknown
  Description of Unknown: Integrase B7383 sequence
  PTHR30461:SF3,cd00338,SM00857,G3DSA:1.10.10.2600,IPR036162, PF13408,IPR025827,PS51737,G3DSA:3.40.50.1390,IPR006119, IPR038109,PF07508,IPR011109,SSF53041,PTHR30461, PS51736,Coil,PF00239
MKIAIYTRVSTMEQAEEGYSISEQQDKLKKYCDIKDWKVARVYTDPGFSGSNVNRPSLQQLISDCKNHMFDAVLVYKLDRLSRSQKDTLYLIEDVFNKNGIDFISLSENFDTSTAFGKAMIGILSVFAQLEREQITERMTLGRVGRAKAGKAMGWSNCPFGYTIYKEVYEIDPFRAEIVKRIFKDYLAGVSIIKLTQNLNKEGHIGKENNWSYRTVRQVLDNIVYAGYIKYKNEIYPGLHKPIISMSDYKKVQAELKKRKITQAKLHNPRPFRTKYMLSGLMRCGYCNSVLQIATSNLKDGTHLHRYNCPSSRPRKRSTNKRHDFDCGFKFIKKNEIESVVISEIKKLPLNMDKVINNQENKDVSKEIKAIKAELQQVEKKQDKMVDLYLLDNINVDELNKKNDELSKQKENLQKRLNSLINNKNKEKIEDFIKNAKEAKNIDKLDYEKQKVIVRKLISGIKVFNDKVEINWNI

SEQ ID NO: 7383 - protein, 474 aa, Unknown
  Description of Unknown: Integrase B7384 sequence
  PTHR30461:SF3,SM00857,G3DSA:1.10.10.2600,IPR036162,PF13408, IPR025827,PS51737,G3DSA:3.40.50.1390,IPR006119,IPR038109, PF07508,SSF53041,IPR011109,PF00239,PTHR30461, PS51736,Coil,cd00338
MKVGIYSRVSTQEQAREGYSIGEQVERLKNYCAAKGWILYKTYTDAGFSGANTDRPGMQQLISDVADGKIDMVLVYKLDRLSRSQKDTLFLIEDVFIKNNVNFASITENFDTSTPFGRAMIGILSVFAQLEREQFRERSIMGKDARAKEGLHHGGGAPTGYDYIDGQLIINKEEAELIKEAYRLFLEDDMTMMGIAAKLSVFSEKFKYDHRIRKMLSNPLYAGWTHCRDELYKGQHEAIISQEVFDKVQTKLKIRAENNPHYRNAFNRTSLLAGILWCKKCGARYFKRVRRYEKGSKVYYYNKYQCYSRSSYKNMVRDKSCKNKIWTMDVLDKAVIDEIKALVANPAEVDNIIKLNQSNNNITEKKEFYKKRIKEIEKQMNKLTDLYSIDGIDIDFVAKKITALNTDKKRIESEMNAINEHKPLISAEDAKKRLSGISNILDNGEFTEKVKVITSLINRIEVDDDDIYIYWNFV

SEQ ID NO: 7384 - protein, 474 aa, Unknown
  Description of Unknown: Integrase B7385 sequence
  PTHR30461:SF3,SM00857,G3DSA:1.10.10.2600,IPR036162,PF13408, IPR025827,G3DSA:3.40.50.1390,PS51737,IPR006119,IPR038109, PF07508,IPR011109,SSF53041,PTHR30461,Coil, PS51736,cd00338,PF00239
MKVGIYSRVSTQEQAREGYSIGEQVERLKNYCAAKGWILYKTYTDAGFSGANTDRPGMQQLISDVADGKIDMVLVYKLDRLSRSQKDTLYLIEDVFIKNNVNFASITENFDTSTPFGRAMIGILSVFAQLEREQFRERSIMGKDARAKEGLHHGGGAPTGYDYIDGQLIINKEEAELIKEAYRLFLEDDMTMMGIAAKLSVFSEKFKYDHRIRKMLTNPLYAGWTHCRDELYKGQHEAIISQEVFDKVQTKLKIRAENNPHYRNAFNRTSLLAGILWCKKCGARYFKRVRRYEKGSKVYYYNKYQCYSRSSYKNMVRDKSCKNKIWTMDVLDKAVIDEIKALVANPAEVDNIIKLNQSNNNITEKKEFYKKRIKEIEKQMNKLTDLYSIDGIDIDFVAKKITALNTDKKRIETEMNAINEHKPLISAEDAKKRLSGISNILDNGEFTEKVKVITSLINRIEVDDDDIYIYWNFV

SEQ ID NO: 7385 - protein, 474 aa, Unknown
  Description of Unknown: Integrase B7386 sequence
  PTHR30461:SF3,SM00857,G3DSA:1.10.10.2600,IPR036162,PF13408, PS51737,G3DSA:3.40.50.1390,IPR025827,IPR006119,IPR038109, PF07508,SSF53041,IPR011109,PF00239,PTHR30461, PS51736,Coil,cd00338
MKVGIYSRVSTQEQAREGYSIGEQVERLKNYCAAKGWILYKTYTDAGFSGANTDRPGMQQLISDVADGKIDMVLVYKLDRLSRSQKDTLFLIEDVFIKNNVNFASITENFDTSTPFGRAMIGILSVFAQLEREQFRERSIMGKDARAKEGLHHGGGAPTGYDYIDGQLIINKEEAELIKEAYRLFLEDDMTMMGIAAKLSVFSEKFKYDHRIRKMLTNPLYAGWTHCRDELYKGQHEAIISQKVFDKVQTKLKIRAENNPHYRNAFNRTSLLAGILWCKKCGARYFKRVRRCEKGSKVYYYNKYQCYSRSSYKNMVRDKSCKNKIWTMEVLDKAVIGEIKALVANPAEVDNIIKLNQSNNNITEKKEFYKKRIKEIEKQMNKLTDLYSIDGIDIDFVAKKITALNTDKKRIESEMNAINEHKPLISAEDAKKRLSGISNILDNGEFTEKVKVITSLINRIEVDDDDIYIYWNFV

SEQ ID NO: 7386 - protein, 474 aa, Unknown
  Description of Unknown: Integrase B7387 sequence
  PTHR30461:SF3,IPR036162,PS51737,IPR011109,PTHR30461, PS00397,PF00239,G3DSA:1.10.10.2600,IPR006119,SSF53041, cd00338,SM00857,IPR025827,IPR038109,PS51736, IPR006118,PF13408,G3DSA:3.40.50.1390,PF07508,Coil
MQTAAAYVRVSTEEQVEYSPDSQIKAIQKYAKDHDMILPQEFIFADEGISGRKALNRPAFQRMIGLAKTKPRPFDVILLWKFSRFARNREDSIVYKSMLRKQCGVDVISVSEQLGEDKTSILIEALLEAMDEYYSINLSEEVKRGMQEKFNRGEVTARPPLGYAMVEGKYVIQPEGAEIVRRIYTEYLAGVGQRAIARELTASDVRTKKGFNFDQTKIQYILTNPVYTGKVRRKIDGVMQVVPGLHEPIIDQETFDRAQERRREVERIYGKYARTEGNERMLKGILRCGNCGGAMVAKENGARMQCAAYGGGACHQSHSIGTHLAEAAILGKLREDLQMGVVGIEIAPPPERHQKREEGLAAAMLKKEQKKLERAKEAYTAGVDTLQEYKEQKAKIQARILELEEQIEACQHTPEQQSLEIVKRIQAGLAILEDPDASGELKNKTLRGLVESIIFHRQDREHSHFEIIYRDPFA

SEQ ID NO: 7387 - protein, 474 aa, Unknown
  Description of Unknown: Integrase B7388 sequence
  PTHR30461:SF3,cd00338,SM00857,G3DSA:1.10.10.2600,IPR036162, PF13408,PS51737,G3DSA:3.40.50.1390,IPR025827,IPR006119, IPR038109,PF07508,IPR011109,SSF53041,PTHR30461, PS51736,Coil,PF00239
MQRTVIYARFSSDMQREESIDAQVRACKAYAKSKGYTVVKEYVDEAKSGRSTLTRDAYNQMMADAMENKFDVIIFHKIDRNSRNELNYFIFKDKLEKLGIRYEYAAQPIDAATAEGQMTETVMVGMAAYYSRNLAKETKKGMNENAYKAIFNGGYAPLGYKIVDKHYVIDEKEAEAVRLIFNLYLDGTGYGEICLALAAHGYTTRSGKNFPKNSLHDILRNERYMGTYTFNRVPKTKRRNSHSYARPNDFISIPDAIPAIVSKETFLAAQEKMLLNKKRKGGAYTAKRDYLLSGKFFCGYCGSAMQGYSCCTRGNMYYYYSCARKDRVPADRCKEKMIRAEVIEHWIMSTLEREIFSDAGIQRVADSMSTAFGNANKEVKNATTVLLQRKAAAERKLNNLYQVIEDGDADEFDMQRLKKAKEELRNINNEICETAVKSAPDIDTSKIISLLKNMREEIFAKKIATTQNKRLNCL

SEQ ID NO: 7388 - protein, 474 aa, Unknown
  Description of Unknown: Integrase B7389 sequence
  PTHR30461:SF3,SM00857,G3DSA:1.10.10.2600,IPR036162,PS51737, G3DSA:3.40.50.1390,IPR006119,IPR038109,PF07508,SSF53041, IPR011109,PTHR30461,PS51736,cd00338,PF00239
MKKTVTEINPKYAKPKKETAKSKLNVAAYCRVSTESDKQMNSLANQKEYFEKLIKSHEDWNFVDIYYDEGISGTSLKKRDGFNKMIADALAGKIDMIVVKSISRFSRNTVDALQTIRNLRNHDIRIFFEKESIDSNDIKSEFMLTIMSSLAQEESQSLSENVKWGKRKIAQKGLVHIPYSNVLGFQQKGKYRIEIDREQAKTVVLIYDMYLHGKTTGEIIKKLIENGTSTPTGLEASHWCNTAILSILRNEKYCGDVILQKTYTKDFLNHKKCINDDVFPKYYVKNNHEEIIPRATWEYTQELLEKYSKRSVNVRYGELIFCSACEHKYRRFHRYHRYYEETILSYRCLGKYDKSTNCNNITLFEKQLDELYHETVLQLLSIYKKELLEYFKLTIPKVIKGKRKSNRIIKLLDNMISFIQSDYEYYSLHILIKNILVHPNKTLEFTTLDGNIIKISIPKYRLVDHYGRKKTSGN

SEQ ID NO: 7389 - protein, 474 aa, Unknown
  Description of Unknown: Integrase B7390 sequence
  PTHR30461:SF3,cd00338,SM00857,G3DSA:1.10.10.2600,IPR036162, PF13408,IPR025827,PS51737,G3DSA:3.40.50.1390,IPR006119, IPR038109,PF07508,SSF53041,IPR011109, PTHR30461,PS51736,Coil,PF00239
MKIAIYTRVSTMEQAEEGYSISEQQDKLKKYCDIKDWKVARVYTDPGFSGSNTNRPSLQQLISDCKNSMFDAVLVYKLDRLSRSQRDTLYLIEDVFNKNGVGFISLSENFDTSTAFGKAMIGILSVFAQLEREQITERMTLGRVGRAKAGKAMGWSNCPFGYTIHKEVYEIDPFRAEIVKRIFKDYLAGVSIIKLTQNLNKEGHIGKENNWSYRTVRQVLDNIVYAGYIKYKNEIYPGLHKPIISISDYKKTQAELKKRKITQAELHNPRPFRTKYMLSGLMRCGYCNSVLQIATSNLKDGTHLHRYNCPSSRPRKRSTNKRHDFDCGFKFIKKNEIESVVISEIKKLPLNMDKIINNQGNKDVSKEIKAIKAELQQIDKKQDKMVDLYLLDNINVDELNKKNDELSKQKENLQKRLNSLIDNKNKEKIEDFIKNAKEAKNIDKLDYEKQKVIVRKLISDIKVFNDKVEINWNI

SEQ ID NO: 7390 - protein, 474 aa, Unknown
  Description of Unknown: Integrase B7391 sequence
  PTHR30461:SF3,SM00857,IPR006118,G3DSA:1.10.10.2600,IPR036162, PS51737,G3DSA:3.40.50.1390,Coil,IPR006119,IPR038109, PF07508,IPR011109,SSF53041,PTHR30461,PS00397, PS51736,cd00338,PF00239
MKTAAAYIRVSTEDQVEYSPDSQLKAIRDYARKNDMILPEEFIFVDEGISGRKAAKRPEFMKMIGTAKIKPKQFDVILLWKFSRFARNREDSIVYKSMLRKQCGIEVISISEQLGEDKTSILIEALIEAMDEYYSINLAEEVRRGMTEKAQRGEVVSTPPFGYDVKDNVFVPNPETAPIVKMIFNKYLSGRGCLEIAKELNTMGIRTKYGNKWENRGVEYVLRNVVYTGKLTWTPVKSKTRDYKNEATIITQGKHEPIIEQEIFDKVQEMILEKKKLFPKHSRQSSNEFMLKGFLKCSNCGGALVYALNDRVQCNRYSKGTCEVSHSASLSKLNASVINALKSDLETQNFNIYNIKSAEEQKGSDITPMLIEKEKKKLERIKEAYAAGIDTLEEYCSNKEKILKAIEELDKNKKSSVITKEDMHKKLSATIRQSLDILEDPNCSESLKNITLRSFVRQIVYAKKTQSIEILYQV

SEQ ID NO: 7391 - protein, 474 aa, Unknown
  Description of Unknown: Integrase B7392 sequence
  PTHR30461:SF3,cd00338,SM00857,G3DSA:1.10.10.2600,IPR036162, PF13408,IPR025827,G3DSA:3.40.50.1390,PS51737,IPR006119, IPR038109,PF07508,IPR011109,SSF53041,PTHR30461, PS51736,Coil,PF00239
MKVAIYTRVSTIEQAEEGYSISEQQDKLKKYCDIKDWKVARVYTDPGFSGSNVNRPSLQQLISDCKNHMFDAVLVYKLDRLSRSQKDTLYLIEDVFNKNGIDFISLSENFDTSTAFGKAMIGILSVFAQLEREQITERMTLGRVGRAKAGKAMGWSNCPFGYTIYKEVYEIDPFRAEIVKRIFKDYLAGVSIIKLTQNLNKEGHIGKENNWSYRTVRQVLDNIVYAGYIKYKNEIYPGLHKPIISMSDYKKVQAELKKRKITQAKLHNPRPFRTKYMLSGLMRCGYCNSVLQIATSNLKDGTHLHRYNCPSSRPRKRSTNKRHDFDCGFKFIKKNEIESVVISEIKKLPLNMDKVINNQENKDVSKEIKAIKAELQQVEKKQDKMVDLYLLDNINVDELNKKNDELSKQKENLQKRLNSLINNKNKEKIEDFIKNAKEAKNIDKLDYEKQKVIVRKLISGIKVFNDKVEINWNI

SEQ ID NO: 7392 - protein, 474 aa, Unknown
  Description of Unknown: Integrase B7393 sequence
  PTHR30461:SF3,IPR036162,PS51737,IPR011109,PTHR30461, PS00397,PF00239,G3DSA:1.10.10.2600,IPR006119,SSF53041, cd00338,SM00857,IPR025827,IPR038109,PS51736, IPR006118,PF13408,G3DSA:3.40.50.1390,PF07508,Coil
MQKRMAALYVRVSTEDQAELSPDAQKRLLLEYAKKNDLITCEEFIFCESVSGRHAQKRPEFQKMIAMAKQSSHPFDVILVWKFSRFARNQEESIVYKSMLKKDDVEVISISEPLVDGPFGSLIERIIEWMDEYYSIRLSGEVKRGMKEKALRHGYQSTPPLGYKAVGGGKPFVIDEASYAIVSYAMNLYDCENMDETAIARKCNDLGYRTKRGNLFERRSIDRILRNPFYCGTVTWNGMEFEGSHEVRISKERFQERQKLIQARMRPAKSRSVSACRHWLSGLLKCSICGATLAYTGGGKDGYHYFNCWQYAKGYHRGTSSIPVKKAEEAVIEYFDKILEGADFSYVRKSNCSVNNEVTVDQIRKELSRIDMKSKRIHDAYESGIDSLQEYKENKERLNDDRSKLEFELHNLLHKKKEKFTDKSEVLKEIKSVNDVLKDPDVGYEEKGMLIRTIVDQIVWDKENNKMYFDIIVH

SEQ ID NO: 7393 - protein, 474 aa, Unknown
  Description of Unknown: Integrase B7394 sequence
  PTHR30461:SF3,SM00857,G3DSA:1.10.10.2600,IPR036162,PF13408, PS51737,G3DSA:3.40.50.1390,IPR025827,IPR006119,IPR038109, PF07508,SSF53041,IPR011109,PTHR30461,Coil, PS51736,cd00338,PF00239
MKVGIYSRVSTQEQAREGYSIGEQVERLKNYCAAKGWILYKTYTDAGFSGANTDRPGMQQLISDVADGKIDMVLVYKLDRLSRSQKDTLFLIEDVFIKNNVNFASITENFDTSTPFGRAMIGILSVFAQLEREQFRERSIMGKDARAKEGLHHGGGAPTGYDYIDGQLIINKEEAELIKEAYRLFLEDDMTMMGIAAKLSVFSEKFKYDHRIRKMLTNPLYAGWTHCRDELYKGQHEAIISQEVFDKVQTKLKIRAENNPHYRNAFNRTSLLAGILWCKKCGARYFKRVRRCEKGSKVYYYNKYQCYSRSSYKNMVRDKSCKNKIWTMEVLDKAVIGEIKALVANPAEVDNIIKLNQSNNNITEKKEFYKKRIKEIEKQMNKLTDLYSIDGIDIDFVAKKITALNTDKKRIESEMNAINEHKPLISAEDAKKRLSGISNILDNGEFTEKVKVITSLINRIEVDDDDIYIYWNFV

SEQ ID NO: 7394 - protein, 474 aa, Unknown
  Description of Unknown: Integrase B7395 sequence
  PTHR30461:SF3,cd00338,SM00857,G3DSA:1.10.10.2600,IPR036162, PF13408,IPR025827,PS51737,G3DSA:3.40.50.1390,IPR006119, IPR038109,PF07508,SSF53041,IPR011109,PTHR30461, PS51736,Coil,PF00239
MKIAIYTRVSTMEQAEEGYSISEQQDKLKKYCDIKDWKVARVYTDPGFSGSNTNRPSLQQLISDCKNSMFDAVLVYKLDRLSRSQRDTLYLIEDVFNKNGVGFISLSENFDTSTAFGKAMIGILSVFAQLEREQITERMTLGRVGRAKAGKAMGWSNCPFGYTIHKEVYEIDPFRAEIVKRIFKDYLAGVSIIKLTQNLNKEGHIGKENNWSYRTVRQVLDNIVYAGYIKYKNEIYPGLHKPIISISDYKKTQAELKKRKITQAELHNPRPFRTKYMLSGLMRCGYCNSVLQIATSNLKDGTHLHRYNCPSSRPRKRSTNKRHDFDCGFKFIKKNEIESVVISEIKKLPLNMDKIINNQGNKDVSKEIKAIKAELQQIDKKQDKMVDLYLLDNINVDELNKKNDELSKQKENLQKRLNSLIDNKNKEKIEDFIKNAKEAKNIDKLDYEKQKVIVRKLISGIKVFNDKVEINWNI

SEQ ID NO: 7395 - protein, 474 aa, Unknown
  Description of Unknown: Integrase B7396 sequence
  PTHR30461:SF3,SM00857,G3DSA:1.10.10.2600,IPR036162,PF13408, PS51737,G3DSA:3.40.50.1390,IPR025827,IPR006119,IPR038109, PF07508,SSF53041,IPR011109,PF00239,PTHR30461, PS51736,Coil,cd00338
MNIYYVREKLRNCSIYDIELNVAYYARVSTEKVEQQASIKHQEEHFEELIHSNNRWKFAGSYIDDGISGIHADKREEFQRMLRDAKLGKIDMIITKEISRFARNTLDSIQYTRELLSYGVCVWFQNDGINTIDDDSEFRLTIMAGVAQDEIRKLSSRVKFGHAQSIKNGVVLGHRMYGYSNNQGKLELVPEEADMVRMIFQDYASGISTPRIEKKLWDMGYRSFKGGKINRDVIKNIIRNPKYKGYYCGGKVKVVDMFTKKQEFLPQSEWVMFKDDGSRVPQIIDEATWEKANAYLRERGEAIKSRRTSFKNENIFTGKLFCANDGAPYWMKQHYIRGKEDVRWVCSYKIKNGAASCNSFGLAESELKEVIAELINKSSENIDSILEEYFEILQSSIKNIPDNINEITRLEKQIDLLKQKREKILEYNLDGKISDDEFVSRNKEYVKQIKQTESHIRELQNTKSPEPVEILKNS

SEQ ID NO: 7396 - protein, 474 aa, Unknown
  Description of Unknown: Integrase B7397 sequence
  PTHR30461:SF3,cd00338,SM00857,G3DSA:1.10.10.2600,IPR036162, PF13408,IPR025827,G3DSA:3.40.50.1390,PS51737,IPR006119, IPR038109,PF07508,SSF53041,IPR011109,PTHR30461, PS51736,Coil,PF00239
MLNAVIYARFSSDMQREESIDAQVRACKAYAKSKGYTVVKEYIDEAKSGRSTLTRDAYNQMMADAMENKFDVIIFHKIDRNSRNELNYFIFKDKLEKLGIRYEYAAQPIDAATAEGQMMETVMVGMAAYYSRNLAKETKKGMNENAYKAIFNGGYAPLGYKIVDKRYVIDEKEAEAVRLIFNLYLDGKGYGEICLALAARGYTTRSGKNFPKNSLHDILRNERYMGTYTFNRVPKTKRRNSHSYARPNDFISIPDAIPAIVSKETFLTAQEKMLLNKKRKGGAYTAKRDYLLSGKFFCGYCGSAMQGYSCCTRGNMYYYYSCARKDRVPADRCKQKMIRAEVIEHWIMSTLEREIFSDAGIQRVADSMSTAFGNANKEVKNATTVLLQRKAAAERKLNNLYQVIEDGDADEFDMQRLKKAKEELRNINNEICETTVKSAPDIDTSKIISLLKNMREEIFAKKIATTQNKRLNCL

SEQ ID NO: 7397 - protein, 474 aa, Unknown
  Description of Unknown: Integrase B7398 sequence
  cd00338,SM00857,IPR006118,IPR036162,G3DSA:3.40.50.1390, IPR006119,SSF53041,PTHR30461,PS00397,PS51736, Coil,PF00239
MKIAVAYVRVSTNKQDIRGSKLGQEQEIKNYASKEGYNIVAFFDDTEHGDIANRVGLDDLKKYLRMNDSVKYVIVYHSDRFTRGFQNGIQDLFFLDGLGIKLVSVMEGIQNIEGNYDSLPTIVRMLGAQVEKDKMVQKVTTAMYQYAETARYLGGSIFPWFSVEKGYIDGKRCKIVVQNKDTWDFYRRFFLTMIQSKSIKSTAEKFGLNLNTVQSWLVVPELMGKRSYGKKGKIDKLHNKGRRQDYLITEKIVFPALLTKEEYDKLLYLRHRHRIQVREDIKIYLYSQVLYCGCGGKFEGNFIRKIGKEGKGTLYYRCSKCGKRINAKKLERDLIDRICNDSRLQMLNEVEFRLADLFDEKTEYEKQINILREKEKRVIHLVTDGITSMDVVEAELRALKKQRDHFHSLINKIDKTIQEEAKKEITEDNINMLKELLTLNLPDDDFRISLKEIINLIIRRITIGNTDNKIYITF

SEQ ID NO: 7398 - protein, 474 aa, Unknown
  Description of Unknown: Integrase B7399 sequence
  cd03768,PTHR30461:SF3,SM00857,G3DSA:1.10.10.2600, IPR036162,PF13408,IPR025827,G3DSA:3.40.50.1390, PS51737,IPR006119,IPR038109,PF07508, IPR011109,SSF53041,PTHR30461,PS51736,Coil,PF00239
MKVAIYTRVSTIEQAEEGYSISEQQDKLKKYCDIKDWKVARVYTDPGFSGSNTNRPSLQQLISDCKNSMFDAVLVYKLDRLSRSQKDTLYLIEDVFNKNGVDFISLSENFDTSTAFGKAMIGILSVFAQLEREQITERMTLGRVGRAKAGKAMGWSNCPFGYTIYKEVYEIDPFRAEIVKRIFKDYLAGVSIIKLTQNLNKEGHIGKENNWSYRTVRQVLDNIVYAGYIKYKNEIYPGLHKPIISISDYKKAQAELKRRKITQAKLHNPRPFRTKYMLSGLMRCGYCNSVLQIATSNLKDGTHLHRYNCPSSRPRKRSTNKRHDFDCGFKFIKKNEIESVVISEIKKLPLNMDKIINNQENKDVSKEIKAIKAELQQIEKKQDKMVDLYLLDNINVDELNKKNDELSKQKENLQKRLNSLIDNKNKEKIEDFIKNAKEAKNIDKLDYEKQKVIVRKLISGIKVFNDKVEINWNI

SEQ ID NO: 7399 - protein, 473 aa, Unknown
  Description of Unknown: Integrase B7400 sequence
  IPR036162,PS51737,IPR011109,PTHR30461,PS00397, PF00239,G3DSA:1.10.10.2600,IPR006119,SSF53041,cd00338, SM00857,IPR025827,IPR038109,mobidb-lite,IPR006118, PF13408,G3DSA:3.40.50.1390,PF07508,Coil
MRIGAAYIRVSTDDQLDISPESQLDEIQRYAKAHDILIPEEYIFMERTGRSGKRADNRPEFQRMIATAKEKPQPFEVILVWKFSRFARNQDESTFYKGMLRKKLKIDIESVSEPIMEGMYGRLIEMIIEWQDEFYSYNLGVEVKRGMAKKAELKGYQLVPPLGYAAVGNGKPYVIREDEYKIVEMIFHMYAVDRLDMTAIARQLNASGYLTRRGNPFEKRSIDRIIQNRFYVGTVEWNGFSFEGTHKTRASVTELFEQCQERRKAEFRPMRHRNVSTCKHWLSGLMRCSVCGATLSYTGSGAVPYFTCWKYSKGLHPESCSISVKKMERIVLRSLDGILESGHFEYTPAASASGSPADPSNEIQSQLDRLRHQEERARIAYENEVYTLDEYKESKARLRSEIQRLSDELQRLLEQPAESAPPQKELLDRVRNVRDLLASPSVGFETKGNALRSILKCIVFDRKTEHFDFQYYA

SEQ ID NO: 7400 - protein, 473 aa, Unknown
  Description of Unknown: Integrase B7401 sequence
  cd00338,SM00857,G3DSA:1.10.10.2600,IPR036162,PS51737, G3DSA:3.40.50.1390,IPR006119,IPR038109,PF07508,SSF53041, IPR011109,PTHR30461,PS51736,Coil,PF00239
MTKGSRAAIYARFSSHNQRDESIEIQVDKSREFCVESGLAVVRIYSDYAKTGRNSDRTEFQQMLKDAQKGLFDYVVIYKVTRIMRNRDEMALARIMLHKAGVEILYAGETLGEGSTRVLHLGMLEVLAEYESGVDSERIRDGIQKNAQRGMASGQRLYGWNVVDDHFVINEREAAVMHKMKNMLLSGSTVADIQRAVKTERSRRGRPFSHGSIKKLLMREQNCGTYNYAGVRIPNGMPAIWSRSEQEEINNVLNGRGHKHRVEDGERVYALSGKMFCCECGRWYVGTSGTGKSGKVYHYYRCPKCRRTFRRDVIEDAVTDTILESIKDPKVRERIITTLEMMIAETAEYDEPKDSERIKAEIKRIDASFERIWQAIEDGFAPPGGKERVDELKARQGELKDELATALEAESAEALTIDDYIDWLDTLNANSDPYDIIDTFIRFIQIDGDEVQIYFSFDNWDDDFMPTKKTNPR

SEQ ID NO: 7401 - protein, 473 aa, Unknown
  Description of Unknown: Integrase B7402 sequence
  cd00338,SM00857,G3DSA:1.10.10.2600,IPR036162, PF13408,IPR025827,G3DSA:3.40.50.1390,PS51737, IPR006119,IPR038109,PF07508,SSF53041, IPR011109,PTHR30461,PS51736,Coil,PF00239
MKNDVAIYLRKSREDDELKEETLARHETMLLDYCKRNNLNIVKIYKEVVSGESIANRPQMQRLLDDVSRGLYAGVVCIEIERLSRGNQIDQVEILEIFKSSGTKIYTLNKIYDLSKEDIDEEFLEFALFMSRREYKIINRRLQRGRNQSRQEGYYIGSILPFGFDKIRGERGYILVPNDNAKVVEFIFNQYLDGVNVATITNYLNDNGIKPQNHNKIWTPPTVRNVLKNKLYIGMINTNNRGGTVKGKHEPIIDELTFNRVQEQLAKTPKVTNRRKLSNPLAGLVYCSECGRTMIRKINALKFEYITCPSLKCNTRSLKLETLESILLDELKKELKGFNYFLDNYGEQIKTEKEKVAVELAILETELEKKLNMIETACEMLEAGIYTKELFTRRISVLEDDIKAMKENISNIKNTPLEDDTRAYKAIPILEKVLENYNVLDAKEKNLLLKSIVERIDFTRLEDDTSLNITLLL

SEQ ID NO: 7402 - protein, 473 aa, Unknown
  Description of Unknown: Integrase B7403 sequence
  PTHR30461:SF3,IPR036162,PS51737,IPR011109,PTHR30461, PS00397,PF00239,G3DSA:1.10.10.2600,IPR006119,SSF53041, cd00338,SM00857,IPR025827,IPR038109,PS51736, IPR006118,PF13408,G3DSA:3.40.50.1390,Coil
MSYKNVICTAHFCFREGILIVECVAYIRVSTEKQAEEGHGLASQRRDIKNYCRKNGLLISEWYEDDGYTGANMNRPALQRLINDCAKKRVQCVVAFKLDRLSRSMVDGIYLIERIFQPNNIQFRCVHDSVSYDSPMEQAYTQMMAVFAQLDKNTMLLRMRGGMLERVKAGYWAGGGNLPYCYSYDKEKGILVPIPEKAEKARMALDLFIEGYSDVKIQHMLGFKTELTVRKLLTSVTNIGLIPYKGEVYQGLHEPIFDKDKFELAQALRKSRRKAKTVCQAEANLLTGLCYCGVCGCKMRYQKWGKQGRKLYCCSRNKDLYYLPNYNADCDNKTFSAEDVEKQVEEKILQISLNVSDYRPKGTENKEEVLQSQLKNEEQKLKRLYMLYAEGNDAIVETIKEVETVVSNIKEQLNILVEEKNDIKSKDLVYENIKKLADIWEYADKPKKNKILKSIISKIVIGKGNIEIQLKTF

SEQ ID NO: 7403 - protein, 473 aa, Unknown
  Description of Unknown: Integrase B7404 sequence
  SM00857,IPR006118,G3DSA:1.10.10.2600,IPR036162,PF13408, PS51737,G3DSA:3.40.50.1390,IPR025827,IPR006119,IPR038109, PF07508,IPR011109,SSF53041,PF00239,PTHR30461, PS00397,Coil,cd00338
MRIGAAYIRVSTDDQLDISPESQLDEIQRYAKSHDILIPEEYIFMERTGRSGKRADNRPEFQRMIATAKEKPQPFEVILVWKFSRFARNQDESTFYKGMLRKKLKIDIESVSEPIMEGMYGRLIEMIIEWQDEFYSYNLGVEVKRGMAKKAELKGYQLVPPLGYAAVGNGKPYVIREDEYKIVEMIFHMYAVDRLDMTAIARQLNASGYLTRRGNPFEKRSIDRIIQNRFYVGTVEWNGFSFEGTHETRASVTELFEQCQERRKAEFRPMRHRNVSTCKHWLSGLMRCSVCGATLSYTGSGAVPYFTCWKYSKGLHPESCSISVKKMERIVLRSLDGILESGHFEYTPAARASGSPADPSNEIQSQLDRLRHQEERARIAYENDAYTLDEYKESKARLRSEIQRLSDELQRLLEQPAESAPPQKELLDRVRNVRDLLASPSVGFETKGNALRSILKCIVFDRKTEHFDFQYYA

SEQ ID NO: 7404 - protein, 473 aa, Unknown
  Description of Unknown: Integrase B7405 sequence
  cd03768,SM00857,IPR006118,G3DSA:1.10.10.2600,IPR036162, PF13408,IPR025827,G3DSA:3.40.50.1390,PS51737,IPR006119, IPR038109,SSF53041,IPR011109,PTHR30461,PS00397, PS51736,Coil,PF00239
MKAASYVRVSTLEQKKNGYSIDGQKERIESYCKAMGYDLVQNFSDDGFSGSTTNRPALQKLLNTVKAHLVDIVIIYRLDRLSRDVRDTLNLVDFFAEHNVKLYSLSEQIDLSSAFGRASLTMSATFSAMEREVVVERLSSGKWDRVKNGEMLGMGKCGAPFGYKLLKEKKAFEIVPEEAEIVRDLFDLYVNQDFTIRKLYPYARAKYNHPFFKNPMCCRDILKRSMYAGFFTYGGELFKGKNFEPIIPYSLYLQAQDKMEKNRAGRQHDTSPYLLTGLLYCGECGNRYVGKRSKRYSALVNGGKNFHEDTYYGCAARIKRDRHYTPVKCTNMIYKSSALDSLIEPQIKQFDFQDFAVETVSENVFGNILEEISELENKNDKLLDLYLDEKITKDTFEKRSREIKDSIDKKKIILEDEKNKLIDKPLITINYLKEKQLNYDNLTQKEKRQFLRLLIKRIILQKNGEIIIKWRVK

SEQ ID NO: 7405 - protein, 473 aa, Unknown
  Description of Unknown: Integrase B7406 sequence
  cd03768,SM00857,IPR006118,G3DSA:1.10.10.2600,IPR036162, PF13408,IPR025827,G3DSA:3.40.50.1390,PS51737,IPR006119, IPR038109,SSF53041,IPR011109,PTHR30461,PS00397, PS51736,Coil,PF00239
MKAASYVRVSTLEQKKNGYSIDGQKERIESYCKAMGYDLVQNFSDDGFSGSTTNRPALQKLLNTVKAHLVDIVIIYRLDRLSRDVRDTLNLVDFFAEHNVKLYSLSEQIDLSSAFGRASLTMSATFSAMEREVVVERLSSGKWDRVKNGEMLGMGKCGAPFGYKLLKEKKAFEIVPEEAEIVRDLFDLYVNQDFTIRKLYPYARAKYNHPFFKNPMCCRDILKRSMYAGFFTYGGELFKGKNFEPIIPYSLYLQAQDKMEKNRAGRQHDTSPYLLTGLLYCGECGNRYVGKRSKRYSALVNGGKNFHEDTYYGCAARIKRDRHYTPVKCTNLIYKSSALDSLIEPQIKQFDFQDFAVETVSENVFGNILEEISELENKNDKLLDLYLDEKITKDTFEKRSREIKDSIDKKKIILEDEKNKLIDKPLITINYLKEKQLNYDNLTQKEKRQFLRLLIKRIILQKNGEIIIKWRVK

SEQ ID NO: 7406 - protein, 473 aa, Unknown
  Description of Unknown: Integrase B7407 sequence
  PTHR30461:SF3,SM00857,G3DSA:1.10.10.2600,IPR036162,PF13408, IPR025827,G3DSA:3.40.50.1390,PS51737,IPR006119,IPR038109, PF07508,IPR011109,SSF53041,PTHR30461,PS51736, cd00338,PF00239
MARSITVIPARQISTAEFGTAQTVQKLRMAAYCRVSTDQEEQLLSYENQVNYYTNYISENPLYKYARTYADEGISGTNTKKRDEFNRMIADCRAGKIDMIITKSISRFARNTLDCLNYVRELKDLGIGIIFEKENINTLDAKGEVLLTILSSLAQDESRSISENCTWGIRRRFETGKHKMSTKRFLGYDADESSGKLIINRKQAPIVVRLYQEFLDGKTADYIKRIFEREGIKNWDGGTKWQATTLMSMLENEKYKGDALLQKGYTVDFLTKKRTQNKGEIQMYYVEDDHEAIISKRIWECVQLEAERRKKYLEEHGTNSYSRRPENNPFASKIVCGSCNKVFAKKGWRSSRGIGWKIWQCSERYKVKGVMGCSNRHVEEETLVKAYLMAWNALVENREAFMERWKEQMQSENLLEGYRAEKFIEYTDGVQPLTEMDTDFMLKTLDYIKVFENGTLLVVFLDGTEIECRSEKE

SEQ ID NO: 7407 - protein, 473 aa, Unknown
  Description of Unknown: Integrase B7408 sequence
  SM00857,IPR006118,IPR036162,PF13408,IPR025827, PS51737,G3DSA:3.40.50.1390,IPR006119,SSF53041,IPR011109, PTHR30461,PS00397,PS51736,cd00338,PF00239
MVKKVLRCAIYIRVSTAEQAMHGKSLEAQLSYLTQYAKDHDMVVAGVYADQGKTARKNLRDRKEIKNLLSSVKRNEIDVIIFWKMDRWFRNVGDFYKVQDILDAHGARWIATAEPNMNMETREGRLNVNIMLSINQNETDTTSERICFVNEASVRLGKAISGAQPYGYKVVRNESGAKVVVKDPERELYVEEFFRHFLVHQSKRGAFLYLTEKYGPVITMSQVITMCKNTMYFGAYRENPNYCPAYITFDQYIQIREINRKNIKVYQSNLGTGEVYLFCGLIHCPICGRPMSANRITKNSHTGKPLKDPLRYYRCQNWCYKKSCTYSKIASEATIEKYLLGHIDEEKERYRQREEILLTRISAQAPVEKKKPSKEKLLAELDRLNNMYQKGRISDEKYDSEYERISSDIKAMSIETLPAPKRSYKELETVLHSGWHEMYEHLSRQNKQAFWRSIIKEIHLNADNSFVNFIDFL

SEQ ID NO: 7408 - protein, 473 aa, Unknown
  Description of Unknown: Integrase B7409 sequence
  cd03768,PTHR30461:SF3,SM00857,G3DSA:1.10.10.2600, IPR036162,PS51737,G3DSA:3.40.50.1390,IPR006119, IPR038109,PF07508,IPR011109,SSF53041, PTHR30461,PS51736,Coil,PF00239
MYKIAIYVRKSVKSEKNSVSIDTQIKVIKDYFLKEGEKEFEIFIDDGFSGGNTNRPQLQEMLDRALKGEFKTVACYKLDRMARNTLDFLNIFNMLKEKGIDLVCVLDSYDARTPAGKMMMTLLASMSEMERENIKTRVTSSMINLAKQGRWTGGKIPVGYKVVIIENGKYLSLENKNVIKEVFNNFLNGLSIRQIAKKNNCSTIRIREMLKNITYLKSSISANEYLSLNGYEVYGEPNGKGYLPYGKRSNKLTTIAAVSRHEGVIDLPTFAKVQDVLKGYGGHVAPRISTLTYLAQLVYCKCGRLMIVTCGTKRKDGTFLVYFRCKNKGCSRLIRADLLEDDIFTLLSSGNPIYAENEENKDNTKKINTLRNEIKEKEIILNGLIDKLALASDKLTPVILSKAENIEKDIQDLSNKLNSLEIKKVQKVDNSKREDIRKFFVENFKNLSLEEKQRYIRKVIHKIVIDENEIVIY

SEQ ID NO: 7409 - protein, 473 aa, Unknown
  Description of Unknown: Integrase B7410 sequence
  PTHR30461:SF3,IPR036162,PS51737,IPR011109,PTHR30461, PS00397,PF00239,G3DSA:1.10.10.2600,IPR006119,SSF53041, SM00857,IPR025827,IPR038109,PS51736,cd03768, IPR006118,PF13408,G3DSA:3.40.50.1390,PF07508,Coil
MQNKVAIYVRVSTSSQAEEGYSIDEQKAKLEAYCEIKDWKIYDTYIDGGFSGANTQRPELERLISDAKRKKIDIVLVYKLDRLSRSQKDTLFLIEDVFTKNDVSFISLQENFDTSTPFGKASIGMLSVFAQLEREQIKERMMLGKEGRAKNGKTMSWTTIPFGYDYSKETGILSVNPTQALIVNRIFTEYLNGKSVVKIIRDLNAEGHVGRKRPWGETITKYLLKNETYLGKVKYKDKVYEGQHEPIITQELFDLVQLEVEKRQISALEKYNNPRPFRAKYMLSGLMKCGYCGASLGLKYTRKDKNGISHHKYQCRNRHSKDLEKRCESGWYSQEELEKDVIKELERLKLNPKYRNKTLAKKEETIKVEEIKKQLERINKQVSKLTELYLDEIITRKELDEKNAKIKTERQFLEEQLENQKSNVMSIRKRKLTRLLKDFDVEKMSYEEASKIVKTIIKEIVVTKDDMTLTLDF

SEQ ID NO: 7410 - protein, 473 aa, Unknown
  Description of Unknown: Integrase B7411 sequence
  PTHR30461:SF3,SM00857,G3DSA:1.10.10.2600,IPR036162,PF13408, IPR025827,G3DSA:3.40.50.1390,PS51737,IPR006119,IPR038109, PF07508,SSF53041,IPR011109,PTHR30461,Coil, PS51736,cd00338,PF00239
MKVALYSRVSTQEQAINGYSIDEQQERMNKYCEAMGWQAYKEYTDAGYSGATTARPALQKMIKDVEAGKVDKVLVYKLDRLSRSQLDTLYLIEKIFLANNVDFISMSENFDTATPFGRAMIGILAVFAQLEREQIKERMMMGKEARAKKGLYHGSNSYPIGYDYVDGQLIPLDFEAMQIRIIFEKYANGDSPMTIAEYLNGNGYTTRYGRWNDTTIRKILKRKTYIGYVKYHDEWFEGQHEAIISRELFDEVQEIYNKKSRDYKYNKRRDGSVNSYLGGLLHCKYCGRKYLKVLGTSTKNGVKYKIAYYKCYSRAHRKRLLKEDPHCKNKTWRMDELDNLILGEIRKLVLDPESFDDEEEQSSNQNVEILKNEIVKIEKQIDKLMDLYSIGGMSIEAVQDKIHALDDQKKKLELQLESFEKETKMSKGDAKKIITSFGDLIDEGDFEDIRWLITTLIEKIVIDGEDLEIYWKF

SEQ ID NO: 7411 - protein, 473 aa, Unknown
  Description of Unknown: Integrase B7412 sequence
  PTHR30461:SF3,SM00857,G3DSA:1.10.10.2600,IPR036162,PS51737, G3DSA:3.40.50.1390,IPR006119,IPR038109,PF07508,SSF53041, IPR011109,PF00239,PTHR30461,PS51736,Coil, cd00338
MRIAIYVRKSVAGDDRSISLESQKELCTNYFKGENTFEVFQDRGISGKNTDRPAFQELSRRVSNGEFDIVVCYKFDRIARNTLDFLTTLELFKSYNTDLVSITEGYDPSTPAGKMMVTLLASLAEMERENIKARVIDSMNQLAREGRYSGGPTPFGYEIDKTPYGSYLKLIDGETISYIFNSFLKGKSANDLGRELKMTSKGIKLILRNPLYMKSSQLANEYLGNIGYEVISYEDRMGNGYLTYGKKGSSNSNKIAVISKHEAVISDSDWIQVQVRLKTYDGHRAPRISSKTWLAQMVKCTHCNKYMKVRTTNTGVYLMCPNNCMKKYINVSKAENLILDELKKFTLDEDTINDNSKENNLLSEINVITKQIDEKDKLIIGLVDKLALANESLANRLVKTIEAYETELNNLKNIKTQKLIAMENKKSNHLFNNEKEFNDFIDSFNKLDMKEKQQSIRNIIDYIEFDGDYFTIY

SEQ ID NO: 7412 - protein, 473 aa, Unknown
  Description of Unknown: Integrase B7413 sequence
  IPR036162,PS51737,IPR011109,PTHR30461,PS00397, PF00239,G3DSA:1.10.10.2600,IPR006119,SSF53041,cd00338, SM00857,IPR025827,IPR038109,PS51736,IPR006118, PF13408,G3DSA:3.40.50.1390,PF07508,Coil
MKTAAAYIRVSTDEQTEHSPDSQLKEIRNYADRHGLILDPSHIYIDAGVSGRKAKKRPQFLKMIATAKGEPSPFSVVLVWKFSRFARNQEESIVYKSLLNRECGVEVVSITEETQDKMFGSLVERMIEWMDEFYSIRLGEEVRTKMTYVAETGKIQTAPSFGFSKNSEGEYVLNPDEAEWVLFMAESLLQKKSLRWIAKELNSHGVRTHRGNKFEPRTVRYILKNLTNTGASHWTPNREDHENEYHPYSDSTIVVDGVCDHIYTREYYDKIIAELDTRAENRKKYDKPDTVKKHWLSGFLKCSNCGSTMVYSLANKGFQCYKYGKSLCDVSHFISASKIEESVIQAIKNVTVNDKFIKSVTKPPKKADHKKDIRRLEGMLQRAKIAYMEEIDTLEEYAANKERIEKEILKFKKEDEKATAYRPAEDVRRQFAEIVDLLSSDSEDAIKRAALGEIVESIVFSRPNTAIKIYFRL

SEQ ID NO: 7413 - protein, 473 aa, Unknown
  Description of Unknown: Integrase B7414 sequence
  PTHR30461:SF3,IPR036162,PS51737,IPR011109,PTHR30461, PS00397,PF00239,G3DSA:1.10.10.2600,IPR006119,SSF53041, SM00857,IPR025827,IPR038109,PS51736,cd03768, IPR006118,PF13408,G3DSA:3.40.50.1390,PF07508,Coil
MSQDMIVVGYVRVSTEHQLDNYSIDEQTERLKAYCRAKGWILAKIYTDGGFSGGNTNRPALQQMLLDIRNNNINSVIVYKLDRLSRSQKDTLRLIEDEFLANDTDFISISENFDTSTPFGRAMIGILSVFAQLEKDQITERLSMGRTARSKSGLFHGGGQAPFGYDYVDSRLQVNSYQSLQVQEVYQRFLSGQSINSIHLQMKALYGGFWSAAKVLNMLRNSIYIGKVKFAQQEYNGVHEPIISETVFQDVQRLLTAPERDAQKSAAQKTPYRAGYLLSSMIYCGQCGSRYSANHGYYRCYSRSKSNKKYITDPNCQNDHWSIEELDQYVIQSIEDLLSNETLLADIMNSCQQNPVLPVIDRQALENRISEINKQMSNVIDLYQLVHQDGNDIPIEDIVSRIKQLSIEKSRLEAELKNDHTTPDNKRTSFLSTLQNFQEHFHNAPLETQRLIVSGLLESITVDGRKISLKWRI

SEQ ID NO: 7414 - protein, 473 aa, Unknown
  Description of Unknown: Integrase B7415 sequence
  cd03768,PTHR30461:SF3,SM00857,G3DSA:1.10.10.2600,IPR036162, PS51737,G3DSA:3.40.50.1390,IPR006119,IPR038109,PF07508, IPR011109,SSF53041,PTHR30461,PS51736,Coil, PF00239
MYKIAIYVRKSVKSEKNSVSIDTQIKVIKDYFLKEGEKEFEIFIDDGFSGGNTNRPQLQEMLDRALKGEFKTVACYKLDRMARNTLDFLNIFNMLKEKGIDLVCVLDSYDARTPAGKMMMTLLASMSEMERENIKTRVTSSMINLAKQGRWTGGKIPVGYKVVIIENGKYLSLENKNVIKEVFNNFLNGLSIRQIAKKNNCSTIRIREMLKNITYLKSSISANEYLSLNGYEVYGEPNGKGYLPYGKRSNKLTTIAAVSRHEGVIDLPTFAKVQDVLKGYGGHVAPRISTLTYLAQLVYCKCGRLMIVTCGTKRKDGTFLVYFRCKNKGCSRLIRADLLEDDIFTLLSSGNPIYAENEENKDNTKKINTLRNEIKEKEIILNGLIDKLALASDKLTPVILSKAENIEKDIQDLSNKLNSLEIKKVQKVDNSKREDIRKFFVENFKNLSLEEKQRYIRKVINKIVIDENEIVIY

SEQ ID NO: 7415 - protein, 473 aa, Unknown
  Description of Unknown: Integrase B7416 sequence
  SM00857,IPR006118,G3DSA:1.10.10.2600,IPR036162,PF13408, IPR025827,PS51737,G3DSA:3.40.50.1390,IPR006119,IPR038109, PF07508,IPR011109,SSF53041,PF00239,PTHR30461, PS00397,Coil,cd00338
MRIGAAYIRVSTDDQLDISPESQLDEIQRYAKSHDILIPEEYIFMERTGRSGKRADNRPEFQRMIATAKEKPQPFEVILVWKFSRFARNQDESTFYKGMLRKKLKIDIESVSEPIMEGMYGRLIEMIIEWQDEFYSYNLGVEVKRGMAKKAELKGYQLVPPLGYAAVGNGKPYVIREDEYKIVEMIFHMYAVDRLDMTAIARQLNASGYLTRRGNPFEKRSIDRIIQNRFYLGTVEWNGFSFEGMHETKPSVTKLFEQCQERRKAEFRPMRHRNVSTCKHWLSGLMRCSVCGATLSYTGSGAVPYFTCWKYSKGLHPESCSISVKKMERIVLRSLDGILESGHFEYTPAASASGSPANLSNEIQSQLDRLRHQEERARIAYENEVYTLDEYKESKARLRSEIQRLSDELQRLLEQPAESAPPQKELLDRVRNVRDLLASPSVGFETKGNALRSILKCIVFDRKTEHFDFQYYA

SEQ ID NO: 7416 - protein, 473 aa, Unknown
  Description of Unknown: Integrase B7417 sequence
  PTHR30461:SF3,SM00857,IPR006118,G3DSA:1.10.10.2600,IPR036162, PS51737,G3DSA:3.40.50.1390,Coil,IPR006119,IPR038109, PF07508,SSF53041,IPR011109,PTHR30461,PS00397, PS51736,cd00338,PF00239
MKIAAAYVRVSTEDQTELSPTSQIKQIREYAKNHGYIVPDEFVFADEGISGKNTQKRPAFNRMIGLAKTKPKPFECILLWKYSRFARNREDSIVYKSMLRKQLGIDVISISESLGDDKMSILIEALIEAMDEYYSINLAEEVKRGMTERVSRGEAVSVPAYGYDIEEGKYIINEAEAEVVRQIFSDFKNGIGTVTIARNLNAIGIKTKRGKLWENRTVKYILHNPVYIGKIRWNPEEITGLNYEHEKIMLVDGIHEPLLTKELWDSVQEKLSLIKRTRKPREKSNSNPDYMLYGLMRCGTCGGTLTLSCGNGLQCHKYAHGTCDTSHYISLSKANAAVIDLIQHTLENGIFTLTPKKQDVSTQQVAMIDKQIQNEKNKLLRVKEAFEYGVDTLEEYKENKNKILQKISELESSKPVQQTNIDKKKFAQKYLGVIDTLKDDTVSESDKNHILRQFVEKIVLHRPSNEIEIFYHY

SEQ ID NO: 7417 - protein, 472 aa, Unknown
  Description of Unknown: Integrase B7418 sequence
  IPR036162,PS51737,IPR011109,PTHR30461,PS00397, PF00239,G3DSA:1.10.10.2600,IPR006119,SSF53041,cd00338, SM00857,IPR025827,IPR038109,PS51736,IPR006118, PF13408,G3DSA:3.40.50.1390,PF07508,Coil
MSARYAYGYVRVSTDKQEELSPDSQEKLLREYAAKNNIIILKVFFEIGISGRKADKRPEFQKMIGLAKSSDHPVDVILVWKFSRFARNQEESIVYKSLLRKQSNVDVVSVSEPLIDGPFGSLIERIIEWMDEYYSIRLSGEVLRGMKEKATKKGYQMSPPFGYRAVGNGDPYKIDQDEMKIVDFICDEFDYRNSDTTKITRKLNDMGVRTRRGNPFESRSVERILKNPFYYGLVAWNGITFMGTHEVHYSKERFEARMKKIQTTYKPLKRRDVSSCKHWLSGILKCGYCGASLAYNGANRHSPGFQCYKYSKGIHTESCSISEKKVIAALEEYFEKLLSGMDFEYSYHSAETGEKISERESLLSELDKISNREKRIRLAYENEVDTLEEYKRNKERLRKDREDILMQLENLDKNNEDTKTKSDVLKNVQTVYDVIKNDAIDYGTKGIFMRSLVEDIVYDKKNSKLIFHLYIS

SEQ ID NO: 7418 - protein, 472 aa, Unknown
  Description of Unknown: Integrase B7419 sequence
  cd03768,PTHR30461:SF3,SM00857,G3DSA:1.10.10.2600,IPR036162, PF13408,IPR025827,G3DSA:3.40.50.1390,PS51737,IPR006119, IPR038109,PF07508,IPR011109,SSF53041,PTHR30461, PS51736,Coil,PF00239
MNSKRKVAIYSRVSTLHQAEEGYSIGQQIEALTKYCQAMDWVIYDNYSDGGFSGGKLERPAMQKMIQDAESGKFDTVIVYKLDRLSRNVRDTLYLVKDVFNANNVDFVSLQENIDTKSAMGNLFITLLSAIAEFEREQIKERMQLGVKGRAKSGKTTSWATPPFGYKYDTNTQSMTVDHYQAEIVRDMFNKIISGWSIMGITTYMRENYDGKWTHVKVKRILENITYIGKVKYRNEIFEGEHTPILPEELFYKAQKALEERTNKKDNTRPFQGLYMLSHIAKCGYCGTPLKIDTYKPRKDGTRKRTYTCINKNPRRTKTTIYNNGEECKESGRYDVKDVESYVLNEINKFQLNPESIESLYKDKPEENLKAYEEQLKQLEKKLSKLNDLYINELISMDALKQKSAELLKEKSSLESFINRNKTQTNNKQSFEKLVKMDDILKMSYDDQKKVVKTLIKRVEVKRDEIDVIFKL

SEQ ID NO: 7419 - protein, 472 aa, Unknown
  Description of Unknown: Integrase B7420 sequence
  IPR036162,PS51737,IPR011109,PTHR30461,PS00397, PF00239,G3DSA:1.10.10.2600,IPR006119,SSF53041,cd00338, SM00857,IPR025827,IPR038109,PS51736,IPR006118, PF13408,G3DSA:3.40.50.1390,PF07508,Coil
MSARYAYGYVRVSTDKQEELSPDSQEKLLREYAAKNNIIILKVFFELGISGRKADKRPEFQKMIGLAKSTDHPVDVILVWKFSRFARNQEESIVYKSLLRKQSNVDVVSISEPLIDGPFGSLIERIIEWMDEYYSIRLSGEVLRGMKEKATKKGYQMSPPLGYHAVGNGEPYKIDPDEMKIVEFICDEFDYHNSDVTKITRKLNDMGVRTRRGNPFESRSVERILRNPFYYGLVVWNGISFAGSHEVHYSKERFETRMKKIQTTYRPLKRRDVSSCKHWLSGLLKCGYCGASLSYNGANRHSPGFQCYKYSKGIHTESCSISEKKVVAALEEYFEKLLSGMDFEYSYHSAETGEKISERESLVSELDKISNREKRIRLAYENEVDTLEEYKRNKERLQKDREDILEQLKNLDKNNEDTKTKSDVLKNVQTVYDVIKNDAIDYDTKGIFMRSLVEDIVYDKKNGKLIFHLYIS

SEQ ID NO: 7420 - protein, 472 aa, Unknown
  Description of Unknown: Integrase B7421 sequence
  IPR036162,PS51737,IPR011109,PTHR30461,PS00397, PF00239,G3DSA:1.10.10.2600,IPR006119,SSF53041,cd00338, SM00857,IPR025827,IPR038109,PS51736,IPR006118, PF13408,G3DSA:3.40.50.1390,PF07508,Coil
MSARYAYGYVRVSTDKQEELSPDSQEKLLREYAAKNNIIILKVFFELGISGRKADKRPEFQKMIGLAKSSDHPVDVILVWKFSRFARNQEESIVYKSLLRKQSNVDVVSVSEPLIDGPFGSLIERIIEWMDEYYSIRLSGEVLRGMKEKATKKGYQMSPPLGYHAVGNGEPYKIDLDEMKIVDFICDEFDYHNSDVTKITRKLNDMGVRTRRGNPFESRSVERILKNPFYYGLVAWNGITFMGTHEVHYSKERFEARMKKIQTTYKPLKRRDVSSCKHWLSGILKCGYCGASLAYNGANRHSPGFQCYRYSKGMHAESCSISEKKVVAALEEYFEKLLSGMDFEYSYHSAETGEKISERESLLSELDKISNREKRIRIAYENEVDTLEEYKRNKERLQKDREDILMQLENLNKNNEDTKTKSDVLKNVQTVYDVIKNDAIDYGTKGIFMRSLVEDIVYDKKNSKLIFHLYIS

SEQ ID NO: 7421 - protein, 472 aa, Unknown
  Description of Unknown: Integrase B7422 sequence
  PTHR30461:SF3,IPR036162,PS51737,IPR011109,PTHR30461, PS00397,PF00239,G3DSA:1.10.10.2600,IPR006119,SSF53041, cd00338,SM00857,IPR025827,IPR038109,PS51736, IPR006118,PF13408,G3DSA:3.40.50.1390,Coil
MSKIIKNVKDKIIRVAIYIRVSTEEQAKHGYSIESQKSRLIEWAKEHNYQVVDIYADEGKSARTKISNRKELLRLLDDVKSDKIDRIIIWRLDRWFRNVADYYRIQDLLDKYNVDWECSDEEFNTSTSNGRLYLNIKLSIAQNESDQTSDRIKFNFENMVRNKRPISGALPIGYKIEGEKQNKRVVKDPELSQMAIDMFDKFEETLSLRATTQYLHDNYPQRPILYERVKHMLKNSMYHGVYRDVEDYCEPYISKERHQKIIDLINKNHRPNKHSDHFFIFSGLIRCYDCGRRMGGSRAGRNHVDGTRIRYGTYKCCNHFLDCRCSNNHTVNEDKLEKWLISNFLIMLNDYVISVESVEEKQIINKNVNKVERLKDKLDRLNELYLDGRITKEKYDNDYNTTQLKIQELDSVDVSIKKRNLEKYKKILKSNTILDLYNKLTRENKRLFWYEYIDYIVQDADDPVNNWHVFFK

SEQ ID NO: 7422 - protein, 472 aa, Unknown
  Description of Unknown: Integrase B7423 sequence
  PTHR30461:SF3,SM00857,IPR006118,G3DSA:1.10.10.2600,IPR036162, PS51737,G3DSA:3.40.50.1390,Coil,IPR006119,IPR038109, PF07508,IPR011109,SSF53041,PTHR30461,PS00397, PS51736,cd00338,PF00239
MKTAAAYIRVSTDDQIEYSPDSQLKAIRDYARKNDMILPEEFVFIDEGISGRKAEKRPEFMKMIGTAKMKPKQFDVILLWKFSRFARNREDSIVYKSMLRKQCGIDVISVSEQLGEDKTSILIEALIEAMDEYYSINLAEEVRRGMTEKAQRGEVVSAPPFGYDIKDNVFIPDPEAAPIVKMIFDKYLKGQGCLEIAKELNKMGIKTKHGNKWENRGVEYVLRNVVYTGKLTWTPIKTKTRDYNCKDTIISRGMHEPIIDQETFDKVQNMILEKKKLFPKHSRQSSNEFMLKGFLKCSNCGGALVYATNNRVQCNRYSKGTCEVSHSVSLSKLNSSVISALKSDLETQQFKIYKKAAEEQDNKDITPTLIAKERKKLERVKDAYEAGIDSLEEYRINKEKILKTIAELEKNKKPESSQKDDFQKLSKTIKKSLDILEDENCSESIKNITLRSFVRQIVYMKKTQSIEILYQI

SEQ ID NO: 7423 - protein, 472 aa, Unknown
  Description of Unknown: Integrase B7424 sequence
  IPR036162,PS51737,IPR011109,PTHR30461,PS00397, PF00239,G3DSA:1.10.10.2600,IPR006119,SSF53041,cd00338, SM00857,IPR025827,IPR038109,PS51736,IPR006118, PF13408,G3DSA:3.40.50.1390,PF07508,Coil
MSARYAYGYVRVSTDKQEELSPDSQEKLLREYAAKNNIIILKVFFEIGISGRKADKRPEFQKMIGLAKSSDHPVDVILVWKFSRFARNQEESIVYKSLLRKQSNVDVVSVSEPLIDGPFGSLIERIIEWMDEYYSIRLSGEVLRGMKEKATKKGYQMSPPFGYRAVGNGDPYKIDQDEMKIVDFICDEFDYHNSDVTKITRKLNDMGVRTRRGNPFESRSVERILKNPFYYGLVAWNGITFMGTHEVHYSKERFEARMKKIQTTYKPLKRRDVSSCKHWLSGILKCGYCGASLAYNGANRHSPGFQCYKYSKGIHAESCSISEKKVIAALEEYFEKLLSGMDFEYSYHSAETGEKISERESLLSELDKISNREKRVRLAYENEVDTLEEYKRNKERLQKDREDILEQLKNLDKNNEDTKTKSDVLKNVQTVYDVIKNDAIDYDTKGIFMRSLVEDIVYDKKNGKLIFHLYIS

SEQ ID NO: 7424 - protein, 472 aa, Unknown
  Description of Unknown: Integrase B7425 sequence
  IPR036162,PS51737,IPR011109,PTHR30461,PS00397, PF00239,G3DSA:1.10.10.2600,IPR006119,SSF53041,cd00338, SM00857,IPR025827,SSF90257,IPR038109,PS51736, IPR006118,PF13408,G3DSA:3.40.50.1390,PF07508,Coil
MSDRIGALYIRVSTDDQAELSPDAQKRLLLDYAKKNGIIISNDFIFSESVSGRHVQKRPEFQRMIGIAKQPSHPIDVILVWKYSRFARNQEESIVYKSMLKKDHVEVISVSEPLVDGPFGSLIERIIEWMDEYYSIRLSGEVLRGMKEKALRNGYQSSPCLGYEAVGHGKPFQINEAEYAMVSYIMDLYDNQNMDETAIARKCNDLGYKTKRGNPFERRTVDRILQNPFYCGIVSWNGVEFDGAHEVRISKERFDRRQKLIASRRRPMKARNVSTCKHWLSGLLKCSVCGATLSYTGNNKCPYFQCWKYAKGFHKTSVALSVKKAEEAVTAYFDQILSGTDFTYVRKDQPAADETAAIEQLQKELSKLSARESRIRDAYESGIDSLEEYKANKERLISNRLQLESELEKLRKEQEEKEVSKEDVLHEIKSVNDILKNPDVSYEEKGTLIRTIVDQIVYDKESGKMYFDIIVS

SEQ ID NO: 7425 - protein, 472 aa, Unknown
  Description of Unknown: Integrase B7426 sequence
  IPR036162,PS51737,IPR011109,PTHR30461,PS00397, PF00239,G3DSA:1.10.10.2600,IPR006119,SSF53041,cd00338, SM00857,IPR025827,IPR038109,PS51736,IPR006118, PF13408,G3DSA:3.40.50.1390,PF07508,Coil
MSVKYAYGYVRVSTDKQEELSPDSQEKLLREYAAKNNIVILKIFFELGISGRKADKRPEFQKMIGLAKSSDHPVDVILVWKFSRFARNQEESIVYKSLLRKQSNVDVVSVSEPLIDGPFGSLIERIIEWMDEYYSIRLSGEVLRGMKEKATKKGYQMSPPFGYRAVGNGDPYKIDPDEMKVVDFICDEFDYRNSDTTKITRKLNDMGVRTRRGNPFESRSVERILKNPFYYGLVAWNGITFMGTHEVHYSKERFEARMKKIQTTYKPLKRRDVSSCKHWLSGILKCGYCGASLAYNGANRHSPGFQCYKYSKGIHTESCSISEKRVIAALEEYFEKLLSGMDFEYSYHSAETGEKISERESLLSELDKISNREKRIRLAYENEVDTLEEYKRNKERLQKDREDILVQLENLDKNNEDTKTKSDVLKNVQTVYDVIKNDAIDYDTKGIFMRSLVEDIVYDKKNGKLVFHLYIS

SEQ ID NO: 7426 - protein, 472 aa, Unknown
  Description of Unknown: Integrase B7427 sequence
  IPR036162,PS51737,IPR011109,PTHR30461,PS00397, PF00239,G3DSA:1.10.10.2600,IPR006119,SSF53041,cd00338, SM00857,IPR025827,IPR038109,PS51736,IPR006118, PF13408,G3DSA:3.40.50.1390,PF07508,Coil
MSVKYAYGYVRVSTDKQEELSPDSQEKLLREYATKNNIVILKVFFELGISGRKADKRPEFQKMIGLAKSSDHPVDVILVWKFSRFARNQEESIVYKSLLRKQSNVDVVSVSEPLIDGPFGSLIERIIEWMDEYYSIRLSGEVLRGMKEKATKKGYQMSPPFGYRAVGNGDPYKIDQDEMKIVDFICDEFDYHNSDVTKITRKLNDMGVRTRRGNPFESRSVERILKNPFYYGLVAWNGITFMGTHEVHYSKERFEARMKKIQTTYKPLKRRDVSSCKHWLSGILKCGYCGASLSYNGANRHSPGFQCYKYSKGIHTESCSISEKKVIAALEEYFEKLLSGMDFEYSYHSAETGEKISERESLLSELDKISNREKRIRIAYENEVDTLEEYKRNKERLRKDREDILMQLENLNKNNEDAKTKSDVLKNVQTVYDVIKNDAIDYDTKGIFMRSLVEDIVYDKKNGKLVFHLYIS

SEQ ID NO: 7427 - protein, 472 aa, Unknown
  Description of Unknown: Integrase B7428 sequence
  IPR036162,PS51737,IPR011109,PTHR30461,PS00397, PF00239,G3DSA:1.10.10.2600,IPR006119,SSF53041,cd00338, SM00857,IPR025827,IPR038109,PS51736,IPR006118, PF13408,G3DSA:3.40.50.1390,PF07508,Coil
MSARYAYGYVRVSTDKQEELSPDSQEKLLREYAAKNNIIILKVFFEIGISGRKADKRPEFQKMIGLAKSSDHPVDVILVWKFSRFARNQEESIVYKSLLRKQSNVDVVSVSEPLIDGPFGSLIERIIEWMDEYYSIRLSGEVIRGMKEKATKKGYQMSPPFGYRAVGNGDPYKIDPDEMKVVDFICDEFDYRNSDTTKITRKLNDMGVRTRRGNPFESRSVERILKNPFYYGLVAWNGITFMGTHEVHYSKERFEARMKKIQTTYKPLKRRDVSSCKHWLSGILKCGYCGASLAYNGANRHSPGFQCYRYSKGMHAESCSISEKKVVAALEEYFEKLLSGMDFEYSYHSAETGEKISERESLLSELDKISNREKRIRIAYENEVDTLEEYKRNKERLQKDREDILMQLENLNKNNEDTKTKSDVLKNVQTVYDVIKNDAIDYGTKGIFMRSLVEDIVYDKKNSKLIFHLYIS

SEQ ID NO: 7428 - protein, 472 aa, Unknown
  Description of Unknown: Integrase B7429 sequence
  IPR036162,PS51737,IPR011109,PTHR30461,PS00397, PF00239,G3DSA:1.10.10.2600,IPR006119,SSF53041,cd00338, SM00857,IPR025827,IPR038109,PS51736,IPR006118, PF13408,G3DSA:3.40.50.1390,PF07508,Coil
MSARYAYGYVRVSTDKQEELSPDSQEKLLREYAAKNNIIILKVFFEIGISGRKADKRPEFQKMIGLAKSSDHPVDVILVWKFSRFARNQEESIVYKSLLRKQSNVDVVSVSEPLIDGPFGSLIERIIEWMDEYYSIRLSGEVLRGMKEKATKKGYQMSPPFGYRAVGNGDPYKIDPDEMKVVDFICDEFDYHNSDTTKITRKLNDMGVRTRRGNPFESRSVERILKNPFYYGLVAWNGITFMGTHEVHYSKERFEARMKKIQTTYKPLKRRDVSSCKHWLSGILKCGYCGASLAYNGANRHSPGFQCYKYSKGVHTESCSISEKKVIAALEEYFEKLLSGMDFEYSYHSAETGEKISERESLLSELDKISNREKRIRLAYENEVDTLEEYKRNKERLQKDREDILVQLENLDKNNEDTKTKSDVLKNVQTVYDVIKNDAIDYDTKGIFMRSLVEDIVYDKKNGKLVFHLYIS

SEQ ID NO: 7429 - protein, 472 aa, Unknown
  Description of Unknown: Integrase B7430 sequence
  PTHR30461:SF3,IPR036162,PS51737,IPR011109,PTHR30461, PS00397,PF00239,G3DSA:1.10.10.2600,IPR006119,SSF53041, cd00338,SM00857,IPR025827,IPR038109,PS51736, IPR006118,PF13408,G3DSA:3.40.50.1390,Coil
MSKIIKNVKDKIIRVAIYIRVSTEEQAKHGYSIKSQKSRLIEWAKEHNYQVVDIYADEGKSARTKISNRKELLRLLDDVKSDKIDRIIIWRLDRWFRNVADYYRIQDLLDKYNVDWECSDEEFNTSTSNGRLYLNIKLSIAQNESDQTSDRIKFNFENMVRNKRPISGALPIGYKIEGEKQNKRVVKDPELSQMAIDMFDKFEETLSLRATTQYLHDNYPQRPILYERVKHMLKNSMYHGVYRDVEDYCEPYISKERHQKIIDLINKNHRPNKHSDHFFIFSGLIRCYDCGRRMGGSRAGRNHVDGTRIRYGTYKCCNHFLDCRCSNNHTVNEDKLEKWLISNFLIMLNDYVISVESVEEKQIINKNVNKVERLKDKLDRLNELYLDGRITKEKYDNDYNTTQLKIQELDSVDVSIKKRNLEKYKKILKSNTILDLYNKLTRENKRLFWYEYIDYIVQDAEDPVNNWHVFFK

SEQ ID NO: 7430 - protein, 472 aa, Unknown
  Description of Unknown: Integrase B7431 sequence
  IPR036162,PS51737,IPR011109,PTHR30461,PS00397, PF00239,G3DSA:1.10.10.2600,IPR006119,SSF53041,cd00338, SM00857,IPR025827,IPR038109,PS51736,IPR006118, PF13408,G3DSA:3.40.50.1390,PF07508,Coil
MSDRIGALYIRVSTDDQAELSPDAQKRLLLDYAKKNGIIISNDFIFSESVSGRHVQKRPEFQRMIGIAKQPSHPIDVILVWKYSRFARNQEESIVYKSMLKKDHVDVISISEPLIDGPFGSLIERIIEWMDEYYSIRLSGEVLRGMKEKALQNGYQSSPCLGYEAVGHGKPYQINEAEYAMVSYIMDLYDNQNMDETAIARKCNDLGYKTKRGNPFERRTIDRILQNPFYCGIVSWNGVEFEGAHEVRISKERFDRRQRLIASRKRPMKARNVSTCKHWLSGLLKCSVCGATLSYTGNGKCPYFQCWKYAKGFHKTSVALSVKKAEEAVISYFDQILSGTDFTYVRKDQPATDETVAIEQLQKELSKLSTREIRIRDAYESGIDSLEEYKANKERLISNRLQLETGLEKLRKEQEEKEVNKEDVLHEIKSVNDILKNPDVSYEEKGTLIRTIVDQIVYDKESGKMYFDIIVS

SEQ ID NO: 7431 - protein, 472 aa, Unknown
  Description of Unknown: Integrase B7432 sequence
  PTHR30461:SF3,cd00338,SM00857,IPR006118,G3DSA:1.10.10.2600, IPR036162,PS51737,G3DSA:3.40.50.1390,IPR006119,IPR038109, PF07508,IPR011109,SSF53041,PTHR30461,PS00397, PS51736,Coil,PF00239
MVKYAYGYIRVSTDKQEELSPDSQEKLLREYAAKNNIIILKFFYELGVSGRKADKRPEFQAMIGLAKSPDHPVDLILVWKFSRFARNQEESIVYKSLLRQKSNVDVVSVSEPLIDGPFGSLIERIIEWMDEYYSIRLSGEVLRGMREKAEKNGYQLKPPLGYQAVGGGKPYVINEEEYKIYQFIADEYDFHNTNFSTIARKLNALGLRTRLGRPFELRTIRRLLQNPFYYGLVIWNGVSFMGTHEVRLTKERFDSRMEKMQSQYVPIHRREVSSCQHWISGLLKCGYCGATMCFNGSRTSVTGFQCYKYSKGIHKESCFITERKVLAAVEEYFEKLLDGMDFEYTYRPPKSANSLSERDPLLQELKKIAVREERIKLAYENGIDSIEEYKQNKDRINQAKADIQLQLDELDSSIQKSATTKEDVLAKVKTVYDVIKDPDVDMETKGNFMRSLVEDIVYDKENGKLIFHLYSS

SEQ ID NO: 7432 - protein, 472 aa, Unknown
  Description of Unknown: Integrase B7433 sequence
  IPR036162,PS51737,IPR011109,PTHR30461,PS00397, PF00239,G3DSA:1.10.10.2600,IPR006119,SSF53041,cd00338, SM00857,IPR025827,IPR038109,PS51736,IPR006118, PF13408,G3DSA:3.40.50.1390,PF07508,Coil
MSARYAYGYVRVSTDKQEELSPDSQEKLLREYAAKNNIIILKVFFEIGISGRKADKRPEFQKMIGLAKSSDHPVDVILVWKFSRFARNQEESIVYKSLLRKQSNVDVVSVSEPLIDGPFGSLIERIIEWMDEYYSIRLSGEVLRGMKEKATKKGYQMSPPFGYRAVGNGDPYKIDQDEMKIVDFICDEFDYRNSDTTKITRKLNDMGVRTRRGNPFESRSVERILKNPFYYGLVAWNGITFMGTHEVHYSKERFEARMKKIQTTYKPLKRRDVSSCKHWLSGILKCGYCGASLAYNGANRHSPGFQCYKYSKGIHTESCSISEKKVIAALEEYFEKLLSGMDFEYSYHSAETGAKISERESLLSELDKISNREKRIRLAYENEVDTLEEYKRNKERLQKDREDILMQLENLNKNNEDTKTKSDVLKNVQTVYDVIKNDAIDYGTKGIFMRSLVEDIVYDKKNGKLIFHLYIS

SEQ ID NO: 7433 - protein, 472 aa, Unknown
  Description of Unknown: Integrase B7434 sequence
  cd03768,PTHR30461:SF3,SM00857,G3DSA:1.10.10.2600,IPR036162, PF13408,IPR025827,G3DSA:3.40.50.1390,PS51737,IPR006119, IPR038109,PF07508,IPR011109,SSF53041,PTHR30461, PS51736,Coil,PF00239
MQTKRKVAIYSRVSTLHQAEEGYSIGQQIEALTKYCQAMGWVIYDNYSDGGFSGGKLERPAMQKMIQDAESGKFDTVVVYKLDRLSRNVRDTLYLVKDVFNANNVDFVSLQENIDTKSAMGNLFITLLSAIAEFEREQIKERMQLGVKGRAKSGKTTSWHTPPYGYVYNQETQMLNIEPFAAETVKNIFDKLNSGWSIMEITTFLRKNHPDNWRPTKVTRILSNISYTGKVKYKGEIFDGLHEPIISDETYTRAQQMLRERSEKATNTRAFQGKYLLSRIVKCGYCGAPLQIDSYRPKKDGTRTRTYSCPNRFTGRAKATIYNNGKFCEKSRRHKADDIEKYVLTEISKLQLNPKIIESLYKGKPEANLDTYYNQLKKVNDKLSKLNDLYINSLIDLDNLKEKSDKILKEKNSIEEIIAKNKNKPNNKPAFEKVIKMEDISTMTYEEQKKIVRMLVSRVEVTPDEIRLIFKL

SEQ ID NO: 7434 - protein, 472 aa, Unknown
  Description of Unknown: Integrase B7435 sequence
  IPR036162,PS51737,IPR011109,PTHR30461,PS00397, PF00239,G3DSA:1.10.10.2600,IPR006119,SSF53041,cd00338, SM00857,IPR025827,IPR038109,PS51736,IPR006118, PF13408,G3DSA:3.40.50.1390,PF07508,Coil
MSARYAYGYVRVSTDKQEELSPDSQEKLLREYAAKNNIIILKVFFEIGISGRKADKRPEFQKMIGLAKSSDHPVDVILVWKFSRFARNQEESIVYKSLLRKQSNVDVVSVSEPLIDGPFGSLIERIIEWMDEYYSIRLSGEVLRGMKEKATKKGYQMSPPFGYRAVGNGDPYKIDPDEMKVVDFICDEFDYHNSDTTKITRKLNDMGVRTRRGNPFESRSVERILKNPFYYGLVAWNGITFMGTHEVHYSKERFEARMKKIQTTYKPLKRRDVSSCKHWLSGILKCGYCGASLAYNGANRHSPGFQCYKYSKGVHTESCSISEKKVIAALEEYFEKLLSGMDFEYSYHSAETGEKISERESLLSELDKISNREKRIRLAYENEVDTLEEYKRNKERLQKDREDILMQLENLDKNNGDTKTKSDVLKNVQTVYDVIKNDAIDYDTKGIFMRSLVEDIVYDKKNGKLIFHLYIS

SEQ ID NO: 7435 - protein, 472 aa, Unknown
  Description of Unknown: Integrase B7436 sequence
  IPR036162,PS51737,IPR011109,PTHR30461,PS00397, PF00239,G3DSA:1.10.10.2600,IPR006119,SSF53041,cd00338, SM00857,IPR025827,IPR038109,PS51736,IPR006118, PF13408,G3DSA:3.40.50.1390,PF07508,Coil
MSARYAYGYVRVSTDKQEELSPDSQEKLLREYAAKNNIIILKVFFEIGISGRKADKRPEFQKMIGLAKSSDHPVDVILVWKFSRFARNQEESIVYKSLLRKQSNVDVVSVSEPLIDGPFGSLIERIIEWMDEYYSIRLSGEVLRGMKEKATKKGYQMSPPFGYRAVGNGDHYKIDPDEMKVVDFICDEFDYHNSDVTKITRKLNDMGARTRRGNPFESRSVERILKNPFYYGLVAWNGITFMGTHEVHYSKERFEARMKKIQTTYKPLKRRDVSSCKHWLSGILKCGYCGASLAYNGANRHSPGFQCYKYSKGIHTESCSISEKKVIAALEEYFEKLLSGMDFEYSYHSAETGEKISERESLLSELDKISNREKRIRLAYENEVDTLEEYKRNKERLQKDREDILMQLENLNKNNEDTKTKSDVLKNVQTVYDVIKNDAIDYGTKGIFMRSLVEDIVYDKKNSKLIFHLYIS

SEQ ID NO: 7436 - protein, 472 aa, Unknown
  Description of Unknown: Integrase B7437 sequence
  IPR036162,PS51737,IPR011109,PTHR30461,PS00397, PF00239,G3DSA:1.10.10.2600,IPR006119,SSF53041,cd00338, SM00857,IPR025827,SSF90257,IPR038109,PS51736, IPR006118,PF13408,G3DSA:3.40.50.1390,PF07508,Coil
MSDRIGALYIRVSTDDQAELSPDAQKRLLLDYAKKNAIIISNDFIFSESVSGRHVQKRPEFQRMIGIAKQPSHPIDVILVWKYSRFARNQEESIVYKSMLKKDHVEVISVSEPLIDGPFGSLIERIIEWMDEYYSIRLSGEVLRGMKEKALRNGYQSSPCLGYEAVGHGKPYQINEAEYAMVSYIMDLYDNQNMDETAIARKCNDLGYKTKRGNPFERRTIDRILQNPFYCGIVSWNGVEFEGAHEVRISKERFDRRQRLITSRKRPMKARNISTCKHWLSGLLKCSVCGATLSYTGNGKCPYFQCWKYAKGFHKTSVALSVKKAEEAVIEYFDQVLAGADFTYVRKEQPAADETAAIEQLQKELSKLSARESRIRDAYESGIDSLEEYKANKERLISNRLQLETELEKLRKEQAEKEVNKEDVLHEIKSVNDILKNPDVSYEEKGTLIRTIVDQIVYDKESGKMYFDIIVS

SEQ ID NO: 7437 - protein, 472 aa, Unknown
  Description of Unknown: Integrase B7438 sequence
  PTHR30461:SF3,cd00338,G3DSA:1.10.10.2600,IPR036162,PF13408, IPR025827,G3DSA:3.40.50.1390,PS51737,IPR006119,IPR038109, PF07508,IPR011109,SSF53041,PTHR30461,Coil, PF00239
MVIVWKLDRFARNRYDSAHYKATLRRNGVKVVSATEVISEGAEGIILESVLEGYAEYYSAELSEKVIRGMTENALKCQYNGGYIPVGYKVDENKHYQIDELTAPFVKEAFLMYVNGRHIKKIVEYFNENGIRSSRNKPMTKTTVSTILQNRKYIGEYQYRDIVVSDGIPAIISRELFALAQQRTEQNKYAPSASRSEIKYLLTGKLMCGDCGSVYAGESGTGRTGQKYHYYKCVKAKKRDGCERKAIKKDEVEEAVIEATVENIFVDEVIEEIADRVISWQEKESTLVPLYQRELAEVEKSIANLLSAIEQGIITSATKNRMAELESLKIDLEVKIAREEIQTQILTKDQVKFWLKNMEKLDLASIDNRQRIINTFVNSIYVYEDRFEVNFNCREGFETIPLDIERFVSRLEIVGEPKQKHTNRFDNMRLYGNQKASGITSRRFSFATNKKISRPQPRAGENFIRTCSVPCG

SEQ ID NO: 7438 - protein, 472 aa, Unknown
  Description of Unknown: Integrase B7439 sequence
  IPR036162,PS51737,IPR011109,PTHR30461,PS00397, PF00239,G3DSA:1.10.10.2600,IPR006119,SSF53041,cd00338, SM00857,IPR025827,IPR038109,PS51736,IPR006118, PF13408,G3DSA:3.40.50.1390,PF07508,Coil
MVKYAYGYIRVSTDKQEELSPDSQEKLLREYAAKNNIIILKFFYELGVSGRKADKRPEFQSMIGLAKSSDHPVDLILVWKFSRFARNQEESIVYKSLLRQKSNVDVVSVSEPLVDGPFGSLIERIIEWMDEYYSIRLSGEVLRGMREKAEQNGYQFVPPLGYQAVGGGKPFVINEDEYKIYQYISDEYDLRNTSVSTIARKLNALGFHTRRGKPFELRSIKRLLQNPFYYGLVVWNGVSFIGPHEVRITKERFDARMQKMQSQYTPTRRREVSSCRHWLSGLLKCGYCGATMCFNGARASVTGFQCYKYSKGLHKESCFITEKKVLSAIEEYFEKLLDGMDFEYAYHPPKSAEFLSEREPLLQELKRIAMREDRIRSAYENGIDTLEEYKQNRERIKQARNDIQSQLDELNNSSAKSPVTKEDILAKVKTVYDVIQDPDVDMETKGAFMRSLVEDIIYDKENGKMIFHLYSS

SEQ ID NO: 7439 - protein, 472 aa, Unknown
  Description of Unknown: Integrase B7440 sequence
  PTHR30461:SF3,IPR036162,PS51737,IPR011109,PTHR30461, PS00397,PF00239,G3DSA:1.10.10.2600,IPR006119,SSF53041, cd00338,SM00857,IPR025827,IPR038109,PS51736, IPR006118,PF13408,G3DSA:3.40.50.1390,PF07508,Coil
MKIAAAYVRVSTEDQTELSPTSQIKQIREYAKNHGYIVPDEYVFADEGISGKNTQKRPAFNRMIGLAKTKPKPFECILLWKYSRFARNREDSIVYKSMLRKQLGIDVISISESLGDDKMSILIEALIEAMDEYYSINLAEEVKRGMTERVSRGEAVSVPAYGYDIEEGKYIINEAEAEVVRQIFSDFNGGVGTVTIARNLNAIGIKTKRGKLWENRTVKYILHNPVYIGKIRWNPEEITGLNYDHEKIMLVDGVHEPLLTKELWDSVQEKLSLMKRTRKPREKSNPTPDYMLYGLIRCGSCGGTLTQSRDGLQCHKYAHGTCNTSHYISLSKANAAVIDLIQHTLENGIFTLTPKKQDISTQQIAMIDKQIQNEKNKLLRVKEAFEYGVDTLEEYKENKNKILQKISELESSKPAQQTNIDKKKFAQKYLGVMDTLKDDTVSEADKNHILRQFVEKIVLHCPSNEIEIFYHY

SEQ ID NO: 7440 - protein, 472 aa, Unknown
  Description of Unknown: Integrase B7441 sequence
  IPR036162,PS51737,IPR011109,PTHR30461,PS00397, PF00239,G3DSA:1.10.10.2600,IPR006119,SSF53041,cd00338, SM00857,IPR025827,IPR038109,PS51736,IPR006118, PF13408,G3DSA:3.40.50.1390,PF07508,Coil
MSARYAYGYVRVSTDKQEELSPDSQEKLLREYAAKNNIIILKVFFEIGISGRKADKRPEFQKMIGLAKSSDHPVDVILVWKFSRFARNQEESIVYKSLLRKQSNVDVVSVSEPLIDGPFGSLIERIIEWMDEYYSIRLSGEVIRGMKEKATKKGYQMSPPFGYRAVGNGDPYKIDPDEMKVVDFICDEFDYRNSDTTKITRKLNDMGVRTRRGNPFESRSVERILKNPFYYGLVAWNGITFMGTHEVHYSKERFEARIKKIQTTYKPLKRRDVSSCKHWLSGILKCGYCGASLAYNGANRHSPGFQCYKYSKGIHTESCSISEKKVIAALEEYFEKLLSGMDFEYSYHSAETGEKISERESLLSELDKISNREKRIRIAYENEVDTLEEYKRNKERLQKDREDILMQLENLNKNNEDTKTKSDVLKNVQTVYDVIKNDAIDYGTKGIFMRSLVEDIVYDKKNSKLIFHLYIS

SEQ ID NO: 7441 - protein, 472 aa, Unknown
  Description of Unknown: Integrase B7442 sequence
  IPR036162,PS51737,IPR011109,PTHR30461,PS00397, PF00239,G3DSA:1.10.10.2600,IPR006119,SSF53041,cd00338, SM00857,IPR025827,SSF90257,IPR038109,PS51736, IPR006118,PF13408,G3DSA:3.40.50.1390,PF07508,Coil
MSDRIGALYIRVSTDDQAELSPDAQKRLLLDYAKKNGIIISNDFIFSESVSGRHVQKRPEFQRMIGIAKQPSHPIDVILVWKYSRFARNQEESIVYKSMLKKDHVEVISVSEPLVDGPFGSLIERIIEWMDEYYSIRLSGEVLRGMKEKALRNGYQSSPCLGYEAVGHGKPFQINEAEYAMVSYIMDLYDNQNMDETAIARKCNDLGYKTKRGNPFERRTIDRILQNPFYCGIVSWNGVEFEGAHEVRISKERFDRRQRLITSRKRPMKARNISTCKHWLSGLLKCSVCGATLSYTGNGKCPYFQCWKYAKGFHKTSVALSVKKAEEAVIEYFDQVLAGADFTYVRKEQPAADETAAIEQLQKELSKLSARESRIRDAYESGIDSLEEYKANKERLISNRLQLETGLEKLRKEQEEKEVNKEDVLHEIKSLNDILKNPDVSYEEKGTLIRTIVDQIVYDKESGKMYFDIIVS

SEQ ID NO: 7442 - protein, 472 aa, Unknown
  Description of Unknown: Integrase B7443 sequence
  IPR036162,PS51737,IPR011109,PTHR30461,PS00397, PF00239,G3DSA:1.10.10.2600,IPR006119,SSF53041,cd00338, SM00857,IPR025827,IPR038109,PS51736,IPR006118, PF13408,G3DSA:3.40.50.1390,PF07508,Coil
MNDRTGALYIRVSTEDQTELSPDAQKRLLLDYAKKNNIIISNDFIFSESVSGRHVQKRPEFQKMIAIAKQSSHPIDVILVWKYSRFARNQEESIVYKSMLKKDNVDVISVSEPLIDGPFGTLIERIIEWMDEYYSIRLSGEVLRGMKEKALQNGYQMSPPLGYEAVGHGKPYKINEAEYAIVSYVMDLYDNQNMDETAIARKCNDMGYRTKRGKLFERRSVDRILSNSFYCGIVRWNGVEFEGPHEIRLSKERFLNRQKLITARKRPVKARSVSACKHWLSGLLKCPVCGATLSYTGNNKCPYFQCWKYAKGFHKTSIALSVKKAEELVLSYFDSVLAGAEFSYIRKNPATNNNTAAIEQLQRELSRYDVKEKRIRDAYESEIDTLEEYRANKERLANERLQVEKELELLLCEQSENAVNKEEVLCEIKSVNDVLKNPDVGYEEKGNLIRTIVDQIVYDKESGKMYFDIIVS

SEQ ID NO: 7443 - protein, 472 aa, Unknown
  Description of Unknown: Integrase B7444 sequence
  PTHR30461:SF3,SM00857,G3DSA:1.10.10.2600,IPR036162,PF13408, IPR025827,G3DSA:3.40.50.1390,PS51737,IPR006119,IPR038109, PF07508,IPR011109,SSF53041,PF00239,PTHR30461, PS51736,Coil,cd00338
MNTKRKVAIYSRVSTLHQAEEGYSIGQQIEALTKYCQAMGWVIYDNYSDGGFSGGKLERPAMQKMIQDAESGKFDTVVVYKLDRLSRNVRDTLYLVKDVFNANNVDFVSLQENIDTKSAMGNLFITLLSAIAEFEREQIKERMQLGVKGRAKSGKTTSWHTPPYGYIYNQETQMLNIEPFAAETVKNIFDKLNSGWSIMEITTFLRKNHPDNWRPTKVTRILSNISYTGKVKYKGEIFDGLHEPIISDETYTRAQQMLRERSEKATNTRAFQGKYLLSRIVKCGYCGAPLQIDSYRPKKDGTKTRTYSCPNRFTGRAKATIYNNGKFCEKSRRHKADDIEKYVLTEISKLQLNPKIIESLYKGKPEANLDTYYNQLKKVNDKLSKLNDLYINGLIDLDNLKEKSDKILKEKNSIEEIIAKNKNRPNNKPAFEKVIKMEDISTMTYEEQKKIVRMLVSRVEVTPDEIRLIFKL

SEQ ID NO: 7444 - protein, 472 aa, Unknown
  Description of Unknown: Integrase B7445 sequence
  IPR036162,PS51737,IPR011109,PTHR30461,PS00397, PF00239,G3DSA:1.10.10.2600,IPR006119,SSF53041,cd00338, SM00857,IPR025827,IPR038109,PS51736,IPR006118, PF13408,G3DSA:3.40.50.1390,PF07508,Coil
MSARYAYGYVRVSTDKQEELSPDSQEKLLREYAAKNNIIILKVFFEIGISGRKADKRPEFQKMIGLAKSSDHPVDVILVWKFSRFARNQEESIVYKSLLRKQSNVDVVSVSEPLIDGPFGSLIERIIEWMDEYYSIRLSGEVLRGMKEKATKKGYQMSPPFGYRAVGNGDPYKIDQDEMKIVDFICDEFDYHNSDVTKITRKLNDMGVRTRRGNPFESRSVERILKNPFYYGLVAWNGITFMGTHEVHYSKERFEARMKKIQTTYKPLKRRDVSSCKHWLSGILKCGYCGASLAYNGANRHSPGFQCYKYSKGIHTESCSISEKKVIAALEEYFEKLLSGMDFEYSYHSAETGEKISERESLLSELDKISNREKRVRLAYENEVDTLEEYKRNKERLQKDREDILEQLKNLDKNNEDTKTKSDVLKNVQTVYDVIKNDAIDYDTKGIFMRSLVEDIVYDKKNGKLIFHLYIS

SEQ ID NO: 7445 - protein, 472 aa, Unknown
  Description of Unknown: Integrase B7446 sequence
  IPR036162,PS51737,IPR011109,PTHR30461,PS00397, PF00239,G3DSA:1.10.10.2600,IPR006119,SSF53041,cd00338, SM00857,IPR025827,IPR038109,PS51736,IPR006118, PF13408,G3DSA:3.40.50.1390,PF07508,Coil
MSVKYAYGYVRVSTDKQEELSPDSQEKLLREYATKNNIVILKVFFELGISGRKADKRPEFQKMIGLAKSSDHPVDVILVWKFSRFARNQEESIVYKSLLRKQSNVDVVSVSEPLIDGPFGSLIERIIEWMDEYYSIRLSGEVLRGMKEKATKKGYQMSPPFGYRAVGNGDPYKIDLDEMKIVDFICDEFDYRNSDTTKITRKLNDMGVRTRRGNPFESRSVERILKNPFYYGLVAWNGITFMGTHEVHYSKERFEARIKKIQTTYKPLKRRDVSSCKHWLSGILKCGYCGASLAYNGANRHSPGFQCYKYSKGIHTESCSISEKKVIAALEEYFEKLLSGMDFEYSYHSAETGEKISERESLLAELDKISNREKRIRLAYENEVDTLEEYKRNKERLQKDREDILMQLENLNKNNEDTKTKSDVLKNVQTVYDVIKNDAIDYGTKGIFMRSLVEDIVYDKKNSKLIFHLYIS

SEQ ID NO: 7446 - protein, 472 aa, Unknown
  Description of Unknown: Integrase B7447 sequence
  PTHR30461:SF3,SM00857,IPR006118,IPR036162,PF13408, IPR025827,G3DSA:3.40.50.1390,Coil,PS51737,IPR006119, SSF53041,IPR011109,PTHR30461,PS00397,PS51736, cd00338,PF00239
MQEKIQRCAIYIRVSTAEQAMHGKSLEAQTEYLTNYAHQHNMVIVGVFADEGKTARKNFKDRKAIKALLKLVKEDAIDIIIFWKMDRWFRNVSDFYKVQDILDAHQVKWIATAEPNMNLDTREGRLNLNIMLSINQNETDTTSERIRFVNEASVRQGKVVSGAQPFGFMIKIFEDGKKKVVKDPDTESIVDEFYEYYFVHQSKRGAFVYLCNKYGPVITMRQVEKLCNNTMYYGRYRDNYNYCPAYITEEQYNQLQEINKRNIKLYMSYEETGEIYLFTGLIPCPICGRPLSANRTTKNSHTGKPFKRAYRYYRCQNWIYKKTCTYSKLANEATIEKYLLDHIEEAKRQYLNEIIVYNSVSEKVPVEKKKNDKEKLLKELDRLNNMYQKGRISEDKYDAEYDRINNELKAITEIPVPRIKRSVEELEAILCEDWKNMYDKLSRENKRAFWRSLIAEIRLNEDSSFVKSIELI

SEQ ID NO: 7447 - protein, 472 aa, Unknown
  Description of Unknown: Integrase B7448 sequence
  IPR036162,PS51737,IPR011109,PTHR30461,PS00397, PF00239,G3DSA:1.10.10.2600,IPR006119,SSF53041,cd00338, SM00857,IPR025827,IPR038109,PS51736,IPR006118, PF13408,G3DSA:3.40.50.1390,PF07508,Coil
MSARYAYGYVRVSTDKQEELSPDSQEKLLREYAAKNNIIILKVFFEIGISGRKADKRPEFQKMIGLAKSSDHPVDVILVWKFSRFARNQEESIVYKSLLRKQSNVDVVSVSEPLIDGPFGSLIERIIEWMDEYYSIRLSGEVLRGMKEKATKKGYQMSPPFGYRAVGNGDPYKIDPDEMKVVDFICDEFDYRNSDATKITRKLNDMGVRTRRGNPFESRSVERILKNPFYYGLVAWNGITFMGTHEVHYSKERFEARMKKIQTTYKPLKRRDVSSCKHWLSGILKCGYCGASLAYNGANRHSPGFQCYKYSKGIHTESCSISEKKVIAALEEYFEKLLSGMDFEYSYHSAETGEKISERESLLSELDKISNREKRIRLAYENEVDTLEEYKRNKERLQKDREDILMQLENLNKNNEDTKTKSDVLKNVQTVYDVIKNDAIDYDTKGIFMRSLVEDIVYDKKNGKLIFHLYIS

SEQ ID NO: 7448 - protein, 472 aa, Unknown
  Description of Unknown: Integrase B7449 sequence
  cd03768,PTHR30461:SF3,SM00857,G3DSA:1.10.10.2600,IPR036162, PF13408,PS51737,G3DSA:3.40.50.1390,IPR025827,IPR006119, IPR038109,PF07508,IPR011109,SSF53041,PTHR30461, PS51736,Coil,PF00239
MNSKRKVAIYSRVSTLHQAEEGYSIGQQIEALTKYCQAMGWVIYDNYSDGGFSGGKLERPAMQKMIQDAKSGKFDTVVVYKLDRLSRNVRDTLYLVKDVFNANNVDFVSLQENIDTKSAMGNLFITLLSAIAEFEREQIKERMQLGVKGRAKSGKTTAWTTPPFGYKYDTNTQSMTVDHYQAEIVRDMFNKIISGWSIMGITTYMRENYDGKWTHVKVKRILENITYIGKVKYRNEIFEGEHTPILPEELFSKAQKALEERTNKKDNTRPFQGLYMLSHIAKCGYCGTPLKIDTYKPRKDGTRKRTYTCINKNPKRIKTATYNDGKQCKESGRYDVKDVERYVLNEISKLQLNPKSIESLYRDKPEENITAHQERLKKLETKLSKLNDLYINELISMEALKQKSAELLKEKSSLETFINNNKRKINNKPAFEKVAKMDDVFKMSYDDQKKIVKTLIKRVEVKRDEINIIFKL

SEQ ID NO: 7449 - protein, 472 aa, Unknown
  Description of Unknown: Integrase B7450 sequence
  IPR036162,PS51737,IPR011109,PTHR30461,PS00397, PF00239,G3DSA:1.10.10.2600,IPR006119,SSF53041,cd00338, SM00857,IPR025827,IPR038109,PS51736,IPR006118, PF13408,G3DSA:3.40.50.1390,PF07508,Coil
MSVKYAYGYVRVSTDKQEELSPDSQEKLLREYATKNNIVILKVFFELGISGRKADKRPEFQKMIGLAKSSDHPVDAILVWKFSRFARNQEESIVYKSLLRKQSNVDVVSVSEPLIDGPFGSLIERIIEWMDEYYSIRLSGEVLRGMKEKATKKGYQMSPPFGYRAVGNGDPYKIDQDEMKIVDFICDEFDYHNSDVTKITRKLNDMGVRTRRGNPFESRSVERILKNPFYYGLVAWNGITFMGTHEVHYSKERFEARMKKIQTTYKPLKRRDVSSCKHWLSGILKCGYCGASLAYNGANRHSPGFQCYRYSKGMHAESCSISEKKVVAALEEYFEKLLSGMDFEYSYHSAETGEKISERESLLSELDKISNREKRIRIAYENEVDTLEEYKRNKERLQKDREDILMQLENLDKNNEDTKTKSDVLKNVQTVYDVIKNDAIDYDTKGVFMRSLVEDIVYDKKNGKLVFHLYIS

SEQ ID NO: 7450 - protein, 472 aa, Unknown
  Description of Unknown: Integrase B7451 sequence
  PTHR30461:SF3,SM00857,G3DSA:1.10.10.2600,IPR036162,PF13408, PS51737,IPR025827,G3DSA:3.40.50.1390,IPR006119,IPR038109, PF07508,IPR011109,SSF53041,PTHR30461,Coil, PS51736,cd00338,PF00239
MNTKRKVAIYSRVSTLHQAEEGYSIGQQIEALTKYCQAMGWVIYDNYSDGGFSGGKLERPAMQKMIQDAKSGKFDTVVVYKLDRLSRNVRDTLYLVKDVFNANNVDFVSLQENIDTKSAMGNLFITLLSAIAEFEREQIKERMQLGVKGRAKSGKTTSWTTPPFGYEYDTNTQLMTINHYQAEIVRDMFNKIISGWSIMGITTYMRENYDGKWTHVKVKRILENITYIGKVKYRNEIFEGEHTPILPEELFYKAQKALEERTNKKDNTRPFQGLYMLSHIAKCGYCGTPLKIDTYKPRKDGTRKRTYTCINKNPKRIKTAIYNDGKQCKESGRYDVKDVERYVLNEISELQLNPKSIESLYKDKPEENITAHQEQLKKLENKLSKLNDLYINELISMEALKQKSAELLKEKSSLETFINNNKRKINNKPAFEKVAKMDDVFKMSYDDQKKIVKTLIKRVEVKRDEINVIFKL

SEQ ID NO: 7451 - protein, 472 aa, Unknown
  Description of Unknown: Integrase B7452 sequence
  IPR036162,PS51737,IPR011109,PTHR30461,PS00397, PF00239,G3DSA:1.10.10.2600,IPR006119,SSF53041,cd00338, SM00857,IPR025827,IPR038109,PS51736,IPR006118, PF13408,G3DSA:3.40.50.1390,PF07508,Coil
MSARYAYGYVRVSTDKQEELSPDSQEKLLREYAAKNNIIILKVFFEIGISGRKADKRPEFQKMIGLAKSSDHPVDVILVWKFSRFARNQEESIVYKSLLRKQSNVDVVSVSEPLIDGPFGSLIERIIEWMDEYYSIRLSGEVLRGMKEKATKKGYQMSPPFGYRAVGNGDPYKIDPDEMKVVDFICDEFDYLNSDATKITRKLNDMGARTRRGNPFESRSVERILKNPFYYGLVAWNGITFMGTHEVHYSKERFEARMKKIQTTYKPLKRRDVSSCKHWLSGILKCGYCGASLAYNGANRHSPGFQCYKYSKGIHTESCSISEKKVIAALEEYFEKLLSGMDFEYSYHSAETGEKISERESLLSELDKISNREKRIRLAYENEVDTLEEYKRNKERLQKDREDILMQLENLNKNNEDTKTKSDVLKNVQTVYDVIKNDAIDYGTKGIFMRSLVEDIVYDKKNSKLIFHLYIS

SEQ ID NO: 7452 - protein, 472 aa, Unknown
  Description of Unknown: Integrase B7453 sequence
  IPR036162,PS51737,IPR011109,PTHR30461,PS00397, PF00239,G3DSA:1.10.10.2600,IPR006119,SSF53041,cd00338, SM00857,IPR025827,IPR038109,PS51736,IPR006118, PF13408,G3DSA:3.40.50.1390,PF07508,Coil
MSARYAYGYVRVSTDKQEELSPDSQEKLLREYAAKNNIIILKVFFELGISGRKADKRPEFQKMIGLAKSTDHPVDVILVWKFSRFARNQEESIVYKSLLRKQSNVDVVSVSEPLIDGPFGSLIERIIEWMDEYYSIRLSGEVLRGMKEKATKKGYQMSPPFGYRAVGNGDPYKIVPDEMKVVDFICDEFDYRNSDTTKITRKLNDMGVRTRRGNPFESRSVERILKNPFYYGLVAWNGITFMGTHEVHYSKERFEARMKKIQTTYKPLKRRDVSSCKHWLSGILKCGYCGASLAYNGANRHSPGFQCYKYSKGIHTESCSISEKKVIAALEEYFEKLLSGMDFEYSYHSAETGAKISERESLLSELDKISNREKRIRLAYENEVDTLEEYKRNKERLQKDREDILMQLENLNKNNEDTKTKSDVLKNVQTVYDVIKNDAIDYGTKGVFMRSLVEDIVYDKKNGKLIFHLYIS

SEQ ID NO: 7453 - protein, 472 aa, Unknown
  Description of Unknown: Integrase B7454 sequence
  IPR036162,PS51737,IPR011109,PTHR30461,PS00397, PF00239,G3DSA:1.10.10.2600,IPR006119,SSF53041,cd00338, SM00857,IPR025827,IPR038109,PS51736,IPR006118, PF13408,G3DSA:3.40.50.1390,PF07508,Coil
MSARYAYGYVRVSTDKQEELSPDSQEKLLREYAAKNNIIILKVFFEIGISGRKADKRPEFQKMIGLAKSSDHPVDVILVWKFSRFARNQEESIVYKSLLRKQSNVDVVSVSEPLIDGPFGSLIERIIEWMDEYYSIRLSGEVLRGMKEKATKKGYQMSPPFGYRAVGNGDPYKIDPDEMKVVDFICDEFDYHNSDTTKITRKLNDMGVRTRRGNPFESRSVERILKNPFYYGLVAWNGITFMGTHEVHYSKERFEARMKKIQTTYRPLKRRDVSSCKHWLSGILKCGYCGASLAYNGANRHSPGFQCYKYSKGVHTESCSISEKKVIAALEEYFEKLLSGMDFEYSYHSAETGEKISERESLLSELDKISNREKRIRLAYENEVDTLEEYKRNKERLQKDREDILMQLENLDKNNGDTKTKSDVLKNVQTVYDVIKNDAIDYDTKGIFMRSLVEDIVYDKKNGKLIFHLYIS

SEQ ID NO: 7454 - protein, 472 aa, Unknown
  Description of Unknown: Integrase B7455 sequence
  IPR036162,PS51737,IPR011109,PTHR30461,PS00397, PF00239,G3DSA:1.10.10.2600,IPR006119,SSF53041,cd00338, SM00857,IPR025827,IPR038109,PS51736,IPR006118, PF13408,G3DSA:3.40.50.1390,PF07508,Coil
MSARYAYGYVRVSTDKQEELSPDSQEKLLREYAAKNNIIILKVFFELGISGRKADKRPEFQKMIGLAKSTDHPVDVILVWKFSRFARNQEESIVYKSLLRKQSNVDVVSVSEPLIDGPFGSLIERIIEWMDEYYSIRLSGEVLRGMKEKAAKKGYQMSPPFGYRAVGNGDPYKIDPDEMKVVDFICDEFDYRNSDTTKITRKLNDMGVRTRRGNPFESRSVERILKNPFYYGLVAWNGITFMGTHEVHYSKERFEARMKKIQTTYKPLKRRDVSSCKHWLSGILKCGYCGASLAYNGANRHSPGFQCYKYSKGIHTESCSISEKKVIAALEEYFEKLLSGMDFEYSYHSAETGAKISERESLLSELDKISNREKRIRLAYENEVDTLEEYKRNKERLQKDREDILMQLENLNKNNEDTKTKSDVLKNVQTVYDVIKNDAIDYGTKGVFMRSLVEDIVYDKKNGKLIFHLYIS

SEQ ID NO: 7455 - protein, 472 aa, Unknown
  Description of Unknown: Integrase B7456 sequence
  IPR036162,PS51737,IPR011109,PTHR30461,PS00397, PF00239,G3DSA:1.10.10.2600,IPR006119,SSF53041,cd00338, SM00857,IPR025827,SSF90257,IPR038109,PS51736, IPR006118,PF13408,G3DSA:3.40.50.1390,PF07508,Coil
MSDRIGALYIRVSTDDQAELSPDAQKRLLLDYAKKNGIIISNDFIFSESVSGRHVQKRPEFQRMIGIAKQPSHPIDVILVWKYSRFARNQEESIVYKSMLKKDHVEVISVSEPLVDGPFGTLIERIIEWMDEYYSIRLSGEVLRGMKEKALRNGYQSSPCLGYEAVGHGKPYQINEAEYAMVSYIMDLYDNQNMDETAIARKCNDLGYKTKRGNPFERRTIDRILQNPFYCGIVSWNGVEFEGAHEVRISKERFDRRQRLIASRKRPMKTRNVSTCKHWLSGLLKCSVCGATLSYTGNGKCPYFQCWKYAKGFHKTSVALSVRKAEEAVITYFDQILSGADFTYIRKDEPTADNTAAIEQIQRELSKLSTRENRIRDAYESGIDTLEEYKANKDRLINNRLQLENELETLQKEQEEKELNKDDVLHEIKSVNDILKNPDVSYEEKGTLIRTIVDQIVYDKESGKMYFDIIVS

SEQ ID NO: 7456 - protein, 472 aa, Unknown
  Description of Unknown: Integrase B7457 sequence
  IPR036162,PS51737,IPR011109,PTHR30461,PS00397, PF00239,G3DSA:1.10.10.2600,IPR006119,SSF53041,cd00338, SM00857,IPR025827,IPR038109,PS51736,IPR006118, PF13408,G3DSA:3.40.50.1390,PF07508,Coil
MSVKYAYGYVRVSTDKQEELSPDSQEKLLREYAAKNNIIILKVFFEIGISGRKADKRPEFQKMIGLAKSSDHPVDVILVWKFSRFARNQEESIVYKSLLRKQSNVDVVSVSEPLIDGPFGSLIERIIEWMDEYYSIRLSGEVLRGMKEKATKKGYQMSPPFGYRAVGNGDPYKIVPDEMKVVDFICDEFDYRNSDTTKITRKLNDMGVRTRRGNPFESRSVERILKNPFYYGLVAWNGITFMGTHEVHYSKERFEARMKKIQTTYKPLKRRDVSSCKHWLSGILKCGYCGASLAYNGANRHSPGFQCYKYSKGIHTESCSISEKKVVAALEEYFEKLLSGMDFEYSYHSAETGEKISERESLLSELDKISNREKRIRLAYENEVDTLEEYKRNKERLRKDREDILMQLENLNKNNEDAKTKSDVLKNVQTVYDVIKNDAIDYDTKGIFMRSLVEDIVYDKKNGKLIFHLYIS

SEQ ID NO: 7457 - protein, 472 aa, Unknown
  Description of Unknown: Integrase B7458 sequence
  IPR036162,PS51737,IPR011109,PTHR30461,PS00397, PF00239,G3DSA:1.10.10.2600,IPR006119,SSF53041,cd00338, SM00857,IPR025827,SSF90257,IPR038109,PS51736, IPR006118,PF13408,G3DSA:3.40.50.1390,PF07508,Coil
MSDRIGALYIRVSTDDQAELSPDAQKRLLLDYAKKNGIIISNDFIFSESVSGRHVQKRPEFQRMIGIAKQPSHPIDVILVWKYSRFARNQEESIVYKSMLKKDHVEVISVSEPLVDGPFGSLIERIIEWMDEYYSIRLSGEVLRGMKEKALRNGYQSSPCLGYEAVGHGKPFQINEVEYAMVSYIMDLYDNQNMDETAIARKCNDLGYTTKRGNPFERRTVDRILQNPFYCGIVSWNGIQFEGTHEVRISKERFDRRQKLIASRRRPMKARNVSTCKHWLSGLLKCSVCGATLSYTGNNKCPYFQCWKYAKGFHKTSVALSVKKAEEAVTAYFDQILSGTDFTYVRKDQPAADETAAIEQLQKELSKLSARESRSRDAYESGIDSLEEYKANKERLISNRLQLESELEKLRKEQEEKEVSKEDVLHEIKSVNDILKDPDVSYEEKGTLIRTIVDQIVYDKESGKMYFDIIVS

SEQ ID NO: 7458 - protein, 472 aa, Unknown
  Description of Unknown: Integrase B7459 sequence
  SM00857,G3DSA:1.10.10.2600,IPR036162,PF13408,PS51737, G3DSA:3.40.50.1390,IPR025827,IPR006119,IPR038109,PF07508, IPR011109,SSF53041,PF00239,PTHR30461,PS51736, Coil,cd00338
MEKVAIYIRVSKKEQTRDKGSDSSLNLQLKKCLDYCKEKGYEVLKVYQDIESGRIDDRKEFNELFEAISKKIYTKIVFWEISRIARKISTGMKFFEELELYKITFDSISQPYLKDFMTLSIFLAWGTEDLKQMSLRIKSNLEEKTKAGYFVHGRPATGYIRGKNKMIIPDPEKAPYILSIFETYAKNFNLTETARIFNKTRMDIVDIIDNKIYIGYVPFRKYIQELNQKKRIQVSKKDIKWYKGLHEPIVPLELFEFCQSIREKNIKSRAAYGDYKPHLLFSSMIYCECGDKMYQQKRNRTYKDNTNYVYYSYSCKNRKHKKSFSARIMDKTIKEMILNSKELEDLNNYNSNDIEKSEKKLLKLENNLKLLENERERIINLFQKSYISEDELENKFKDLNTRIQIAKEKKIEFENTLNIPRNNDIKVLEKLKFIIENYDEEDVIETRKILKMIIKEIRVISFYPLKISILFY

SEQ ID NO: 7459 - protein, 472 aa, Unknown
  Description of Unknown: Integrase B7460 sequence
  cd03768,PTHR30461:SF3,SM00857,G3DSA:1.10.10.2600,IPR036162, PF13408,IPR025827,PS51737,G3DSA:3.40.50.1390,IPR006119, IPR038109,PF07508,IPR011109,SSF53041,PTHR30461, PS51736,Coil,PF00239
MQTKRKVAIYSRVSTLHQAEEGYSIGQQIEALTKYCQAMGWVIYDNYSDGGFSGGKLERPAMQKMIQDAESGKFDTVVVYKLDRLSRNVRDTLYLVKDVFNANNVDFVSLQENIDTKSAMGNLFITLLSAIAEFEREQIKERMQLGVKGRAKSGKTTSWHTPPYGYVYNQETQMLNIEPFAAETVKNIFDKLNSGWSIMEITTFLRKNHPDNWRPTKVTRILSNISYTGKVKYKGEIFDGLHEPIISDETYTRAQQMLRERSEKATNTRAFQGKYLLSRIVKCGYCGAPLQIDSYRPKKDGTRTRTYSCPNRFTGRAKATIYNNGKFCEKSRRHKADDIEKYVLTEISKLQLNPKIIESLYKGKPEANLDIYYNQLKKVNDKLSKLNDLYINSLIDLDNLKEKSDKILKEKNSIEEIIAKNKNKPNNKPAFEKVIKMEDISTMTYEEQKKIVRMLVSRVEVTPDEIRLIFKL

SEQ ID NO: 7460 - protein, 472 aa, Unknown
  Description of Unknown: Integrase B7461 sequence
  PTHR30461:SF3,cd00338,SM00857,IPR006118,G3DSA:1.10.10.2600, IPR036162,PS51737,G3DSA:3.40.50.1390,IPR006119,IPR038109, IPR011109,SSF53041,PTHR30461,PS00397,PS51736, Coil,PF00239
MMRAAIYIRVSTDEQARHGFSLAEQEHDLTEYADKHHYIVVGVYADEGSSARKSIARRKQLQRLLDDVRADRVDIILLKCLDRWFRNVADFYKVQAILDEHKVQWVCTQEDYNTTTTNGRLMLNLKLSIAQNESDQTADRIKYVNQGILRRKREIGGKAPFGYRFVDLEDGGKRIAVVEEQRAAVEFIFRSHLSGHSPMKIAHDVFVQYGIPITRRRVRCVLRNETYTGRRYGIDDFCPAIISPDTFRQAQERIAGHKSWPKKRDFLYLFRGKVICPSCGRILFGHHGDHKKKNGYISHYCNYWCCKHFVFGAPDVAAGGCAYGGAVSERSIERYLLDHLAELLESYQLDISKRRSSSRLSPDQRIQTAAAKLTRLKDLYVDGFIDKSTYQADYTKLQQEISAALAEKQATRATPEAVQNLILHADDIRKIYATMDRQHKYDLWQSTIKSIKIGEPRPSRGRAYKNFIVEFY

SEQ ID NO: 7461 - protein, 472 aa, Unknown
  Description of Unknown: Integrase B7462 sequence
  IPR036162,PS51737,IPR011109,PTHR30461,PS00397, PF00239,G3DSA:1.10.10.2600,IPR006119,SSF53041,cd00338, SM00857,IPR025827,IPR038109,PS51736,IPR006118, PF13408,G3DSA:3.40.50.1390,PF07508,Coil
MSDRIGALYIRVSTDDQAELSPDAQKRLLLDYAKKNGIIISNDFIFSESVSGRHVQKRPEFQRMIGIAKQPSHPIDVILVWKYSRFARNQEESIVYKSMLKKDHVEVISVSEPLIDGPFGSLIERIIEWMDEYYSIRLSGEVLRGMKEKALRNGYQSSPCLGYEAIGHGKPYQINEAEYAMVSYIMDLYDNQNMDETAIARKCNDLGYKTKRGNPFERRTIDRILQNPFYCGIVSWNGVEFEGAHEVRISKERFDRRQRLIASRKRPMKARSVSTCKHWLSGLLKCSVCGATLSYTGNGKCPYFQCWKYAKGFHKTSVALSVRKAEEAVITYFDQILSGADFTYVRKDEPTADNTAAIEQIQRELSKLATRENRIRDAYESGIDTLEEYKANKDRLISNRLQLENELEVLQKEQKDKELNKDDVLYEIKSVNDILKNPDVSYEEKGTLIRTIVDQIVYDKESGKMYFDIIVS

SEQ ID NO: 7462 - protein, 472 aa, Unknown
  Description of Unknown: Integrase B7463 sequence
  PTHR30461:SF3,SM00857,IPR006118,G3DSA:1.10.10.2600,IPR036162, PS51737,G3DSA:3.40.50.1390,Coil,IPR006119,IPR038109, PF07508,IPR011109,SSF53041,PTHR30461,PS00397, PS51736,cd00338,PF00239
MKIAAAYVRVSTEDQTELSPASQIKQIREYAKNHGYIVPDEYIFADEGISGKNTQKRPAFNRMIGLAKTKPKPFECILLWKYSRFARNREDSIVYKSMLRKQLGIDVISISENLGDDKMSILIEALIEAMDEYYSINLAEEVKRGMTERVSRGEAVSVPAYGYDIEEGKYIINEAEAEVVRQIFSDFNNGIGTVTIARNLNAIGIKTKRGKLWENRTVKYILHNPVYIGKIRWNPEEITGLNYDHEKIMLVDGIHEPLLTKDLWDSVQEKLSLMKKTRKPRERSNPTPDYMLYGLMRCGSCGGTLTQSRDGLQCHKYAHGTCDTSHYISLSKANTAVIDLIQHTLENGIFTLTPKKQDVSTQQIAMIDKQIQSEKNKLIRVKEAFEYGVDTLEEYKENKNKILQKISELESSKPVQQTNIDKKKFAQKYLGVIDTLKDDTVSEADKNHILRQFVEKIVLHRPSNEIEIFYYY

SEQ ID NO: 7463 - protein, 472 aa, Unknown
  Description of Unknown: Integrase B7464 sequence
  IPR036162,PS51737,IPR011109,PTHR30461,PS00397, PF00239,G3DSA:1.10.10.2600,IPR006119,SSF53041,cd00338, SM00857,IPR025827,SSF90257,IPR038109,PS51736, IPR006118,PF13408,G3DSA:3.40.50.1390,PF07508,Coil
MSDRIGALYIRVSTDDQAELSPDAQKRLLLDYAKKNGIIISNDFIFSESVSGRHVQKRPEFQRMIGIAKQPSHPIDVILVWKYSRFARNQEESIVYKSMLKKDHVEVISVSEPLIDGPFGSLIERIIEWMDEYYSIRLSGEVLRGMKEKALRNGYQSSPCLGYEAVGHGKPFQINEAEYAMVSYIMDLYDNQNMDETAIARKCNDLGYKTKRGNPFERRTIDRILQNPFYCGIVSWNGVEFEGAHEVRISKERFDRRQRLIASRKRPMKARNISTCKHWLSGLLKCSVCGATLSYTGNGKCPYFQCWKYAKGFHKTSVALSVKKAEEAVIEYFDQVLAGADFTYVRKEQPAADETAAIEQLQKELSKLSTRENRIRDAYESGIDSLEEYKANKERLISNRLQLETELEKLRKEQEEKEVNKEDVLHEIKSLNDILKNPDVSYEEKGTLIRTIVDQIVYDKESGKMYFDIIVS

SEQ ID NO: 7464 - protein, 472 aa, Unknown
  Description of Unknown: Integrase B7465 sequence
  IPR036162,PS51737,IPR011109,PTHR30461,PS00397, PF00239,G3DSA:1.10.10.2600,IPR006119,SSF53041,cd00338, SM00857,IPR025827,SSF90257,IPR038109,PS51736, IPR006118,PF13408,G3DSA:3.40.50.1390,PF07508,Coil
MSDRIGALYIRVSTDDQAELSPDAQKRLLLDYAKKNGIIISNDFIFSESVSGRHVQKRPEFQRMIGIAKQPSHPIDVILVWKYSRFARNQEESIVYKSMLKKDHVEVISVSEPLIDGPFGSLIERIIEWMDEYYSIRLSGEVLRGMKEKALRNGYQSSPCLGYEAVGHGKPFQINEAEYAMVSYIMDLYDNQNMDETAIARKCNDLGYKTKRGNPFERRTIDRILQNPFYCGIVSWNGVEFEGAHEVRISKERFDRRQRLIASRKRPMKARNISTCKHWLSGLLKCSVCGATLSYTGNGKCPYFQCWKYAKGFHKTSVALSVKKAEEAVIEYFDQVLAGADFTYVRKEQPAADETAAIEQLQKELSKLSARESRIRDAYESGIDSLEEYKTNKERLISNRLQLETELEKFRKEQEEKEVNKEDVLHEIKSLNDILKNPDVSYEEKGTLIRTIVDQIVYDKESGKMYFDIIVS

SEQ ID NO: 7465 - protein, 472 aa, Unknown
  Description of Unknown: Integrase B7466 sequence
  PTHR30461:SF3,SM00857,IPR006118,G3DSA:1.10.10.2600,IPR036162, PS51737,G3DSA:3.40.50.1390,Coil,IPR006119,IPR038109, PF07508,IPR011109,SSF53041,PTHR30461,PS00397, PS51736,cd00338,PF00239
MKTAAAYIRVSTDDQIEYSPDSQLKAIRDYARKNDMILPEEFVFIDEGISGRKAEKRPEFMKMIGTAKMKPKQFDVILLWKFSRFARNREDSIVYKSMLRKQCGIDVISVSEQLGEDKTSILIEALIEAMDEYYSINLAEEVRRGMTEKAQRGEVVSAPPFGYDIKDNVFIPDPEAAPIVKMIFDKYLNGQGCLEIAKELNKMGIKTKHGNKWENRGVEYVLRNVVYTGKLTWTPIKTKTRDYNCKDTIISRGMHEPIIDQETFDKVQNMILEKKKLFPKHSRQSSNEFMLKGFLKCSNCGGALVYATNNRVQCNRYSKGTCEVSHSVSLSKLNSSVISALKSDLETQQFKIYKKAAEEQDNKDITPTLIAKERKKLERVKDAYEAGIDSLEEYRINKEKILKTIAELEKNKKPESSQKDDFQKLSKTIKKSLDILEDENCSESIKNITLRSFVRQIVYMKKTQSIEILYQI

SEQ ID NO: 7466 - protein, 472 aa, Unknown
  Description of Unknown: Integrase B7467 sequence
  IPR036162,PS51737,IPR011109,PTHR30461,PS00397, PF00239,G3DSA:1.10.10.2600,IPR006119,SSF53041,cd00338, SM00857,IPR025827,IPR038109,PS51736,IPR006118, PF13408,G3DSA:3.40.50.1390,PF07508,Coil
MSVKYAYGYVRVSTDKQEELSPDSQEKLLREYAAKNNIVILKIFFELGISGRKADKRPEFQKMIGLAKSSDHPVDVILVWKFSRFARNQEESIVYKSLLRKQSNVDVVSVSEPLIDGPFGSLIERIIEWMDEYYSIRLSGEVLRGMKEKAAKKGYQMSPPFGYRAVGNGDPYKIDQDEMKIVDFICDEFDYHNSDVTKITRKLNDMGVRTRRGNPFESRSVERILKNPFYYGLVAWNGITFMGTHEVHYSKERFEARMKKIQTTYKPLKRRDVSSCKHWLSGILKCGYCGASLAYNGANRHSPGFQCYKYSKGIHTESCSISEKKVIAALEEYFEKLLSGMDFEYSYHSAETGEKISERESLLSELDKISNREKRIRLAYENEVDTLEEYKRNKERLQKDREDILMQLENLNKNNEDTKTKSDVLKNVQTVYDVIKNDAIDYGTKGIFMRSLVEDIVYDKKNSKLIFHLYIS

SEQ ID NO: 7467 - protein, 472 aa, Unknown
  Description of Unknown: Integrase B7468 sequence
  IPR036162,PS51737,IPR011109,PTHR30461,PS00397, PF00239,G3DSA:1.10.10.2600,IPR006119,SSF53041,cd00338, SM00857,IPR025827,IPR038109,PS51736,IPR006118, PF13408,G3DSA:3.40.50.1390,PF07508,Coil
MSVKYAYGYVRVSTDKQEELSPDSQEKLLREYATKNNIVILKVFFELGISGRKADKRPEFQKMIGLAKSSDHPVDVILVWKFSRFARNQEESIVYKSLLRKQSNVDVVSVSEPLIDGPFGSLIERIIEWMDEYYSIRLSGEVLRGMKEKATKKGYQMSPPFGYRAVGNGDPYKIDQDEMKIVDFICDEFDYHNSDVTKITRKLNDMGVRTRRGNPFESRSVERILKNPFYYGLVAWNGITFMGTHEVHYSKERFEARMKKIQTTYKPLKRRDVSSCKHWLSGILKCGYCGASLSYNGANRHSPGFQCYKYSKGIHTESCSISEKKVIAALEEYFEKLLSGMDFEYSYHSAETGEKISERESLLSELDKISNREKRIRLAYENEVDTLEEYKRNKERLQKDREDILMQLENLDKNNGDTKTKSDVLKNVQTVYDVIKNDAIDYDTKGIFMRSLVEDIVYDKKNGKLIFHLYIS

SEQ ID NO: 7468 - protein, 472 aa, Unknown
  Description of Unknown: Integrase B7469 sequence
  IPR036162,PS51737,IPR011109,PTHR30461,PS00397, PF00239,G3DSA:1.10.10.2600,IPR006119,SSF53041,cd00338, SM00857,IPR025827,IPR038109,PS51736,IPR006118, PF13408,G3DSA:3.40.50.1390,PF07508,Coil
MSARYAYGYVRVSTDKQEELSPDSQEKLLREYAAKNNIIILKVFFEIGISGRKADKRPEFQKMIGLAKSSDHPVDVILVWKFSRFARNQEESIVYKSLLRKQSNVDVVSVSEPLIDGPFGSLIERIIEWMDEYYSIRLSGEVLRGMKEKATKKGYQMSPPFGYRAVGNGDPYKIDQDEMKIVDFICDEFDYHNSDVTKITRKLNDMGVRTRRGNPFESRSVERILKNPFYYGLVAWNGITFMGTHEVHYSKERFEARMKKIQTTYKPLKRRDVSSCKHWLSGILKCGYCGASLAYNGANRHSPGFQCYKYSKGVHTESCSISEKKVIAALEEYFEKLLSGMDFEYSYHSAETGEKISERESLLSELDKISNREKRIRLAYENEVDTLEEYKRNKERLQKDREDILMQLENLDKNNGDTKTKSDVLKNVQTVYDVIKNDAIDYDTKGIFMRSLVEDIVYDKKNGKLIFHLYIS

SEQ ID NO: 7469 - protein, 472 aa, Unknown
  Description of Unknown: Integrase B7470 sequence
  IPR036162,PS51737,IPR011109,PTHR30461,PS00397, PF00239,G3DSA:1.10.10.2600,IPR006119,SSF53041,cd00338, SM00857,IPR025827,SSF90257,IPR038109,PS51736, IPR006118,PF13408,G3DSA:3.40.50.1390,PF07508,Coil
MSDRIGALYIRVSTDDQAELSPDAQKRLLLDYAKKNGIIISNDFIFSESVSGRHVQKRPEFQRMIGIAKQPSHPIDVILVWKYSRFARNQEESIVYKSMLKKDHVEVISISEPLIDGPFGSLIERIIEWMDEYYSIRLSGEVLRGMKEKALRNGYQSSPCLGYEAVGHGKPYQINEAEYAMVSYIMDLYDNQNMDETAIARKCNDLGYKTKRGNPFERRTIDRILQNPFYCGIVSWNGVEFEGAHEVRISKERFDRRQRLIASRKRPMKARNVSTCKHWLSGLLKCSVCGATLSYTGNGKCPYFQCWKYAKGFHKTSVALSVKKAEEAVIAYFDQILSGEDFTYVRKDEPTADNTAAIEQIQRELSKLSTRENRIRDAYESGIDTLEEYKANKDRLISNRLQLENELEALQTEQKEKELNKDDVLHEIKSVNDILKNPDVSYEEKGTLIRTIVDQIVYDKESGKMYFDIIVS

SEQ ID NO: 7470 - protein, 472 aa, Unknown
  Description of Unknown: Integrase B7471 sequence
  IPR036162,PS51737,IPR011109,PTHR30461,PS00397, PF00239,G3DSA:1.10.10.2600,IPR006119,SSF53041,cd00338, SM00857,IPR025827,IPR038109,PS51736,IPR006118, PF13408,G3DSA:3.40.50.1390,PF07508,Coil
MSARYAYGYVRVSTDKQEELSPDSQEKLLREYAAKNNIIILKVFFEIGISGRKADKRPEFQKMIGLAKSTDHPVDVILVWKFSRFARNQEESIVYKSLLRKQSNVDVVSVSEPLIDGPFGSLIERIIEWMDEYYSIRLSGEVLRGMKEKAAKKGYQMSPPFGYRAVGNGDPYKIDPDEMKVVDFICDEFDYRNSDTTKITRKLNDMGVRTRRGNPFESRSVERILKNPFYYGLVAWNGITFMGTHEVHYSKERFEARMKKIQTTYKPLKRRDVSSCKHWLSGILKCGYCGASLAYNGANRHSPGFQCYKYSKGIHTESCSISEKKVIAALEEYFEKLLSGMDFEYSYHSAETGAKISERESLLSELDKISNREKRIRLAYENEVDTLEEYKRNKERLQKDREDILMQLENLNKNNEDTKTKSDVLKNVQTVYDVIKNDAIDYGTKGVFMRSLVEDIVYDKKNGKLIFHLYIS

SEQ ID NO: 7471 - protein, 472 aa, Unknown
  Description of Unknown: Integrase B7472 sequence
  IPR036162,PS51737,IPR011109,PTHR30461,PS00397, PF00239,G3DSA:1.10.10.2600,IPR006119,SSF53041,cd00338, SM00857,IPR025827,IPR038109,PS51736,IPR006118, PF13408,G3DSA:3.40.50.1390,PF07508,Coil
MSARYAYGYVRVSTDKQEELSPDSQEKLLREYAAKNNIIILKVFFEIGISGRKADKRPEFQKMIGLAKSSDHPVDVILVWKFSRFARNQEESIVYKSLLRKQSNVDVVSVSEPLIDGPFGSLIERIIEWMDEYYSIRLSGEVLRGMKEKATKKGYQMSPPFGYRAVGNGDPYKIDPDEMKVVDFICDEFDYRNSDATKITRKLNDMGVRTRRGNPFESRSVERILKNPFYYGLVAWNGITFMGTHEVHYSKERFEARMKKIQTTYRPLKRRDVSSCKHWLSGILKCGYCGASLAYNGANRHSPGFQCYKYSKGIHTESCSISEKKVIAALEEYFEKLLSGMDFEYSYHSAETGAKISERESLLAELDKISNREKRIRLAYENEVDTLEEYKRNKERLQKDREDILEQLKNLDKNNEDTKTKSDVLKNVQTVYDVIKNDAIDYDTKGIFMRSLVEDIVYDKKNGKLIFHLYIS

SEQ ID NO: 7472 - protein, 472 aa, Unknown
  Description of Unknown: Integrase B7473 sequence
  PTHR30461:SF3,cd00338,SM00857,G3DSA:1.10.10.2600,IPR036162, PF13408,IPR025827,G3DSA:3.40.50.1390,PS51737,IPR006119, IPR038109,PF07508,SSF53041,IPR011109,PTHR30461, PS51736,Coil,PF00239
MTQKTAVIYARFSCSKQREASIEDQLRVCREWCSREGYEVVKEYSDYALSGRSDDRPQFQTMIANAGESDIVLVYMMDRFSRDEYDAPVYKRELRKHGVELYSAMEAMPDGPERILIEKIYEGLAAVESAKTAIRVKRGMTGNALKCKTNGVRLFGYNEGEDGCYVINEDEAVLVREAFKRKIEGEPVNHIASDFAKRGVKTYVGRPCGYNMIYHMLKSEKYMGVYSWGDVRVEGGMPAIVDKGTFMRAQEIKTKKRRKDENWCDYALAGRVICASCGRNFYGMSGHSRSGKRYDYYTCGSCKEVKAVRKDWLEGEITSRIREMLKDRDTATRIAEMVADAQDDKTTREARKSAQNAKQSAETGLANILAAIEQGIIAPGTQERIAQLEIQRDKAERDLASLKDRTIDPEDFVDFLMFGATLDDKQLLDAFVYQVMVSNEDVIVVLNYNTKENEPARFTFERVRTNLRWCAI

SEQ ID NO: 7473 - protein, 472 aa, Unknown
  Description of Unknown: Integrase B7474 sequence
  cd03768,PTHR30461:SF3,SM00857,G3DSA:1.10.10.2600,IPR036162, PF13408,IPR025827,PS51737,G3DSA:3.40.50.1390,IPR006119, IPR038109,PF07508,IPR011109,SSF53041,PTHR30461, PS51736,Coil,PF00239
MQTKRKVAIYSRVSTLHQAEEGYSIGQQIEALTKYCQAMGWVIYDNYSDGGFSGGKLERPAMQKMIQDAKSGKFDTVVVYKLDRLSRNVRDTLYLVKDVFNANNVDFVSLQENIDTKSAMGNLFITLLSAIAEFEREQIKERMQLGVKGRAKSGKTTSWTTPPFGYEYDTNTQLMTINHYQAEIVRDMFDKIISGWSIMGITTHLRKTNNKKWTHVRVKRILENVAYIGKVKYRDEIFDGEHAPILTEEIFYKAQKALEERTSKKDNTRPFQGLYMLSNIAKCGYCGTPLKIDSYKPRKDGTRKRTYTCINRNPKRIKTATYNDGKQCKESGRYDVKDVERYVLNEISKLQLNPKSIESLYRDKPEENITAHQERLKKLETKLSKLNDLYINELISMEALKQKSAELLKEKSSLETFINNNKRKINNKPAFEKVAKMDDVFKMSYDDQKKIVKTLIKRVEVKRDEINVIFKL

SEQ ID NO: 7474 - protein, 472 aa, Unknown
  Description of Unknown: Integrase B7475 sequence
  IPR036162,PS51737,IPR011109,PTHR30461,PS00397, PF00239,G3DSA:1.10.10.2600,IPR006119,SSF53041,cd00338, SM00857,IPR025827,IPR038109,PS51736,IPR006118, PF13408,G3DSA:3.40.50.1390,PF07508,Coil
MSVKYAYGYVRVSTDKQEELSPDSQEKLLREYATKNNIVILKVFFELGISGRKADKRPEFQKMIGLAKSSDHPVDVILVWKFSRFTRNQEESIVYKSLLRKQSNVDVVSVSEPLIDGPFGSLIERIIEWMDEYYSIRLSGEVLRGMKEKATKKGYQMSPPFGYRAVGNGDPYKIDQDEMKIVDFICDEFDYHNSDVTKITRKLNDMGVRTRRGNPFESRSVERILKNPFYYGLVAWNGITFMGTHEVHYSKERFEARMKKIQTTYKPLKRRDVSSCKHWLSGILKCGYCGASLSYNGANRHSPGFQCYKYSKGIHTESCSISEKKVIAALEEYFEKLLSGMDFEYSYHSAETGEKISERESLLSELDKISNREKRIRIAYENEVDTLEEYKRNKERLRKDREDILMQLENLNKNNEDAKTKSDVLKNVQTVYDVIKNDAIDYDTKGIFMRSLVEDIVYDKKNGKLVFHLYIS

SEQ ID NO: 7475 - protein, 472 aa, Unknown
  Description of Unknown: Integrase B7476 sequence
  IPR036162,PS51737,IPR011109,PTHR30461,PS00397, PF00239,G3DSA:1.10.10.2600,IPR006119,SSF53041,cd00338, SM00857,IPR025827,IPR038109,PS51736,IPR006118, PF13408,G3DSA:3.40.50.1390,PF07508,Coil
MSARYAYGYVRVSTDKQEELSPDSQEKLLREYAVKNNIIILKVFFEIGISGRKADKRPEFQKMIGLAKSSDHPVDVILVWKFSRFARNQEESIVYKSLLRKQSNVDVVSVSEPLIDGPFGSLIERIIEWMDEYYSIRLSGEVLRGMKEKATKKGYQMSPPFGYRAVGNGDPYKIDPDEMKVVDFICDEFDYHNSDTTKITRKLNDMGVRTRRGNPFESRSVERILKNPFYYGLVAWNGITFMGTHEVHYSKERFEARMKKIQTTYKPLKRRDVSSCKHWLSGILKCGYCGASLAYNGANRHSPGFQCYRYSKGMHAESCSISEKKVVAALEEYFEKLLSGMDFEYSYHSAETGEKISERESLLSELDKISNREKRIRIAYENEVDTLEEYKRNKERLQKDREDILMQLENLNKNNEDTKTKSDVLKNVQTVYDVIKNDAIDYGTKGIFMRSLVEDIVYDKKNSKLIFHLYIS

SEQ ID NO: 7476 - protein, 472 aa, Unknown
  Description of Unknown: Integrase B7477 sequence
  IPR036162,PS51737,IPR011109,PTHR30461,PS00397, PF00239,G3DSA:1.10.10.2600,IPR006119,SSF53041,cd00338, SM00857,IPR025827,IPR038109,PS51736,IPR006118, PF13408,G3DSA:3.40.50.1390,PF07508,Coil
MSDRIGALYIRVSTDDQAELSPDAQKRLLLDYAKKSGIIISNDFIFSESVSGRHVQKRPEFQRMIGIAKQPSHPIDVILVWKYSRFARNQEESIVYKSMLKKDHVEVISVSEPLVDGPFGSLIERIIEWMDEYYSIRLSGEVLRGMKEKALRNGYQSSPCLGYEAVGHGKPYQINEAEYAMVSYIMDLYDNHNMDETAIARKCNDLGYKTKRGNLFERRTIDRILQNPFYCGIVSWNGVEFEGAHEVRISKERFDRRQRLIASRKRPMKARNVSTCKHWLSGLLKCSVCGATLSYTGNGKCPYFQCWKYAKGFHKTSVALSVKRAEEAVISYFDQILSGTDFTYVRKDQPATDETVAIEQLQKELSKLSTRESRIRDAYESGIDSLEEYKANKERLISNRLQLETGLEKLRKEQKEKEVTKEDVLHEIKSVNDILKNPDVSYEEKGTLIRTIVDQIVYDKESGKMYFDIIVS

SEQ ID NO: 7477 - protein, 472 aa, Unknown
  Description of Unknown: Integrase B7478 sequence
  IPR036162,PS51737,IPR011109,PTHR30461,PS00397, PF00239,G3DSA:1.10.10.2600,IPR006119,SSF53041,cd00338, SM00857,IPR025827,IPR038109,PS51736,IPR006118, PF13408,G3DSA:3.40.50.1390,PF07508,Coil
MSDRIGALYIRVSTDDQAELSPDAQKRLLLDYAKKSGIIISNDFIFSESVSGRHVQKRPEFQRMIGIAKQPSHPIDVILVWKYSRFARNQEESIVYKSMLKKDHVEVISVSEPLVDGPFGSLIERIIEWMDEYYSIRLSGEVLRGMKEKALRNGYQSSPCLGYEAVGHGKPYQINEAEYAMVSYIMDLYDNHNMDETAIARKCNDLGYKTKRGNLFERRTIDRILQNPFYCGIVSWNGVEFEGAHEVRISKERFDRRQQLIASRKRPMKARNVSTCKHWLSGLLKCSVCGATLSYTGNGKCPYFQCWKYAKGFHKTSVALSVKRAEEAVISYFDQILSGTDFTYVRKDQPATDETVAIEQLQKELSKLSTRESRIRDAYESGIDSLEEYKANKERLISNRLQLETGLEKLRKEQKEKEVTKEDVLHEIKSVNDILKNPDVSYEEKGTLIRTIVDQIVYDKESGKMYFDIIVS

SEQ ID NO: 7478 - protein, 472 aa, Unknown
  Description of Unknown: Integrase B7479 sequence
  PTHR30461:SF3,IPR036162,PS51737,IPR011109,PTHR30461, PS00397,PF00239,G3DSA:1.10.10.2600,IPR006119,SSF53041, cd00338,SM00857,IPR025827,IPR038109,PS51736, IPR006118,PF13408,G3DSA:3.40.50.1390,PF07508,Coil
MVKYAYGYIRVSTDKQEELSPDSQEKLLREYATKNNIIILKFFYEIGISGRKADKRPEFQSMIGLAKSPDHPVDLILVWKFSRFARNQEESIVYKSLLRQKSNVDVVSVSEPLIDGPFGSLIERIIEWMDEYYSIRLSGEVLRGMREKAEQNGYQFIPPLGYQAVGGGKPFVINENEYKIYQYIADEYDLRNSGISTIARKLNDLGLQTRRGRPFEMRSIRRLLQNPFYYGLVVWNGVSFVGTHEVRITKERFDARMQKMQSQYAPARRRDVSSCRHWLSGLLKCGYCGATMCFNGARSSTAGFQCYKYSKGLHKESCFITERKVLAAINEYFEKLLNGMDFEYTYHPPKSAELLSEREPLLQELKKIAMREERIRSAYENGIDTLEEYKRNKERIKQAKEDIQSQLDELNDSSAKPSVTKEDMLAKVRTVYDVIQDPDVDLETKGAFMRSLVEDIVYDKENGKMIFHLYAS

SEQ ID NO: 7479 - protein, 472 aa, Unknown
  Description of Unknown: Integrase B7480 sequence
  IPR036162,PS51737,IPR011109,PTHR30461,PS00397, PF00239,G3DSA:1.10.10.2600,IPR006119,SSF53041,cd00338, SM00857,IPR025827,IPR038109,PS51736,IPR006118, PF13408,G3DSA:3.40.50.1390,PF07508,Coil
MSARYAYGYVRVSTDKQEELSPDSQEKLLREYAAKNNIIILKVFFEIGISGRKADKRPEFQKMIGLAKSSDHPVDVILVWKFSRFARNQEESIVYKSLLRKQSNVDVVSVSEPLIDGPFGSLIERIIEWMDEYYSIRLSGEVLRGMKEKATKKGYQMSPPFGYRAVGNGDPYKIDPDEMKVVDFICDEFDYRNSDTTKITRKLNDMGARTRRGNPFESRSVERILKNPFYYGLVAWNGITFMGTHEVHYSKERFEARIKKIQTTYKPLKRRDVSSCKHWLSGILKCGYCGASLAYNGANRHSPGFQCYKYSKGIHTESCSISEKKVIAALEEYFEKLLSGMDFEYSYHSAETGEKISERESLLAELDKISNREKRIRLAYENEVDTLEEYKRNKERLQKDREDILMQLENLNKNNEDTKTKSDVLKNVQTVYDVIKNDAIDYGTKGIFMRSLVEDIVYDKKNSKLIFHLYIS

SEQ ID NO: 7480 - protein, 472 aa, Unknown
  Description of Unknown: Integrase B7481 sequence
  IPR036162,PS51737,IPR011109,PTHR30461,PS00397, PF00239,G3DSA:1.10.10.2600,IPR006119,SSF53041,cd00338, SM00857,IPR025827,IPR038109,PS51736,IPR006118, PF13408,G3DSA:3.40.50.1390,PF07508,Coil
MSVKYAYGYVRVSTDKQEELSPDSQEKLLREYAAKNNIVILKIFFELGISGRKADKRPEFQKMIGLAKSSDHPVDVILVWKFSRFARNQEESIVYKSLLRKQSNVDVVSVSEPLIDGPFGSLIERIIEWMDEYYSIRLSGEVLRGMKEKATKKGYQMSPPLGYRAVGNGNPYKIDPDEMKIVDFICDEFDHRNSDITKITRRLNDMGVRTRRGNPFESRSVERILKNPFYYGLVVWNGISFMGTHEVHYSKDRFEERMQKIQTTYRPVKRRDVSSCKHWLSGLLKCGYCGASLSYNGSNVHSPGFQCYKYSKGIHAESCSISEKKVIAALKEYFEKLLSGMDFEYSYHSAETGEKISERESLLSELDKITNREKRIRIAYENEVDTLEEYKQNKERLQKDREDILMQLENLDKNNEDTKTKSDVLKNVQTVYDVIKNDAIDYDTKGIFMRSLVEDIVYDKKNGKLIFHLYIS

SEQ ID NO: 7481 - protein, 472 aa, Unknown
  Description of Unknown: Integrase B7482 sequence
  IPR036162,PS51737,IPR011109,PTHR30461,PS00397, PF00239,G3DSA:1.10.10.2600,IPR006119,SSF53041,cd00338, SM00857,IPR025827,IPR038109,PS51736,IPR006118, PF13408,G3DSA:3.40.50.1390,PF07508,Coil
MSARYAYGYVRVSTDKQEELSPDSQEKLLREYAAKNNIIILKVFFEIGISGRKADKRPEFQKMIGLAKSSDHPVDVILVWKFSRFARNQEESIVYKSLLRKQSNVDVVSVSEPLIDGPFGSLIERIIEWMDEYYSIRLSGEVLRGMKEKAAKKGYQMSPPFGYRAVGNGDPYKIDPDEMKVVDFICDEFDYRNSDATKITRKLNDMGVRTRRGNPFESRSVERILKNPFYYGLVAWNGITFMGTHEVHYSKERFEARMKKIQTTYKPLKRRDVSSCKHWLSGILKCGYCGASLAYNGANRHSPGFQCYKYSKGIHTESCSISEKKVIAALEEYFEKLLSGMDFEYSYHSAETGEKISERESLLSELDKISNREKRIRLAYENEVDTLEEYKRNKERLQKDREDILMQLENLDKNNGDTKTKSDVLKNVQTVYDVIKNDAIDYDTKGIFMRSLVEDIVYDKKNGKLIFHLYIS

SEQ ID NO: 7482 - protein, 472 aa, Unknown
  Description of Unknown: Integrase B7483 sequence
  IPR036162,PS51737,IPR011109,PTHR30461,PS00397, PF00239,G3DSA:1.10.10.2600,IPR006119,SSF53041,cd00338, SM00857,IPR025827,IPR038109,PS51736,IPR006118, PF13408,G3DSA:3.40.50.1390,PF07508,Coil
MSVKYAYGYVRVSTDKQEELSPDSQEKLLREYAAKNNIIILKVFFEIGISGRKADKRPEFQKMIGLAKSSDHPVDVILVWKFSRFARNQEESIVYKSLLRKQSNVDVVSVSEPLIDGPFGSLIERIIEWMDEYYSIRLSGEVLRGMKEKATKKGYQMSPPLGYHAVGNGEPYKIDLDEMKIVDFICDEFDYHNSDVTKITRKLNDMGVRTRRGNPFESRSVERILKNPFYYGLVAWNGITFMGTHEVHYSKERFEARMKKIQTTYKPLKRRDVSSCKHWLSGILKCGYCGASLAYNGANRHSPGFQCYRYSKGMHAESCSISEKKVVAALEEYFEKLLSGMDFEYSYHSAETGEKISERESLLSELDKISNREKRIRIAYENEVDTLEEYKRNKERLQKDREDILMQLENLNKNNEDTKTKSDVLKNVQTVYDVIKNDAIDYGTKGIFMRSLVEDIVYDKKNSKLIFHLYIS

SEQ ID NO: 7483 - protein, 472 aa, Unknown
  Description of Unknown: Integrase B7484 sequence
  cd03768,PTHR30461:SF3,SM00857,G3DSA:1.10.10.2600,IPR036162, PF13408,IPR025827,PS51737,G3DSA:3.40.50.1390,IPR006119, IPR038109,PF07508,IPR011109,SSF53041,PTHR30461, PS51736,Coil,PF00239
MQTKRKVAIYSRVSTLHQAEEGYSIGQQIEALTKYCQAMGWVIYDNYSDGGFSGGKLERPAMQKMIQDAKSGKFDTVVVYKLDRLSRNVRDTLYLVKDVFNANNVDFVSLQENIDTKSAMGNLFITLLSAIAEFEREQIKERMQLGVKGRAKSGKTTSWTTPPFGYKYDTNTQSMTVDHYQAEIVRDMFNKIISGWSIMGITTYMRENYDGKWTHVKVKRILENITYIGKVKYRNEIFDGEHAPILTEEIFYKAQKALEERTSKKDNTRPFQGLYMLSNIAKCGYCGTPLKIDSYKPRKDGTRKRTYTCINRNPKRIKTAIYNDGEQCKESGRYDVKDVERYVLNEISKLQLNPKSIESLYRDKPEENITAHQERLKKLETKLSKLNDLYINELISMEALKQKSAELLKEKSSLETFINNNKRKINNKPAFEKVAKMDDVFKMSYDDQKKIVKTLIKRVEVKRDEINVIFKL

SEQ ID NO: 7484 - protein, 471 aa, Unknown
  Description of Unknown: Integrase B7485 sequence
  IPR036162,PS51737,IPR011109,PTHR30461,PS00397, PF00239,G3DSA:1.10.10.2600,IPR006119,SSF53041,cd00338, SM00857,IPR025827,IPR038109,PS51736,IPR006118, PF13408,G3DSA:3.40.50.1390,PF07508,Coil
MSSKVAALYIRVSTEDQTELSPDAQKRLLLDYAQKNDMIVSGDFIFTESVSGRHAQKRPEFQKMIALAKQPSHPIDVILVWKFSRFARNQEESIVYKSMLKKDNVDVISVSEPLIEGPFGSLIERIIEWMDEYYSIRLSGEVLRGMKEKALQKGYQTSPCLGYTAVGHGKPYIINEAEYAIVSYIMDLYDNQNLDETAIARRCNDLGYRTKRGKLFERRSVDRILGNPFYCGTVVWNGVEFEGSHEVRLSRERYEKRQKLITSRKRPVKARNVSACKHWLSGLLKCSVCGATLSYTGNNKCPYFQCWKYAKGFHKTSVALSVKKAEEAVISYFDQILDGAEFTYVCKKKKTDHSLQIDQLQREISKLSMRENRIKEAYEAGVDTLEEYKSNKDRLVSDRLELTAALSQLLQEEQSEQPNTEEILKEIRSVADVLKNPDVGYEEKGNLIRSVVEQIIYDKESGKMSFDIIIS

SEQ ID NO: 7485 - protein, 471 aa, Unknown
  Description of Unknown: Integrase B7486 sequence
  IPR036162,PS51737,IPR011109,PTHR30461,PS00397, PF00239,G3DSA:1.10.10.2600,IPR006119,SSF53041,cd00338, SM00857,IPR025827,IPR038109,PS51736,IPR006118, PF13408,G3DSA:3.40.50.1390,PF07508,Coil
MSSKVACLYIRVSTEDQTELSPDAQKRLLLDYAQKNDMIVSGDFIFTESVSGRHAQKRPEFQKMIALAKQPSHPIDVILVWKFSRFARNQEESIVYKSMLKKDNVDVISVSEPLIEGPFGSLIERIIEWMDEYYSIRLSGEVLRGMKEKALQKGYQTSPCLGYTAVGHGKPYVINEAEYAIVSYIMDLYDNQNLDETAIARRCNDLGYRTKRGKLFERRSVDRILGNPFYCGTVVWNGVEFEGNHEVRLSRERYEKRQKLITSRKRPVKARNVSACKHWLSGLLKCSVCGATLSYTGNNKCPYFQCWKYAKGFHKTSVALSVKKAEEAVISYFDQILDGAEFTYVCKKKKTDHSLQIEQLQKEISKLTMRESRIKEAYEAGVDTLEEYKNNKDRLVSDRLELTAALSQLLQKEQAEQPDTEEILKEIRSVSDVLKNPDVGYEEKGNLIRSVVEQIIYDKESGKMSFDIIIS

SEQ ID NO: 7486 - protein, 471 aa, Unknown
  Description of Unknown: Integrase B7487 sequence
  IPR036162,PS51737,IPR011109,PTHR30461,PS00397, PF00239,G3DSA:1.10.10.2600,IPR006119,SSF53041,cd00338, SM00857,IPR025827,IPR038109,PS51736,IPR006118, PF13408,G3DSA:3.40.50.1390,PF07508,Coil
MSSKVACLYIRVSTEDQTELSPDAQKRLLLDYAQKNDMIVSGDFIFTESVSGRHAQKRPEFQKMIALAKQPSHPIDVILVWKFSRFARNQEESIVYKSMLKKDNVDVISVSEPLIEGPFGSLIERIIEWMDEYYSIRLSGEVLRGMKEKALQKGYQTSPCLGYTAVGHGKPYVINEAEYAIVSYIMDLYDNQNLDETAIARRCNDLGYRTKRGKLFERRSVDRILGNPFYCGTVVWNGVEFEGSHEVRLSRERYEKRQKLITSRKRPVKVRNVSACKHWLSGLLKCSVCGATLSYTGNNKCPYFQCWKYAKGFHKTSVALSVKKAEEAVISYFDQILDGAEFTYVCKKKKTDHSLQIEQLQREISKLTMRESRIKEAYEAGVDTLEEYKNNKDRLVSDRLELTAALSQLLQEEQAEQPDAEEILKEIRSVTDVLKNPDVGYEAKGNLIRSVVEQIIYDKESGKMSFDIIIS

SEQ ID NO: 7487 - protein, 471 aa, Unknown
  Description of Unknown: Integrase B7488 sequence
  IPR036162,PS51737,IPR011109,PTHR30461,PS00397, PF00239,G3DSA:1.10.10.2600,IPR006119,SSF53041,cd00338, SM00857,IPR025827,IPR038109,PS51736,IPR006118, PF13408,G3DSA:3.40.50.1390,PF07508,Coil
MSSKVAALYIRVSTEDQTELSPDAQKRLLLDYAQKNDMIVSGDFIFTESVSGRHAQKRPEFQKMIALAKQPSHPIDVILVWKFSRFARNQEESIVYKSMLKKDNVDVISVSEPLIEGPFGSLIERIIEWMDEYYSIRLSGEVLRGMKEKALQKGYQTSPCLGYTAVGHGKPYIINEAEYAIVSYIMDLYDNQNLDETAIARRCNDLGYRTKRGKLFERRSVDRILGNPFYCGTVVWNGVEFEGSHEVRLSRERYEKRQKLITSRKRPVKARNVSACKHWLSGLLKCSVCGATLSYTGNNKCPYFQCWKYAKGFHKTSVALSVKKAEEAVISYFDQILDGAEFTYVCKKKKTDHSLQIEQLQREINKLTMRESRIKEAYEAGVDTLEEYKSNKDRLVSDRLELTAALSQLLQEEQSEQPNTEEILKEIRSVADVLKNPDVGYEEKGNLIRSVVEQIIYDKESGKMSFDIIIS

SEQ ID NO: 7488 - protein, 471 aa, Unknown
  Description of Unknown: Integrase B7489 sequence
  IPR036162,PS51737,IPR011109,PTHR30461,PS00397, PF00239,G3DSA:1.10.10.2600,IPR006119,SSF53041,cd00338, SM00857,IPR025827,IPR038109,PS51736,IPR006118, PF13408,G3DSA:3.40.50.1390,PF07508,Coil
MSSKVAALYIRVSTEDQTELSPDAQKRLLLDYAQKNDMIVSGDFIFTESVSGRHAQKRPEFQKMIALAKQPSHPIDVILVWKFSRFARNQEESIVYKSMLKKDNVDVISVSEPLIEGPFGSLIERIIEWMDEYYSIRLSGEVLRGMKEKALQKGYQTSPCLGYTAVGHGKPYVINEAEYAIVSYIMDLYDNQNLDETAIARRCNDLGYRTKRGKLFERRSVDRILGNPFYCGTVVWNGVEFEGSHEVRLSRERYEKRQKLITSRKRPVKARNVSACKHWLSGLLKCSVCGATLSYTGNNKCPYFQCWKYAKGFHKTSVALSVKKAEEAVISYFDQILDGAEFTYVCKKKKTDHSLQIEQLQKEIGKLTMRESRIKEAYEAGVDTLEEYKNNKDRLVSDRLELTAALSQLLQEEQAEQPDTEKILKEIRSVADVLKNPDVGYEEKGNLIRSVVEQIIYDKESGKMSFDIIIS

SEQ ID NO: 7489 - protein, 471 aa, Unknown
  Description of Unknown: Integrase B7490 sequence
  IPR036162,PS51737,IPR011109,PTHR30461,PS00397, PF00239,G3DSA:1.10.10.2600,IPR006119,SSF53041,cd00338, SM00857,IPR025827,IPR038109,PS51736,IPR006118, PF13408,G3DSA:3.40.50.1390,PF07508,Coil
MSSKVAALYIRVSTEDQTELSPDAQKRLLLDYAQKNDMIVSGDFIFTESVSGRHAQKRPEFQRMIALAKQPSHPIDVILVWKFSRFARNQEESIVYKSMLKKDNVDVISVSEPLIEGPFGSLIERIIEWMDEYYSIRLSGEVLRGMKEKALQKGYQTSPCLGYTAVGHGKPYVINEAEYAIVSYIMDLYDNQNLDETAIARRCNDLGYRTKRGKLFERRSVDRILGNPFYCGTVVWNGVEFEGNHEVRLSRERYEKRQKLITSRKRPVKARNVSACKHWLSGLLKCSVCGATLSYTGNNKCPYFQCWKYAKGFHKTSVALSVKKAEEAVISYFDQILDGAEFTYVCKKKKTDHSLQIEQLQKEISKLTMRESRIKEAYEAGVDTLEEYKNNKDRLVSDRLELTAALSQLLQEEQADQPDTEEILKEIRSVADVLKNPDVGYEEKGNLIRSVVEQIIYDKESGKMSFDIIIS

SEQ ID NO: 7490 - protein, 471 aa, Unknown
  Description of Unknown: Integrase B7491 sequence
  PTHR30461:SF3,IPR036162,PS51737,IPR011109,PTHR30461, PS00397,PF00239,G3DSA:1.10.10.2600,IPR006119,SSF53041, cd00338,SM00857,IPR025827,IPR038109,PS51736, IPR006118,PF13408,G3DSA:3.40.50.1390,PF07508,Coil
MENRVGALYVRVSTDDQTDLSPDAQRRLLLEYAKKNGIIVPSEFIFSESVSGRHALKRPEFQRMIALAKQSSHPIDVILVWKFSRFARNQEESIVYKSMLKKDNVEVVSVSEPLVDGPFGSLIERIIEWMDEYYSIRLSGEVLRGMKEKALQHGYQSVPSLGYRAVGGGKPFVIDEGEYAIVALIMDLYDNGNLDPTAIARRCNDLGYRTRRGTLFEHRTVMRILQNAFYCGTVAWNGIEFEGSHEVRLSKERFHHRQELIAARHRPAKARSVSACKHWLSGLLRCSTCGGTLARNGCRGYSYFQCWKYTKGFHKGSSAIRIEEAEKAVINYFDGILSGADFSYVRKSQSTIDNTAAIEQLQRELSRLSVKEDRIRDAYENGIDTLEEYKDNKMRLADSRHRLEQELQNLQSTKELPIDREKILEEIRSVNDVLKDPDVSYEEKGNLIRTIVEQIVYDKKTGKMYFDIIVP

SEQ ID NO: 7491 - protein, 471 aa, Unknown
  Description of Unknown: Integrase B7492 sequence
  IPR036162,PS51737,IPR011109,PTHR30461,PS00397, PF00239,G3DSA:1.10.10.2600,IPR006119,SSF53041,cd00338, SM00857,IPR025827,IPR038109,PS51736,IPR006118, PF13408,G3DSA:3.40.50.1390,PF07508,Coil
MSSKVAALYIRVSTEDQTELSPDAQKRLLLDYAQKNDMIVSGDFIFTESVSGRHAQKRPEFQKMIALAKQPSHPIDVILVWKFSRFARNQEESIVYKSMLKKDNVDVISVSEPLIEGPFGSLIERIIEWMDEYYSIRLSGEVLRGMKEKALQKGYQTSPCLGYTAVGHGKPYVINEAEYAIVSYIMDLYDNQNLDETAIARRCNDLGYRTKRGKLFERRSVDRILGNPFYCGTVVWNGVEFEGSHEVRLSRERYEKRQKLITSRKRPVKARNVSACKHWLSGLLKCSVCGATLSYTGNNKCPYFQCWKYAKGFHKTSVALSVKKAEEAVISYFDQILDGAEFTYVCKKKKTDHSLQIEQLQKEIGKLTMRESRIKEAYEAGVDTLEEYKNNKDRLVSDRLELTVALSQLLQEEQAEQPDTEEILKEIRSVSDVLKNPDVGYEEKGNLIRSVVEQIIYDKESGKMSFDIIIS

SEQ ID NO: 7492 - protein, 471 aa, Unknown
  Description of Unknown: Integrase B7493 sequence
  IPR036162,PS51737,IPR011109,PTHR30461,PS00397, PF00239,G3DSA:1.10.10.2600,IPR006119,SSF53041,cd00338, SM00857,IPR025827,IPR038109,PS51736,IPR006118, PF13408,G3DSA:3.40.50.1390,PF07508,Coil
MSSKVAALYIRVSTEDQTELSPDAQKRLLLDYAQKNDMIVSGDFIFTESVSGRHAQKRPEFQKMIALAKQPSHPIDVILVWKFSRFARNQEESIVYKSMLKKDNVDVISVSEPLIEGPFGSLIERIIEWMDEYYSIRLSGEVLRGMKEKALQKGYQTSPCLGYTAVGHGKPYIINEAEYAIVSYIMDLYDNQNLDETAIARRCNDLGYRTKRGKLFERRSVDRILGNPFYCGTVVWNGVEFEGSHEVRLSRERYEKRQKLITSRKRPVKARNVSACKHWLSGLLKCSVCGATLSYTGNNKCPYFQCWKYAKGFHKTSVALSVKKAEEAVISYFDQILDGAEFTYVCKKKKTDHSLQIEQLQKEISKLTMRESRIKEAYEAGVDTLEEYKNNKDRLVSDRLELTAALSQLLQEEQAEQPDTEEILKEIRSVADVLKNPDVGYEEKGNLIRSVVEQIIYDKESGKMSFDIIIS

SEQ ID NO: 7493 - protein, 471 aa, Unknown
  Description of Unknown: Integrase B7494 sequence
  IPR036162,PS51737,IPR011109,PTHR30461,PS00397, PF00239,G3DSA:1.10.10.2600,IPR006119,SSF53041,cd00338, SM00857,IPR025827,IPR038109,PS51736,IPR006118, PF13408,G3DSA:3.40.50.1390,PF07508,Coil
MSSKVAALYIRVSTEDQTELSPDAQKRLLLDYAQKNDMIVSGDFIFTESVSGRHAQKRPEFQKMIALAKQPSHPIDVILVWKFSRFARNQEESIVYKSMLKKDNVDVISVSEPLIEGPFGSLIERIIEWMDEYYSIRLSGEVLRGMKEKALQKGYQTSPCLGYTAVGHGKPYIINEAEYAIVSYIMDLYDNQNLDETAIARRCNDLGYRTKRGKLFERRSVDRILGNPFYCGTVVWNGVEFEGSHEVRLSRERYEKRQKLITSRKRPVKARNVSACKHWLSGLLKCSVCGATLSYTGNNKCPYFQCWKYAKGFHKTSVALSVKKAEEAVISYFDQILDGAEFTYVCKKKKTDHSLQIEQLQKEISKLTMRESRIKEAYEAGVDTLEEYKNNKDRLVSDRLELTTALSQLLQEEQAEQPDTEEILKEIRSVADVLKNPDVGYEEKGNLIRSVVEQIIYDKESGKMSFDIIIS

SEQ ID NO: 7494 - protein, 471 aa, Unknown
  Description of Unknown: Integrase B7495 sequence
  IPR036162,PS51737,IPR011109,PTHR30461,PS00397, PF00239,G3DSA:1.10.10.2600,IPR006119,SSF53041,cd00338, SM00857,IPR025827,IPR038109,PS51736,IPR006118, PF13408,G3DSA:3.40.50.1390,PF07508,Coil
MSSKVACLYIRVSTEDQTELSPDAQKRLLLDYAQKNDMIVSGDFIFTESVSGRHAQKRPEFQKMIALAKQPSHPIDVILVWKFSRFARNQEESIVYKSMLKKDNVDVISVSEPLIEGPFGSLIERIIEWMDEYYSIRLSGEVLRGMKEKALQKGYQTSPCLGYTAVGHGKPYVINEAEYAIVSYIMDLYDNQNLDETAIARRCNDLGYRTKRGKLFERRSVDRILGNPFYCGTVVWNGVEFEGSHEVRLSRERYEKRQKLITSRKRPVKARNVSACKHWLSGLLKCSVCGATLSYTGNNKCPYFQCWKYAKGFHKTSVALSVKKAEEAVISYFDQILDGAEFTYVCKKKKTDHSLQIEQLQREISKLTMRESRIKEAYEAGVDTLEEYKNNKDRLVSDRLELTAALSQLLQEEQAEQPDTEEILKEIRSVADVLKNPDIGYEAKGNLIRSVVEQIIYDKESGKMSFDIIIS

SEQ ID NO: 7495 - protein, 471 aa, Unknown
  Description of Unknown: Integrase B7496 sequence
  PTHR30461:SF3,SM00857,G3DSA:1.10.10.2600,IPR036162,PS51737, G3DSA:3.40.50.1390,IPR006119,IPR038109,PF07508,IPR011109, SSF53041,PF00239,PTHR30461,PS51736,Coil, cd00338
MNVIYLRKSREDLNSEDTLWKHRSTLVELCKRNNWEYTIFEEIGSSDSLDKRTEINKVIALAEEGKIRNVICMDLDRLSRNTFHSTYIQKIFRDNNVKIVTPTKTYDLNNENDILFSELQNVISAQEYRLIRKRMMQGKELGAKEGNLVGGTTPLGYYYDRNERIVKIDEDESKRYRWLIDNFLTGVFSTRTLAVEFNKYYVSKRGNKINCSSLHRILTNRFYLGEIRFKGEWYKGKHQPLITLDEFELVQKQLNGNSIVPLRQGYKKIKPLSQILRCGYCGHTLSVTVDKRYGNFIRCWHSDIITGERCCQKGIKESIVLEVLDAEIKSHMDSLRDAINNGGTEHQNKKINTLQSQIESIDTTIGKLETKKENTILMTQEGILTLAKCKEELAKIEKEIKTFNDDKQLLQKEISSTNKDYKKDLIRFEEVYESLKDATAEEFNTLIRTLVNRIVLKKEDRYTLEVDIQFI

SEQ ID NO: 7496 - protein, 471 aa, Unknown
  Description of Unknown: Integrase B7497 sequence
  IPR036162,PS51737,IPR011109,PTHR30461,PS00397, PF00239,G3DSA:1.10.10.2600,IPR006119,SSF53041,cd00338, SM00857,IPR025827,IPR038109,PS51736,IPR006118, PF13408,G3DSA:3.40.50.1390,PF07508,Coil
MSSKVAALYIRVSTEDQTELSPDAQKRLLLDYAQKNDMIVSGDFIFTESVSGRHAQKRPEFQKMIALAKQPSHPIDVILVWKFSRFARNQEESIVYKSMLKKDNVDVISVSEPLIEGPFGSLIERIIEWMDEYYSIRLSGEVLRGMKEKALQKGYQTSPCLGYTAVGHGKPYIINEAEYAIVSYIMDLYDNQNLDETAIARRCNDLGYRTKRGKLFERRSVDRILGNPFYCGTVVWNGVEFEGSHEVRLSRERYEKRQKLITSRKRPVKARNVSACKHWLSGLLKCSVCGATLSYTGNNKCPYFQCWKYAKGFHKTSVALSVKKAEEAVISYFDQILDGAEFTYVCKKKKTDHSLQIEQLQKEISKLTMRESRIKEAYEAGVDTLEEYKNNKDRLVSDRLELTAALSQLLQKEQAEQPDTEEILKEIRSVSDVLKNPDVGYEEKGNLIRSVVEQIIYDKESGKMSFDIIIS

SEQ ID NO: 7497 - protein, 471 aa, Unknown
  Description of Unknown: Integrase B7498 sequence
  PTHR30461:SF3,SM00857,G3DSA:1.10.10.2600,IPR036162,PF13408, PS51737,G3DSA:3.40.50.1390,IPR025827,IPR006119,IPR038109, PF07508,IPR011109,SSF53041,PF00239,PTHR30461, PS51736,Coil,cd00338
MFAFNASTMEQATDGYSIGEQKDKLLHYASAQGYAVVDTYSDEGFSGKDLLRPNMERMLNDIQHGKINTVLVYKLDRLSRHVKDVLELVETFDKCNVTLYSLSENFDLASPFGRAALKMMATFAELERETIVERMEMGKIARAKDGKYTCPGTRCPFGYRHDKKNDRLLIEESEAEIIRKIFDLYVNHGYTFRKLYDYCREAYPDVKYFNNQMCCKPIIERPLYAGYFRYRGGELTKGTNFEAIISYELFLQAQAQVDRNRTKRLSDSSPYLLTGLLICGRCGNRYVGKMYERYTKKPDGTHTKHYRYRDYGCAARLKRDKNYHPAKCDNDIYRAEELEKIVEDYVLNLNIDDYNKADFSPGLIDKMMSEIGAIKRSQSKLLDLYLSGDIDKDTFLIRKIEYDSKIAELQNLIEKETESVQSAPTNAEAIKKSIAEYSMLNRRQKRTLLEYLIKNIIVDGSRITVNLRLKK

SEQ ID NO: 7498 - protein, 471 aa, Unknown
  Description of Unknown: Integrase B7499 sequence
  IPR036162,PS51737,IPR011109,PTHR30461,PS00397, PF00239,G3DSA:1.10.10.2600,IPR006119,SSF53041,cd00338, SM00857,IPR025827,IPR038109,PS51736,IPR006118, PF13408,G3DSA:3.40.50.1390,PF07508,Coil
MSSKVAALYIRVSTEDQTELSPDAQKRLLLDYAQKNDMIVSGDFIFTESVSGRHAQKRPEFQKMIALAKQPSHPIDVILVWKFSRFARNQEESIVYKSMLKKDNVDVISVSEPLIEGPFGSLIERIIEWMDEYYSIRLSGEVLRGMKEKALQKGYQTSPCLGYTAVGHGKPYVINEAEYAIVSYIMDLYDNQNLDETAIARRCNDLGYRTKRGKLFERRSVDRILGNPFYCGTVVWNGVEFEGSHEVRLSRERYEKRQKLITSRKRPVKARNVSACKHWLSGLLKCSVCGATLSYTGNNKCPYFQCWKYAKGFHKTSVALSVKKAEEAVISYFDQILDGAEFTYVCKKKKTDHSLQIEQLQREISKLTMRESRIKEAYEAGVDTLEEYKNNKDRLVSDRLELTAALSQLLQEEQAEQPDTEEILKEIRSVADVLKNPDIGYEAKGNLIRSVVEQIIYDKESGKMSFDIIIS

SEQ ID NO: 7499 - protein, 471 aa, Unknown
  Description of Unknown: Integrase B7500 sequence
  SM00857,G3DSA:1.10.10.2600,IPR036162,PS51737,G3DSA:3.40.50.1390, IPR006119,IPR038109,PF07508,IPR011109,SSF53041, PF00239,PTHR30461,PS51736,Coil,cd00338
MPFEDYIDGAAYTRVSSGKQEELSPAAQKRLLLDYAKKHKILIRPEHIFMENGISGRNAQKRPEFQKMIALAKQKPSPFQVILVWKFSRFARNQEESIVYKSMLKKQCHVEVISITEPLIDGPFGSLIERIIEWMDEYYSINLSGETLRGMTENALRGGYQSTPCLGYAAVGNGQPFVVVKEEKNVVQFIFEKFCYSYMEPTAIARVLNEKGIKTKRGGLFEKRSVTYILRNQFYIGKISWNGVEHDGAHETFISQELFDLAQERLNATFKPKKRRDISECKHWASGLVKCSICGATLSYNKCRYPFFNCWKYSKGFHKETSSISEKNLVKGILDYFEKLLDGEDFSFHSLPASEPVSLRENYEDELKKLDAREQRVRLAYENGIDSLEEYRENKIRLQAERRQLQELQNACKEPEPISKADFLEKIHTVYDILKDDGISYEIKGTFLRSVVEEIIYDKEKNSLAFHLYRS

SEQ ID NO: 7500 - protein, 471 aa, Unknown
  Description of Unknown: Integrase B7501 sequence
  IPR036162,PS51737,IPR011109,PTHR30461, PS00397,PF00239,G3DSA:1.10.10.2600,IPR006119, SSF53041,cd00338,SM00857,IPR025827,IPR038109,PS51736 ,IPR006118,PF13408,G3DSA:3.40.50.1390,PF07508,Coil
MSSKVACLYIRVSTEDQTELSPDAQKRLLLDYAQKNDMIVSGDFIFTESVSGRHAQKRPEFQKMIALAKQPSHPIDVILVWKFSRFARNQEESIVYKSMLKKDNVDVISVSEPLIEGPFGTLIERIIEWMDEYYSIRLSGEVLRGMKEKALQNGYQTSPCLGYDAVGHGKPYVINEAEYAVVSYIMDLYDNHNLDETAIARRCNDLGYRTKRGNLFERRTVDRILENPFYCGTVIWNGVEFEGSHEVRLSKERYEKRQRLIASRKRPVKARNVSACKHWLSGLLKCSICGATLSYTGNNKCPYFQCWKYAKGFHKVSTALSVKKAEEAVINYFEQILNGAEFTYVCKRKTTDNSLQIEQLQKEINKLSMRESRIRDAYEAGIDTLEEYKNNKERLVSDRLELTAALSQLLQEEQADVPDTEEVLKEIRSIADILKNPDVSYEEKGSLIRSVVEQIVYDKASGKMSFDIIIS

SEQ ID NO: 7501 - protein, 471 aa, Unknown
  Description of Unknown: Integrase B7502 sequence
  IPR036162,PS51737,IPR011109,PTHR30461,PS00397, PF00239,G3DSA:1.10.10.2600,IPR006119,SSF53041,cd00338, SM00857,IPR025827,IPR038109,PS51736,IPR006118, PF13408,G3DSA:3.40.50.1390,PF07508,Coil
MSSKVAALYIRVSTEDQTELSPDAQKRLLLDYAQKNDMIVSGDFIFTESVSGRHAQKRPEFQKMIALVKQPSHPIDVILVWKFSRFARNQEESIVYKSMLKKDNVDVISVSEPLIEGPFGSLIERIIEWMDEYYSIRLSGEVLRGMKEKALQKGYQTSPCLGYTAVGHGKPYIINEAEYAIVSYIMDLYDNQNLDETAIARRCNDLGYRTKRGKLFERRSVDRILGNPFYCGTVVWNGVEFEGSHEVRLSRERYEKRQKLITSRKRPVKARNVSACKHWLSGLLKCSVCGATLSYTGNNKCPYFQCWKYAKGFHKTSVALSVKKAEEAVISYFDQILDGAEFTYVCKKKKTDHSLQIEQLQKEINKLTMRESRIKEAYEAGVDTLEEYKNNKDRLVSDRLELTAALSQLLQEEQAEQPDTEEILKEIRSVADVLKNPDVGYEEKGNLIRSVVEQIIYDKESGKMSFDIIIS

SEQ ID NO: 7502 - protein, 471 aa, Unknown
  Description of Unknown: Integrase B7503 sequence
  IPR036162,PS51737,IPR011109,PTHR30461,PS00397, PF00239,G3DSA:1.10.10.2600,IPR006119,SSF53041,cd00338, SM00857,IPR025827,IPR038109,PS51736,IPR006118, PF13408,G3DSA:3.40.50.1390,PF07508,Coil
MSSKVAALYIRVSTEDQTELSPDAQKRLLLDYAQKNDMIVSGDFIFTESVSGRHAQKRPEFQKMIALAKQPSHPIDVILVWKFSRFARNQEESIVYKSMLKKDNVDVISVSEPLIEGPFGSLIERIIEWMDEYYSIRLSGEVLRGMKEKALQKGYQTSPCLGYTAVGHGKPYVINEAEYTIVSYIMDLYDNQNLDETAIARRCNDLGYRTKRGKLFERRSVDRILGNPFYCGTVVWNGVEFEGSHEVRLSRERYEKRQKLITSRKRPVKARNVSACKHWLSGLLKCSVCGATLSYTGNNKCPYFQCWKYAKGFHKTSVALSVKKAEEAVISYFEQILDGAEFTYVCKKKKTDHSLQIEQLQKEISKLSMRESRIKEAYEAGVDTLEEYKRNKDRLVSDRLELTAALSQLLQEEQAEQPNTEEVLKEIRSVADVLKNPDVGYEEKGNLIRSVVEQIIYDKESGKMSFDIIIS

SEQ ID NO: 7503 - protein, 471 aa, Unknown
  Description of Unknown: Integrase B7504 sequence
  IPR036162,PS51737,IPR011109,PTHR30461,PS00397, PF00239,G3DSA:1.10.10.2600,IPR006119,SSF53041,cd00338, SM00857,IPR025827,IPR038109,PS51736,IPR006118, PF13408,G3DSA:3.40.50.1390,PF07508,Coil
MSSKVACLYIRVSTEDQTELSPDAQKRLLLDYAQKNDMIVSGDFIFTESVSGRHAQKRPEFQKMIALAKQPSHPIDVILVWKFSRFARNQEESIVYKSMLKKDNVDVISVSEPLIEGPFGSLIERIIEWMDEYYSIRLSGEVLRGMKEKALQKGYQTSPCLGYTAVGHGKPYIINEAEYAIVSYIMDLYDNQNLDETAIARRCNDLGYRTKRGKLFERRSVDRILGNPFYCGIVVWNGVEFEGSHEVRLSRERYEKRQKLITSRKRPVKARNVSACKHWLSGLLKCSVCGATLSYTGNNKCPYFQCWKYAKGFHKTSVALSVKKAEEAVISYFDQILDGAEFTYVCKKKKTDHSLQIEQLQKEISKLTMRESRIKEAYEAGVDTLEEYKNNKDRLVSDRLELTAALSQLLQEEQAEQPDTEEILKEIRSVADVLKNPDVGYEEKGNLIRSVVEQIIYDKESGKMSFDIIIS

SEQ ID NO: 7504 - protein, 471 aa, Unknown
  Description of Unknown: Integrase B7505 sequence
  IPR036162,PS51737,IPR011109,PTHR30461,PS00397, PF00239,G3DSA:1.10.10.2600,IPR006119,SSF53041,cd00338, SM00857,IPR025827,IPR038109,PS51736,IPR006118, PF13408,G3DSA:3.40.50.1390,PF07508,Coil
MSSKVAALYIRVSTEDQTELSPDAQKRLLLDYAQKNDMIVSGDFIFTESVSGRHAQKRPEFQKMIALAKQPSHPIDVILVWKFSRFARNQEESIVYKSMLKKDNVDVISVSEPLIEGPFGSLIERIIEWMDEYYSIRLSGEVLRGMKEKALQKGYQTSPCLGYTAVGHGKPYIINEAEYAIVSYIMDLYDNQNLDETAIARRCNDLGYRTKRGKLFERRSVDRILGNPFYCGTVVWNGVEFEGNHEVRLSRERYEKRQKLITSRKRPVKARNVSACKHWLSGLLKCSVCGATLSYTGNNKCPYFQCWKYAKGFHKTSVALSVKKAEEAVISYFDQILDGAEFTYVCKKKKTDHSLQIDQLQREISKLAMREGRIKEAYEAGVDTLAEYKNNKDRLVSDRLELTAALSQLLQEEQAEQPDAEEILKEIRSVADVLKNPDVGYEEKGNLIRSVVEQIIYDKESGKMSFDIIIS

SEQ ID NO: 7505 - protein, 471 aa, Unknown
  Description of Unknown: Integrase B7506 sequence
  IPR036162,PS51737,IPR011109,PTHR30461,PS00397, PF00239,G3DSA:1.10.10.2600,IPR006119,SSF53041,cd00338, SM00857,IPR025827,IPR038109,PS51736,IPR006118, PF13408,G3DSA:3.40.50.1390,PF07508,Coil
MSSKVACLYIRVSTEDQTELSPDAQKRLLLDYAQKNDMIVSGDFIFTESVSGRHAQKRPEFQKMIALAKQPSHPIDVILVWKFSRFARNQEESIVYKSMLKKDNVDVISVSEPLIEGPFGSLIERIIEWMDEYYSIRLSGEVLRGMKEKALQKGYQTSPCLGYTAVGHGKPYIINEAEYAIVSYIMDLYDNQNLDETAIARRCNDLGYRTKRGKLFERRSVDRILGNPFYCGTVVWNGVEFEGSHEVRLSRERYEKRQKLITSRKRPVKARNVSACKHWLSGLLKCSVCGATLSYTGNNKCPYFQCWKYAKGFHKTSVALSVKKAEEAVISYFDQILDGAEFTYVCKKKKTDHSLQIEQLQKEIGKLTMREGRIKEAYEAGVDTLEEYKNNKDRLVSDRLELTAALSQLLQEEQAEQPDAEEILKEIRSVADVLKNPDVGYEEKGNLIRSVVEQIIYDKESGKMSFDIIIS

SEQ ID NO: 7506 - protein, 471 aa, Unknown
  Description of Unknown: Integrase B7507 sequence
  IPR036162,PS51737,IPR011109,PTHR30461,PS00397, PF00239,G3DSA:1.10.10.2600,IPR006119,SSF53041,cd00338, SM00857,IPR025827,IPR038109,PS51736,IPR006118, PF13408,G3DSA:3.40.50.1390,PF07508,Coil
MSSKVAALYIRVSTEDQTELSPDAQKRLLLDYAQKNDMIVSGDFIFTESVSGRHAQKRPEFQKMIALAKQPSHPIDVILVWKFSRFARNQEESIVYKSMLKKDNVDVISVSEPLIEGPFGSLIERIIEWMDEYYSIRLSGEVLRGMKEKALQKGYQTSPCLGYTAVGHGKPYIINEAEYAIVSYIMDLYDNQNLDETAIARRCNDLGYRTKRGKLFERRSVDRILGNPFYCGTVVWNGVEFEGNHEVRLSRERYEKRQKLITSRKRPVKARNVSACKHWLSGLLKCSVCGATLSYTGNNKCPYFQCWKYAKGFHKTSVALSVKKAEEAVISYFDQILDGAEFTYVCKKKKTDHSLQIEQLQKEIGKLTMRESRIKEAYEAGVDTLEEYKNNKDRLVSDRLELTAALSQLLQEEQSEQPNTEEILKEIRSVADVLKNPDVGYEEKGNLIRSVVEQIIYDKGSGKMSFDIIIS

SEQ ID NO: 7507 - protein, 471 aa, Unknown
  Description of Unknown: Integrase B7508 sequence
  IPR036162,PS51737,IPR011109,PTHR30461,PS00397, PF00239,G3DSA:1.10.10.2600,IPR006119,SSF53041,cd00338, SM00857,IPR025827,IPR038109,PS51736,IPR006118, PF13408,G3DSA:3.40.50.1390,PF07508,Coil
MSSKVAALYIRVSTEDQTELSPDAQKRLLLDYAQKNDMIVSGDFIFTESVSGRHAQKRPEFQKMIALAKQPSHPIDVILVWKFSRFARNQEESIVYKSMLKKDNVDVISVSEPLIEGPFGSLIERIIEWMDEYYSIRLSGEVLRGMKEKALQKGYQTSPCLGYTAVGHGKPYVINEAEYAIVSYIMDLYDNQNLDETAIARRCNDLGYRTKRGKLFERRSVDRILGNPFYCGTVVWNGVEFEGNHEVRLSRERYEKRQKLITSRKRPVKARNVSACKHWLSGLLKCSVCGATLSYTGNNKCPYFQCWKYAKGFHKTSVALSVKKAEDAVITYFEQILDGAEFTYVCKKKKTDHSLQIDQLQREISKLAMREGRIKEAYEAGVDTLEEYKNNKDRLVSDRLELTAALSQLLQEEQADQPDTEEILKEIRSVADVLKNPDVGYEEKGNLIRSVVEQIIYDKESGKMSFDIIIS

SEQ ID NO: 7508 - protein, 471 aa, Unknown
  Description of Unknown: Integrase B7509 sequence
  cd00338,SM00857,G3DSA:1.10.10.2600,IPR036162,PF13408, IPR025827,G3DSA:3.40.50.1390,PS51737,IPR006119,IPR038109, PF07508,SSF53041,IPR011109,PTHR30461,PS51736, Coil,PF00239
MSSKVAALYSRVSTEDQTELSPDAQKRLLLDYAQKNDMIVSGDFIFTESVSGRHAQKRPEFQKMIALAKQPSHPIDVILVWKFSRFARNQEESIVYKSMLKKDNVDVISVSEPLIEGPFGSLIERIIEWMDEYYSIRLSGEVLRGMKEKALQKGYQTSPCLGYTAVGHGKPYIINEAEYAIVSYIMDLYDNQNLDETAIARRCNDLGYRTKRGKLFERRSVDRILGNPFYCGTVVWNGVEFEGSHEVRLSRERYEKRQKLITSRKRPVKARNVSACKHWLSGLLKCSVCGATLSYTGNNKCPYFQCWKYAKGFHKTSVALSVKKAEEAVISYFDQILDGAEFTYVCKKKKTDHSLQIEQLQKEISKLTMRESRIKEAYEAGVDTLEEYKNNKDRLVSDRLELTAALSQLLQEEQADQPDTEEILKEIRSVADVLKNPDVGYEEKGNLIRSVVEQIIYDKESGKMSFDIIIS

SEQ ID NO: 7509 - protein, 471 aa, Unknown
  Description of Unknown: Integrase B7510 sequence
  PTHR30461:SF3,cd00338,SM00857,G3DSA:1.10.10.2600,IPR036162, PF13408,IPR025827,PS51737,G3DSA:3.40.50.1390,IPR006119, IPR038109,PF07508,IPR011109,SSF53041,PTHR30461, PS51736,Coil,PF00239
MDGKLKEIDKNCGDIMRNKEIAPALVRVALYIRVSGEEQKIKGLSLEAQQERLEAYARERGWVIVGIYIDAAKTARKNIHKRTEFQRMMDSVKRDEVDILLFARLDRWFRSVADYYKVMEVLQAHNCDWKTTDEEYDTTTANGRLYINVKLSIAQNEADIDGERIDVVFDSKIAHGTVVSGSAPFGFRVNEEKRLEVVPEDAAIVQDAFNYFENTVSQRATVRYIRETYGVNWCDATFRRMLKEKLYTGVYDRGGRYNDQFCPAIIDRQQFDRVQALLTRNVRSALSGKVYIFTSILTCAECGHKLVGYKSSDYFYYRCNQHFQRGRCSHNHSAREDVVEQWLFEHLGEELERCQLEWDVEAAKKKASVARTDKAALKRKLTKLKELYVNDLIDIEDYKKDYQIYVSALNQIPEPAQEAPPDFAAVRRLLDNSFRTIYDTLTREEKRTLWRSVIKEIRIDNDQNITGVVFG

SEQ ID NO: 7510 - protein, 471 aa, Unknown
  Description of Unknown: Integrase B7511 sequence
  IPR036162,PS51737,IPR011109,PTHR30461,PS00397, PF00239,G3DSA:1.10.10.2600,IPR006119,SSF53041,cd00338, SM00857,IPR025827,IPR038109,PS51736,IPR006118, PF13408,G3DSA:3.40.50.1390,PF07508,Coil
MSSKVACLYIRVSTEDQTELSPDAQKRLLLDYAQKNDMIVSGNFIFTESVSGRHAQKRPEFQKMIALAKQPSHPIDVILVWKFSRFARNQEESIVYKSMLKKDNVDVISVSEPLIEGPFGSLIERIIEWMDEYYSIRLSGEVLRGMKEKALQKGYQTSPCLGYTAVGHGKPYIINEAEYAIVSYIMDLYDNQNLDETAIARRCNDLGYRTKRGKLFERRSVDRILGNPFYCGTVVWNGVEFEGNHEVRLSREQYEKRQKLITSRKRPVKARNVSACKHWLSGLLKCSVCGATLSYTGNNKCPYFQCWKYAKGFHKTSVALSVKKAEEAAISYFDQILDGAEFTYVCKKKKTDHSLQIEQLQREISKLTMRESRIKEAYEAGVDTLEEYKNNKDRLVSDRLELTAALSQLLQEEQADQPDTEEILKEIRSVADVLKNPDVGYEEKGNLIRSVVEQIIYDKESGKMSFDIIIS

SEQ ID NO: 7511 - protein, 471 aa, Unknown
  Description of Unknown: Integrase B7512 sequence
  IPR036162,PS51737,IPR011109,PTHR30461,PS00397, PF00239,G3DSA:1.10.10.2600,IPR006119,SSF53041,cd00338, SM00857,IPR025827,IPR038109,PS51736,IPR006118, PF13408,G3DSA:3.40.50.1390,PF07508,Coil
MSSKVAALYIRVSTEDQTELSPDAQKRLLLDYAQKNDMIVSGDFIFTESVSGRHAQKRPEFQRMIALAKQPSHPIDIILVWKFSRFARNQEESIVYKSMLKKDNVDVISVSEPLIEGPFGSLIERIIEWMDEYYSIRLSGEVLRGMKEKALQKGYQTSPCLGYTAVGHGKPYVINEAEYAIVSYIMDLYDNQNLDETAIARRCNDLGDRTKRGKLFERRSVDRILGNPFYCGTVVWNGVEFEGSHEVRLSRERYEKRQKLITSRKRPVKARNVSACKHWLSGLLKCSVCGATLSYTGNNKCPYFQCWKYAKGFHKTSVALSVKKAEEAVISYFDQILDGAEFTYVCKKKKTDHSLQIEQLQKEIGKLTMRESRIKEAYEAGVDTLEEYKNNKDRLVSDRLELTAALSQLLQEEQAEQPDTEEILKEIRSVADVLKNPDVGYEEKGNLIRSVVEQIIYDKESGKMSFDIIIS

SEQ ID NO: 7512 - protein, 471 aa, Unknown
  Description of Unknown: Integrase B7513 sequence
  IPR036162,PS51737,IPR011109,PTHR30461,PS00397, PF00239,G3DSA:1.10.10.2600,IPR006119,SSF53041,cd00338, SM00857,IPR025827,IPR038109,PS51736,IPR006118, PF13408,G3DSA:3.40.50.1390,PF07508,Coil
MSSKVAALYIRVSTEDQTELSPDAQKRLLLDYAQKNDMIVSGDFIFTESVSGRHAQKRPEFQRMIALAKQPSHPIDVILVWKFSRFARNQEESIVYKSMLKKDNVDVISVSEPLIEGPFGSLIERIIEWMDEYYSIRLSGEVLRGMKEKALQKGYQTSPCLGYTAVGHGKPFVINESEYAIVSYIMDLYDNQNLDETAIARRCNDLGYRTKRGNLFERRSVDRILGNPFYCGTVVWNGMEFEGNHEVRLSRERYEKRQKLITSRRRPVKARNVSACKHWLSGLLKCSVCGATLSYTGNNKCPYFQCWKYAKGFHKTSVALSVKKAEEAVISYFDQILDGAEFTYVCKKKKTDHSLQIEQLQREISKLTMRESRIKEAYEAGVDTLEEYKNNKDRLVSDRLELTAALSQLLQEEQADQPDTEEILKEIRSVADVLKNPDVGYEEKGNLIRSVVEQIIYDKESGKMSFDIIIS

SEQ ID NO: 7513 - protein, 471 aa, Unknown
  Description of Unknown: Integrase B7514 sequence
  IPR036162,PS51737,IPR011109,PTHR30461,PS00397, PF00239,G3DSA:1.10.10.2600,IPR006119,SSF53041,cd00338, SM00857,IPR025827,IPR038109,PS51736,IPR006118, PF13408,G3DSA:3.40.50.1390,PF07508,Coil
MSSKVACLYIRVSTEDQTELSPDAQKRLLLDYAQKNDMIVSGDFIFTESVSGRHAQKRPEFQKMIALAKQPSHPIDVILVWKFSRFARNQEESIVYKSMLKKDNVDVISVSEPLIEGPFGSLIERIIEWMDEYYSIRLSGEVLRGMKEKALQKGYQTSPCLGYTAVGHGKPYVINEAEYAIVSYIMDLYDNQNLDETAIARRCNDLGYRTKRGKLFERRSVDRILGNPFYCGTVVWNGVEFEGSHEVRLSRERYEKRQKLITSRKRPVKARNVSACKHWLSGLLKCSVCGATLSYTGNNKCPYFQCWKYAKGFHKTSVALSVKKAEEAVISYFDQILDGAEFTYVCKKKKTDHSLQIEQLQKEISKLTMRESRIKEAYEAGVDTLEEYKNNKDRLVSDRLELTAALSQLLQEEQAEQPDAEEILKEIRSVADVLKNPDVGYEEKGNLIRSVVEQIIYDKESGKMSFDIIVS

SEQ ID NO: 7514 - protein, 471 aa, Unknown
  Description of Unknown: Integrase B7515 sequence
  IPR036162,PS51737,IPR011109,PTHR30461,PS00397, PF00239,G3DSA:1.10.10.2600,IPR006119,SSF53041,cd00338, SM00857,IPR025827,IPR038109,PS51736,IPR006118, PF13408,G3DSA:3.40.50.1390,PF07508,Coil
MIPAIVYARASTDHQEYSVNDQLKYIKDWAKHHGYKIIKVYIDDGISGAFVAKRPGFLSMIEDVTTNLSGAKALLIWDSYRFARNMVEFLTYKQMIRQHGVSVIAVTEPIVEDEDAQLYIDAINGASGELYLRKLSKDSKRGIRAKVVERHEHLGFAPYGYRMDRNTGQLEIQSEEAQWVQYIFQSVIDGAPYLQICEALRKAGVKTRKGCAWTNTQVKYTLTNKTYCGLLEVHLDGKHGVYEGKHEPIIDQETFDKVQAIIEERAAKHKKYARNTNKYKHWLSGLMRCPYCGGALSYVQGSGGRADRYRCNSRTDGKGCVNTSVKVNVAADFVLDQLQQIYDRPEILCTLKTTTPQPANRIDYDGEIKKLRGQLTRAKKAYMEEIDTLEEYRENKARITAAIEDMEAQKNAAAAGIIKFDPAAFQEKCLSALSVLQSDVDTEKKVAVSHNLIEKIDCDNLKKVLTIYFYS

SEQ ID NO: 7515 - protein, 471 aa, Unknown
  Description of Unknown: Integrase B7516 sequence
  IPR036162,PS51737,IPR011109,PTHR30461,PS00397, PF00239,G3DSA:1.10.10.2600,IPR006119,SSF53041,cd00338, SM00857,IPR025827,IPR038109,PS51736,IPR006118, PF13408,G3DSA:3.40.50.1390,PF07508,Coil
MENRVGALYVRVSTDDQTDLSPDAQRRLLLEYAKKNGIIVPSEFIFSESVSGRHALKRPEFQRMIALAKQSSHPIDVILVWKFSRFARNQEESIVYKSMLKKDNVEVVSVSEPLVDGPFGSLIERIIEWMDEYYSIRLSGEVLRGMKEKALQHGYQSVPSLGYRAVGGGKPFVIDEGEYAIVALIMDLYDNGNLDPTAIARRCNDLGYRTRRGTPFERRTVMRILQNAFYCGTVAWNGIEFEGSHEVRLSKERFQHRQELIAARHRPAKARSVSACKHWLSGLLRCSTCGGTLARNGCRGYSYFQCWKYTKGFHKGSSAIRIEEAEKAVINYFDEILAGADFSYVRKSQSTIDNTAAIEQLQRELSRLSVKEDRIRDAYENGIDTLEEYKDNKMRLADSRHRLEQELQNLQSVKELPIDREKILEEIRSVNDVLKDPDVSYEEKGNLIRTIVEQIVYDKKTGKMYFDIIVP

SEQ ID NO: 7516 - protein, 471 aa, Unknown
  Description of Unknown: Integrase B7517 sequence
  IPR036162,PS51737,IPR011109,PTHR30461,PS00397, PF00239,G3DSA:1.10.10.2600,IPR006119,SSF53041,cd00338, SM00857,IPR025827,IPR038109,PS51736,IPR006118, PF13408,G3DSA:3.40.50.1390,PF07508,Coil
MSSKVACLYIRVSTEDQTELSPDAQKRLLLDYAQKNDMIVSGDFIFTESVSGRHAQKRPEFQKMIALAKQPSHPIDVILVWKFSRFARNQEESIVYKSMLKKDNVDVISVSEPLIEGPFGSLIERIIEWMDEYYSIRLSGEVLRGMKEKALQKGYQTSPCLGYTAVGHGKPYIINEAEYAIVSYIMDLYDNQNLDETAIARRCNDLGYRTKRGKLFERRSVDRILGNPFYCGTVVWNGVEFEGSHEVRLSRERYEKRQKLITSRKRPVKARNVSACKHWLSGLLKCSVCGATLSYTGNNKCPYFQCWKYAKGFHKTSVALSVKKAEEAVISYFDQILDGAEFTYVCKKKKTDHSLQIEQLQKEISKLTMRENRIKEAYEAGVDTLEEYKSNKDRLVSDRLELTAALSQLLQEEQSEQPNTEEILKEIRSVADVLKNPDVGYEEKGNLIRSIVEQIIYDKESGKMSFDIIIS

SEQ ID NO: 7517 - protein, 471 aa, Unknown
  Description of Unknown: Integrase B7518 sequence
  IPR036162,PS51737,IPR011109,PTHR30461,PS00397, PF00239,G3DSA:1.10.10.2600,IPR006119,SSF53041,cd00338, SM00857,IPR025827,IPR038109,PS51736,IPR006118, PF13408,G3DSA:3.40.50.1390,PF07508,Coil
MSSKVAALYIRVSTEDQTELSPDAQKRLLLDYAQKNDMIVSGDFIFTESVSGRHAQKRPEFQKMIALAKQPSHPIDVILVWKFSRFARNQEESIVYKSMLKKDNVDVISVSEPLIEGPFGSLIERIIEWMDEYYSIRLSGEVLRGMKEKALQKGYQTSPCLGYTAVGHGKPYIINEAEYAIVSYIMDLYDNQNLDETAIARRCNDLGYRTKRGKLFERRSVDRILGNPFYCGTVVWNGVEFEGNHEVRLSRERYEKRQKLITSRKRPVKARNVSACKHWLSGLLKCSVCGATLSYTGNNKCPYFQCWKYAKGFHKTSVALSVKKAEEAVISYFDQILDGAEFTYVCKKKKTDHSLQIEQLQKEIGKLTMRESRIKEAYEAGVDTLEEYKNNKDRLVSDRLELTAALSQLLQEEQAEQPDTEEILKEIRSVADVLKNPDVGYEEKGNLIRSVVEQIIYDKESRKMSFDIIIS

SEQ ID NO: 7518 - protein, 471 aa, Unknown
  Description of Unknown: Integrase B7519 sequence
  IPR036162,PS51737,IPR011109,PTHR30461,PS00397, PF00239,G3DSA:1.10.10.2600,IPR006119,SSF53041,cd00338, SM00857,IPR025827,IPR038109,PS51736,IPR006118, PF13408,G3DSA:3.40.50.1390,PF07508,Coil
MSSKVAALYIRVSTEDQTELSPDAQKRLLLDYAQKNDMIVSGDFIFTESVSGRHAQKRPEFQKMIALAKQPSHPIDVILVWKFSRFARNQEESIVYKSMLKKDNVDVISVSEPLIEGPFGSLIERIIEWMDEYYSIRLSGEVLRGMKEKALQKGYQTSPCLGYTAVGHGKPYVINEAEYAIVSYIMDLYDNQNLDETAIARRCNDLGYRTKRGKLFERRSVDRILGNPFYCGTVVWNGVEFEGNHEVRLSRERYEKRQKLITSRKRPVKARNVSACKHWLSGLLKCSVCGATLSYTGNNKCPYFQCWKYAKGFHKTSVALSVKKAEEAVISYFDQILDGAEFTYVCKKKKTDHSLQIDQLQREISKLAMREGRIKEAYEAGVDTLAEYKNNKDRLVSDRLELTAALSQLLQEEQSEQPNTEEVLKEIRSVADVLKNPDVGYEEKGNLIRSVVEQIIYDKESGKMSFDIIIS

SEQ ID NO: 7519 - protein, 471 aa, Unknown
  Description of Unknown: Integrase B7520 sequence
  IPR036162,PS51737,IPR011109,PTHR30461,PS00397, PF00239,G3DSA:1.10.10.2600,IPR006119,SSF53041,cd00338, SM00857,IPR025827,IPR038109,PS51736,IPR006118, PF13408,G3DSA:3.40.50.1390,PF07508,Coil
MSSKVACLYIRVSTEDQTELSPDAQKRLLLDYAQKNDMIVSGDFIFTESVSGRHAQKRPEFQKMIALAKQPSHPIDVILVWKFSRFARNQEESIVYKSMLKKDNVDVISVSEPLIEGPFGSLIERIIEWMDEYYSIRLSGEVLRGMKEKALQKGYQTSPCLGYTAVGHGKPYIINEAEYAIVSYIMDLYDNQNLDETAIARRCNDLGYRTKRGKLFERRSVDRILGNPFYCGTVVWNGVEFEGSHEVRLSRERYEKRQKLIASRRRPVKARNVSACKHWLSGLLKCSVCGATLSYTGNNKCPYFQCWKYAKGFHKTSVALSVKKAEEAVISYFDQILDGAEFTYVCKKKKTDHSLQIEQLQKEISKLTMRESRIKEAYEAGVDTLEEYKNNKDRLVSDRLELTAALSQLLQEEQAEQPDTEEILKEIRSVADVLKNPDVGYEEKGNLIRSVVEQIIYDKESGKMSFDIIIS

SEQ ID NO: 7520 - protein, 471 aa, Unknown
  Description of Unknown: Integrase B7521 sequence
  PTHR30461:SF3,IPR036162,PS51737,IPR011109,PTHR30461, PS00397,PF00239,G3DSA:1.10.10.2600,IPR006119,SSF53041, cd00338,SM00857,IPR025827,IPR038109,PS51736, IPR006118,PF13408,G3DSA:3.40.50.1390,PF07508,Coil
MIPAIVYARASTDHQEYSVNDQLKYIKDWAKHHGYKIIKVYIDDGISGAFVAKRPGFLSMIEDVTTNLSGAKALLIWDSYRFARNMVEFLTYKQMIRQHGVSVIAVTEPIVEDEDAQLYIDAINGASGELYLRKLSKDSKRGIRAKVVERREHLGFAPYGYRMNRNTRQLEIQPEEAKWVKYIFQCVIDGLPYLAICQKLREAGVKTRKGCAWTNTQVKYTLTNKTYCGLLEVTLDGKHGIYDGKHEPIIDRETFDNVKTIIEERQAKHKKYQRSSYQYKHWLSGLMRCPYCGGALSYVQGSGGRADRYRCNSKTDGKGCVNLSVKVKVAADFVLDQLQQIYDSPEMLCTLKTVTPQPANQIDYDGEIKKLRGQLTRAKKAYMEEIDTLEEYRENKTRLTAAIEEMEAQKNAAAAGVIQFDPVAFQEKCLSALSVLQSDVDVEKKVAVSHNLIEKIDCDNINKVLTIYFYS

SEQ ID NO: 7521 - protein, 471 aa, Unknown
  Description of Unknown: Integrase B7522 sequence
  IPR036162,PS51737,IPR011109,PTHR30461,PS00397, PF00239,G3DSA:1.10.10.2600,IPR006119,SSF53041,cd00338, SM00857,IPR025827,IPR038109,PS51736,IPR006118, PF13408,G3DSA:3.40.50.1390,PF07508,Coil
MSSKVACLYIRVSTEDQTELSPDAQKRLLLDYAQKNDMIVSGDFIFTESVSGRHAQKRPEFQKMIALAKQPSHPIDVILVWKFSRFARNQEESIVYKSMLKKDNVDVISVSEPLIEGPFGSLIERIIEWMDEYYSIRLSGEVLRGMKEKALQKGYQTSPCLGYTAVGHGKPYIINEAEYAIVSYIMDLYDNQNLDETAIARRCNDLGYRTKRGKLFERRSVDRILGNPFYCGTVVWNGVEFEGNHEVRLSRERYEKRQKLITSRKRPVKARNVSACKHWLSGLLKCSVCGATLSYTGNNKCPYFQCWKYAKGFHKTSVALSVKKAEEAVISYFDQILDGAEFTYVCKKKKTNHSLQIEQLQKEISKLTMRESRIKEAYEAGVDTLEEYKNNKDRLVSDRLELTAALSQLLQEEQADQPDTEEILKEIRSVADVLKNPDVGYEEKGNLIRSVVEQIIYDKESGKMSFDIIIS

SEQ ID NO: 7522 - protein, 471 aa, Unknown
  Description of Unknown: Integrase B7523 sequence
  PTHR30461:SF3,cd00338,SM00857,G3DSA:1.10.10.2600,IPR036162, PF13408,IPR025827,PS51737,G3DSA:3.40.50.1390,IPR006119, IPR038109,PF07508,SSF53041,IPR011109,PTHR30461, PS51736,Coil,PF00239
MDGKLKEIDKNCGDIMRNKEIAPALVRVALYIRVSGEEQKIKGLSLEAQQERLEAYARERGWVIVGIYIDAAKTARKNIHKRTEFQRMMDSVKRDEVDILLFARLDRWFRSVADYYKVMEVLQAHNCDWKTTDEEYDTTTANGRLYINVKLSIAQNEADIDGERIDVVFDSKIAHGTVVSGSAPFGFRVNEEKRLEVVPENAAIVQDAFNYFENTVSQRATVRYVRETYGVNWCDATFRRMLKEKLYTGVYDRGGRYNDQFCPAIINRHQFDRVQALLTRNVRSAPSGKVYIFTSILTCAECGHKLVGYKSSDYFYYRCNQHFQRGRCSHNHSAREDVVEAWLFDHLGEELERCQLEWDVEAAKKKASVARTDKAALKRKLTKLKELYVNDLIDIEDYKKDYQIYVSALNQIPEPAQEAPPDFAAVRRLLDNSFRTIYDTLTREEKRTLWRSVIKEIRIDNDQNITGVVFG

SEQ ID NO: 7523 - protein, 471 aa, Unknown
  Description of Unknown: Integrase B7524 sequence
  IPR036162,PS51737,IPR011109,PTHR30461,PS00397, PF00239,G3DSA:1.10.10.2600,IPR006119,SSF53041,cd00338, SM00857,IPR025827,IPR038109,PS51736,IPR006118, PF13408,G3DSA:3.40.50.1390,PF07508,Coil
MSSKVAALYIRVSTEDQTELSPDAQKRLLLDYAQKNDMIVSGDFIFTESVSGRHAQKRPEFQKMIALAKQPSHPIDVILVWKFSRFARNQEESIVYKSMLKKDNVDVISVSEPLIEGPFGSLIERIIEWMDEYYSIRLSGEVLRGMKEKALQKGYQTSPCLGYTAVGHGKPYIINEAEYAIVSYIMDLYDNQNLDETAIARRCNDLGYRTKRGKLFERRSVDRILGNPFYCGTVVWNGVEFEGSHEVRLSRERYEKRQKLITSRKRPVKARNVSACKHWLSGLLKCSVCGATLSYTGNNKCPYFQCWKYAKGFHKTSVALSVKKAEEAVISYFDQILDGAEFTYVCKKKKTDHSLQIEQLQREIGKLTMRESRIKEAYEAGVDTLEEYKNNKDRLVSDRLELTAALSQLLQEEQAEQPDTEEILKEIRSVADVLKNPDVGYEEKGNLIRSVVEQIIYDKESGKMSFDIIIS

SEQ ID NO: 7524 - protein, 471 aa, Unknown
  Description of Unknown: Integrase B7525 sequence
  IPR036162,PS51737,IPR011109,PTHR30461,PS00397, PF00239,G3DSA:1.10.10.2600,IPR006119,SSF53041,cd00338, SM00857,IPR025827,IPR038109,PS51736,IPR006118, PF13408,G3DSA:3.40.50.1390,PF07508,Coil
MIPAIVYARASTDHQEYSVKDQLKYIKDWAKHHGYKIIKVYIDDGISGAFVAKRPGFLSMIEDVTTNISGAKALLIWDSYRFARNMVEFLTYKQMIRQHGVSVIAVTEPIVEDEDAQLYIDAINGASGELYLRKLSKDSKRGLRAKVVERHEHLGFAPYGYRMDRNTGQLEIQPEEARWVQYIFQSVIDGAPYLQICEALRKAGVKTRKGCAWTNTQVKYTLTNKTYCGLLEVHLDGKHGVYDGKHEPIIDRETFDNVQTIIEERAAKHKKYARNTNKYKHWLSGLMRCPYCGGALSYVQGSGGRADRYRCNSRTDGKGCVNTSVKVNVAADFVLDQLQQIYDRPEILCTLKTTTPQPANRVDYDAEIKKLRGQLTRAKKAYMEEIDTLEEYRENKTRITAAIEDMETQKNAAAAGIIKFDPAAFQKKCLSALSVLQSDVDTEKKVAVSHNLIEKIDCDNLNKVLTIYFYS

SEQ ID NO: 7525 - protein, 471 aa, Unknown
  Description of Unknown: Integrase B7526 sequence
  IPR036162,PS51737,IPR011109,PTHR30461,PS00397, PF00239,G3DSA:1.10.10.2600,IPR006119,SSF53041,cd00338, SM00857,IPR025827,IPR038109,PS51736,IPR006118, PF13408,G3DSA:3.40.50.1390,PF07508,Coil
MSSKVACLYIRVSTEDQTELSPDAQKRLLLDYAQKNDMIVSGDFIFTESVSGRHAQKRPEFQKMIALAKQPSHPIDVILVWKFSRFARNQEESIVYKSMLKKDNVDVISVSEPLIEGPFGSLIERIIEWMDEYYSIRLSGEVLRGMKEKALQKGYQTSPCLGYTAVGHGKPYVINEAEYAIVSYIMDLYDNQNLDETAIARRCNDLGYRTKRGKLFERRSVDRILGNPFYCGTVVWNGVEFEGNHEVRLSREQYEKRQKLITSRKRPVKARNVSACKHWLSGLLKCSVCGATLSYTGNNKCPYFQCWKYAKGFHKTSVALSVKKAEEAAISYFDQILDGAEFTYVCKKKKTDHSLQIEQLQREISKLTMRESRIKEAYEAGVDTLEEYKNNKDRLVSDRLELTAALSQLLQEEQADQPDTEEILKEIRSVADVLKNPDVGYEEKGNLIRSVVEQIIYDKESGKMSFDIIIS

SEQ ID NO: 7526 - protein, 471 aa, Unknown
  Description of Unknown: Integrase B7527 sequence
  IPR036162,PS51737,IPR011109,PTHR30461,PS00397, PF00239,G3DSA:1.10.10.2600,IPR006119,SSF53041,cd00338, SM00857,IPR025827,IPR038109,PS51736,IPR006118, PF13408,G3DSA:3.40.50.1390,PF07508,Coil
MSSKVACLYIRVSTEDQTELSPDAQKRLLLDYAQKNDMIVSGDFIFTESVSGRHAQKRPEFQKMIALAKQPSHPIDVILVWKFSRFARNQEESIVYKSMLKKDNVDVISVSEPLIEGPFGSLIERIIEWMDEYYSIRLSGEVLRGMKEKALQKGYQTSPCLGYTAVGHGKPYIINEAEYAIVSYIMDLYDNQNLDETAIARRCNDLGYRTKRGKLFERRSVDRILGNPFYCGTVVWNGVEFEGNHEVRLSRERYEKRQKLITSRKRPVKARNVSACKHWLSGLLKCSVCGATLSYTGNNKCPYFQCWKYAKGFHKTSVALSVKKAEEAVISYFDQILDGAEFTYVCKKKKTDHSLQIDQLQREISKLAMREGRIKEAYEAGVDTLAEYKNNKDRLVSDRLELTAALSQLLQEEQSEQPNTEEVLKEIRSVADVLKNPDVGYEEKGNLIRSVVEQIIYDKESGKMSFDIIIS

SEQ ID NO: 7527 - protein, 471 aa, Unknown
  Description of Unknown: Integrase B7528 sequence
  IPR036162,PS51737,IPR011109,PTHR30461,PS00397, PF00239,G3DSA:1.10.10.2600,IPR006119,SSF53041,cd00338, SM00857,IPR025827,IPR038109,PS51736,IPR006118, PF13408,G3DSA:3.40.50.1390,PF07508,Coil
MSSKVAALYIRVSTEDQTELSPDAQKRLLLDYAQKNDMIVSGDFIFTESVSGRHAQKRPEFQKMIALAKQPSHPIDVILVWKFSRFARNQEESIVYKSMLKKDNVDVISVSEPLIEGPFGSLIERIIEWMDEYYSIRLSGEVLRGMKEKALQKGYQTSPCLGYTAVGHGKPYVINEAEYAIVSYIMDLYDNQNLDETAIARRCNDLGYRTKRGKLFERRSVDRILGNPFYCGTVVWNGVEFEGNHEVRLSRERYEKRQKLITSRKRPVKARNVSACKHWLSGLLKCSVCGATLSYTGNNKCPYFQCWKYAKGFHKTSVALSVKKAEEAVISYFDQILDGAEFTYVCKKKKTDHSLQIEQLQREIGKLTMRESRIKEAYEAGVDTLEEYKNNKDRLVSDRLELTAALSQLLQEEQAEQPDTEEILKEIRSVADVLKNPDVGYEEKGNLIRSVVEQIIYDKESGKMSFDIIIS

SEQ ID NO: 7528 - protein, 471 aa, Unknown
  Description of Unknown: Integrase B7529 sequence
  IPR036162,PS51737,IPR011109,PTHR30461,PS00397, PF00239,G3DSA:1.10.10.2600,IPR006119,SSF53041,cd00338, SM00857,IPR025827,IPR038109,PS51736,IPR006118, PF13408,G3DSA:3.40.50.1390,PF07508,Coil
MSSKVACLYIRVSTEDQTELSPDAQKRLLLDYAQKNDMIVSGDFIFTESVSGRHAQKRPEFQKMIALAKQPSHPIDVILVWKFSRFARNQEESIVYKSMLKKDNVDVISVSEPLIEGPFGSLIERIIEWMDEYYSIRLSGEVLRGMKEKALQKGYQTSPCLGYTAVGHGKPYIINEAEYAIVSYIMDLYDNQNLDETAIARRCNDLGYRTKRGKLFERRSVDRILGNPFYCGTVVWNGVEFEGNHEVRLSRERYEKRQKLITSRKRPVKARNVSACKHWLSGLLKCSVCGATLSYTGNNKCPYFQCWKYAKGFHKTSVALSVKKAEEAVISYFDQILDGAEFTYVCKKKKTDHSLQIDQLQREISKLAMREGRIKEAYEAGVDTLAEYKNNKDRLVSDRLELTAALSQLLQEEQAEQPDAEEILKEIRSVADVLKNPDVGYEEKGNLIRSVVEQIIYDKESGKMSFDIIIS

SEQ ID NO: 7529 - protein, 471 aa, Unknown
  Description of Unknown: Integrase B7530 sequence
  IPR036162,PS51737,IPR011109,PTHR30461,PS00397, PF00239,G3DSA:1.10.10.2600,IPR006119,SSF53041,cd00338, SM00857,IPR025827,IPR038109,PS51736,IPR006118, PF13408,G3DSA:3.40.50.1390,PF07508,Coil
MSSKVACLYIRVSTEDQTELSPDAQKRLLLDYAQKNDMIVSGDFIFTESVSGRHAQKRPEFQKMIALAKQPSHPIDVILVWKFSRFARNQEESIVYKSMLKKDNVDVISVSEPLIGGPFGSLIERIIEWMDEYYSIRLSGEVLRGMKEKALQKGYQTSPCLGYTAVGHGKPFVINESEYAIVSYIMDLYDNQNLDETAIARRCNDLGYRTKRGNLFERRSVDRILGNPFYCGTVVWNGVEFEGSHEVRLSRERYEKRQKLITSRKRPVKARNVSACKHWLSGLLKCSVCGATLSYTGNNKCPYFQCWKYAKGFHKTSVALSVKKAEEAVISYFDQILDGAEFTYVCKKKKTDHSLQIEQLQREISKLTMRESRIKEAYEAGVDTLEEYKNNKDRLVSDRLELTAALSQLLQEEQAEQPDAEEILKEIRSVTDVLKNPDVGYEAKGNLIRSVVEQIIYDKESGKMSFDIIIS

SEQ ID NO: 7530 - protein, 471 aa, Unknown
  Description of Unknown: Integrase B7531 sequence
  IPR036162,PS51737,IPR011109,PTHR30461,PS00397, PF00239,G3DSA:1.10.10.2600,IPR006119,SSF53041,cd00338, SM00857,IPR025827,IPR038109,PS51736,IPR006118, PF13408,G3DSA:3.40.50.1390,PF07508,Coil
MSSKVACLYIRVSTEDQTELSPDAQKRLLLDYAQKNDMIVSGDFIFTESVSGRHAQKRPEFQKMIALAKQPSHPIDVILVWKFSRFARNQEESIVYKSMLKKDNVDVISVSEPLIEGPFGSLIERIIEWMDEYYSIRLSGEVLRGMKEKALQKGYQTSPCLGYTAVGHGKPYVINEAEYAIVSYIMDLYDNQNLDETAIARRCNDLGYRTKRGKLFERRSVDRILGNPFYCGTVVWNGVEFEGNHEVRLSRERYEKRQKLITSRKRPVKARNVSACKHWLSGLLKCSVCGATLSYTGNNKCPYFQCWKYAKGFHKTSVALSVKKAEDAVITYFEQILDGAEFTYVCKKKKTDHSLQIDQLQREISKLAMREGRIKEAYEAGVDTLEEYKNNKDRLVSDRLELTAALSQLLQEEQAEQPNTEEVLKEIRSVADVLKNPDVGYEEKGNLIRSVVEQIIYDKESGKMSFDIIIS

SEQ ID NO: 7531 - protein, 471 aa, Unknown
  Description of Unknown: Integrase B7532 sequence
  IPR036162,PS51737,IPR011109,PTHR30461,PS00397, PF00239,G3DSA:1.10.10.2600,IPR006119,SSF53041,cd00338, SM00857,IPR025827,IPR038109,PS51736,IPR006118, PF13408,G3DSA:3.40.50.1390,PF07508,Coil
MSSKVAALYIRVSTEDQTELSPDAQKRLLLDYAQKNDMIVSGDFIFTESVSGRHAQKRPEFQKMIALAKQPSHPIDVILVWKFSRFARNQEESIVYKSMLKKDNVDVISVSEPLIEGPFGSLIERIIEWMDEYYSIRLSGEVLRGMKEKALQKGYQTSPCLGYTAVGHGKPYIINEAEYAIVSYIMDLYDNQNLDETAIARRCNDLGYRTKRGKLFERRSVDRILGNPFYCGTVVWNGVEFEGNHEVRLSRERYEKRQKLITSRRRPVKARNVSACKHWLSGLLKCSVCGATLSYTGNNKCPYFQCWKYAKGFHKTSVALSVKKAEEAVISYFEQILDGAEFTYVCKKKKTDHSLQIEQLQKEISKLSMRESRIKEAYEAGVDTLEEYKSNKDRLVSDRLELTAALSQLLQEEQSEQPNTEEILKEIRSVADVLKNPNVGYEEKGNLIRSVVEQIIYDKESGKMSFDIIIS

SEQ ID NO: 7532 - protein, 471 aa, Unknown
  Description of Unknown: Integrase B7533 sequence
  IPR036162,PS51737,IPR011109,PTHR30461,PS00397, PF00239,G3DSA:1.10.10.2600,IPR006119,SSF53041,cd00338, SM00857,IPR025827,IPR038109,PS51736,IPR006118, PF13408,G3DSA:3.40.50.1390,PF07508,Coil
MSSKVAALYIRVSTEDQTELSPDAQKRLLLDYAQKNDMIVSGDFIFTESVSGRHAQKRPEFQRMIALAKQPSHPIDVILVWKFSRFARNQEESIVYKSMLKKDNVDVISVSEPLVEGPFGTLIERIIEWMDEYYSIRLSGEVLRGMKEKALQKGYQTSPCLGYTAVGHGKPYIINEAEYAIVSYIMDLYDNQNLDETAIARRCNDLGYRTKRGKLFERRSVDRILGNPFYCGTVVWNGVEFEGSHEVRLSRERYEKRQKLITSRKRPVKVRNVSACKHWLSGLLKCSVCGATLSYTGNNKCPYFQCWKYAKGFHKTSVALSVKKAEEAVISYFDQILDGAEFTYVCKKKKTDHSLQIEQLQREISKLTMRESRIKEAYEAGVDTLEEYKNNKDRLVSDRLELTAALSQLLQEEQAEQPDAKEVLKEIRSVADVLKNPDVGYEAKGNLIRSVVEQIIYDKESGKMSFDIIIS

SEQ ID NO: 7533 - protein, 471 aa, Unknown
  Description of Unknown: Integrase B7534 sequence
  IPR036162,PS51737,IPR011109,PTHR30461,PS00397, PF00239,G3DSA:1.10.10.2600,IPR006119,SSF53041,cd00338, SM00857,IPR025827,IPR038109,PS51736,IPR006118, PF13408,G3DSA:3.40.50.1390,PF07508,Coil
MSSKVAALYIRVSTEDQTELSPDAQKRLLLDYAQKNDMIVSGDFIFTESVSGRHAQKRPEFQKMIALAKQPSHPIDVILVWKFSRFARNQEESIVYKSMLKKDNVDVISVSEPLIEGPFGSLIERIIEWMDEYYSIRLSGEVLRGMKEKALQKGYQMSPCLGYTAVGHGKPYIINEAEYAIVSYIMDLYDNQNLDETAIARRCNDLGYRTKRGKLFERRSVDRILGNPFYCGTVVWNGVEFEGSHEVRLSRERYEKRQKLITSRKRPVKARNVSTCKHWLSGLLKCSVCGATLSYTGNNKCPYFQCWKYAKGFHKTSVALSVKKAEEAVISYFDQILDGAEFTYVCKKKKTDHSLQIEQLQKEISKLTMRESRIKEAYEAGVDTLEEYKNNKDRLVSDRLELTAALSQLLQEEQADQPDTEEILKEIRSVADVLKNPDVGYEEKGNLIRSVVEQIIYDKESGKMSFDIIIS

SEQ ID NO: 7534 - protein, 471 aa, Unknown
  Description of Unknown: Integrase B7535 sequence
  IPR036162,PS51737,IPR011109,PTHR30461,PS00397, PF00239,G3DSA:1.10.10.2600,IPR006119,SSF53041,cd00338, SM00857,IPR025827,IPR038109,PS51736,IPR006118, PF13408,G3DSA:3.40.50.1390,PF07508,Coil
MSSKVAALYIRVSTEDQTELSPDAQKRLLLDYAQKNDMIVSGDFIFTESVSGRHAQKRPEFQKMIALAKQPSHPIDVILVWKFSRFARNQEESIVYKSMLKKDNVDVISVSEPLIEGPFGSLIERIIEWMDEYYSIRLSGEVLRGMKEKALQKGYQTSPCLGYTAVGHGKPYVINEAEYAIVSYIMDLYDNQNLDETAIARRCNDLGYRTKRGKLFERRSVDRILGNPFYCGTVVWNGVEFEGSHEVRLSRERYEKRQKLITSRKRPVKARNVSACKHWLSGLLKCSVCGATLSYTGNNKCPYFQCWKYAKGFHKTSVALSVKKAEEAVISYFDQILDGAEFTYVCKKKKTDHSLQIEQLQKEIGKLTMRESRIKEAYEAGVDTLEEYKNNKDRLVSDRLELTAALSQLLQEEQAEQPDTEKILIEIRSVADVLKNPDVGYEEKGNLIRSVVEQIIYDKESGKMSFDIIIS

SEQ ID NO: 7535 - protein, 471 aa, Unknown
  Description of Unknown: Integrase B7536 sequence
  PTHR30461:SF3,IPR036162,PS51737,IPR011109,PTHR30461, PS00397,PF00239,G3DSA:1.10.10.2600,IPR006119,SSF53041, cd00338,SM00857,IPR025827,IPR038109,PS51736, IPR006118,PF13408,G3DSA:3.40.50.1390,PF07508,Coil
MKRVALYIRVSSDEQAKFGDSIREQQETLTEYVERHDDMKIVSTYIDDGISGQKLNRDEFAQLITDVQGDQIDLIIFTKLDRWFRSLKHYLNTQDILEAHNVYWFAVSQPYYDTRTAQGRAFIAQSMTWAELEAQQTSERTIAINISKVKNGEVITGSTPFGYSIKDKHLFPDDNAPIALAIFEYFDQTSSIAGTAKYLKETFGISRTRPGIRNMLKNRMYIGKYRQNNNYCPAIIPEALFASVQRKLPLNVKSNNKNDYIFQGLMMCGCCGRKMSAGQATRYGRPRKDGTKKHYPSVSVYKCRYHISDKRDCPNKKTIKETVLEEYLLDHIKEMIQFEIVAIENKKKQVIDTKARRRKIEEKLDRLKAAYLDDVIGLDEYKKDRQELQETLATFKNKPSADISNKKSDLEELLYSGLFDHYPVLTKLEKKEFWRSFIDSITMDGERNITVKFLESTYVLTDTDGRASFRR

SEQ ID NO: 7536 - protein, 471 aa, Unknown
  Description of Unknown: Integrase B7537 sequence
  IPR036162,PS51737,IPR011109,PTHR30461,PS00397, PF00239,G3DSA:1.10.10.2600,IPR006119,SSF53041,cd00338, SM00857,IPR025827,IPR038109,PS51736,IPR006118, PF13408,G3DSA:3.40.50.1390,PF07508,Coil
MSSKVACLYIRVSTEDQTELSPDAQKRLLLDYAQKNDMIVSGDFIFTESVSGRHAQKRPEFQKMIALAKQPSHPIDVILVWKFSRFARNQEESIVYKSMLKKDNVDVISVSEPLIEGPFGSLIERIIEWMDEYYSIRLSGEVLRGMKEKALQKGYQTSPCLGYTAVGHGKPYIINEAEYAIVSYIMDLYDNQNLDETAIARRCNDLGYRTKRGKLFERRSVDRILGNPFYCGTVVWNGVEFEGNHEVRLSRERYEKRQKLITSRKRPVKARNVSACKHWLSGLLKCSVCGATLSYTGNNKCPYFQCWKYAKGFHKTSVALSVKKAEEAVISYFDQILDGAEFTYVCKKKKTDHSLQIEQLQREIGKLTMRESRIKEAYEAGVDTLEEYKNNKDRLVSDRLELTAALSQLLQEEQAEQTDAEEILKEIRSVADVLKNPDVGYEAKGNLIRSVVEQIIYDKESGKMSFDIIIS

SEQ ID NO: 7537 - protein, 471 aa, Unknown
  Description of Unknown: Integrase B7538 sequence
  IPR036162,PS51737,IPR011109,PTHR30461,PS00397, PF00239,G3DSA:1.10.10.2600,IPR006119,SSF53041,cd00338, SM00857,IPR025827,IPR038109,PS51736,IPR006118, PF13408,G3DSA:3.40.50.1390,PF07508,Coil
MSSKVAALYIRVSTEDQTELSPDAQKRLLLDYAQKNDMIVSGDFIFTESVSGRHAQKRPEFQKMIALAKQPSHPIDVILVWKFSRFARNQEESIVYKSMLKKDNVDVISVSEPLIEGPFGSLIERIIEWMDEYYSIRLSGEVLRGMKEKALQKGYQTSPCLGYTAVGHGKPYVINEAEYAIVSYIMDLYDNQNLDETAIARRCNDLGYRTKRGKLFERRSVDRILGNPFYCGTVVWNGVEFEGNHEVRLSRERYEKRQKLITSRKRPVKARNVSACKHWLSGLLKCSVCGATLSYTGNNKCPYFQCWKYAKGFHKTSVALSVKKAEDAVITYFEQILDGAEFTYVCKKKKTDHSLQIDQLQREISKLAMREGRIKEAYEAGVDTLEEYKNNKDRLVSDRLELTAALSQLLQEEQAEQPDTEKILKEIRSVADVLKNPDVGYEEKGNLIRSVVEQIIYDKESGKMSFDIIIS

SEQ ID NO: 7538 - protein, 471 aa, Unknown
  Description of Unknown: Integrase B7539 sequence
  IPR036162,PS51737,IPR011109,PTHR30461,PS00397, PF00239,G3DSA:1.10.10.2600,IPR006119,SSF53041,cd00338, SM00857,IPR025827,IPR038109,PS51736,IPR006118, PF13408,G3DSA:3.40.50.1390,PF07508,Coil
MSSKVAALYIRVSTEDQTELSPDAQKRLLLDYAQKNDMIVSGDFIFTESVSGRHAQKRPEFQKMIALAKQPSHPIDVILVWKFSRFARNQEESIVYKSMLKKDNVDVISVSEPLIEGPFGSLIERIIEWMDEYYSIRLSGEVLRGMKEKALQKGYQTSPCLGYTAVGHGKPYIINEAEYAIVSYIMDLYDNQNLDETAIARRCNDLGYRTKRGKLFERRSVDRILGNPFYCGIVVWNGVEFEGSHEVRLSRERYEKRQKLITSRKRPVKARNVSACKHWLSGLLKCSVCGATLSYTGNNKCPYFQCWKYAKGFHKTSVALSVKKAEEAVISYFDQILDGAEFTYVCKKKKTDHSLQIEQLQREISKLTMRENRIKEAYEAGVDTLEEYKNNKDHLVSDRLELTAALSQLLQEEQSEQPNTEEILKEIRSVADVLKNPNVGYEEKGNLIRSIVEQIIYDKESGKMSFDIIIS

SEQ ID NO: 7539 - protein, 471 aa, Unknown
  Description of Unknown: Integrase B7540 sequence
  IPR036162,PS51737,IPR011109,PTHR30461,PS00397, PF00239,G3DSA:1.10.10.2600,IPR006119,SSF53041,cd00338, SM00857,IPR025827,IPR038109,PS51736,IPR006118, PF13408,G3DSA:3.40.50.1390,PF07508,Coil
MSSKVAALYIRVSTEDQTELSPDAQKRLLLDYAQKNDMIVSGDFIFTESVSGRHAQKRPEFQKMIALAKQPSHPIDVILVWKFSRFARNQEESIVYKSMLKKDNVDVISVSEPLIEGPFGSLIERIIEWMDEYYSIRLSGEVLRGMKEKALQKGYQTSPCLGYTAVGHGKPYIINEAEYAIVSYIMDLYDNQNLDETAIARRCNDLGYRTKRGKLFERRSVDRILGNPFYCGTVVWNGVEFEGNHEVRLSRERYEKRQKLITSRKRPVKARNVSACKHWLSGLLKCSVCGATLSYTGNNKCPYFQCWKYAKGFHKTSVALSVKKAEEAVISYFDQILDGAEFTYVCKKKKTDHSLQIEQLQKEISKLTMRESRIKEAYEAGVDTLEEYKNNKDRLVSDRLELTAALSQLLQEEQADQPDTEEILKEIRSVADVLKNPDVGYEEKGNLIRSVVEQIIYDKESGKMSFDIIIS

SEQ ID NO: 7540 - protein, 471 aa, Unknown
  Description of Unknown: Integrase B7541 sequence
  IPR036162,PS51737,IPR011109,PTHR30461,PS00397, PF00239,G3DSA:1.10.10.2600,IPR006119,SSF53041,cd00338, SM00857,IPR025827,IPR038109,PS51736,IPR006118, PF13408,G3DSA:3.40.50.1390,PF07508,Coil
MSSKVACLYIRVSTEDQTELSPDAQKRLLLDYAQKNDMIVSGDFIFTESVSGRHAQKRPEFQKMIALAKQPSHPIDVILVWKFSRFARNQEESIVYKSMLKKDNVDVISVSEPLIEGPFGSLIERIIEWMDEYYSIRLSGEVLRGMKEKALQKGYQTSPCLGYTAVGHGKPYVINEAEYAIVSYIMDLYDNQNLDETAIARRCNDLGYRTKRGKLFERRSVDRILGNPFYCGTVVWNGVEFEGSHEVRLSRERYEKRQKLITSRKRPVKARNVSACKHWLSGLLKCSVCGATLSYTGNNKCPYFQCWKYAKGFHKTSVALSVKKAEEAVISYFDQILDGAEFTYVCKKKKTDHSLQIEQLQKEISKLTMRESRIKEAYEAGVDTLEEYKNNKDRLVSDRLELTAALSQLLQEEQAEQPDAEEILKEIRSVADVLKNPDVGYEEKGNLIRSVVEQIIYDKESGKMSFDIIIS

SEQ ID NO: 7541 - protein, 471 aa, Unknown
  Description of Unknown: Integrase B7542 sequence
  IPR036162,PS51737,IPR011109,PTHR30461,PS00397, PF00239,G3DSA:1.10.10.2600,IPR006119,SSF53041,cd00338, SM00857,IPR025827,IPR038109,PS51736,IPR006118, PF13408,G3DSA:3.40.50.1390,PF07508,Coil
MSSKVACLYIRVSTEDQTELSPDAQKRLLLDYAQKNDMIVSGDFIFTESVSGRHAQKRPEFQKMIALAKQPSHPIDVILVWKFSRFARNQEESIVYKSMLKKDNVDVISVSEPLIGGPFGSLIERIIEWMDEYYSIRLSGEVLRGMKEKALQKGYQTSPCLGYTAVGHGKPYIINEAEYAIVSYIMDLYDNQNLDETAIARRCNDLGYRTKRGKLFERRSVDRILGNPFYCGTVVWNGVEFEGSHEVRLSRERYEKRQKLITSRKRPVKARNVSACKHWLSGLLKCSVCGATLSYTGNNKCPYFQCWKYAKGFHKTSVALSVKKAEEAVISYFDQILDGAEFTYVCKKKKTDHSLQIEQLQKEISKLTMRESRIKEAYEAGVDTLEEYKNNKDRLVSDRLELTAALSQLLQEEQAEQPDAEEILKEIRSVADVLKNPDVGYEEKGNLIRSVVEQIIYDKESGKMSFDIIIS

SEQ ID NO: 7542 - protein, 471 aa, Unknown
  Description of Unknown: Integrase B7543 sequence
  PTHR30461:SF3,IPR036162,PS51737,IPR011109,PTHR30461, PS00397,PF00239,G3DSA:1.10.10.2600,IPR006119,SSF53041, cd00338,SM00857,IPR025827,IPR038109,PS51736, IPR006118,PF13408,G3DSA:3.40.50.1390,Coil
MKKKGKRVACYIRVSTQEQKLHGLSLDAQRFTLKAFCEHNSLNIVAWYEDEGISGRKLIKKRPALQQMLNDAPNDMFDRIIFIKLDRYFRSVGEYYECQKILERYNIVWTATEEKYDLTTANGRFWVNQKLSMAEYEADQTGERIRLVNEYKVRTGQPLTGSQNLSLAFKVGFDEKTGLKNVIHDKENEQRVYDLIDTFLKKKSLHRTVEEINIKYSVKTTYNVYRKVLKNSMLYGFYRGNSEYCEPYVSKEKFEQIQECLEKNIKARKNKRFYLFSGLIKCPECGRMLIGNNSCKRTTKRGDKIYINTKKLYHYRCNNYRINRLCDFNKSVNEEKLEKKLLNIFDSEIASYVEKIKISEQENDTISIKKEIQDLKSELSRLNNIFQKGRMSEKDYDSEYSKIEKKINDLEKSVTKTIKKDMSKYNELLASTSWQDLYLQLNRENKQAFWHRYIKQILLTENGEIDKIIFF

SEQ ID NO: 7543 - protein, 471 aa, Unknown
  Description of Unknown: Integrase B7544 sequence
  IPR036162,PS51737,IPR011109,PTHR30461,PS00397, PF00239,G3DSA:1.10.10.2600,IPR006119,SSF53041,cd00338, SM00857,IPR025827,IPR038109,PS51736,IPR006118, PF13408,G3DSA:3.40.50.1390,PF07508,Coil
MSSKVAALYIRVSTEDQTELSPDAQKRLLLDYAQKNDMIVSGDFIFTESVSGRHAQKRPKFQKMIALAKQPSHPIDVILVWKFSRFARNQEESIVYKSMLKKDNVDVISVSEPLIEGPFGSLIERIIEWMDEYYSIRLSGEVLRGMKEKALQKGYQTSPCLGYTAVGHGKPYIINEAEYAIVSYIMDLYDNQNLDETAIARRCNDLGYRTKRGKLFERRSVDRILGNPFYCGTVVWNGMEFEGNHEVRLSKERYEKRQKLITSRRRPVKARNVSACKHWLSGLLKCSVCGATLSYTGNNKCPYFQCWKYAKGFHKTSVALSVKKAEEAVISYFDQILDGAEFTYVCKKKKTDHSLQIEQLQKEIGKLTMRESRIKEAYEAGVDTLEEYKNNKDRLVSDRLELTAALSQLLQEEQSEQPDTEEVLKEIRSVADVLKNPDVGYEEKGNLIRSVVEQIIYDKESGKMSFDIIIS

SEQ ID NO: 7544 - protein, 471 aa, Unknown
  Description of Unknown: Integrase B7545 sequence
  IPR036162,PS51737,IPR011109,PTHR30461,PS00397, PF00239,G3DSA:1.10.10.2600,IPR006119,SSF53041,cd00338, SM00857,IPR025827,IPR038109,PS51736,IPR006118, PF13408,G3DSA:3.40.50.1390,PF07508,Coil
MSSKVACLYIRVSTEDQTELSPDAQKRLLLDYAQKNDMIVSGDFIFTESVSGRHAQKRPEFQKMIALAKQPSHPIDVILVWKFSRFARNQEESIVYKSMLKKDNVDVISVSEPLIEGPFGSLIERIIEWMDEYYSIRLSGEVLRGMKEKALQKGYQTSPCLGYTAVGHGKPYIINEAEYAIVSYIMDLYDNQNLDETAIARRCNDLGYRTKRGKLFERRSVDRILGNPFYCGTVVWNGVEFEGNHEVRLSRERYEKRQKLITSRKRPVKARNVSACKHWLSGLLKCSVCGATLSYTGNNKCPYFQCWKYAKGFHKTSVALSVKKAEEAVISYFDQILDGAEFTYVCKKKKTDHSLQIEQLQREIGKLTMRESRIKEAYEAGVDTLEEYKNNKDRLVSDRLELTAALSQLLQEEQSEQPDTEEILKEIRSVADVLKNPDVGYEEKGNLIRSVVEQIIYDKESGKMSFDIIIS

SEQ ID NO: 7545 - protein, 471 aa, Unknown
  Description of Unknown: Integrase B7546 sequence
  IPR036162,PS51737,IPR011109,PTHR30461,PS00397, PF00239,G3DSA:1.10.10.2600,IPR006119,SSF53041,cd00338, SM00857,IPR025827,IPR038109,PS51736,IPR006118, PF13408,G3DSA:3.40.50.1390,PF07508,Coil
MIPAIVYARASTDHQEYSVNDQLKYIKDWAKHHGYKIIKVYIDDGISGAFVAKRPGFLSMIEDVTTNLSGAKALLIWDSYRFARNMVEFLTYKQMIRQHGVSVIAVTEPIVEDEDAQLYIDAINGASGELYLRKLSKDSKRGIRAKVVERHEHLGFAPYGYRMDRNTGQLEIQPEEAQWVQYIFQSVIDGAPYLQICEALRKAGVKTRKGCAWTNTQVKYTLTNKTYCGLLEVHLDGKHGVYEGKHEPIIDRETFDKVQAIIEERAAKHKKYARNTNKYKHWLSGLMRCPYCGGALSYVQGSGGRADRYRCNSRMDGKGCVNTSVKVNVAADFVLNQLQQIYDRPEILCTLKTTTPQPANRIDYDGEIKKLRGQLTRAKKAYMEEIDTLEEYRENKARITAAIEDMEAQKNAAAAGIIKFDPAAFQEKCLSALSVLQSDVDTEKKVAVSHNLIEKIDCDNLKKVLTIYFYS

SEQ ID NO: 7546 - protein, 470 aa, Unknown
  Description of Unknown: Integrase B7547 sequence
  PTHR30461:SF3,IPR036162,PS51737,IPR011109,PTHR30461, PS00397,PF00239,G3DSA:1.10.10.2600,IPR006119,SSF53041, SM00857,IPR025827,IPR038109,PS51736,cd03768, IPR006118,PF13408,G3DSA:3.40.50.1390,PF07508,Coil
MKKAAIYVRVSTQEQAQEGFSIPEQTERLTKYCEAHGWTIGNIYTDPGFSGANTNRPALKCLFKDCERKRFDIVVVYKLDRLSRSQKDTLYIIEDVFLKNSISFISMNENFDTGSPFGRAMIGILSVFAQLEREQIKERMAMGREGRAKQGKWHGGGNVPIGYTSVDGNLIPDEYEAMQVRKVFSLALEGHSFIQITRMMAAAGYTHKYGAYKAGYVTVSKMLHNPIYIGMIKNGDDYVSGIHDPLIDQQTFDAVQKRLQQISDDYQKNHRKNQPVAYMLSGLCHCALCGSEYSGFYVGAKGYRKKYYRCKKRAYHWREKKETCTAPNIRVEQLDAAVIEEIRKIQTDPAYFEKVSKPQTSINNELQTLNNRFSEIQKRIQRTIKLYSLGNIEDDDIDDQMKQLYCERDSIQNEIDRLSGSQPDVDYIKEVLSLAVLEDMSTLELRQLCQTLIDHIIIKEDESIEIYWAF

SEQ ID NO: 7547 - protein, 470 aa, Unknown
  Description of Unknown: Integrase B7548 sequence
  PTHR30461:SF3,IPR036162,PS51737,IPR011109,PTHR30461, PS00397,PF00239,G3DSA:1.10.10.2600,IPR006119,SSF53041, SM00857,IPR025827,IPR038109,PS51736,cd03768, IPR006118,PF13408,G3DSA:3.40.50.1390,PF07508,Coil
MKKAAIYVRVSTQEQAQEGFSIPEQTERLTKYCEAHGWTIGNIYTDPGFSGANTNRPALKCLFKDCERKRFDIVVVYKLDRLSRSQKDTLYIIEDVFLKNSIGFISMNENFDTGSPFGRAMIGILSVFAQLEREQIKERMAMGREGRAKQGKWHGGGNVPIGYTSVDGNLIPDEYEAMQVRKVFSLALEGHSFMQITRMMAAAGYTHKYGAYKAGYVTVSKMLHNPIYIGMIKNGDDYVSGIHDPLIDQQTFDAVQKRLQQISDDYQKNHRKNQPVAYMLSGLCHCALCGSEYSGFYVGAKGYRKKYYRCKKRAYHWREKKETCTAPNIRVEQLDAAVIEEIRKIQTDPAYFEKVSKPQTSINNELQTLNNRFSEIQKRIQRTIKLYSLGNIEDDDIDDQMKQLYCERDSIQNEIDRLSGSQPDVDYIKEVLSLAVLEDMSTLELRQLCQTLIDHIIIKEDESIEIYWAF

SEQ ID NO: 7548 - protein, 470 aa, Unknown
  Description of Unknown: Integrase B7549 sequence
  PTHR30461:SF3,IPR036162,PS51737,IPR011109,PTHR30461, PS00397,PF00239,G3DSA:1.10.10.2600,IPR006119,SSF53041, SM00857,IPR025827,IPR038109,PS51736,cd03768, IPR006118,PF13408,G3DSA:3.40.50.1390,PF07508,Coil
MKKAAIYVRVSTQEQAQEGFSIPEQTERLTKYCEAHGWTIGNIYTDPGFSGANTNRPALKCLFKDCERKRFDIVVVYKLDRLSRSQKDTLYIIEDVFLKNSISFISMNENFDTGSPFGRAMIGILSVFAQLEREQIKERMAMGREGRAKQGKWHGGGNVPIGYTSVDGNLIPDEYEAMQVRKVFSLALEGHSFMQITRMMAAAGYTHKYGAYKAGYVTVSKMLHNPIYIGMIKNGDDYVSGIHDPLIDQQTFDAVQKRLQQISDDYQKNHRKNQPVAYMLSGLCHCALCGSEYSGFYVGAKGYRKKYYRCKKRAYHWREKKETCTAPNIRVEQLDAAVIEEIRKIQTDPAYFEKVSKPQTSINNELQTLNNRFSEIQKRIQRTIKLYSLGNIEDDDIDDQMKQLYCERDSIQNEIDRLSGSQPDVDYIKEVLSLAVLEDMSTLELRQLCQTLIDHIIIKEDESIEIYWAF

SEQ ID NO: 7549 - protein, 470 aa, Unknown
  Description of Unknown: Integrase B7550 sequence
  PTHR30461:SF3,SM00857,G3DSA:1.10.10.2600,IPR036162,PF13408, IPR025827,G3DSA:3.40.50.1390,PS51737,IPR006119,IPR038109, PF07508,IPR011109,SSF53041,PTHR30461,PS51736, cd00338,PF00239
MARSVTCIPARQTIATEGNTIEIPKKRVAAYCRVSTDEDGQLSSYQNQVQFYTEHIKSNRAYEFAGVYADEGISGTNTKKREQFNKMIQDCKNGKIDLIITKSISRFARNTLDCLQYVRELKEIEVEIFFEKEHIFTLDSKGEVLLTILSSLAQDESRSISENTTWGVRRRFEQGRVTVNEKKFLGYDKDEEGNLIINKQQAKIVRRIYTEYLNGKGPTRIAKELERDKVKGVTGTTKWYASTIDKILRNEKYKGDALLQKTYTVDFLTKKRVKNDEGKVTQYYVQESHPAIIEHEMWEAVQLEIERRKQYVEKHKLQKYDYGLEDTAFAGRIICGECGRGYYRKTWHSNSKPIKLWQCGAKYQEKGKIGCTNSHIYAQKLNEVFINAFNALVENKKAFLSKWKGELQGADVLKAYRLRQFIELIAEADMIEEVDKELVFKVLDKIAVIDKGQVIVKFLDGTELECKMES

SEQ ID NO: 7550 - protein, 470 aa, Unknown
  Description of Unknown: Integrase B7551 sequence
  PTHR30461:SF3,cd00338,SM00857,IPR036162,PF13408, IPR025827,G3DSA:3.40.50.1390,IPR006119,SSF53041,PTHR30461, PS51736,Coil,PF00239
MRKKIRVAQYERVSHEDQKKFGSSIAAQRQHLNKFLDEHPEMVLIDEYCDEGISADKLNKRTELQRMLKDIEEGKIDLVIFTKLDRWFRSVAKYYKIQEILEANNVAWQAVLEDYETVTANGKFKVNIMLSVAQQERDRDSERIKDVFAYKVSQGEAIVPSSSLHFPFIVKEIDGVKRVVHNPETEAMTYDWIEHLKTYNSQSRAAAYINEKYNKDFDYNSLVKTSKDTLLYGCYRGNENYCEPYMTKEEFMQLQENLKKNIRVKKNNHVYIFSSKMKCPRCGQSLVGGWTMYKTKESDKNYSYYYKCNFAHHKRKIKSAKACSYTRAIGENYLEQKMITNLKKYIIDFISEKEANVKKDVPKNTKNIKRKLQDEIERLNKMYQKGRINEEDYDAEYDRIEKKINALEEEKKESYDSTKLEELLKTDVIEQYYNSDRLTRQGFWNTLVKEIEIDENKEIVRVDFFRLTSM

SEQ ID NO: 7551 - protein, 470 aa, Unknown
  Description of Unknown: Integrase B7552 sequence
  PTHR30461:SF3,IPR036162,PS51737,IPR011109, PTHR30461,PS00397,PF00239,G3DSA:1.10.10.2600, IPR006119,SSF53041,cd00338,SM00857,IPR025827,IPR038109 ,PS51736,IPR006118,PF13408,G3DSA:3.40.50.1390,PF07508,Coil
MKGESELDKKAAIYIRVSTQEQATEGYSIQAQTDRLIKYVEAKDFILYKKYIDAGYSASKLERPAMQELIQDVQSKKVDVVIVYKLDRLSRSQKDTMYLIEDIFRPNDVELISMQESFDTSTAFGSATVGMLSVFAQLERKSISERMITGRVERAKKGFYHTGGQDRPPAGYQFNSDNQLIINEYEAAAIKDLFRLYNDGLGKSSISEYLKKNYPGKNKWLPSSIDRMLKNSLYIGKVKFSGVEYDGIHEPIIDEVTFYKTQKEIARRKQTNTKRYNYVALLGGLCECGICGAKMANRRSVGRKGKVYRYYRCYSKKGSPKHMMKTDGCSSKAQQQFIIDEAVINNLKNIDVEAELKRRSAPQTNTSLISSQIESIDKQINKLIDLFQVDSMPLDVISEKIDKLNKEKQSMEKLLERKNKLDKTELQHRFDVLKSFDWDNSSIESKRVVIEMLVQKVIIHDNSIEIILVE

SEQ ID NO: 7552 - protein, 470 aa, Unknown
  Description of Unknown: Integrase B7553 sequence
  PTHR30461:SF3,SM00857,G3DSA:1.10.10.2600,IPR036162,PF13408, PS51737,G3DSA:3.40.50.1390,IPR025827,IPR006119,IPR038109, PF07508,IPR011109,SSF53041,PTHR30461,Coil, cd00338,PF00239
MKNGFVVVNEYIDRAISGKTDNRPSFQRLIKDSDKGHFDAVIMYTLDRFARNRYDSAIYKAKLKKNGVRVFYAKQPMPDTPEGIILESVLEGYAEYYSENLARSIKRGMKENALHTIAMGSLGLGYKIGEDRKYEIDPVGAKAVRAIFTMYAEGKSKTEIVNWLNEHGFKTSQGNQFNKNSLSRILRNDKYIGVYRYADVVVENAIPPIIDKHLFDKVQALLKHNFASRARNKAKEDYLLSTKLFCGHCGSPMIGESGTSKLGRVYHYYKCSKRKRERDCSKKVEKKDWLEELVVRYTVHHVLTDENIELIATKAMELIEKDLQDTSVLVGLQGMLKDVNKKIKNLMSAIEQGIITSSTKERLEELELERLNIEGQIAREEMKKPLLSKERIVYWLTSFKSGDIQDIEYQRRIIDTLVNSVFVYDDDGNGRRIVLTFNISGNNTLTIECSDIEGIAPPKKGLAFQQVLFP

SEQ ID NO: 7553 - protein, 470 aa, Unknown
  Description of Unknown: Integrase B7554 sequence
  cd00338,SM00857,G3DSA:1.10.10.2600,IPR036162,PF13408, IPR025827,G3DSA:3.40.50.1390,PS51737,IPR006119,IPR038109, PF07508,IPR011109,SSF53041,PTHR30461,PS51736, Coil,PF00239
MRVGLYTRVSTQEQAQEGYSIDAQLERLTAYCKAKDWHIVHTYTDAGFSGSNLNRPAMQQLINDIDSDTFDTVLVYKLDRISRSQKDTLFLIEDVFLKNNISFISVNENFDTSTAFGRAMIGILSVFAQLEREQIKERTRMGLEERVRKGKHHSFAPFGYRLKDKELVICEPEADVVRIVYDMTLQNKTAKVINDYVVENYPEYKALFTTKNNKVYDIIHNITYGGYVKFGDKISKGSHEAIIDDITYAKVQKLLKKKAEIWETSRTKRTGTRSYYLLTGFVFCGNCGARLRVIKPSSGGKYSCYSRIGNPSYMVKDPNCRLKVYELSELDNIVLDELKKLKSDEEYFNSLCRPNIVENKADKISKELNRIEIQINKLLDLYQMDDIDVSLLTNRMKQLNNKKKKLENEISASKQDSLPKLTYRQALDILSDLDSYIEKGATDQLRELLQMLIDRITVYDDRVEIKWSFS

SEQ ID NO: 7554 - protein, 470 aa, Unknown
  Description of Unknown: Integrase B7555 sequence
  PTHR30461:SF3,SM00857,G3DSA:1.10.10.2600,IPR036162,PF13408, IPR025827,PS51737,G3DSA:3.40.50.1390,IPR006119,IPR038109, PF07508,IPR011109,SSF53041,PTHR30461,Coil, PS51736,cd00338,PF00239
MTIIGEYCDKAISGKTDNRPSFQRLIKDSEKGQFEAVIMYTLDRFARNRYDSAIYKAKLKKNGVRVYYAKQPMPDTPEGIILESVLEGYAEYYSENLSRNIKRGMKENALQCIANGGAGMPLGYTVGEDRRYKIDPVGARIVQEIFQMYADGMSATQIINECNKRGYKTARGNAFNKNSLRTMLKNDRYIGVYRFADVVVEGGVPPIISRELFDKVQATLKHNYSARARNKAKDDYLLTAKLFCGHCGSSMVGESGTSKSGKLHHYYKCIERKRKHKCNKAVEKKDWMEELVVRFTVQKVLTDENIERIAVKAMEIIEKESADTTYIDGLRNELKEVKKKIKNLMTAIEQGIITPSTKERMDELELEKNEIEGRIASEEMKKPLLTKERIMYWLYSFKSGNIDDVEYKRRVIDTLVNSVYVYDEGDKGRRIVFTFNISGQNTATLSCSDIACFAPPRDCEQILFTHRINP

SEQ ID NO: 7555 - protein, 470 aa, Unknown
  Description of Unknown: Integrase B7556 sequence
  cd00338,SM00857,G3DSA:1.10.10.2600,IPR036162,PF13408, PS51737,G3DSA:3.40.50.1390,IPR025827,IPR006119,IPR038109, PF07508,IPR011109,SSF53041,PTHR30461,PS51736, Coil,PF00239
MRVGLYTRVSTQEQAQEGYSIDAQLERLTAYCKAKDWHIVHTYTDAGFSGSNLNRPAMQQLINDIDSDTFDTVLVYKLDRISRSQKDTLFLIEDVFLKNNISFISVNENFDTSTAFGRAMIGILSVFAQLEREQIKERTRMGLEERVRKGKHHSFAPFGYRLKDKELVICEPEADVVRIVYDMTLQNKTAKVINDYVVENYPEYKALFTTKNNKVYDIIHNITYGGYVKFGDKISKGTHEAIIDDITYAKVQKILQKKAEIWETSRTKRTGTRSYYLLTGFVFCGNCGARLRVIKPSSGGKYSCYSRIGNPSYMVKDPNCRLKVYELSELDNIVLDELKKLKSDEEYFNSLCRPNIVENKADKISKELNRIEIQINKLLDLYQMDDIDISMLTNRMKQLNNKKKKLENEISASKQDSLPKLTYRQALDILSDLDSYIEKGATDQLRELLQMLIDRITVYDDRVEIKWSFS

SEQ ID NO: 7556 - protein, 470 aa, Unknown
  Description of Unknown: Integrase B7557 sequence
  IPR036162,PS51737,IPR011109,PTHR30461,PS00397, PF00239,G3DSA:1.10.10.2600,IPR006119,SSF53041,cd00338, SM00857,IPR025827,IPR038109,PS51736,IPR006118, PF13408,G3DSA:3.40.50.1390,PF07508,Coil
MKTGALYIRVSTDDQAELSPDAQKRLLLDYAKKNDIIVSKDFIFSESVSGRHVQKRPEFQRMIATAKQPSHPIDVILVWKFSRFARNQEESIVYKSMLKKDRVDVVSVSEPLIEGPFGSLIERIIEWMDEYYSIRLSGEVLRGMKEKALQHGYQSTPCLGYDAVGHGKPFVINEAEYAMVSYIMDLYDNQNMDETAIARRCNDLGYRTKRGNLFERRTVDRILENPFYCGTVIWNGVEFEGTHEVRLSRERFEKRQELIASRKRPIKARNVSACKHWLSGLIKCSICGATLSYTGNNACPYFQCWKYAKGFHKTSVALSVKKAEEAVTDYFDQILSGAEFSYVRKSQPKDNNDLEIERLQKELSKLEIREKRIREAYESEIDTLEEYKTNKDRLTASRLKLNSQIKNLLHDQEEPEIDTEKVLREIKSVNDILKNPDVGYEEKGLLIRSVVDQIVYDKEEGKMYFDIIVS

SEQ ID NO: 7557 - protein, 470 aa, Unknown
  Description of Unknown: Integrase B7558 sequence
  PTHR30461:SF3,IPR036162,PS51737,IPR011109,PTHR30461, PS00397,PF00239,G3DSA:1.10.10.2600,IPR006119,SSF53041, cd00338,SM00857,IPR025827,IPR038109,PS51736, IPR006118,PF13408,G3DSA:3.40.50.1390,PF07508,Coil
MKGESELDKKAAIYIRVSTQEQATEGYSIQAQTDRLIKYVEAKDFILYNKYIDAGYSASKLERPAMQELIQDVQSKKVDVVIVYKLDRLSRSQKDTMYLIEDIFRPNDVELISMQESFDTSTAFGSATVGMLSVFAQLERKSISERMITGRVERAKKGFYHTGGQDRPPAGYQFNSDNQLIINEYEAAAIKDLFRLYNDGLGKSSISEYLKKNYPGKNKWLPSSIDRMLKNSLYIGKVKFSGAEYDGIHEPIIDEVTFYKTQKEIARRKQTNTKRYNYVALLGGLCECGICGAKMANRRAVGRKGKVYRYYRCYSKKGSPKHMMKTDGCSSKAQQQFIIDEAVINNLKNIDVEAELKRRSAPQTNTSLISSQIESIDKQINKLIDLFQVDSMPLDVISEKIDKLNKEKQSMEKLLERKNRLDKTELQHRFDVLKSFDWDNSSIESKRVVIEMLVQKVIIHDNSIEIILVE

SEQ ID NO: 7558 - protein, 469 aa, Unknown
  Description of Unknown: Integrase B7559 sequence
  SM00857,G3DSA:1.10.10.2600,IPR036162,PF13408,IPR025827, G3DSA:3.40.50.1390,PS51737,IPR006119,IPR038109,PF07508, SSF53041,IPR011109,PF00239,PTHR30461,PS51736, Coil,cd00338
MRAGLQIRVSTLEQAIEGYSLAAQEKKLREYAQFKGYEIVGVYRDDGYSGASLNRPGLRRLMSDIEADKLDIVLIYKQDRLTRSVKDLLNLLDVFDKHNVALFSITENIDLSSPFGRAALKMSATFSELERETIIERSKMGKDQKARQGELMGSGNSPFGYRYDKLTKRFEIIPEEAEIVRNIYSLYIKGMSIRQLNAYCRDTYNHPHFGNPMSCKALLHRPMYAGYFDWKGDLIKGVNFDPIITYEDYLKVQNILKQNTFRRNRLTSPYMLTGLLVCGDCGNRYVGKYKKSYQINREGKRVQYGNKYYGCTARIKRDKNYHPAKCSNKMWRVEELDEIVLNAVKNIDFADLKSPKATEGSFDLLRGEIADAKNKIDKLLDLYMNDLVTREAYEQRLYEYEKKIKQTEAVIEQEQEKLGDSPELPTNYLKEQQARIDDMSLDERRLYLKMIIKHIVLKNDEIYIEWRIK

SEQ ID NO: 7559 - protein, 469 aa, Unknown
  Description of Unknown: Integrase B7560 sequence
  PTHR30461:SF3,IPR036162,PS51737,IPR011109,PTHR30461, PS00397,PF00239,G3DSA:1.10.10.2600,IPR006119,SSF53041, SM00857,IPR025827,IPR038109,PS51736,cd03768, IPR006118,PF13408,G3DSA:3.40.50.1390,Coil
MAKSKMKKIVAPEQLTQSIVALYIRVSTDKQREEGFSIDIQKERLRAYATSMFPGAVVKEYVDDGFSGGSLDRPQMKMLIEDVKEKRVTHVVVLKLDRLSRSQKDTLYLIEDVFLPHNVAFISMGESFNTATPFGRAVVGILSVFAQLERENIFERTRSGMQKRVELGYWPGGGRTPFGYDYDETQGILVPNKDADTVRKIYDLYLGGMSLQNIADLCGLSYERLASQIIKRKSNTGVIVYNGEEYKGRHQPLVSEETYNKAMLMMQERSSARCTVFPDHLLSGLVYCGVCGAKMRYQKWGKAGTKLVCYSQQKSKRYLIRDENCDNIKPWADDVEAAVLDAVFARVSDPAPVDEGTTDRTMSDILKEQKSQAERKLRRLYDLYSDNPNDILLASITDLTDQIKDIEHKLDIEQKRSAVTERAHNVQIKLEEIESCWPYMTPTEKQSVLRELINKISVEKGHVHVDFRY

SEQ ID NO: 7560 - protein, 469 aa, Unknown
  Description of Unknown: Integrase B7561 sequence
  cd00338,SM00857,G3DSA:1.10.10.2600,IPR036162,PF13408, IPR025827,G3DSA:3.40.50.1390,PS51737,IPR006119,IPR038109, PF07508,SSF53041,IPR011109,PTHR30461,PS51736, Coil,PF00239
MMKKIAVLYMRMSTDMQEHSIESQERVLMEYAKRNGYVVIRKYIDRGISGQHASKRPDFLKMIDDSETGEFQFVLIYDSSRFARNLVESLTYKSILKENCVRLISMTEPNLEDDEMSLYIDAMQGATNEIYVRKLSKSVKRGHNDRALRGDLPGDVQFGLKRLKDGSIVLDEVKAPIMRWMYEAIYYDDSSYYSICETLAAKGIKSQRGNIIDSRQVKRMLMNIKNKAYHWAEKDGKPILKKGNYPAIVDEEIFDAVQEIIAERAKHYKKNEKPAEFRKHWLSGLLVCPHCGAGYSYNTRKPPQHDAFRCGNQTRGACKKGSSILVDVAVEMVLDKLSEVYAGPLAPYVKNITVSQPEPQIDYDKEIKLLEAQLKRAKQAYLAEIDTIDEYAQNKRRIASNIKELQEAKNQAQEGAALNEPQFKVKLLNAITLLKSDCPMSEKIPAARSIIEKILVDPRNKTMDIYFFA

SEQ ID NO: 7561 - protein, 469 aa, Unknown
  Description of Unknown: Integrase B7562 sequence
  PTHR30461:SF3,SM00857,G3DSA:1.10.10.2600,IPR036162,PF13408, IPR025827,PS51737,G3DSA:3.40.50.1390,IPR006119,IPR038109, PF07508,IPR011109,SSF53041,PTHR30461,PS51736, cd00338,PF00239
MARSITHIPARQTVVTTNNNLQIPKKKVAAYCRVSTDQLEQLSSYQNQLIYYREYISNNKAYEFVGIYADEGISGTNTKKREQFNKMIADCKSGKIDMIMTKSISRFARNTLDCLQYVRLLKDLGIEVFFEKENINTLDSKGEILLTLLSSLAQEESNNLSQITTWGIRRRFEQGKVTVNEKKFLGYDKDGEGNLIINRQQAKIVKRIYQEYLNGKGPTRIMRELEHDKVKGVTGSIKWYTTTIDKILRNEKYKGDALLQKTYTTNFLNKTRAKNEGQVTQYYVEESHPAIIPPIMWDAVQLEIERRKQYVEEHKLQKYDYGFEDTAFAGHIICGECGRSYQRKIWHSNSKPVRLWQCGSKYQEKGKVGCNNSHIYDQKLNEIFISAFNALVKNKETFLSKWRGELQGADVLKAYRMKQFIELIAEINTIEEVDKELVFKVLDKITVIDKGKVIVKFLDGTELECLMES

SEQ ID NO: 7562 - protein, 469 aa, Unknown
  Description of Unknown: Integrase B7563 sequence
  PTHR30461:SF3,SM00857,IPR006118,IPR036162,PF13408, IPR025827,G3DSA:3.40.50.1390,PS51737,IPR006119,SSF53041, IPR011109,PTHR30461,PS00397,PS51736,cd00338, PF00239
MLEKILRVALYIRVSTQEQVMHGYSLEAQEAALYDWCKNFKNDRAYKDYDSIEIVDIFKDEGKSAFKPCKKRPEFMRLINDFVIPEKVDLIIFIRLDRWFRRVGEYHEMQKILEDHNVHWKAILEEYETATSNGRFMVNIKISTAENEAENTRNRILDVNRYKRRIGKVMSGNQPFGYTVGIVDGSKRPVIHEIKGKIYRDMISYFFLSGSVGKTADYCNQKYHMNSNYSWYSKVLNNIDTYLGYSEGIGGYRPPLLSLDEAEKLRNLLGNNARRPRSQRIYIFSGLLTCPVCGNRLTSCISVYTNSNGKKKYYKRYRCQNAKVSHLCSFGTSFSERKIEAALLKGVGSAFADFETACQKNMKKSRDSAEELKKIQGQLDRLNKIFLMGNIQEDEYEATSFSLKKRMESLRLSPSRIDKKTADLLKTGEFIDYYRLLDDEHKQFFWRGIIKSVTLCNDHSNMISSILFL

SEQ ID NO: 7563 - protein, 469 aa, Unknown
  Description of Unknown: Integrase B7564 sequence
  G3DSA:1.10.10.2600,IPR036162,PF13408,PS51737,G3DSA:3.40.50.1390, IPR025827,IPR006119,IPR038109,PF07508,IPR011109, SSF53041,PF00239,PTHR30461,Coil,cd00338
MLENKFDIIVIKDQSRLMRNVLDWYLFVDRLNRTKKKLYLYLDHAFYTPDDALITGIKAMMAEEYSKDLSRKILSAAKRSQKGGTVYGNNRLWGYDQKDGKLFINEKEAEIVRFVFSSYVSGNGFRKIVTQLDDMGIKSSTGTIFSISVLKRMIRNEKYKGVLVGGKTHKDFYTKKTTFTDEDEWVEIPGGVPAIVSEEIWEQANHILNERRKKKIESDKGAAKEVYIGHFSGPYCLSGKMRCGVCGEIMWHTSYTTQKSKIKHEIWICRKYKMYGKSTKRGCNARTVFEEDIIPIIKTCIFEALNNEKDAIEAVIANIKLVTQRNAPTLFSENIEQRVRSLRQKTEKILDLYVDGVLNKYEYKTKKEEIDSQIADLERKQVGAFGVEEITRKQDERIVNLRKVLASKFESPEKLPDSFIRNFVYDVTVYDDKIKITLYDGSEYMRELIERKHRNKGGENTENFTNVSA

SEQ ID NO: 7564 - protein, 469 aa, Unknown
  Description of Unknown: Integrase B7565 sequence
  G3DSA:1.10.10.2600,IPR036162,PF13408,PS51737, G3DSA:3.40.50.1390,IPR025827,IPR006119,IPR038109, PF07508,IPR011109,SSF53041,PF00239, PTHR30461,Coil,cd00338
MLENKFDIIVIKDQSRLMRNVLDWYLFVDRLNRTKKKLYLYLDHAFYTPDDALITGIKAMMAEEYSKDLSRKILSAAKRSQKGGTVYGNNRLWGYDQKDGKLFINEKEAEIVRFVFSSYVSGNGFRKIVTQLDDMGIKSSTGTIFSISVLKRMIRNEKYKGVLVGGKTHKDFYTKKTTFTDEDEWVEIPGGVPAIVSEEIWEQANHILNERRKKKIESDKGAAKEVYIGHFSGPYCLSGKMRCGVCGEIMWHTSYTTQKSKIKHEIWICRKYKMYGKSTKRGCNARTVFEEDIIPIIKTCIFEALNNEKDAIEAVIANIKLVTQRNAPTLFSENIEQRVRSLRQKTEKIFDLYVDGVLNKYEYKTKKEEIDSQIADLERKQVGAFGVEEITRKQDERIVNLRKVLASKFESPEKLPDSFIRNFVYDVTVYDDKIKITLYDGSEYMRELIERKHRNKGGENTENFTNVSA

SEQ ID NO: 7565 - protein, 469 aa, Unknown
  Description of Unknown: Integrase B7566 sequence
  cd03768,PTHR30461:SF3,SM00857,G3DSA:1.10.10.2600,IPR036162, PS51737,G3DSA:3.40.50.1390,IPR006119,IPR038109,PF07508, IPR011109,SSF53041,PTHR30461,PS51736,Coil, PF00239
MYYERSYLRSCQVSSYEQATEGYSIHEQERKLKAFCEVQNWHDFKVFTDAGVSGGSMNRPALKRIMDNLEYYDLVLVYKLDRLTRNVKDLLEMLEKFEKYNVAFKSATEVFDTTTAIGKLFITMVGAMAEWERATIRERALFGSRAAVREGNYIREAPFCYDNVDGKLVPNKHKWVIDYLVEQFKHGVSGNEIARQMNLKKVNVPKVKKWNRTSIIRLMKNPVLRGHTKYGDMYIENTHEPVLSESDYKRIIDVIENKTHRSKVKHHAIFRGVLTCPQCHNKLHLYAGKITDKKGYSYEVRRYKCDTCSKDKNVQTISFNESEVEDKFIELLKTYDVNKFKVDIVEESTPELDYDIDKIMKQREKLTRSWSLGYIEDDEYFSLMDETKEILDKVERAGAEVESTQTVTNEQLNMIDNILIKGWSKLNVEQKEELILSTVKEIAFDFVPRKYNENGKVNTLNIREITFKF

SEQ ID NO: 7566 - protein, 469 aa, Unknown
  Description of Unknown: Integrase B7567 sequence
  cd03768,PTHR30461:SF3,SM00857,G3DSA:1.10.10.2600,IPR036162, PS51737,G3DSA:3.40.50.1390,IPR006119,IPR038109,PF07508, IPR011109,SSF53041,PTHR30461,PS51736,Coil, PF00239
MYYERSYLRSCQVSSYEQATEGYSIHEQERKLKAFCEVQNWHEFKVFTDAGVSGGSMNRPALKRIMDNLEYYDLVLVYKLDRLTRNVKDLLEMLETFEKYNVAFKSATEVFDTTTAIGKLFITMVGAMAEWERATIRERALFGSRAAVREGNYIREAPFCYDNVDGKLVPNKHKWVIDYLVEQFKHGVSGNEIARQMNLKKVNVPKVKKWNRTSIIRLMKNPVLRGHTKYGDMYIENTHEPVLSESDYKRIIDVIENKTHRSKVKHHAIFRGVLTCPQCHNKLHLYAGKITDKKGYSYEVRRYKCDTCSKDKNVQTISFNESEVEDKFIELLKTYDMNKFKVDIVEESTPKLDYDIDKIMKQREKLTRSWSLGYIEDNEYFSLMDETKEILDKVEHSNSEVESTQTVTNEQLNMIDDILIKGWSKLNVEQKEELILSTVKEIVFDFVPRKYNENGKVNTLNISEITFKF

SEQ ID NO: 7567 - protein, 469 aa, Unknown
  Description of Unknown: Integrase B7568 sequence
  cd00338,SM00857,G3DSA:1.10.10.2600,IPR036162,PF13408, PS51737,G3DSA:3.40.50.1390,IPR025827,IPR006119,IPR038109, PF07508,IPR011109,SSF53041,PTHR30461,PS51736, Coil,PF00239
MMKKIAVLYMRMSTDMQEHSIESQERVLMEYAKRNGYVVIRKYIDRGISGQHASKRPDFLKMIDDSETGEFQFVLIYDSSRFARNLVESLTYKSILKENCVRLISMTEPNLEDDEMSLYIDAMQGATNEIYVRKLSKSVKRGHNDRALRGDLPGDVQFGLKRLKDGSIVLDEVKAPIMRWMYEAIYYDDSSYYSIWETLAAKGIKSQRGNIIDSRQVKRMLMNIKNKAYHWAEKDGKPILKKGNYPAIVDEEIFDAVQEIIAERAKHYKKNEKPAEFRKHWLSGLLVCPHCGAGYSYNTRKPPQHDAFRCGNQTRGACKKGSSILVDVAVEMVLDKLSEVYAGPLAPYVKNITVSQPEPQIDYDKEIKLLEAQLKRAKQAYLAEIDTIDEYAQNKRRIASNIKELQEAKNQAQEGAALNEPQFKVKLLNAITLLKSDCPMSEKIPAARSIIEKILVDPRNKTMDIYFFA

SEQ ID NO: 7568 - protein, 469 aa, Unknown
  Description of Unknown: Integrase B7569 sequence
  SM00857,G3DSA:1.10.10.2600,IPR036162,PF13408,IPR025827, G3DSA:3.40.50.1390,PS51737,IPR006119,IPR038109,PF07508, IPR011109,SSF53041,PF00239,PTHR30461,PS51736, Coil,cd00338
MRAGLQIRVSTLEQAIDGYSLAAQEKKLKEYAQFKGYEIVGIYRDDGYSGASLNRPGLRRMMSDIEADKLDIVLIYKQDRLTRSVKDLLNLLDIFDRHNVALYSITENIDLSSPFGRAALKMSATFSELERETIIERSKMGKDQKARQGELMGNGKSPFGYKYDKSIKRFEIVPEEAEIVRNIYSLYIKGMSIRQLNAHCRETYNHPYFGNPMSCKAILHRPMYAGYFQWKGELIKGVNFEPIISYEDYLKVQNILKQNTFRRNRLTSPYLLTGLLLCGECGNRYVGKYKKSCQTNSEGQRIQYGNKYYGCTARIKRDKNYHPAKCTNKLWRVDILDEIIVNAVKNIDFEDIKTVKSPEGLFDSLRAEIADAKNKIDKLLDLYMSDLITREAYEQRLYEYEKKIRQAETVIEQEQIKLGDSPDIPTNYLKEQQLRLDDMTLDEKRLYLKMLIKHIILKQDEIYIEWRIK

SEQ ID NO: 7569 - protein, 469 aa, Unknown
  Description of Unknown: Integrase B7570 sequence
  PTHR30461:SF3,cd00338,G3DSA:1.10.10.2600,IPR036162,PF13408, IPR025827,PS51737,G3DSA:3.40.50.1390,IPR006119,IPR038109, PF07508,SSF53041,IPR011109,PTHR30461,Coil, PF00239
MLENKFDIIVIKDQSRLMRNVLDWYLFVDRLNRTKKKLYLYLDHAFYTPDDALITGIKAMMAEEYSKDLSRKILSAAKRSQKGGTVYGNNRLWGYDQKDGKLFINEKEAEIVRFVFSSYVSGNGFRKIVTQLDDMGIKSSTGTIFSISVLKRMIRNEKYKGVLVGGKTHKDFYTKKTTFTDEDEWVEIPGGVPAIVSEEIWEQANRILNERRKKKIESDKGAAKEVYIGHFSGPYCLSGKMRCGVCGEIMWHTSYTTQKSKIKHEIWICRKYKMYGKNTKRGCNARTVFEEDIIPIIKTCIFEALNNEKDAIEAVIANIKLATQRNAPTLFSENIEQRVRSLKQKGEKLLDLYVDGILNKYEYKTKKEEIDSQIAELERKQAGVFDVDEITRKQDERIVNLQKVLASKFESPEKLPDSFIRNFVYDVTVYDDKIKITLYDGSEYMRELIERKHRNKGGENTENFTNVSA

SEQ ID NO: 7570 - protein, 469 aa, Unknown
  Description of Unknown: Integrase B7571 sequence
  SM00857,G3DSA:1.10.10.2600,IPR036162,PF13408,PS51737, IPR025827,G3DSA:3.40.50.1390,IPR006119,IPR038109,PF07508, IPR011109,SSF53041,PF00239,PTHR30461,PS51736, Coil,cd00338
MRAGLQIRVSTLEQAIEGYSLAAQEKKLREYAKFKGYEIVGVYRDDGYSGASLNRPGLRRLMSDIEADKLDIVLIYKQDRLTRSVKDLLNLLDVFDKHNVALYSITENIDLSSPFGRAALKMSATFSELERETIIERSKMGKDQKARQGELMGSGNSPFGYKYDKLTKRFEIVPEEAEIVRNIYSLYIRGMSIRQLNAYCRDTYNHPHFGNPMSCKALLHRPMYAGYFEWKGDLIKGVNFDPIITYEDYLKVQNILKQNTFRRNRLTSPYMLTGLLVCGDCGNRYVGKYKKSYQINREGKRVQYGSKYYGCTARIKRDKNYHPAKCSNKMWRVEELDEIVLNAVKNIDFADLKSPKTVEGSFDLLRGEIADAKNKIDKLLDLYMNDLVTREAYEQRLYEYEKRIKQTEAVIEQEQEKLGDSPELPTNYLKEQQARIDELSLDERRLYLKMIIKHIVLKNDEIYIEWRIK

SEQ ID NO: 7571 - protein, 469 aa, Unknown
  Description of Unknown: Integrase B7572 sequence
  PTHR30461:SF3,SM00857,G3DSA:1.10.10.2600,IPR036162,PF13408, PS51737,G3DSA:3.40.50.1390,IPR025827,IPR006119,IPR038109, PF07508,SSF53041,IPR011109,PTHR30461,Coil, PS51736,cd00338,PF00239
MVDEYIDRAISGKTDNRPSFQRLIKDSEKGHFDAVIMYTLDRFARNRYDSAIYKAKLKRNGVKIFYAKQPMPDTPEGIILESVLEGYAEYYSENLARSIKRGMKENALHGIAMGSPVLGYKIGNDRQYEIDPVGAKAVRTIFTMYAEGKSKTQIVNWLNEHGFKTSRGNAFNKNSLSRILRNDKYIGVYRYDDVVLEDAVPPIIDKTLFEKVQATFRHNYTARAKAKAIEDYLLTTKVFCGHCGEPMVGESGTSKTGKVHHYYKCVNRKRKHNCKKKVEKKEWLERTVVEFTVQQVLTDENIEKISTRAMELIEKELQDTSILIGLQERLKETNKRIKNLMSAIEQGIITPTTKERLEELEEERRDLEGQIAREEMKKPLLTKERIMYWLESFKRGDIKDVEYQRRIIDTLVNSVYVYDDGDKGRKLVLTFNISGNNTLTISSSDIERTAPPKSSTSQEVELFSFYYTL

SEQ ID NO: 7572 - protein, 469 aa, Unknown
  Description of Unknown: Integrase B7573 sequence
  cd00338,SM00857,G3DSA:1.10.10.2600,IPR036162,PF13408, IPR025827,G3DSA:3.40.50.1390,PS51737,IPR006119,IPR038109, PF07508,SSF53041,IPR011109,PTHR30461,PS51736, Coil,PF00239
MMKKIAVLYMRMSTDMQEHSIESQERVLMEYAKRNGYVVIRKYIDRGISGQHASKRPDFLKMIDDSETGEFQFVLIYDSSRFARNLVESLTYKSILKENCVRLISMTEPNLEDDEMSLYIDAMQGATNEIYVRKLSKSVKRGHNDRALRGDLPGDVQFGLKRLKDGSIVLDEVKAPIMRWMYEAIYYDDSSYYSICETLAAKGIKSQRGNIIDSRQVKRMLMNIKNKAYHWAEKDGKPILKKGNYPAIVDEEIFDAVQEIIAERAKHYKKNEKPAEFRKHWLSGLLVCPHCGAGYSYNTRKPPQHDAFRCGNQTRGACKKGSSILVDVAVEMVLDKLSEVYAGPLAPYVKNITVSQPEPQIDYDKEIKLLEAQLKRAKQAYLAEIDTIDEYAQNKRRIASNIKELHEAKNQAQEGAALNEPQFKVKLLNAITLLKSDCPMSEKIPAARSIIEKILVDPRNKTMDIYFFA

SEQ ID NO: 7573 - protein, 469 aa, Unknown
  Description of Unknown: Integrase B7574 sequence
  PTHR30461:SF3,IPR036162,PS51737,IPR011109,PTHR30461, PS00397,PF00239,G3DSA:1.10.10.2600,IPR006119,SSF53041, SM00857,IPR025827,IPR038109,PS51736,cd03768, IPR006118,PF13408,G3DSA:3.40.50.1390,Coil
MAKSKMKKIVAPEHLAQSIVALYIRVSTDKQREEGFSIDIQKERLRAYATSMFPGAVVKEYVDDGFSGGSLDRPQMKMLIEDVKEKRVTHVVVLKLDRLSRSQKDTLYLIEDVFLPHNVAFISMGESFNTATPFGRAVVGILSVFAQLERENIFERTRSGMQKRVELGYWPGGGRTPFGYDYDETQGILVPNKDADTVRKIYDLYLGGMSLQNIADLCGLSYERLASQIIKRKSNTGVIVYNGEEYKGRHQPLVSEETYNKAMLMMQERSSARCTVFPNHLLSGLVYCGVCGAKMRYQKWGKAGTKLVCYSQQKSKRYLIRDENCDNIKPWADDVEAAVLDAVFARASGPAPVDEGTPDRTMSDILKEQKSQAERKLRRLYDLYSDNPNDILLASITDLTDQIRDIEHKLDIEQKRSAVTERAHNIQIKLEEIESCWPYMTPTEKQSVLRELINKISVEKDHIHVDFRY

SEQ ID NO: 7574 - protein, 468 aa, Unknown
  Description of Unknown: Integrase B7575 sequence
  PTHR30461:SF3,IPR036162,PS51737,IPR011109,PTHR30461, PS00397,PF00239,G3DSA:1.10.10.2600,IPR006119,SSF53041, cd00338,SM00857,IPR025827,IPR038109,PS51736, IPR006118,PF13408,G3DSA:3.40.50.1390,PF07508,Coil
MSVKYAYGYIRVSTHDQEEISPDSQEHLLWDYAAKNNIVILKIFTDLGISGRKANKRPGFQEMIGLAKGDDHPVDQILVWKFSRFARNQEESIVYKSLLKKQHNVDVVSVSEPLSDNPFGSLIERIIAWLDEYYSIRLSGEVYRGMKENALRGAYQARPPLGYKVVEHGKPPVIVPEEAKIVRTIFEKYTNEGMSFFDIARYLNSLGLKTSHGKPFERRSVEYIIQNPSYCGMIRWNRTENSTNRIKDKDEWIVTEGQQPAIISKELFESAQKRFKATYKPVGKRPSSTYKHWLSGLLKCPDCGRTLTSTTMKRVNGEKYSYFSCYGYSKGKCKKPNGISSLVLEKEVLASIKEILDTKDIVYELREYQPTEQFDERKAITEQLESLTGKEERIKASYREGIDTLEEYKANKAIIQKEQESLEQQLKELKKAAHKSDQDPADACCRRSGVCMIFSSPTIIHTCKRTNP

SEQ ID NO: 7575 - protein, 468 aa, Unknown
  Description of Unknown: Integrase B7576 sequence
  PTHR30461:SF3,SM00857,IPR006118,G3DSA:1.10.10.2600,IPR036162, PS51737,G3DSA:3.40.50.1390,IPR006119,IPR038109,PF07508, IPR011109,SSF53041,PTHR30461,PS00397,PS51736, cd00338,PF00239
MLYGKPQNYAWYRARVILYIRVSTDEQARHGYSLGAQREALREFCDTFQCQIVAEYSDDGVSARKEIQRRPGLLRVLEAVKAGGVDYVLFIKLDRWFRSVREYYRVQDVLDAAGTNWKAILEDYDTSTTNGRLNLNIRLSVAQDESDRTADRIKFVFSERVKNGGAIFGSKSLPYGLEVRDHRVQIVEDQAVIVRAFFEHYEAAHSTRSTQVWLRDQYGVDLPRNAIGRMLRNGLYCGQYRDNKNYCPAIISPDQFQRVQEILARQASGHTRQSKYSYVFTGLLRCPVCGCTLKAFPQFDHKLNRLYLRYRCTQHWIEKRCSWKTTPWEPRLEGWLLDHVQPQLDAYVAQFDVQEAQRRQAVVDVGAIQRKLSRLQDLYVDGVIDRAAYDEKYHALIQQQDAAEAVRAAQSAGRDFGPLRQLLAGDFRSIYATLSPQERHTLWASVIDRIVVKDGRYGHLDLDVIFLP

SEQ ID NO: 7576 - protein, 468 aa, Unknown
  Description of Unknown: Integrase B7577 sequence
  PTHR30461:SF3,SM00857,IPR006118,G3DSA:1.10.10.2600,IPR036162, PS51737,G3DSA:3.40.50.1390,IPR006119,IPR038109,PF07508, SSF53041,IPR011109,PTHR30461,PS00397,PS51736, cd00338,PF00239
MLYGKPQNYSWYRARVVLYIRVSTDEQARHGYSLGAQREALREFCDTFQCQIVAEYSDDGVSARKEIQRRPGLLRVLEAVKAGGVDYVLFIKLDRWFRSVREYYRVQDVLDAAGTNWKAILEDYDTSTTNGRLNLNIRLSVAQDESDRTADRIKFVFSERVKNGGAIFGSKSLPYGLEVRDHRVQIVEDQAVIVRAFFDHYEAAQSARSTQVWLRDQYGVDLPRNTIGRMLRNGLYCGQYRDNKNYCPAIISPDQFRRVQEILARQASGHTRQSKYSYVFTGLLRCPVCGCTLKAFPQFDYKWNRLYLRYRCTQHWIENRCSWKTTPWEPRLEGWLLDHIQPQLDAYIAQFDVQEAQRRRAVVDVGAIQRKLSRLQDLYVDGMIDRAAYDEKYQALIRQQEVAQAAQQSQSAGRDLEPLRQLLAGDFRSIYATLSPQERHTLWASVIDHIVVKDGRYGHFDLDVIFLP

SEQ ID NO: 7577 - protein, 468 aa, Unknown
  Description of Unknown: Integrase B7578 sequence
  PTHR30461:SF3,SM00857,IPR006118,G3DSA:1.10.10.2600,IPR036162, PS51737,G3DSA:3.40.50.1390,IPR006119,IPR038109,PF07508, IPR011109,SSF53041,PTHR30461,PS00397,PS51736, cd00338,PF00239
MLYGKPQNYAWYRARVILYIRVSTDEQARHGYSLGAQREALREFCDTFQCQIVAEYSDDGVSARKEIQRRPGLLRVLEAVKAGGVDYVLFIKLDRWFRSVREYYRVQDVLDAAGTNWKAILEDYDTSTTNGRLNLNIRLSVAQDESDRTADRIKFVFSERVKNGGAIFGSKSLPYGLEVRDHRVQIVEGQAVIVRAFFDHYEAAHSTRSTQVWLRDQYGVDLPRATIGRMLRNGLYCGQYRDNKNYCPAIISPDQFQRVQEILARQASGHTRQSKYSYVFTGLLRCPVCGCTLKAFPQFDYKWNRLYLRYRCTQHWIERRCSWKTTPWEPRLEGWLLDHIQPQLDAYVAQFDVQEAQRRQAVVDVSAIQRKLSRLQDLYVDGVIDRAAYDEKYRALIQQQDAAEAARAAQSAGRDLEPLRQLLAGDFRSIYATLSPQERHTLWASVIDHIVVKDGRYGHYDLDVIFLP

SEQ ID NO: 7578 - protein, 468 aa, Unknown
  Description of Unknown: Integrase B7579 sequence
  PTHR30461:SF3,SM00857,IPR006118,G3DSA:1.10.10.2600,IPR036162, PS51737,G3DSA:3.40.50.1390,IPR006119,IPR038109,PF07508, IPR011109,SSF53041,PTHR30461,PS00397,PS51736, cd00338,PF00239
MLYGKPQNYAWYRARVILYIRVSTDEQARHGYSLGAQREALREFCDTFQCQIVAEYSDDGVSARKEIQRRPGLLRVLEAVKAGGVDYVLFIKLDRWFRSVREYYRVQDVLDAAGTNWKAILEDYDTSTTNGRLNLNIRLSVAQDESDRTADRIKFVFSERVKNGGAIFGSKSLPYGLEVRDHRVQIVEDQAVIVRAFFDHYEAAHSTRSTQVWLRDQYGVDLPRATIGRMLRNGLYCGQYRDNKNYCPAIISPDQFQRVQEILARQASGHTRQSKYSYVFTGLLRCPVCGCTLKAFPQFDYKWNRLYLRYRCTQHWIERRCSWKTTPWEPRLEGWLLDHIQPQLDAYVAQFDVQEAQRRQAVVDVGAIQRKLSRLQDLYVDGVIDRAAYDEKYRVLIQQQDAAEAARAAQSAGRDLEPLRQLLAGDFRSIYATLSPQERHTLWASVIDHIVVKDGRYGHFDLDVIFLP

SEQ ID NO: 7579 - protein, 468 aa, Unknown
  Description of Unknown: Integrase B7580 sequence
  PTHR30461:SF3,IPR036162,PS51737,IPR011109,PTHR30461, PS00397,PF00239,G3DSA:1.10.10.2600,IPR006119,SSF53041, cd00338,SM00857,IPR025827,IPR038109,PS51736, IPR006118,PF13408,G3DSA:3.40.50.1390,PF07508
MLYGKPQNYSWYRARVVLYIRVSTDEQARHGYSLGAQREALREFCDTFQCQIVAEYSDDGVSARKEIRRRPGLLRVLEAVKAGGVDYVLFIKLDRWFRSVREYYRVQDVLEAAGTNWKAILEDYDTSTTNGRLNLNIRLSVAQDESDRTADRIKFVFAERVKNGGAIFGSKSLPYGLEVADHRVQIVESQADAVRGMFDHYEATNSTRETHAWLRDQCGVDLPYNTIRNMLRNSLYCGEYRGNVNYCPAIISREQFQNIQKIVSRQGANRTRQSKYSYVFTGLLRCPVCGCTLKAFPQTDYKFHRVYLRYRCTQHWIDKRCTWKTTPWEPRLEDWLLDHIQPQLDAYIAQFDVQEAQRRRAVVDVGAIQRKLSRLQDLYVDGMIGRAAYDEKYQALIRQQEAAHAAQQGQSAGRDLEPLRQLLAGDFRSVYATLSPQERHTLWASVIDHIVVKDGRYGRFDLDVIFLP

SEQ ID NO: 7580 - protein, 468 aa, Unknown
  Description of Unknown: Integrase B7581 sequence
  SM00857,IPR006118,G3DSA:1.10.10.2600,IPR036162,PS51737, G3DSA:3.40.50.1390,IPR006119,IPR038109,PF07508,IPR011109, SSF53041,PF00239,PTHR30461,PS00397,PS51736, Coil,cd00338
MKKLRAIAYCRVSTVTQEEGRSLEFQIKKCQDYCEFNNYELIEIIQDVESGGNDERKGFQDLNNKIKAKLFDVLVVFESSRISRITLTMLNFVLELQKSNIHFISISQPELNTTTPTGMLFFQIQSSLSEYERKQISVRVKSNKWARAREGIWQGGKLPLGYKKDPQNNDIILIDEDNAIIVKSIFDYYLRTQSIAKTSKYFNKPMESIRWILTNPFYKGLFRYGKKENNINTGIVKINKDYQYFEGSHSPIISDEIFDKVQSILSLRKKNISVSFKLLFTGLVTCSCGGKYFSAKNGHKYNYRCSDCGKAISYRKMEGNIIKEILKLSELEELNEVDLKIENYSLQIDSISQLIEKDKKAREKVMQLFKNDLISIDELKKEVNDIDDSILYKEKEIKRIKNFIDNQKTNSEKVNNLKLLKEAIEYMEDEDREDIHDLFKLMIKEIVILNKDEINVKTENINLKIFLK

SEQ ID NO: 7581 - protein, 468 aa, Unknown
  Description of Unknown: Integrase B7582 sequence
  PTHR30461:SF3,SM00857,IPR006118,IPR036162,PF13408, PS51737,G3DSA:3.40.50.1390,Coil,IPR025827,IPR006119, IPR011109,SSF53041,PTHR30461,PS00397,PS51736, cd00338,PF00239
MSEKIKRCAIYIRVSTSEQLVHGKSLEAQKDYLTSYAKDHGMIPVGVYADEGKTARKELKKRKAIHALLEDVKAGKIDVILFWRLDRWFRNMSDFYKVQDILDEYKVYWISASEPGINMETRDGRLQLNVVLSIGQNEVDTTSERIKFVNEASIRQKKVIFGEANMPRGYKIGVVNGQKCMVKDPDQEELVNAFFDYFEKHQGKQATLRYIQSHYDPSFSYSCLRTMLSSEFYKGTYRGIPYCPSYVSEVRWARLQKISKKNIKNTPSGRIYYFTGMIRCPECGQILAGTGCRSIINRKTGEKRDYCYYRCNRAMIDRICTNRHKVSQNLIETYLLENLEREFEEYKIRVDEIQKKNKQKPKVRTEEQIEKEMSRLNLLFQKDRITWDYYSKEYDALESEKNGLKAIIIEPESDYSSVESLLQKDFLAIYHSLAEENRRTFWRNIIRQIHLKSDYTINYVDFVQSVSV

SEQ ID NO: 7582 - protein, 468 aa, Unknown
  Description of Unknown: Integrase B7583 sequence
  PTHR30461:SF3,SM00857,IPR006118,IPR036162,PF13408, PS51737,G3DSA:3.40.50.1390,Coil,IPR025827,IPR006119, IPR011109,SSF53041,PTHR30461,PS00397,PS51736, cd00338,PF00239
MSEKIKRCAIYIRVSTSEQLVHGKSLEAQKDYLTSYAKDHGMIPVGVYADEGKTARKELKKRKAIHALLEDVKAGKIDVILFWRLDRWFRNMSDFYKVQDILDEYKVYWISASEPGINMETRDGRLQLNVVLSIGQNEVDTTSERIKFVNEASIRQKKVIFGEANMPRGYKIGVVNGQKCMVKDPDQEELVNAFFDYFEKHQGKQATLRYIQSHYDPSFSYSCLRTMLSSEFYKGTYRGIPYCPSYVSEVRWARLQKISKKNIKNTPSGRIYYFTGMIRCPECGQILAGTGCRSIINRKTGEKRDYCYYRCNRAMIDRICTNRHKVSQNLIETYLLENLEREFEEYKIRVDEIQKKNKQKPKVRTEEQIEKEMSRLNLLFQKDRITWDYYSKEYDALESEKNGLKAIIIEPESDYSSVESLLQKDFLAIYHSLAEENRRTFWRNIIRQIHLKPDYTINYVDFVQSVSV

SEQ ID NO: 7583 - protein, 468 aa, Unknown
  Description of Unknown: Integrase B7584 sequence
  PTHR30461:SF3,IPR036162,PS51737,IPR011109,PTHR30461, PS00397,PF00239,G3DSA:1.10.10.2600,IPR006119,SSF53041, cd00338,SM00857,IPR025827,IPR038109,PS51736, IPR006118,PF13408,G3DSA:3.40.50.1390,PF07508
MLYGKPQNYSWYRARVVLYIRVSTDEQARHGYSLGAQREALREFCDTFQCQIVAEYSDDGVSARKEIQRRPGLLRVLEAVKAGGVDYVLFIKLDRWFRSVREYYRVQDVLDAAGTNWKAILEDYDTSTTNGRLNLNIRLSVAQDESDRTADRIKFVFSERVKNGGAIFGSKSLPYGLEVRDHRVQIVEDQAVIVRAFFDHYEAAHSTRSTQVWLRDQYGVDLPRATIGRMLRNGLYCGQYRDNKNYCPAIISLDQFQRVQEILARQASGHTRQSKYSYVFTGLLRCPVCGCTLKAFPQFDYKWNRLYLRYRCTQHWIERRCSWKTTPWEPRLEDWLLDHIQPQLDAYIAQFDVQEAQRRRAVVDVCAIQRKLSRLQDLYVDGMIDRAAYDEKYQALIRQQEAAQAAQQSQSAGRDLEPLRQLLAGDFRSIYATLSPQERHTLWASVIDHIVVKDGRYGHYDLDVIFLP

SEQ ID NO: 7584 - protein, 468 aa, Unknown
  Description of Unknown: Integrase B7585 sequence
  PTHR30461:SF3,SM00857,IPR006118,G3DSA:1.10.10.2600,IPR036162, PS51737,G3DSA:3.40.50.1390,IPR006119,IPR038109,PF07508, IPR011109,SSF53041,PTHR30461,PS00397,PS51736, cd00338,PF00239
MLYGKPQNYAWYRARVILYIRVSTDEQARHGYSLGAQREALREFCDTFQCQIVAEYSDDGVSARKEIQRRPGLLRVLEAVKAGGVDYVLFIKLDRWFRSVREYYRVQDVLDAAGTNWKAILEDYDTSTTNGRLNLNIRLSVAQDESDRTADRIKFVFSERVKNGGAIFGSKSLPYGLEVRDHRVQIVEDQAVIVRAFFDHYEAAHSTRSTQVWLRDQYGVDLPRATIGRMLRNGLYCGQYRDNKNYCPAIISPDQFQRVQEILARQASGHTRQSKYSYVFTGLLRCPVCGCTLKAFPQFDYKWNRLYLRYRCTQHWIERRCSWKTTPWEPRLEGWLLDHIQPQLDAYVAQFDVQEAQRRQAVVDVGAIQRKLSRLQDLYVDGVIDRAAYDEKYRALIQQQDAAEAARAAQSAGRDLEPLRQLLAGDFRSIYATLSPQERHTLWASVIDHIVVKDGRYGHYDLDVIFLP

SEQ ID NO: 7585 - protein, 468 aa, Unknown
  Description of Unknown: Integrase B7586 sequence
  PTHR30461:SF3,SM00857,IPR006118,G3DSA:1.10.10.2600,IPR036162, PS51737,G3DSA:3.40.50.1390,IPR006119,IPR038109,PF07508, IPR011109,SSF53041,PTHR30461,PS00397,PS51736, cd00338,PF00239
MLYGKPQNYSWYRARVVLYIRVSTDEQARHGYSLGAQREALREFCDTFQCQIVAEYSDDGVSARKEIQRRPGLLRVLEAVKAGGVDYVLFIKLDRWFRSVREYYRVQDVLDAAGTNWKAILEDYDTSTTNGRLNLNIRLSVAQDESDRTADRIKFVFSERVKNGGAIFGSKSLPYGLEVRGHRVQIVEDQAVIVRAFFDHYEAVHSARSTQVWLRDQCGVDLPRNAIGRMLRNGLYCGQYRDNKNYCPAIISPDQFQRVQEILARQASGHTRQSKYSYVFTGLLRCPVCGCTLKAFPQFDHKLNRLYLRYRCTQHWIEKRCSWKTTPWEPRLEGWLLDHIQPQLDAYIAQFDVQEAQRRQAVVDVGAIQRKLSRLQDLYVDGVIDRAAYDEKYRALIQQQDAAEAARAAQSAERDLGPLRQLLAGDFRSIYATLSPQERHTLWASVIDRIVVKDGRYGHFDLDVIFLP

SEQ ID NO: 7586 - protein, 468 aa, Unknown
  Description of Unknown: Integrase B7587 sequence
  PTHR30461:SF3,cd00338,SM00857,IPR036162,PF13408, PS51737,G3DSA:3.40.50.1390,IPR025827,IPR006119,IPR011109, SSF53041,PTHR30461,PS51736,Coil,PF00239
MASNFFAPQPELFGRRVVKYIRCSSEGQVLHGETLETQNMLLDDFIRVNRLVLVDTFVDEALTARKRYTKRKEFVRLLDGVQAHNFDLILFTKLDRWFRNIGDYHQIQAILEENGVQWKAILESYDTTTSNGRLHINIRMSVAQDECDRCSERIKDVFAYKLRNKTFVAGKVPRGLMLDEEKHIVHDPEWKQWALDLFDSIEATGSVYSARALMAEKYGFSLTEQGFVRASKNRLYKGQYRDDPEFCEPLIDPERFDRIQDLIARNKRFGKTKYSYSFSGLLICSSCRHKLVGATYSTKNLDGTVRQYTCYRCNVHTSQPSLNLCDRSHAIREERVEEYLLEHIRPALSEYLSSYNVSAQESKRNTHQADAAKIRRKIEKLYDLFMDDLIEKEEYREKYEDLQKQLKECQIAPVPAPAPNLGQLQDLLSQDWEAVYATFSKPEKNAFWKSFVHSVVVYDDEHMDISFL

SEQ ID NO: 7587 - protein, 468 aa, Unknown
  Description of Unknown: Integrase B7588 sequence
  cd03768,PTHR30461:SF3,SM00857,IPR006118, G3DSA:1.10.10.2600,IPR036162,PS51737,G3DSA:3.40.50.1390, IPR006119,IPR038109,PF07508,IPR011109, SSF53041,PTHR30461,PS00397,PS51736,Coil,PF00239
MYQDITTVCGYVRVSTENQLENYSIEEQTVRIRSYCQAKGWHLVQIYTDGGYSGGNTNRPALQRMLSDIRQGKMQAVVVYKLDRLSRSQKDTLTLIEDHMLSAGVDFISINENFDTSSPFGRAMIGILSVFAQLEKDQITERFTMGRIGRSKAGYYHGGPNAPRGYQYVDGTLIVDEFKASQVKEIFRLFLDGKSINRIARQMEQKYGGRWNAAGVRVILLNSTYIGKVKFAGVEYDGRHQPLISKEDFETAQKLLFSPARDAKKNSAQKNPFRAETLLSGLILCSRCGARYSGCHGHYKCYSRAKGNPRYVKDPNCKNDNWIISELDSLTISSIRELLDNNDLLDAAIENARPSLEDSANEIEITTHLKEIEAQINRLLDLYQIGSIPTETLSSRIQTLDQEKTALTTLLENKEDSFEERKQAFLENIQNFRDHFDDSDLDTQRLLIRSIIESISVDGRNISIQWRI

SEQ ID NO: 7588 - protein, 468 aa, Unknown
  Description of Unknown: Integrase B7589 sequence
  PTHR30461:SF3,SM00857,IPR006118,G3DSA:1.10.10.2600,IPR036162, PS51737,G3DSA:3.40.50.1390,IPR006119,IPR038109,PF07508, IPR011109,SSF53041,PTHR30461,PS00397,PS51736, cd00338,PF00239
MLYGKPQNYSWYRARVVLYIRVSTDEQARHGYSLGAQREALREFCDTFQCQIVAEYSDDGVSARKEIQRRPGLLRVLEAVKAGGVDYVLFIKLDRWFRSVREYYRVQDVLDAAGTNWKAILEDYDTSTTNGRLNLNIRLSVAQDESDRTADRIKFVFSERVKNGGAIFGSKSLPYGLEVRNHRVQIVEDQAVIVRAFFDHYEAVHSARSTQVWLRDQCGVDLPRNAIGRMLRNGLYCGQYRDNKNYCPAIISPDQFQRVQEILARQASGHTRQSKYSYVFTGLLRCPVCGCTLKAFPQFDHKLNRLYLRYRCTQHWIEKRCTWKTTPWEPRLEGWLLDHVQPQLDAYVAHFDVQEAQRRQAVVDVGAIQRKLSRLQDLYVDGVIDRAAYDEKYHALIQQQDAAEAVRAAQSAGRDLGPLRQLLVGDFRSIYATLSPQERHTLWASVIDRIVVKDGRYGHFDLDVIFLP

SEQ ID NO: 7589 - protein, 468 aa, Unknown
  Description of Unknown: Integrase B7590 sequence
  PTHR30461:SF3,SM00857,IPR006118,G3DSA:1.10.10.2600,IPR036162, PS51737,G3DSA:3.40.50.1390,IPR006119,IPR038109,PF07508, SSF53041,IPR011109,PTHR30461,PS00397,PS51736, cd00338,PF00239
MLYGKPQNYSWYRARVVLYIRVSTDEQARHGYSLGAQREALREFCDTFQCQIVAEYSDDGVSARKEIQRRPGLLRVLEAVKAGGVDYVLFIKLDRWFRSVREYYRVQDVLDAAGTNWKAILEDYDTSTTNGRLNLNIRLSVAQDESDRTADRIKFVFSERVKNGGAIFGSKSLPYGLEVRDHRVQIVEDQAVIVRAFFDHYEAVHSARSTQVWLRDQCGVDLPRNAIGRMLRNGLYCGQYRDNKNYCPAIISPDQFQRVQEILARQASGHTRQSKYSYVFTGLLRCPVCGCTLKAFPQFDHKLNRLYLRYRCTQHWIEKRCSWKTTPWEPRLEGWLLDHIQPQLDAYIAQFDVQEAQRRQAVVDVGAIQRKLSRLQDLYVDGVIDRAAYDEKYRALIQQQDAAEAARAAQRAERDLGPLRQLLAGDFRSIYATLSPQERHTLWASVIDRIVVKDGRYGHFDLDVIFLA

SEQ ID NO: 7590 - protein, 468 aa, Unknown
  Description of Unknown: Integrase B7591 sequence
  PTHR30461:SF3,SM00857,IPR006118,G3DSA:1.10.10.2600,IPR036162, PS51737,G3DSA:3.40.50.1390,IPR006119,IPR038109,PF07508, SSF53041,IPR011109,PTHR30461,PS00397,PS51736, cd00338,PF00239
MLYGKPQNYAWYRARVILYIRVSTDEQARHGYSLGAQREALREFCDTFQCQIVAEYSDDGVSARKEIQRRPGLLRVLEAVKAGGVDYVLFIKLDRWFRSVREYYRVQDVLDAAGTNWKAILEDYDTSTTNGRLNLNIRLSVAQDESDRTADRIKFVFSERVKNGGAIFGSKSLPYGLEVRDHRVQIVEDQAVIVRAFFDHYEAVHSARSTQVWLRDQCGVDLPRNAIGRMLRNGLYCGQYRDNKNYCPAIISPDQFQRVQEILARQASGHTRQSKYSYVFTGLLRCPVCGCTLKAFPQFDHKLNRLYLRYRCTQHWIEKRCSWKTTPWEPRLEGWLLDHVQPQLDAYVAQFDVQEAQRRQAVVDVGAIQRKLSRLQDLYVDGVIDRAAYDEKYHALIQQQDAAEAVRAAQSAGRDLGPLRQLLAGDFRSIYATLSPQERHTLWASVIDRIVVKDGRYGHFDLDVIFLP

SEQ ID NO: 7591 - protein, 468 aa, Unknown
  Description of Unknown: Integrase B7592 sequence
  PTHR30461:SF3,SM00857,IPR006118,G3DSA:1.10.10.2600,IPR036162, PS51737,G3DSA:3.40.50.1390,IPR006119,IPR038109,PF07508, IPR011109,SSF53041,PTHR30461,PS00397,PS51736, cd00338,PF00239
MLYGKPQNYSWYRARVVLYIRVSTDEQARHGYSLGAQREALREFCDTFQCQIVAEYSDDGVSARKEIQRRPGLLRVLEAVKAGGVDYVLFIKLDRWFRSVREYYRVQDVLDAAGTNWKAILEDYDTSTTNGRLNLNIRLSVAQDESDRTADRIKFVFSERVKSGGAIFGSKSLPYGLEVRGHRVQIVEDQAVIVRAFFDHYEAVHSARSTQVWLRDQCGVDLPRNAIGRMLRNGLYCGQYRDNKNYCPAIISPDQFQRVQEILARQASGHTRQSKYSYVFTGLLRCPVCGCTLKAFPQFDHKLNRLYLRYRCTQHWIEKRCSWKTTPWEPRLEGWLLDHIQPQLDAYIAQFDVQEAQRRQAVVDVGAIQRKLSRLQDLYVDGVIDRAAYDEKYRALIQQQDAAEAARAAQSAERNLGPLRQLLAGDFRSIYATLSPQERHTLWASVIDRIVVKDGRCGHFDLDVIFLP

SEQ ID NO: 7592 - protein, 468 aa, Unknown
  Description of Unknown: Integrase B7593 sequence
  PTHR30461:SF3,SM00857,IPR006118,G3DSA:1.10.10.2600,IPR036162, PS51737,G3DSA:3.40.50.1390,IPR006119,IPR038109,PF07508, IPR011109,SSF53041,PTHR30461,PS00397,PS51736, cd00338,PF00239
MLYGKPQNYAWYRARVILYIRVSTDEQARHGYSLGAQREALREFCDTFQCQIVAEYSDDGVSARKEIQRRPGLLRVLEAVKAGGVDYVLFIKLDRWFRSVREYYRVQDVLDAAGTNWKAILEDYDTSTTNGRLNLNIRLSVAQDESDRTADRIKFVFSERVKNGGAIFGSKSLPYGLEVRDHRVQIVEDQAVIVRAFFDHYEAAHSTRSTQVWLRDQYGVDLPRATIGRMLRNGLYCGQYRDNKNYCPAIISPDQFQRVQEILARQASGHTRQSKYSYVFTGLLRCPVCGCTLKAFPQFDYKWNRLYLRYRCTQHWIERRCSWKTTPWEPRLEGWLLDHVQPQLDAYIAQFDVQEAQRRQAVVDVGAIQRKLSRLQDLYVDGVIDRAAYDEKYRALIQQQDAAEAARAAQSAGRDLEPLRQLLAGDFRSIYATLSPQERHTLWASVIDHIVVKDGRYGHYDLDVTFLP

SEQ ID NO: 7593 - protein, 468 aa, Unknown
  Description of Unknown: Integrase B7594 sequence
  PTHR30461:SF3,IPR036162,PS51737,IPR011109,PTHR30461, PS00397,PF00239,G3DSA:1.10.10.2600,IPR006119,SSF53041, SM00857,IPR025827,IPR038109,PS51736,cd03768, IPR006118,PF13408,G3DSA:3.40.50.1390,PF07508,Coil
MKKVAIYVRVSTQEQAVEGYSISEQIDRLTKFCEAHSWKIYKVYTDPGFSGGNMNRPSLQKLFADCTQKRFDTVLVYKLDRLSRSQKDTLYIIEDLFLTNHVDFISMSENFDTSTPFGRAMIGILSVFAQLEREQIKERMAMGREGRAKQGKWHGGGNVPIGYDFINDYLIPNEYEAAQVKQIFDLAIRGYSYSDIARSMSGYTTKYGPYKVGYNTISLILQNPIYIGKIKTNTGYINGIHEPLIDETTFNEVQKKVTQIAEYYKKEHTGHYGQYLLSGLCRCASCGATYSAHYVGTKKHRYKYYKCRNRAYNWRDGSPKCMSPNIRVEVLDNAVLNEIRHLQLDPDYFDEVSNSPAADSSSLVETLNKRLENIQKQIARTIRLYSLGSVEEKDIENQLQILYSERDTLSLEIENATADQKDTADVKSILSMSNIDELDDTEKHNLVCLLINHIMINSNGDFEIHWTF

SEQ ID NO: 7594 - protein, 468 aa, Unknown
  Description of Unknown: Integrase B7595 sequence
  PTHR30461:SF3,SM00857,IPR006118,G3DSA:1.10.10.2600,IPR036162, PS51737,G3DSA:3.40.50.1390,IPR006119,IPR038109,IPR011109, SSF53041,PTHR30461,PS00397,PS51736,cd00338, PF00239
MLYGKPQNYSWYRARVVLYIRVSTDEQARHGYSLGAQREALHEFCDTFQCQIVAEYSDDGVSARKEIRRRPGLLRVLEAVKAGGVDYVLFIKLDRWFRSVREYYRVQDVLEAAGTNWKAILEDYDTGTTNGRLNLNIRLSVAQDESDRTADRIKFVFAERVKNGGAIYGSKSLPYGLEVADHRVQIVESQADAVRGMFAHYEATASARDTQFWLRDQYGVDLPYNTVGRMLRNSLYCGEYRGNASYCPAIIPPDQFRRVQEILARQTTSHTRQSKYSYVFSGLLRCPVCGCTLKAFPQMDYKFNRVYLRYRCAQCWIEKRCTWKTTPWEPRLEDWLLDHIQPQLDAYIAQFDVQEAQRRRAVVDVGAIQRKLSRLQDLYVDGMIDRAAYDEKYQALIRQQEAAQAAQQSQSAGRDLEPLRQLLAGDFRSIYATLSPQERHTLWASVIDHIVVKDGRYGHFDLDVIFLP

SEQ ID NO: 7595 - protein, 468 aa, Unknown
  Description of Unknown: Integrase B7596 sequence
  PTHR30461:SF3,SM00857,IPR006118,G3DSA:1.10.10.2600,IPR036162, PS51737,G3DSA:3.40.50.1390,IPR006119,IPR038109,PF07508, SSF53041,IPR011109,PTHR30461,PS00397,PS51736, cd00338,PF00239
MLYGKPQNYAWYRARVILYIRVSTDEQARHGYSLGAQREALREFCDTFQCQIVAEYSDDGVSARKEIQRRPGLLRVLEAVKAGGVDYVLFIKLDRWFRSVREYYRVQDVLDAAGTNWKAILEDYDTSTTNGRLNLNIRLSVAQDESDRTADRIKFVFSERVKNGGAIFGSKSLPYGLEVRDHRVQIVEDQAVIVRAFFDHYEAAHSTRSTQVWLRDQYGVDLPRTTIGRMLRNGLYCGQYRDNKNYCPAIISPDQFRRVQEILARQASGHTRQSKYSYVFTGLLRCPVCGCTLKAFPQFDYKWNRLYLRYRCTQHWIERRCSWKTTPWEPRLEGWLLDHVQPQLDAYIAQFDVQEAQRRQAVVDVGAIQRKLSRLQDLYVDGVIDRAAYDEKYRALIQQQDAAEAARAAQRAERDLGPLRQLLAGDFRSIYATLSPQERHTLWASVIDRIVVKDGRYGHFDLDVIFLP

SEQ ID NO: 7596 - protein, 468 aa, Unknown
  Description of Unknown: Integrase B7597 sequence
  PTHR30461:SF3,SM00857,IPR006118,G3DSA:1.10.10.2600,IPR036162, PS51737,G3DSA:3.40.50.1390,IPR006119,IPR038109,PF07508, SSF53041,IPR011109,PTHR30461,PS00397,PS51736, cd00338,PF00239
MLYGKPQNYSWYRARVVLYIRVSTDEQARHGYSLGAQREALREFCDTFQCQIVAEYSDDGVSARKEIQRRPGLLRVLEAVKAGGVDYVLFIKLDRWFRSVREYYRVQDVLDAAGTNWKAILEDYDTSTTNGRLNLNIRLSVAQDESDRTADRIKFVFSERVKNGGAIFGSKSLPYGLEVRDHRVQIVEDQAVIVRAFFDHYEAAQSARSTQVWLRDQCGVDLPRNTIGRMLRNGLYCGQYRDNKNYCPAIISPDQFQRVQEILARQASGHTRQSKYSYVFTGLLRCPVCGCTLKAFPQFDYKWNRLYLRYRCTQHWIENRCSWKTTPWEPRLEGWLLDHIQPQLDAYIAQFDVQEAQRRRAVVDVGAIQRKLSRLQDLYVDGMIDRAAYDEKYQALIRQQEAAQAAQQSQSAGRDLEPLRQLLAGDFRSIYATLSPQERHTLWASVIDHIVVKDGRYGHFDLDVIFLP

SEQ ID NO: 7597 - protein, 468 aa, Unknown
  Description of Unknown: Integrase B7598 sequence
  PTHR30461:SF3,IPR036162,PS51737,IPR011109,PTHR30461, PS00397,PF00239,G3DSA:1.10.10.2600,IPR006119,SSF53041, cd00338,SM00857,IPR025827,IPR038109,PS51736, IPR006118,PF13408,G3DSA:3.40.50.1390,PF07508,Coil
MVKEINNNMNDFTKKVEEVALYIRVSTEEQAINGDSLRTQREALTKFALANHYHIYGIYEDDGFSATNLNRPALQRLLEDVRKNKINRILLTKLDRLSRGVRNYYKVLDVLDAHCVFWQTIFEKYDSSTASGRLHINIMLSVAENESAQTSERIRSVFNNKIHQKEIISGKIPIGYKKEEKKLVVDEDKKALVIDAFNFYLKSGSVYKTFEYLALFDPSINYPRTARLLANPLYIGTKVCKYGSIENYCEPIISKETFDEVQNLLKKNQRKRDNSDHEFLFSGLLRCNECGYKMSGKYCKNFPTNCTFYYLCSNARLKKKCNMLKQLNETKIEKKLLEQIVPEINKYIDKNNILEQEKVQIRDISKERDKVNKQLEKLRDLYVNDLIQIDHYEKQYKELTSKLDSLKEEEKPVEEKKTVNYDEFKSFLSRDFVALYNNLSRTEKRLIWASAIDTIYIDDNYNLRIVFI

SEQ ID NO: 7598 - protein, 468 aa, Unknown
  Description of Unknown: Integrase B7599 sequence
  PTHR30461:SF3,IPR036162,PS51737,IPR011109,PTHR30461, PS00397,PF00239,G3DSA:1.10.10.2600,IPR006119,SSF53041, cd00338,SM00857,IPR025827,IPR038109,PS51736, IPR006118,PF13408,G3DSA:3.40.50.1390,PF07508,Coil
MDKKINNNMNDFTKKVEEVALYIRVSTEEQAINGDSLRTQREALTKFALANHYHIYGIYEDDGFSATNLNRPALQRLLEDVRKNKINRILLTKLDRLSRGVRNYYKVLDVLDAHCVFWQTIFEKYDSSTASGRLHINIMLSVAENESAQTSERIRSVFNNKIHQKEIISGKIPIGYKKEEKKLVVDEDKKALVIDAFNFYLKIGSVYKTFEYLALFDPSMNYPRTARLLANPLYIGTKVCKYGSIENYCEPIISKETFDEVQNLLKKNQRKRDNSDHEFLFSGLLRCNECGYKMSGKYCKNFPPNCTFYYLCSNARLKKKCNMLKQLNETKIEKKLLEQIVPEINKYIDKNNILEQEKVQTRDISKERDKVNKQLEKLRDLYVNDLIQIDHYEKQYKELTSKLDNLKEEEKPVEKKKTVNYDEFKSFLSRDFVSLYNNLSRTEKRLIWASAIDTIYIDDNYNLRIVFI

SEQ ID NO: 7599 - protein, 468 aa, Unknown
  Description of Unknown: Integrase B7600 sequence
  PTHR30461:SF3,IPR036162,PS51737,IPR011109,PTHR30461, PS00397,PF00239,G3DSA:1.10.10.2600,IPR006119,SSF53041, cd00338,SM00857,IPR025827,IPR038109,PS51736, IPR006118,PF13408,G3DSA:3.40.50.1390,PF07508
MLYGKPQNYAWYRARVILYIRVSTDEQARHGYSLGAQREALREFCDTFQCQIVAEYSDDGVSARKEIQRRPGLLRVLEAVKAGGVDYVLFIKLDRWFRSVREYYRVQDVLDAAGTNWKAILEDYDTSTTNGRLNLNIRLSVAQDESDRTADRIKFVFSERVKNGGAIFGSKSLPYGLEVRDHRVQIVEDQAVIVRAFFDHYEAAHSTRSTQVWLRDQYGVDLPRATIGRMLRNGLYCGQYRDNKNYCPAIISPDQFQRVQEILARQASGHTRQSKYSYVFTGLLRCPVCGCTLKAFPQFDYKWNRLYLRYRCTQHWIERRCSWKTTPWEPRLEDWLLDHIQPQLDAYIAQFDVQEAQRRRAVVDVGTIQRKLSRLQDLYVDGMIDRAAYDEKYQALIRQQEAAQAAQQSQSAGRDLEPLRQLLAGDFRSIYATLSPQERHTLWASVIDHIVVKDGRYGHYDLDVIFLP

SEQ ID NO: 7600 - protein, 468 aa, Unknown
  Description of Unknown: Integrase B7601 sequence
  PTHR30461:SF3,SM00857,IPR006118,G3DSA:1.10.10.2600,IPR036162, PS51737,G3DSA:3.40.50.1390,IPR006119,IPR038109,PF07508, IPR011109,SSF53041,PTHR30461,PS00397,PS51736, cd00338,PF00239
MLYGKPQNYAWYRARVILYIRVSTDEQARHGYSLGAQREALREFCDTFQCQIVTEYSDDGVSARKEIRRRPGLLRVLEAVKAGGVDYVLFIKLDRWFRSVREYYRVQDVLEAAGTNWKAILEDYDTSTTNGRLNLNIRLSVAQDESDRTADRIKFVFSERVKNGGAIFGSKSLPYGLEVRGHRVQIVEDQAVIVRAFFDHYEAVHSARSTQVWLRDQCGVDLPRNAIGRMLRNGLYCGQYRDNKNYCPAIISPDQFQRVQEILARQASGHTRQSKYSYVFTGLLRCPVCGCTLKAFPQFDHKLNRLYLRYRCTQHWIEKRCSWKTTPWEPRLEGWLLDHIQPQLDAYIAQFDVQEAQRRQAVVDVGAIQRKLSRLQDLYVDGVIDRAAYDEKYRALIQQQDAAEAARAAQRAERDLGPLRQLLAGDFRSIYATLSPQERHTLWASVIDRIVVKDGRYGHFDLDVIFLP

SEQ ID NO: 7601 - protein, 468 aa, Unknown
  Description of Unknown: Integrase B7602 sequence
  PTHR30461:SF3,IPR036162,PS51737,IPR011109,PTHR30461, PS00397,PF00239,G3DSA:1.10.10.2600,IPR006119,SSF53041, cd00338,SM00857,IPR025827,IPR038109,PS51736, IPR006118,PF13408,G3DSA:3.40.50.1390,PF07508,Coil
MDKKINNNMNDFTKKVEEVALYIRVSTEEQAINGDSLRTQREALTKFALANHYHIYGIYEDDGFSATNLNRPALQRLLEDVRKNKINRILLTKLDRLSRGVRNYYKVLDVLDAHCVFWQTIFEKYDSSTASGRLHINIMLSVAENESAQTSERIRSVFNNKIHQKEIISGKIPIGYKKEEKKLVVDDDKKALVIDAFNFYLKSGSVYKTFEYLALFDPSMNYPRTARLLANPLYIGTKVCKYGSIENYCEPIISKETFDEVQNLLKKNQRKRDNSDHEFLFSGLLRCNECGYKMSGKYCKNFPTNCTFYYLCSNARLKKKCNMLKQLNETKIEKKLLEQIVPEINKYIDNNNILEQEKVQIRDISKERDKVNKQLEKLRDLYVNDLIQIDHYEKQYKELTSKLDSLKEEEKPVEEKKTVNYDEFKSFLSRDFVSLYNNLSRTEKRLIWASAIDTIYIDDNYNLRIVFI

SEQ ID NO: 7602 - protein, 468 aa, Unknown
  Description of Unknown: Integrase B7603 sequence
  PTHR30461:SF3,IPR036162,PS51737,IPR011109,PTHR30461, PS00397,PF00239,G3DSA:1.10.10.2600,IPR006119,SSF53041, cd00338,SM00857,IPR025827,IPR038109,PS51736, IPR006118,PF13408,G3DSA:3.40.50.1390,Coil
MNKIIRVGIYIRVSTEEQAKHGYSIDSQKTRLITWAKEHNYQIVDVYADEGKSARTKIFNRKELLRLLDDVKDDKIDRIIIWRLDRWFRNVADYYRIQDILDKHNVDWECSDEDFNTSTSNGRLYLNIKLSIAQNESDQTSDRIKFNFENMVRNKRPISGALPVGYMVAGEKQNKRVVKDPALSQMAIDMFEKFEETLSLRATTQYLNETYPHRPIGYERVKKMLQNSMYHGVYRDVEDYCEPYITKERQDNIIKLIKKNHRPNKPSGHVFIFSGLIRCYDCGRRMGGSRASRKHTKRGVVTEIIRYGTYKCCNHFLDCRCSNNHTINEDKLERWMIDNFLAKLNEHVISIETAEEKKTKTNNINKITNLKDKLERLNELYLDGRISREKYDNDYLDTKNKIKELKIDDELDSNRNLYKYKEIIKDANVVDIYNKLDRKHKRLFWYEYIDHIEQDFDNINDNWLVFFK

SEQ ID NO: 7603 - protein, 468 aa, Unknown
  Description of Unknown: Integrase B7604 sequence
  PTHR30461:SF3,SM00857,IPR006118,G3DSA:1.10.10.2600,IPR036162, PS51737,G3DSA:3.40.50.1390,IPR006119,IPR038109,PF07508, IPR011109,SSF53041,PTHR30461,PS00397,PS51736, cd00338,PF00239
MLYGKPQNYAWYRARVILYIRVSTDEQARHGYSLGAQREALREFCDTFQCQIVAEYSDDGVSARKEIQRRPGLLRVLEAVKAGGVDYVLFIKLDRWFRSVREYYRVQDVLDAAGTNWKAILEDYDTSTTNGRLNLNIRLSVAQDESDRTADRIKFVFSERVKNGGAIFGSKSLPYGLEVRDHRVQIVEDQAVIVRAFFEHYEAAHSTRSTQVWLRDQYGVDLPRATIGRMLRNGLYCGQYRDNKNYCPAIISPDQFQRVQEILARQASGHTRQSKYSYVFTGLLRCPVCGCTLKAFPQFDYKWNRLYLRYRCTQHWIERRCSWKTTPWEPRLEGWLLDHIQPQLDAYIAQFDVQEAQRRRAVVDVGAIQRKLSRLQDLYVDGMIDRAAYDEKYQALIRQQEAAQAAQQSQSAGRDLEPLRQLLAGDFRSIYATLSPQERHTLWASVIDHIVVKDGRYGHFDLDVIFLP

SEQ ID NO: 7604 - protein, 468 aa, Unknown
  Description of Unknown: Integrase B7605 sequence
  PTHR30461:SF3,SM00857,IPR006118,IPR036162,PF13408, PS51737,G3DSA:3.40.50.1390,Coil,IPR025827,IPR006119, IPR011109,SSF53041,PTHR30461,PS00397,PS51736, cd00338,PF00239
MSEKIKRCAIYIRVSTSEQLVHGKSLEAQKDYLTSYAKDHGMIPVGVYADEGKTARKELKKRKAIHALLEDVKAGKIDVILFWRLDRWFRNMSDFYKVQDILDEYKVYWISASEPGINMETRDGRLQLNVVLSIGQNEVDTTSERIKFVNEASIRQKKVIFGEANMPRGYKIGVVNGQKCMVKDPDQEELVNAFFDYFEKHQGKQATLRYIQSHYDPSFSYSCLRTMLSSEFYKGTYRGIPYCPSYVSEVRWARLQKISKKNIKNTPSGRIYYFTGMIRCPECGQILAGTGCRSIINRKTGEKRDYFYYRCNRAMIDRICTNRHKVSQNLIETYLLENLEREFEEYKIRVDEIQKKNKQKPKVRTEEQIEKEMSRLNLLFQKDRITWDYYSKEYDALESEKNGLKAIIIEPESDYSSVESLLQKDFLAIYHSLAEENRRTFWRNIIRQIHLKPDYTINYVDFVQSVSV

SEQ ID NO: 7605 - protein, 468 aa, Unknown
  Description of Unknown: Integrase B7606 sequence
  PTHR30461:SF3,SM00857,IPR006118,G3DSA:1.10.10.2600,IPR036162, PS51737,G3DSA:3.40.50.1390,IPR006119,IPR038109,PF07508, IPR011109,SSF53041,PTHR30461,PS00397,PS51736, cd00338,PF00239
MLYGKPQNYSWYRARVVLYIRVSTDEQARHGYSLGAQREALREFCDTFQCQIVAEYSDDGVSARKEIRRRPGLLRVLEAVKAGGVDYVLFIKLDRWFRSVREYYRVQDVLEAAGTNWKAILEDYDTSTTNGRLNLNIRLSVAQDESDRTADRIKFVFAERVKNGGAIFGSKSLPYGLEVRNHRVQIVEDQAVIVRAFFDHYEAVHSARSTQVWLHDQCGVDLPRNAIGRMLRNGLYCGQYRDNKNYCPAIISPDQFQRVQEILARQASGHTRQSKYSYVFTGLLRCPVCGCTLKAFPQFDHKLNRLYLRYRCTQHWIEKRCSWKTTPWEPRLEGWLLDHVQPQLDTYVAHFDVQEAQRRQAVVDVGAIQRKLSRLQDLYVDGVIDRAAYDEKYHALIQQQDAAEAVRAAQSAGRDLGPLRQLLAGDFRSIYATLSPQERHTLWASVIDRIVVKDGRYGHFDLDVIFLP

SEQ ID NO: 7606 - protein, 468 aa, Unknown
  Description of Unknown: Integrase B7607 sequence
  PTHR30461:SF3,IPR036162,PS51737,IPR011109,PTHR30461, PS00397,PF00239,G3DSA:1.10.10.2600,IPR006119,SSF53041, cd00338,SM00857,IPR025827,IPR038109,PS51736, IPR006118,PF13408,G3DSA:3.40.50.1390,PF07508,Coil
MVKEINNNMNDFTKKVEEVALYIRVSTEEQAINGDSLRTQREALTKFALANHYHIYGIYEDDGFSATNLNRPALQRLLEDVRKNKINRILLTKLDRLSRGVRNYYKVLDVLDAHCVFWQTIFEKYDSSTASGRLHINIMLSVAENESAQTSERIRSVFNNKIHQKEIISGKIPIGYKKEEKKLVVDEDKKALVIDAFNFYLKSGSVYKTFEYLALFDPSINYPRTARLLANPLYIGTKVCKYGSIENYCEPIISKETFDEVQNLLKKNQRKRDNSDHEFLFSGLLRCNECGYKMSGKYCKNFPTNCTFYYLCSNARLKKKCNMLKQLNETKIEKKLLEQIVPEINKYIDKNNILELEKAQIRDISKERDKVNKQLEKLRDLYVNDLIQIDHYEKQYKELTSKLDSLKEEEKPVEEKKTVNYDEFKSFLSRDFVSLYNNLSRTEKRLIWASAIDTIYIDDNYNLRIVFI

SEQ ID NO: 7607 - protein, 468 aa, Unknown
  Description of Unknown: Integrase B7608 sequence
  PTHR30461:SF3,IPR036162,PS51737,IPR011109,PTHR30461, PS00397,PF00239,G3DSA:1.10.10.2600,IPR006119,SSF53041, cd00338,SM00857,IPR025827,IPR038109,PS51736, IPR006118,PF13408,G3DSA:3.40.50.1390,PF07508
MLYGKPQNYAWYRARVVLYIRVSTDEQARHGYSLGAQREALREFCDTFQCQIVAEYSDDGVSARKEIRRRPGLLRVLEAVKAGGVDYVLFIKLDRWFRSVREYYRVQDVLEAAGTNWKAILEDYDTSTTNGRLNLNIRLSVAQDESDRTADRIKFVFSERVKNGGAIFGSKSLPYGLETRDHRVQIVEDQAVAVRAFFDHYEATHSARDTQVWLRDQYGVDLPRNTIGRMLRNSLYCGEYRGNVNYCPAIISREQFQNIQKIVSRQGANRTRQSKYSYVFTGLLRCPVCGCTLKAFPQFDYKWNRVYLRYRCSQHWIEKRCTWKTTPWEPRLEDWLLDHIQPQLDAYIAQFDVQEAQRRRAVVDVGAIQRKLSRLQDLYVDGMIDRAAYDEKYQALIQQQEAAQAAQQSQSAGRDLEPLRQLLAGDFRSVYATLSPQERHTLWASVIDHIVVKDGRYGHFDLDVIFLP

SEQ ID NO: 7608 - protein, 468 aa, Unknown
  Description of Unknown: Integrase B7609 sequence
  PTHR30461:SF3,IPR036162,PS51737,IPR011109,PTHR30461, PS00397,PF00239,G3DSA:1.10.10.2600,IPR006119,SSF53041, cd00338,SM00857,IPR025827,IPR038109,PS51736, IPR006118,PF13408,G3DSA:3.40.50.1390,PF07508,Coil
MVKEINNNMNDFTKKVEEVALYIRVSTEEQAINGDSLRTQREALTKFALANHYHIYGIYEDDGFSATNLNRPALQRLLEDVRKNKINRILLTKLDRLSRGVRNYYKVLDVLDAHCVFWQTIFEKYDSSTASGRLHINIMLSVAENESAQTSERIRSVFNNKIHQKEIISGKIPIGYKKEEKKLVVDEDKKALVIDAFNFYLKSGSVYKTFEYLALFDPSMNYPRTARLLANPLYIGTKVCKYGSIENYCEPIISNKTFNEVQNLLKKNQRKRDNSDHEFLFSGLLRCNECGYKMSGKYCKNFPTNCTFYYLCSNARLKKKCNMLKQLNETKIEKKLLEQIVPEINKYIDNNNILEQEKVQIRDISKERDKVNKQLEKLRDLYVNDLIQIDHYEKQYKELTSKLDSLKEEEKPVEEKKTVNYDEFRSFLSRDFVTLYNSLSRTEKRLIWASVIDTIYIDDNYNLRIVFI

SEQ ID NO: 7609 - protein, 468 aa, Unknown
  Description of Unknown: Integrase B7610 sequence
  PTHR30461:SF3,SM00857,IPR006118,G3DSA:1.10.10.2600,IPR036162, PS51737,G3DSA:3.40.50.1390,IPR006119,IPR038109,PF07508, SSF53041,IPR011109,PTHR30461,PS00397,PS51736, cd00338,PF00239
MLYGKPQNYAWYRARVILYIRVSTDEQARHGYSLGAQREALREFCDTFQCQIVAECSDDGVSARKEIQRRPGLLRVLEAVKAGGVDYVLFIKLDRWFRSVREYYRVQDVLDAAGTNWKAILEDYDTSTTNGRLNLNIRLSVAQDESDRTADRIKFVFSERVKNGGAIFGSKSLPYGLEVRDHRVQIVEDQAVIVRAFFDHYEAAQSARSTQVWLRDQCGVDLPRNTIGRMLRNGLYCGQYRDNKNYCPAIISPDQFQRVQEILARQASGHTRQSKYSYVFTGLLRCPVCGCTLKAFPQFDYKWNRLYLRYRCTQHWIENRCSWKTTPWEPRLEGWLLDHIQPQLDAYIAQFDVQEAQRRRAVVDVGAIQRKLSRLQDLYVDGMIDRAAYDEKYQALIRQQEAAQAAQQSQIAGRDLEPLRQLLAGDFRSIYATLSPQERHTLWASVIDHIVVKDGRYGHFDLDVIFLP

SEQ ID NO: 7610 - protein, 468 aa, Unknown
  Description of Unknown: Integrase B7611 sequence
  PTHR30461:SF3,IPR036162,PS51737,IPR011109,PTHR30461, PS00397,PF00239,G3DSA:1.10.10.2600,IPR006119,SSF53041, cd00338,SM00857,IPR025827,IPR038109,PS51736, IPR006118,PF13408,G3DSA:3.40.50.1390,PF07508
MLYGKPQNYAWYRARVILYIRVSTDEQARHGYSLGAQREALREFCDTFQCQIVAEYSDDGVSARKEIQRRPGLLRVLEAVKAGGVDYVLFIKLDRWFRSVREYYRVQDVLDAAGTNWKAILEDYDTSTTNGRLNLNIRLSVAQDESDRTADRIKFVFSERVKNGGAIFGSKSLPYGLEVRGHRVQIVEDQAVIVRAFFDHYEAVHSARSTQVWLRDQCGVDLPRNAIGRMLRNGLYCGQYRDNKNYCPAIISPDQFQRVQEILARQASGHTRQSKYSYVFTGLLRCPVCGCTLKAFPQFDHKLNRLYLRYRCTQHWIEKRCTWKTTPWEPRLEDWLLDHIQPQLDAYIAQFDVQEAQRRRAVVDVGAIQRKLSRLQDLYVDGVIDRAAYDEKYRALIQQQDAAGAARAAQSAERDLGPLRQLLAGDFRSIYATLSPQERHTLWASVIDRIVVKDGRYGHIDLDVIFLP

SEQ ID NO: 7611 - protein, 468 aa, Unknown
  Description of Unknown: Integrase B7612 sequence
  PTHR30461:SF3,IPR036162,PS51737,IPR011109,PTHR30461, PS00397,PF00239,G3DSA:1.10.10.2600,IPR006119,SSF53041, cd00338,SM00857,IPR025827,IPR038109,PS51736, IPR006118,PF13408,G3DSA:3.40.50.1390,PF07508
MLYGKPQNYSWYRARVVLYIRVSTDEQARHGYSLGAQREALREFCDTFQCQIVAEYSDDGVSARKEIRRRPGLLRVLEAVKAGGVDYVLFIKLDRWFRSVREYYRVQDVLEAAGTNWKAILEDYDTSTTNGRLNLNIRLSVAQDESDRTADRIKFVFAERVKNGGAIFGSKSLPYGLEVADHRVQIVESQADAVRGMFDHYEATNSTRETHAWLRDQYGVDLPYNTIRNMLRNSLYCGEYRGNVNYCPAIISREQFQNIQKIVSRQGANRTRQSKYSYVFTGLLRCPVCGCTLKAFPQTDYKFHRVYLRYRCTQHWIDKRCTWKTTPWEPRLEDWLLDHIQPQLDAYIAQFDVQEAQRRRAVVDVGAIQRKLSRLQDLYVDGMIDRAAYDEKYQALIRQQEAAQAAQQSQSAGRDLEPLRQLLAGDFRSIYATLSPQERHTLWASVIDHIVVKDGRYGHFDLDVIFLP

SEQ ID NO: 7612 - protein, 468 aa, Unknown
  Description of Unknown: Integrase B7613 sequence
  PTHR30461:SF3,SM00857,IPR006118,IPR036162,PF13408, PS51737,G3DSA:3.40.50.1390,IPR025827,PS00397,IPR006119, IPR011109,SSF53041,PTHR30461,Coil,PS51736, cd00338,PF00239
MSEKIKRCAIYIRVSTSEQLVHGKSLEAQKDYLTSYAKDHGMIPVGVYADEGKTARKELKKRKAIHALLEDVKAGKIDVILFWRLDRWFRNMSDFYKVQDILDEYKVYWISASEPGINMETRDGRLQLNVVLSIGQNEVDTTSERIKFVNEASIRQKKVIFGEANMPRGYKIGVVNGQKCMVKDPDQEELVNAFFDYFEKHQGKQATLRYIQSHYDPSFSYSCLRTMLSSEFYKGTYRGIPYCPSYVSEVRWARLQKISKKNIKNTPSGRIYYFTGMIRCPECGQILAGTGCRSIINRKTGEKRDYCYYRCNRAMIDRICTNRHKVSQNLIETYLLENLEREFEEYKIRVDEIQKKNKQKPKVRTEEQIEKEMSRLNLLFQKDRITWDYYSKEYDALESEKNGLKAIIIEPESDYSSVESLLQKDFLAIYHSLAEENRRTFWRNIIRQIHLKSDYTINYIDFVQSVSV

SEQ ID NO: 7613 - protein, 468 aa, Unknown
  Description of Unknown: Integrase B7614 sequence
  PTHR30461:SF3,SM00857,IPR006118,G3DSA:1.10.10.2600,IPR036162, PS51737,G3DSA:3.40.50.1390,IPR006119,IPR038109,PF07508, IPR011109,SSF53041,PTHR30461,PS00397,PS51736, cd00338,PF00239
MLYGKPQNYAWYRARVVLYIRVSTDEQARHGYSLGAQREALHEFCDTFQCQIVAEYSDDGVSARKEIRRRPGLLRVLEAVKAGGVDYVLFIKLDRWFRSVREYYRVQDVLEAAGTNWKAILEDYDTSTTNGRLNLNIRLSVAQDESDRTADRIKFVFSERVKNGGAIFGSKSLPYGLEVRDHRVQIVEDQAVIVRAFFDHYEAAQSARSTQVWLRDQCGVDLPRNTIGRMLRNGLYCGQYRDNKNYCPAIISPDQFQRVQEILARQASGHTRQSKYSYVFTGLLRCPVCGCTLKAFPQFDYKWNRLYLRYRCTQHWIENRCSWKTTPWEPRLEGWLLDHIQPQLDAYIAQFDVQEAQRRRAVVDVGVIQRKLSRLQDLYVDGMIDRAAYDEKYQALIRQQEAAQAAQQSQSAGRDLEPLRQLLAGDFRSIYATLSPQERHTLWASVIDHIVVKDGRYGHFDLDVIFLP

SEQ ID NO: 7614 - protein, 467 aa, Unknown
  Description of Unknown: Integrase B7615 sequence
  PTHR30461:SF3,IPR036162,PS51737,IPR011109,PTHR30461, PS00397,PF00239,G3DSA:1.10.10.2600,IPR006119,SSF53041, cd00338,SM00857,IPR025827,IPR038109,PS51736, IPR006118,PF13408,G3DSA:3.40.50.1390,PF07508,Coil
MLKAALYARVSSEEQAKRENSIPAQLRALREYCRKNNIEIFKEYKDEGITGQISKRPAFQQMLSAAFSGKINVILVHKFDRFARKAELSRSVKNSLQAAKVNVVSITEPIEDSPMGFFMEGLYELMAEYYVRNLSAEVFKGMNERALKGKHMGQMPYGYYCKDGNVYVNETQAEVIHKIYRFYDEGWGHMKIAKWLNESKIPTYKGIIGGWQTFQVKQILKNSKYIGENLWNGTVYPADFPAILEPALFHRVQEKSNLMTRTHTYRGNNYTKHHLLGLLYCGECGSIMRVKPNQDWQRRKFDTYTCRDASQYRGDCRFTKIFDATKLESEVDAYLRSVLAGAPISLIVSKDAEKVKPADASKSQIEKINAELKRAKDAYLSGVFDLDEYREIRQGLENNKKIIEAETKNVPAPLRANEKEDILRKKIKSAWDLYKNVQTAEEKRTILKTFIHKILIYRDRWEVVFYI

SEQ ID NO: 7615 - protein, 467 aa, Unknown
  Description of Unknown: Integrase B7616 sequence
  PTHR30461:SF3,IPR036162,PS51737,IPR011109,PTHR30461, PS00397,PF00239,G3DSA:1.10.10.2600,IPR006119,SSF53041, SM00857,IPR025827,IPR038109,PS51736,cd03768, IPR006118,PF13408,G3DSA:3.40.50.1390,PF07508
MRRAALYIRVSTLEQAQEGYSVGEQRERLIAYCKAQDWLIADIYVDGGYTGSNLNRPGIQKLMSETEKFDVVLVYKLDRLSRSQRDTLYLIEEIFRPNKVDFVSMQESFDTSSPFGKAMIGLLAVFAQLEREQIKERTWMGRVARAKTGLHHGGGNIPIGYDYEDGKLIVNPYEAEQVRKIYEWYLSGSSLKAITDKLQDAGYTNKYSSYNSWSSVRNILENETYIGRLHFGDVVVDHAHEAIITEEQFNAAQILRGKRREQFGSHAFQSKHVLTGLLFCGHCGGRYYLRNTGKYSYYACYSRTKQMKNMIKDPNCQNKIWRAQDLEPIIEEKILALLRNPKIAEELAAGKPKAAAPVSKNTDIERRIREIDRQIGKLMELYQQDDIPPELLGEKINRLYGEKTALENSIAPVEETNAMPLDLVAELITNAAEIWDFADENQKRRILQSLISRIVLTDDQVDIEWAF

SEQ ID NO: 7616 - protein, 467 aa, Unknown
  Description of Unknown: Integrase B7617 sequence
  PTHR30461:SF3,IPR036162,PS51737,IPR011109,PTHR30461, PS00397,PF00239,G3DSA:1.10.10.2600,IPR006119,SSF53041, SM00857,IPR025827,IPR038109,PS51736,cd03768, IPR006118,PF13408,G3DSA:3.40.50.1390,PF07508
MRRAALYIRVSTLEQAQEGYSVGEQRERLIAYCKAQDWLIADIYVDGGYTGSNLNRPGIQKLMSETEKFDVVLVYKLDRLSRSQRDTLYLIEEIFRPNKVDFVSMQESFDTSSPFGKAMIGLLAVFAQLEREQIKERTWMGRVARAKTGLHHGGGNIPIGYDYEDGKLIVNPYEAEQVRKIYEWYLSGASLKAITDKLQDAGYTNKYSSYNSWSSVRNILENETYIGRLHFGGVVVDHAHEAIITEEQFNAAQILRGKRREQFGSHAFQSKHVLTGLLFCGHCGGRYYLRNTGKYSYYACYSRTKQMKNMIKDPNCQNKIWRAQDLEPIIEEKILALLRNPQIAEELAAGKPKTAAPVSKNTDIERRIREIDRQIGKLMELYQQDDIPPELLGEKINRLYGEKTALENSIAPVKETDAMPLDLVAELITNAAEIWDFADENQKRRILQSLISRIVLTDDQVDIEWAF

SEQ ID NO: 7617 - protein, 467 aa, Unknown
  Description of Unknown: Integrase B7618 sequence
  PTHR30461:SF3,SM00857,G3DSA:1.10.10.2600,IPR036162,PF13408, IPR025827,G3DSA:3.40.50.1390,PS51737,IPR006119,IPR038109, PF07508,SSF53041,IPR011109,PF00239,PTHR30461, PS51736,Coil,cd00338
MDKAVFIYTRVSTREQADEGYSLGEQEERLKKYSEAMGWKVIGIYTDPGYSGSNMERPALQQMLSDISKKHPDIVLVDKLDRLSRSQYDTLYLIKKVFAAAGISFVSRAEAFDTSTAFGRAMLGILSTFAELERERIKERMMEGRQGRAKDGLYMGSQAPLGYNYSPENGLTINENEAEIIRFIFEQAAQRRPFACIAGDCANMYDIDFFWSLASITRILNSKLYIGQVLFCGKWTQGKHAPIISEETFEKTQEVLGERKENFSKFTGKKTKNLLSGLIYCEYCKKRFHKIQTGTYIYYVCYSRSRVKGSMVVNRDCSAKRLNLRKTDALVLDQIKRIRTDVAFYDSVKQAKGSADQTVESLGKKIASINTRINRLISLYSLEQIDIEQVKAQIDPLTAQKKELQKKLDAAESKKNDYVKREDAMTLSQAVEEAYNSGNINEARALISQLIKYISVNADSISIHWRF

SEQ ID NO: 7618 - protein, 467 aa, Unknown
  Description of Unknown: Integrase B7619 sequence
  PTHR30461:SF3,IPR036162,PS51737,IPR011109,PTHR30461, PS00397,PF00239,G3DSA:1.10.10.2600,IPR006119,SSF53041, cd00338,SM00857,IPR025827,IPR038109,PS51736, IPR006118,PF13408,G3DSA:3.40.50.1390,PF07508,Coil
MLKAALYARVSSEEQAKRENSIPAQLRALREYCRKNNIEIFKEYKDEGITGQISKRPAFQQMLSAAFSGKINVILVHKFDRFARKVELSRSVKNSLQAAKVNVVSITEPIEDSPMGFFMEGLYELMAEYYVRNLSAEVFKGMNERALKGKHMGQMPYGYYCKDGNVYVNETQAEVIHKIYRFYDEGWGHMKIAKWLNESKIPTYKGIIGGWQTFQVKQILKNSKYIGENLWNGTVYPADFPAILEPALFHRVQEKSNLMTRTHTYRGNNYTKHHLLGLLYCGECGSIMRVKPNQDWQRRKFDTYTCRDASQYRGDCRFTKIFDATKLESEVDAYLRSVLAGAPISLIVSKDAEKVKPADASKSQIEKINAELKRAKDAYLSGVFDLDEYREIRQGLENNKKIIEAETKNVPAPLRANEKEDILRKKIKSAWDLYKNVQTAEEKRTILKTFIHKILIYRDRWEVVFYI

SEQ ID NO: 7619 - protein, 467 aa, Unknown
  Description of Unknown: Integrase B7620 sequence
  PTHR30461:SF3,IPR036162,PS51737,IPR011109,PTHR30461, PS00397,PF00239,G3DSA:1.10.10.2600,IPR006119,SSF53041, SM00857,IPR025827,IPR038109,PS51736,cd03768, IPR006118,PF13408,G3DSA:3.40.50.1390,PF07508
MRRAALYIRVSTLEQAQEGYSVGEQRERLIAYCKAQDWLIADIYVDGGYTGSNLNRPGIQKLMSETEKFDVVLVYKLDRLSRSQRDTLYLIEEIFRPNKVDFVSMQESFDTSSPFGKAMIGLLAVFAQLEREQIKERTWMGRVARAKTGLHHGGGNIPIGYDYEDGKLIVNPYEAEQVRKIYEWYLSGASLKAITDKLQDAGYTNKYSSYNSWSSVRNILENETYIGRLHFGGVVVDHAHEAIITEEQFNAAQILRGKRREQFGSHAFQSKHVLTGLLFCGHCGGRYYLRNTGKYSYYACYSRTKQMKNMIKDPNCQNKIWRAQDLEPIIEEKILALLRNPQIAEELAAGKPKTAAPVSKNTDIERRIREIDRQIGKLMELYQQDDIPPELLGEKINRLYSEKTALENSIAPVEETNAMPLDLVAELITNAAEIWDFADENQKRRILQSLISRIVLTDDQVDIEWAF

SEQ ID NO: 7620 - protein, 467 aa, Unknown
  Description of Unknown: Integrase B7621 sequence
  PTHR30461:SF3,IPR036162,PS51737,IPR011109,PTHR30461, PS00397,PF00239,G3DSA:1.10.10.2600,IPR006119,SSF53041, cd00338,SM00857,IPR025827,IPR038109,PS51736, IPR006118,PF13408,G3DSA:3.40.50.1390,PF07508,Coil
MLKAALYARVSSEEQAKRENSIPAQLRALREYCRKNNIEIFKEYKDEGITGQISKRPAFQQMLSAAFSGKINVILVHKFDRFARKVELSRSVKNSLQAAKVNVVSITEPIEDSPMGFFMEGLYELMAEYYVRNLSAEAFKGMNERALKGKHMGQMPYGYYCKDGNVYVNETQAEVIHKIYRFYDDGWGHMKIAKWLNESKIPTYKGIIGGWQTFQVKQILKNSKYIGENLWNGTVYPADFPAILEPALFHRVQEKSNLMTRTHTYRGNNYTKHHLLGLLYCGECGSIMRVKPNQDWQRRKFDTYTCRDASQYRGDCRFTKIFDAAKLESEVDAYLRSVLAGAPISLIVSKDAEKVKPADASKSQIEKINAELKRAKDAYLSGVFDLDEYREIRQGLEKNKKILEAKTEDAPAPLQANEKEDILRKKIKSAWDLYENVQTAEEKRTILKTFIHKILIYRDKWEVVFYI

SEQ ID NO: 7621 - protein, 467 aa, Unknown
  Description of Unknown: Integrase B7622 sequence
  PTHR30461:SF3,IPR036162,PS51737,IPR011109,PTHR30461, PS00397,PF00239,G3DSA:1.10.10.2600,IPR006119,SSF53041, cd00338,SM00857,IPR025827,IPR038109,PS51736, IPR006118,PF13408,G3DSA:3.40.50.1390,PF07508,Coil
MLKAALYARVSSEEQAKRENSIPAQLRALREYCQKNNIEIFKEYKDEGITGQISKRPAFQQMLSAAFSGKINVILVHKFDRFARKVELSRSVKNSLQAAKVNVVSITEPIEDSPMGFFMEGLYELMAEYYVRNLSAEVFKGMNERALKGKHMGQMPYGYYCKDGNVYVNETQAEVIHKIYRFYDDGWGHMKIAKWLNESKIPTYKGIIGGWQTFQVKQILKNSKYIGENLWNGTVYPADFPAILEPALFHRVQEKSNLMTRTHTYRGNNYTKHHLLGLLYCGECGSIMRVKPNQDWQRRKFDTYTCRDASQYRGDCRFTKIFDAAKLESEVDAYLRSVLAGAPISLIVSKDAEKVKPADASKSQIEKINAELKRAKDAYLSGVFDLDEYREIRQGLEKNKKILEAKTEDAPAPLQANEKEDILRKKIKSAWDLYENVQTAEEKRTILKTFIHKILIYRDKWEVVFYI

SEQ ID NO: 7622 - protein, 467 aa, Unknown
  Description of Unknown: Integrase B7623 sequence
  PTHR30461:SF3,IPR036162,PS51737,IPR011109,PTHR30461, PS00397,PF00239,G3DSA:1.10.10.2600,IPR006119,SSF53041, SM00857,IPR025827,IPR038109,PS51736,cd03768, IPR006118,PF13408,G3DSA:3.40.50.1390,PF07508,Coil
MKRAAVYIRVSTQEQAQEGYSVGEQKERLIAYCKAQDWLIADIYVDGGYSGSNLNRPGIQKLMGETDKFDVVLVYKLDRLSRSQRDTLYLIEEVFLPHDVDFVSMQESFDTATPFGKAMIGLLAVFAQLEREQIKERTRMGRIARAKSGLHHGGGFAPIGYDYADGKLTINPYEAEQVRKIFQWYIEGESLRGIMLRMNEAGFTNRYSSYKSWTCIRNILDNPLYTGQLHFGEVIVENAHEPIISKETFQMAQSLRKKKRGKFGVTSFSSKHLLTGMVFCGKCGARYYVKSNGVYKYYCCYSRTKQLPTMVKDPNCKNKYWRAQDLETVVEKEVRKVLKSPKLAKEIAEANAPRAIVPNKNASIEKRVHEIDKQIGKLMELYQTDSIPADILGDSINKLYNEKTSLESMTEKEEKDSVLPFDLAKELLSDAAQVWDFADGEQRRRILQSLVNRIIVTDDKVDIEWSF

SEQ ID NO: 7623 - protein, 467 aa, Unknown
  Description of Unknown: Integrase B7624 sequence
  PTHR30461:SF3,SM00857,G3DSA:1.10.10.2600,IPR036162,PF13408, PS51737,G3DSA:3.40.50.1390,IPR025827,IPR006119,IPR038109, PF07508,SSF53041,IPR011109,PF00239,PTHR30461, PS51736,Coil,cd00338
MDKAVFIYTRVSTREQADEGYSLGEQEERLKKYSEAMGWKVIGIYTDPGYSGSNMERPALQQMLSDISKKHPDIVLVDKLDRLSRSQYDTLYLIKKVFAAAGASFVSRAEAFDTSTAFGRAMLGILSTFAELERERIKERMMEGRQGRAKDGLYMGSQAPLGYDYSPENGLTINESEAGIVRFVFEQAAQRRPFTCIAEDCANMYDIDFFWSLASITRILNSKLYIGQVLFCGKWTQGKHAPIISEETFEKAQEVLGERKENFSKFTGKKTKNLLSGLIYCEYCKKRFHKIQTGTYIYYVCYSRSRVKGSMVVNRDCSAKRLNLRKTDALVLDQIKRIRTDVAFYDSVKQAKGSADQTVESLGKKIASINTRINRLISLYSLEQIDIEQVKAQIDPLTAQKKELQKKLDAAESKKNDYVKREDAVTLSQAVEEAYNSGNINEARALISQLIKYISVNADYISIHWRF

SEQ ID NO: 7624 - protein, 467 aa, Unknown
  Description of Unknown: Integrase B7625 sequence
  SM00857,G3DSA:1.10.10.2600,IPR036162,PF13408,PS51737, G3DSA:3.40.50.1390,IPR025827,IPR006119,IPR038109,IPR011109, SSF53041,PF00239,PTHR30461,PS51736,Coil, cd00338
MNLELNKIIKVALYTRVSTIQQVEEGFSLEAQKEHLLKYSDNNNYQVYKIYEELGRSGKNINRPAFQEMMQDMRNKKFEKIVVLKLDRISRSVVDLETIIQELQSNNCGFESASEKIDTTSAMGLMFIRLLGIFAQFERERISERIKDVFAEKIQRGLAITGSLPLGYKIGYNENNEKIVVKDLEKEEFVNAIFDTYETTSSLIKTCQYLNTTYPNFVYAGGFNTIDLKRIMLNTMYYGKLKDNDNYCEPYLTYERWKKINDMRESKNIKNNKRHVYLFSGIIKGACGHRLAGTHFISSRIHKTIKYSYRCSKYAHSGQCKNLNITEEAIERKVLEMLPKTIDEFINNYEKEYVKTNVKDNSKKIKELESEKKRIINSYNKGWMSESDAENEIDKINEKLKKYSEVPIKKDYSYLKELKNLNWIDYYKGLTRENKQLFFHKIIDLITVDVEAYRVGKEDFIKIELVK

SEQ ID NO: 7625 - protein, 467 aa, Unknown
  Description of Unknown: Integrase B7626 sequence
  PTHR30461:SF3,IPR036162,PS51737,IPR011109,PTHR30461, PS00397,PF00239,G3DSA:1.10.10.2600,IPR006119,SSF53041, SM00857,IPR025827,IPR038109,PS51736,cd03768, IPR006118,PF13408,G3DSA:3.40.50.1390,PF07508,Coil
MKRAALYIRVSTLEQAQEGYSVGEQRERLIAYCKAQDWLIADIYVDGGYTGSNLNRPGIQKLIGETEKFDVVLVYKLDRLSRSQRDTLYLIEEIFRPNNVDFVSMQESFDTSSPFGKAMIGLLAVFAQLEREQIKERTWMGRVARAKTGLHHGGGNIPIGYDYSDGKLIVNPYEAEQVRKIYEWYLAGDSLKAITDKLQDAGYTNRYSSYNSWTSVRNILENETYIGRLHFGDVVVDHAHEAIITEEQFNAAQILRGKRREQFGSHAFQSKHVLTGLLFCGHCGGRYYLRNTGKYSYYACYSRTKQMKNMIKDPNCQNKIWRAQDLEPIIEEKILALLRNPKLAEELSASRRKAPAPVSKNTDIEKRIRDIDRQISKLMELYQQDDIPPELLGERINRLYGEKTALENTLTPVVEQNAVPLDLVSELIEDAAEIWDFADEGQKRRILQSLVSRIVLTDDQVDIEWAF

SEQ ID NO: 7626 - protein, 467 aa, Unknown
  Description of Unknown: Integrase B7627 sequence
  PTHR30461:SF3,IPR036162,PS51737,IPR011109,PTHR30461, PS00397,PF00239,G3DSA:1.10.10.2600,IPR006119,SSF53041, SM00857,IPR025827,IPR038109,PS51736,cd03768, IPR006118,PF13408,G3DSA:3.40.50.1390,PF07508
MRRAALYIRVSTLEQAQEGYSVGEQRERLIAYCKAQDWLIADIYVDGGYTGSNLNRPGIQKLMSETEKFDVVLVYKLDRLSRSQRDTLYLIEEIFRPNKVDFVSMQESFDTSSPFGKAMIGLLAVFAQLEREQIKERTWMGRVARAKTGLHHGGGNIPIGYDYEDGKLIVNPYEAEQVRKIYEWYLSGASLKAITDKLQDAGYTNKYSSYNSWSSVRNILENETYIGRLHFGGVVVDHAHEAIITEEQFNAAQILRGKRREQFGSHAFQSKHVLTGLLFCGHCGGRYYLRNTGKYSYYACYSRTKQMKNMIKDPNCQNKIWRAQDLEPIIEEKILALLRNPQIAEELAAGKPKAAAPVSKNTDIERRIREIDRQIGKLMELYQQDDIPPELLGEKINRLYGEKTALENSIAPVKETDAMPLDLVAELITNAAEIWDFADENQKRRILQSLISRIVLTDDQVDIEWAF

SEQ ID NO: 7627 - protein, 467 aa, Unknown
  Description of Unknown: Integrase B7628 sequence
  PTHR30461:SF3,IPR036162,PS51737,IPR011109,PTHR30461, PS00397,PF00239,G3DSA:1.10.10.2600,IPR006119,SSF53041, SM00857,IPR025827,IPR038109,PS51736,cd03768, IPR006118,PF13408,G3DSA:3.40.50.1390,PF07508
MRRAALYIRVSTLEQAQEGYSVGEQRERLIAYCKAQDWLIADIYVDGGYTGSNLNRPGIQKLMSETEKFDVVLVYKLDRLSRSQRDTLYLIEEIFRPNKVDFVSMQESFDTSSPFGKAMIGLLAVFAQLEREQIKERTWMGRVARAKTGLHHGGGNIPIGYDYEDGKLIVNPYEAEQVRKIYEWYLSGASLKAITDKLQDAGYTNKYSSYNSWSSVRNILENETYIGRLHFGDVVVDHAHEAIITEEQFNAAQILRGKRREQFGSHAFQSKHVLTGLLFCGHCGGRYYLRNTGKYSYYACYSRTKQMKNMIKDPNCQNKIWRAQDLEPIIEEKILALLRNPKIAKELAAGKPKAAAPISKNTDIERRIREIDRQIGKLMELYQQDDIPPELLGEKINRLYGEKTALENSIAPVEETNAMPLDLVAELISNAAEMWDFADENQKRRILQSLISRIVLTDDQVDIEWAF

SEQ ID NO: 7628 - protein, 467 aa, Unknown
  Description of Unknown: Integrase B7629 sequence
  PTHR30461:SF3,SM00857,G3DSA:1.10.10.2600,IPR036162,PF13408, PS51737,G3DSA:3.40.50.1390,IPR025827,IPR006119,IPR038109, PF07508,SSF53041,IPR011109,PF00239,PTHR30461, PS51736,Coil,cd00338
MDKAVFIYTRVSTREQADEGYSLGEQEERLKKYSEAMGWKVIGIYTDPGYSGSNMERPALQQMLSDISKKHPDIVLVDKLDRLSRSQYDTLYLIKKVFAAAGASFVSRAEAFDTSTAFGRAMLGILSTFAELERERIKERMMEGRQGRAKDGLYMGSQAPLGYDYSPENGLTINESEAGIVRFVFEQAAQRRPFTCIAEDCANMYDIDFFWSLASITRILNSKLYIGQVLFCGKWTQGKHAPIISEETFEKAQEVLGERKENFSKFTGKKTKNLLSGLIYCEYCKKRFHKIQTGTYIYYVCYSRSRVKGSMVVNRDCSAKRLNLRKTDALVLDQIKRIRTDVAFYDSVKQAKGSADQTVESLGKKIASINTRINRLISLYSLEQIDIEQVKAQIDPLTAQKKELQKKLDAAESKKNDYVKREDAVTLSQAVEEAYNSGNINEARALISQLIKYISVNADSISIHWRF

SEQ ID NO: 7629 - protein, 467 aa, Unknown
  Description of Unknown: Integrase B7630 sequence
  PTHR30461:SF3,cd00338,SM00857,G3DSA:1.10.10.2600,IPR036162, PF13408,PS51737,IPR025827,G3DSA:3.40.50.1390,IPR006119, IPR038109,PF07508,IPR011109,SSF53041,PTHR30461, PS51736,Coil,PF00239
MKEIDKKCGDIVYKKELAPDLVRVALYIRVSGEEQKIKGLSLEAQQERLEAYARERGWVIVGIYIDAAKTARKNIHKRTEFQRMMDSVKRDEVDILLFARLDRWFRSVADYYKVMEILQAHNCDWKTTDEEYDTTTANGRLYINVKLSIAQNEADIDGERIDVVFDSKIAHGTVVSGSAPFGFRVNEEKRLEVVPEDAAIVQDAFNYFENTVSQRATVRYVRETYGVNWCDATFRRMLKEKLYTGVYDRGGRYNDQFCPAIINRHQFDRVQALLTRNVRSAPSGKVYIFTSILTCAECGHKLVGYKSSDYYYYRCNQHFQRGRCSHNHSAREDVVEAWLFDHLGEELERCQLEWDVEAAKKKASVARTDKAALKRKLTKLKELYVNDLIDIEDYKKDYQIYVSALNQIPEPAQEAPPDFAAVRRLLDNSFRTIYDTLTREEKRTLWRSVIKEIRIDNDQNITGVVFG

SEQ ID NO: 7630 - protein, 467 aa, Unknown
  Description of Unknown: Integrase B7631 sequence
  PTHR30461:SF3,SM00857,G3DSA:1.10.10.2600,IPR036162,PF13408, PS51737,G3DSA:3.40.50.1390,IPR025827,IPR006119,IPR038109, PF07508,IPR011109,SSF53041,PTHR30461,PS51736, cd00338,PF00239
MQRAVIYARFSSDMQREESIDAQVRACKAYAKNKGYIVVDTYADEAKSGRDVTKRDAYNQMLADAMEDKFDVIIFHKIDRNSRNELNYFTFKDKLEKLGIRYEYAAQPIDALSPEGQMMETMMVGMAAYYSRNLAKETKKGLNENAYKALFNGGCPPLGYKIVDKKYVIDEQEAAAVRLIFELYLNGYGYAAICRELSAKGYTTKAGKAFAKNSLHDILCNEKYIGTYTFNKIPRKKGGRNSHAAERPEDFISIENAFPAIISKDDWALVRAKMDRNRHRAASYTAKEKYLLSGKVFCGHCGSAMVGHRIRKRYCYYGCTRKEQTPTSKCPQKMIRAEILEHWVLQILERVVFTVGGMRRIADAIVVAYEADQKEQAGSQATLLQRKAVAEKKLNNLYKIFEEGNADEFDRQRLNQIKAELREINKSICETSVKPAKLLSKQKIAAILAAMKDEIFVKKIVTMSNKL

SEQ ID NO: 7631 - protein, 467 aa, Unknown
  Description of Unknown: Integrase B7632 sequence
  PTHR30461:SF3,IPR036162,PS51737,IPR011109,PTHR30461, PS00397,PF00239,G3DSA:1.10.10.2600,IPR006119,SSF53041, SM00857,IPR025827,IPR038109,PS51736,cd03768, IPR006118,PF13408,G3DSA:3.40.50.1390,PF07508
MRRAALYIRVSTLEQAQEGYSVGEQRERLIAYCKAQDWLIADIYVDGGYTGSNLNRPGIQKLMSETEKFDVVLVYKLDRLSRSQRDTLYLIEEIFRPNKVDFVSMQESFDTSSPFGKAMIGLLAVFAQLEREQIKERTWMGRVARAKTGLRHGGGNIPIGYDYEDGKLIVNPYEAEQVRKIYEWYLSGASLKAITDKLQDAGYTNKYSSYNSWSSVRNILENETYIGRLHFGDVVVDHAHEAIITEEQFNAAQILRGKRREQFGSHAFQSKHVLTGLLFCGHCGGRYYLRNTGKYSYYACYSRTKQMKNMIKDPNCQNKIWRAQDLEPIIEEKILALLRNPKIAEELAAGKPKAPAPVSKNTDIGRRIREIDRQIGKLMELYQQDDIPPELLGEKINRLYGEKTALENSIAPVEETNAMPLDLVAELITNAAEIWDFADENQKRRILQSLISRIVLTDDQVDIEWAF

SEQ ID NO: 7632 - protein, 467 aa, Unknown
  Description of Unknown: Integrase B7633 sequence
  PTHR30461:SF3,cd00338,SM00857,IPR036162,PF13408, IPR025827,G3DSA:3.40.50.1390,IPR006119,SSF53041,PTHR30461, PS51736,Coil,PF00239
MAQSRSATEKILRVALYPRVSTEEQFLRGYSLQTQEEVLTQYAHDHGYKIVGVYRDEGHSARKPALKRKVMQELLSDVQAGKIDRILFIKLDRWFRNVREYHKIQEILEANNVTWQATMEDYNTATADGRLKVNIMLSVAENESDRTSERIKFVFDGKRRRKEWCFTGGPDQWPYGYMPQVIDGAKRCVKNPETEMIVQDFWDYVVKYSSVRKAGMFCCEKYGITRNYRTWMTTARNELYTGIFHGVEDYCPAYINRADWERIILGHEVIKKTQRPDRVYLFTGLIRCPGCGATMKATFKTYPNDRSKEYNGYRCNNSKLRTCACRHQLSERKIEKYLLGNIKSQLENYIVQAEAQETQKRRQPKIQSLMALNEQLRRLNVIFIAGNIGDEEYAAETKRIKAEIEKAKQQESENRPANLDWIKSFLESDFLSTYESLDKEEQRRLWRSIIEEIYIDGTEVTGIKPRI

SEQ ID NO: 7633 - protein, 467 aa, Unknown
  Description of Unknown: Integrase B7634 sequence
  cd03768,PTHR30461:SF3,SM00857,G3DSA:1.10.10.2600, IPR036162,PF13408,PS51737,IPR025827, G3DSA:3.40.50.1390,IPR006119,IPR038109,PF07508, IPR011109,SSF53041,PTHR30461,PS51736,Coil,PF00239
MDKAVFIYTRVSTREQADEGYSLGEQEERLKKYSDAMRWKVAGIYTDPGYSGSNMERPALQQMLSDISKKHPDIVLVDKLDRLSRSQYDTLYLIKKVFAAAGASFVSRAEAFDTSTAFGRAMLGILSTFAELERERIKERMMEGRQGRAKDGLYMGSQAPLGYDYSPENGLTINESEAEIVRFIFEQAAQRRPFACIAGDCANMYDVDFFWSLSSITRILNSKLYIGQVLFCGKWTQGKHAPIISEETFEKAQEVLDERKENFSKFAGKKTKNLLSGLIYCEYCKTRFHKIQTGKYIYYVCYSRSRVKGSMIVNRDCSAKRLNLRKTDALVLEQIKRIRTDVAFYDSVKQAKGGADQALENLEKKMASINTRINRLISLYSLEQIDMEQVKAQIDPLSAQKKELQKKLDAAKSKKNDYVKREDAMTLSQAVEEAYNSGNISEARALISQLIKYISVNADSISIHWRF

SEQ ID NO: 7634 - protein, 467 aa, Unknown
  Description of Unknown: Integrase B7635 sequence
  IPR036162,PS51737,PS00398,IPR011109,PTHR30461, PF00239,G3DSA:1.10.10.2600,IPR006119,SSF53041,cd00338, SM00857,IPR025827,IPR038109,PS51736,IPR006118, PF13408,G3DSA:3.40.50.1390,PF07508,Coil
MKRVISYIRFSSERQAKGDSLRRQSKMVNDWLKAHPEYYLDQDLSFRDLGVSGFTGKHLKGGLGDFLTAIEKGLVKAGDTLLIESLDRLSRQDVDQASELLRNILRSGVDVVTLSDGEHYTRESLKDPLALIKSILIMQRSHEESLRKSERIQAAWDAKKEAAKAGIKISRRCPAWLKLNDDRKSFSVIPEKVETVRRCFQLRLEGKSIWEIVRILNDEGHQTLNQYKAGKFGQTSVQDLLKNRSVIGYFTPKGCEEIVGYFPPIIPETDFYKVQQLSYSRYGRKPASDKPLSVNLFKGVIRCSECGHALIITGFSDTRSGIYRCPSRNENRCNAKGLSRKQTDGTLLALLSRIDRFDSDMTNTIDTLKLHREHISSNIEKLVQLSLEIEDLSAITSKLKQLKGELSQVDADIEKETQRLKSIDVGCLSDCDLTTKAGRIEAQLIIKSAVKEVVLNTAKRRCNFSQR

SEQ ID NO: 7635 - protein, 467 aa, Unknown
  Description of Unknown: Integrase B7636 sequence
  PTHR30461:SF3,IPR036162,PS51737,IPR011109,PTHR30461, PF00239,G3DSA:1.10.10.2600,IPR006119,SSF53041,cd00338, cd09609,SM00857,IPR025827,IPR038109,PS51736, PF13408,G3DSA:3.40.50.1390,PF07508,Coil
MDKAVFIYTRVSTREQADEGYSLGEQEERLKKYSEAMGWKVTGIYTDPGYSGSNMERPALQQMLSDISKKHPDIVLVDKLDRLSRSQYDTLYLIKKVFAAAGVSFVSRAEAFDTSTAFGRAMLGILSTFAELERERIKERMMEGRQGRAKDGLYMGSQAPLGYDYSPEDGLTINENEAGIVRFIFEQAAQRRPFTCIAEDCANMYDIDFFWSLASITRILNSKLYIGQVLFCGKWTQGKHAPIISEETFEKAQEVLSERKENFSKFTGKKTKNLLSGLIYCEYCKTRFHKIQTGKYIYYVCYSRSRVKGSMIVNRDCSAKRLNLRKTDALVLEQIKRIRTDVAFYDSIKQAADGTDQALANLEKKMASINTRINRLISLYSLEQIDIEQVKAQIDPLSAQKKELQKKLDAAESKKNDYVKREDAVTLSQAVEEAYNSGNINEARALISQLIKYISVNADSISIHWRF

SEQ ID NO: 7636 - protein, 467 aa, Unknown
  Description of Unknown: Integrase B7637 sequence
  SM00857,IPR006118,G3DSA:1.10.10.2600,IPR036162,PF13408, PS51737,G3DSA:3.40.50.1390,Coil,IPR025827,IPR006119, IPR038109,SSF53041,IPR011109,PTHR30461,PS00397, PS51736,cd00338,PF00239
MKKIVKNITETIIRVVLYIRVSSEEQVKHGYSLQSQRERLIEYCKQKGYQVVEIYVDEGKSARSKLKNRTELLRLIEDAKLKKFDRIVFWRLDRWFRNIADYYKVQEILDNNKIDWECSDEEYSTTTSNGRLHLNIKLSIAQNESDQTSDRIKFNFDNMVKNGRAITGSQGVPLGYMVSGEEKNKKVVKNPETEPIAIDMLEYVKKCGSVRKTVIYINQKYNLKICYDSMRHYLMNEKYYGYYRGIENYCEPYITKQEFDEIQSLIKRNVKCNKKYDYIFSGLLKCPICGCKLAGYQQIQNKVKYNKIYKYPSYRCRHTQYDKLCHYHKYPHENAIENYMINNIKNEMLQLIKNSESPLEKNDIKIKKLDKEKIKTKLARLTDLYIDGMILREKYDQEFKKLNSLLQEADENIIEEKRDLSQYKEFLNSDALSIYNKLNNSSKRMFWAKYIEYIIYNEDGTYEIKFK

SEQ ID NO: 7637 - protein, 467 aa, Unknown
  Description of Unknown: Integrase B7638 sequence
  PTHR30461:SF3,IPR036162,PS51737,IPR011109,PTHR30461, PS00397,PF00239,G3DSA:1.10.10.2600,IPR006119,SSF53041, cd00338,SM00857,IPR025827,IPR038109,PS51736, IPR006118,PF13408,G3DSA:3.40.50.1390,PF07508,Coil
MLKAALYARVSSEEQAKRENSIPAQLRALREYCQKNNIEIFKEYKDEGITGQISKRPAFQQMLSAAFSGKINVILVHKFDRFARKVELSRSVKNSLQAAKVNVVSITEPIEDSPMGFFMEGLYELMAEYYVRNLSAEVFKGMNERALKGKHMGQMPYGYYCKDGNVYVNETQAEVIHKIYRFYDKGWGHMKIAKWLNESKIPTYKGIIGGWQTFQVKQILKNSKYIGENLWNGTVYPADFPAILEPALFHRVQEKSNLMTRTHTYRGNNYTKHHLLGLLYCGECGSIMRVKPNQDWQRRKFDTYTCRDASQYRGDCRFTKIFDAAKLESEVDAYLRSVLAGAPISLIVSKDAEKVKPADSSKSQIEKINAELKRAKDAYLSGVFDLDEYREIRQGLEKNKKILEAKTEDAPAPLQANEKEDILRKKIKSAWDLYENVQTAEEKRTILKTFIHKILIYRDKWEVVFYI

SEQ ID NO: 7638 - protein, 467 aa, Unknown
  Description of Unknown: Integrase B7639 sequence
  PTHR30461:SF3,cd00338,SM00857,IPR036162,PF13408, IPR025827,G3DSA:3.40.50.1390,IPR006119,SSF53041,PTHR30461, PS51736,Coil,PF00239
MAQSRSATEKILRVALYPRVSTEEQFLRGYSLQTQEEVLTQYAHDHGYKIVGVYRDEGHSARKPALKRKVMQELLSDVQAGKIDRILFIKLDRWFRNVREYHKIQEILEANNVTWQATMEDYNTATADGRLKVNIMLSVAENESDRTSERIKFVFDGKRRRKEWCFTGGPDQWPYGYMPQIIDGAKRCVKNPETEMIVQDFWDYVVKYSSVRKAGMYCCEKYGITRNYRTWMTTARNELYTGIFHGVEDYCPAYINRADWERIILGHEVIKKTQRPDRVYLFTGIIRCPGCGATMKATFKTYPNDRSKEYNGYRCNNSKLRTCAYRHQLSERKIEKYLLGNIKSQLGNYIVQAEAQETQKRRQPKIQSLVALNEQLRRLNVIFIAGNIGDEEYAAETKRIKAEIEKAKQQESENRPANLDWIKSFLESDFLSTYESLDKEDQRRLWRSIIEEIYIDGTEVTGIKPRI

SEQ ID NO: 7639 - protein, 467 aa, Unknown
  Description of Unknown: Integrase B7640 sequence
  PTHR30461:SF3,IPR036162,PS51737,IPR011109, PTHR30461,PS00397,PF00239,G3DSA:1.10.10.2600, IPR006119,SSF53041,SM00857,IPR025827,IPR038109,PS51736 ,cd03768,IPR006118,PF13408,G3DSA:3.40.50.1390,PF07508
MRRAALYIRVSTLEQAQEGYSVGEQRERLIAYCKAQDWLIADIYVDGGYTGSNLNRPGIQKLMSETEKFDVVLVYKLDRLSRSQRDTLYLIEEIFRPNKVDFVSMQESFDTSSPFGKAMIGLLAVFAQLEREQIKERTWMGRVARAKTGLHHGGGNIPIGYDYEDGKLIVNPYEAEQVRKIYEWYLSGASLKAITDKLQDAGYTNKYSSYNSWSSVRNILENETYIGRLHFGDVVVDHAHEAIITEEQFNAAQILRGKRREQFGSHAFQSKHVLTGLLFCGHCGGRYYLRNTGKYSYYACYSRTKQMKNMIKDPNCQNKIWRAQDLKPIIEEKILALLRNPQIAEELAAGKPKAAAPVSKNTDIERRIREIDRQIGKLMELYQQDDIPPELLGEKINRLYSEKTALENSIAPVEETNAMPLDLVAELITNAAEIWDFADENQKRRILQSLISRIVLTDDQVDIEWAF

SEQ ID NO: 7640 - protein, 467 aa, Unknown
  Description of Unknown: Integrase B7641 sequence
  PTHR30461:SF3,IPR036162,PS51737,IPR011109,PTHR30461, PS00397,PF00239,G3DSA:1.10.10.2600,IPR006119,SSF53041, SM00857,IPR025827,IPR038109,PS51736,cd03768, IPR006118,PF13408,G3DSA:3.40.50.1390,PF07508,Coil
MKRAALYIRVSTLEQAQEGYSVGEQRERLIAYCKAQDWLIADIYVDGGYTGSNLNRPGIQKLIGETEKFDVVLVYKLDRLSRSQRDTLYLIEEIFRPNNVDFVSMQESFDTSSPFGKAMIGLLAVFAQLEREQIKERTWMGRVARAKTGLHHGGGNIPIGYDYSDGKLIVNPYEAEQVRKIYEWYLAGASLKAITDKLQDAGYTNRYSSYNSWTSVRNILENETYIGRLHFGDVVVDHAHEAIITEEQFNAAQILRGKRKEQFGSHAFQSKHVLTGLLFCGHCGGRYYLRNTGKYSYYACYSRTKQMKNMIKDPNCQNKIWRAQDLEPIIEEKIIALLHNPKLAEELSASRRKAPAPVSKNTEIEKRIRDIDRQISKLMELYQQDDIPPELLGERINRLYGEKTALENTLAPVVEQNTMPLDLVSELIEDATEIWDFADEGQKRRILQSLVSRIVLTDDQVDIEWAF

SEQ ID NO: 7641 - protein, 467 aa, Unknown
  Description of Unknown: Integrase B7642 sequence
  PTHR30461:SF3,cd00338,SM00857,IPR036162,PF13408, IPR025827,G3DSA:3.40.50.1390,IPR006119,SSF53041,PTHR30461, PS51736,Coil,PF00239
MAQSRSATEKILRVALYPRVSTEEQFLRGYSLQTQEEVLTQYSNDHGYKIVGVYRDEGHSARKPALKRKVMQELLADVQAGKIDRILFIKLDRWFRNVREYHKIQEILEANNVTWQATMEDYNTATADGRLKVNIMLSVAENESDRTSERIKFVFDGKRRRKEWCFTGGPDQWPYGYMPQVIDGAKRCVKNPETEVIVQDFWDYVVKYSSVRKAGMYCCEKYGITRNYRTWMTTARNELYTGIFHGVEDYCPAYINRADWERIILGHEVIKKTQRPDRVYLFTGLIRCPGCGATMKATFKTYPNDRSKEYNGYRCNNSKLRTCAYRHQLSERKIEKYLLGNIKSQLENYIVQAEAQETQKRRQPKIQSLVALNEQLRRLNVIFIAGNIGDEEYAAETKRIKAEVEKAKQQESENRPANLDWIKSFIESDFLSTYESLDKEDQRRLWRSIIEEIYIDGTEVTGIKPRI

SEQ ID NO: 7642 - protein, 467 aa, Unknown
  Description of Unknown: Integrase B7643 sequence
  PTHR30461:SF3,SM00857,G3DSA:1.10.10.2600,IPR036162, PF13408,IPR025827,G3DSA:3.40.50.1390,PS51737, IPR006119,IPR038109,PF07508,IPR011109, SSF53041,PTHR30461,Coil,cd00338,PF00239
MTIIGEYCDRAISGKTDNRPNFQKLIKDSEKGQFEAVIMYTLDRFARNRYDSAIYKAKLKKNGVKVYYAKQPMPDTPEGIILESVLEGYAEYYSENLSRNIKRGMKENALQCLANGGAGMPLGYTVGEDRKYQIDPVGAKIVQEIFQMYADGMSATQIINECNRRGYKTSRGNTFNKNSLRTMLKNDRYIGVYRFADVIVEDGVPPIISRELFDKVQATLRHNYSARARNKAKDDYLLTTKLFCGHCGSSMVGESGTSKSGKLHHYYKCIDRKRKRKCKKAVEKKDWIEELVVRFTVQNVLTDKNIERISVKAMEIIEKESADTSYLDGLQSELKDIKKKIKNLMTAIEQGIITASTKERMDELESEKNEIEGKIAREEMKKPLLTKERIMYWLYSFKSGDIDNIEYRRRVIDTLVNSVYVYDDGEKGRRIVFTFNISGQNTATLSCSDIACVAPPQVKKSEHYHQW

SEQ ID NO: 7643 - protein, 467 aa, Unknown
  Description of Unknown: Integrase B7644 sequence
  PTHR30461:SF3,IPR036162,PS51737,IPR011109,PTHR30461, PS00397,PF00239,G3DSA:1.10.10.2600,IPR006119,SSF53041, SM00857,IPR025827,IPR038109,PS51736,cd03768, IPR006118,PF13408,G3DSA:3.40.50.1390,PF07508
MRRAALYIRVSTLEQAQEGYSVGEQRERLIAYCKAQDWLIADIYVDGGYTGSNLNRPGIQKLMSETEKFDVVLVYKLDRLSRSQRDTLYLIEEIFRPNKVDFVSMQESFDTSSPFGKAMIGLLAVFAQLEREQIKERTWMGRVARAKTGLHHGGGNIPIGYDYEDGKLIVNPYEAEQVRKIYEWYLSGASLKAITDKLQDAGYTNKYSSYNSWSSVRNILENETYIGRLHFGDVVVDHAHEAIITEEQFNAAQILRGKRREQFGSHAFQSKHVLTGLLFCGHCGGRYYLRNTGKYSYYACYSRTKQMKNMIKDPNCQNKIWRAQDLEPIIEEKILALLRNPKIAEELAAGKPKAPAPVSKNTDIGRRIREIDRQIGKLMELYQQDDIPPELLGEKINRLYGEKTALENSIAPVEETNAMPLDLVAELITNAAEIWDFADENQKRRILQSLISRIVLTDDQVDIEWAF

SEQ ID NO: 7644 - protein, 466 aa, Unknown
  Description of Unknown: Integrase B7645 sequence
  PTHR30461:SF3,IPR036162,PS51737,IPR011109,PTHR30461, PS00397,PF00239,G3DSA:1.10.10.2600,IPR006119,SSF53041, SM00857,IPR025827,IPR038109,PS51736,cd03768, IPR006118,PF13408,G3DSA:3.40.50.1390,PF07508,Coil
MNRAALYIRVSTLEQAQEGYSVGEQKERLIAYCKAKDWIIADIYVDGGYTGSNLNRPGIQKLISETDKFDLVLVYKLDRLSRSQRDTLYLIEEVFRPKGVDFISMQESFDTSTPFGKAMIGLLAVFAQLEREQIKERTWMGRVARAKTGLHHGGGHIPIGYEYEDGHLVINPYEAKQVRKIYEWYLAGDSLKTITDKLQEAGYTNKYSSYNSWTSVRNILGNETYTGRLHFGDVIVDNAHEPIISKEQFDAAQVLRGKRQEQYGGQAFQSKHLLAGLIYCGHCGGRYYLRNTGKYSYYACYSRTKQMKSMVKDPNCMNKIWKGAELEAIVDARIRELLSSPEMAAEIAASRSKPTPVSKNADIEKRLREIDKQIGKLMELYQHDDIPPELLGERINKLYNERTALESTLAPVVEDEAMPFDLVEALISDAAQVWDFADESQKRRILQSLVSRIVLTDDDVKIEWAF

SEQ ID NO: 7645 - protein, 466 aa, Unknown
  Description of Unknown: Integrase B7646 sequence
  PTHR30461:SF3,IPR036162,PS51737,IPR011109,PTHR30461, PS00397,PF00239,G3DSA:1.10.10.2600,IPR006119,SSF53041, SM00857,IPR025827,IPR038109,PS51736,cd03768, IPR006118,PF13408,G3DSA:3.40.50.1390,PF07508,Coil
MNRAALYIRVSTLEQAQEGYSVGEQKERLIAYCKAKDWIIADIYVDGGYTGSNLNRPGIQKLISETDKFDLVLVYKLDRLSRSQRDTLYLIEEVFRPKGVDFISMQESFDTSTPFGKAMIGLLAVFAQLEREQIKERTWMGRVARAKTGLHHGGGHIPIGYEYEDGHLVINPYEAEQVRKIYEWYLAGDSLKTITDKLQEAGYTNKYSSYNSWSSVRNILGNETYTGRLHFGDVTVDNAHEPIITKEQFDAAQVLRGKRQEQYGGQAFQSKHLLAGLIYCGHCGGRYYLRNTGKYSYYACYSRTKQMKSMVKDPNCKNKIWKGSELEPIIDAKVRELLSSPEMAAEIAASHSKPVPVSKNADIEKRLREIDKQIGRLMELYQHDDIPPELLGERINKLYNERTALESTLTPVVENEVMPFDLVEALIADAAQVWDFADESQKRRILQSLVSRIVLTDDDVKIEWAF

SEQ ID NO: 7646 - protein, 466 aa, Unknown
  Description of Unknown: Integrase B7647 sequence
  PTHR30461:SF3,IPR036162,PS51737,IPR011109,PTHR30461, PS00397,PF00239,G3DSA:1.10.10.2600,IPR006119,SSF53041, SM00857,IPR025827,IPR038109,PS51736,cd03768, IPR006118,PF13408,G3DSA:3.40.50.1390,PF07508,Coil
MNRAALYIRVSTLEQAQEGYSVGEQKERLIAYCKAKDWIVADIYVDGGYTGSNLNRPGIQKLISETDKFDLVLVYKLDRLSRSQRDTLYLIEEVFRPKGVDFISMQESFDTSTPFGKAMIGLLAVFAQLEREQIKERTWMGRVARAKTGLHHGGGHIPIGYEYEDGHLVINPYEAEQVRKIYEWYLAGDSLKTITDKLQEAGYTNKYSSYNSWTSVRNILGNETYTGRLHFGDVIVDNAHEPIISKEQFDAAQVLRGKRQEQYGGQAFQSKHLLAGLIYCGHCGGRYYLRNTGKYSYYACYSRTKQMKSMVKDPNCMNKIWKGAELEAIVDARIRELLSSPEMAAEIAASRSKPTPVSKNADIEKRLREIDKQIGKLMELYQHDDIPPELLGERINKLYNERTALESTLAPVVEDEAVPFDLVEALISDAAQVWDFADESQKRRILQSLVSRIVLTDDAVKIEWAF

SEQ ID NO: 7647 - protein, 466 aa, Unknown
  Description of Unknown: Integrase B7648 sequence
  PTHR30461:SF3,IPR036162,PS51737,cd16859,IPR011109, PTHR30461,PS00397,PF00239,G3DSA:1.10.10.2600,IPR006119, SSF53041,cd00338,cd06456,SM00857,IPR025827,IPR038109 ,PS51736,IPR006118,PF13408,G3DSA:3.40.50.1390,PF07508,Coil
MKKAGLYIRVSTPQQEKEGYSIEAQTEKLNAYAVAKDYKVFKTYTDAAFSGAKLERPALNEMIEDIENNKIDVVIVYKLDRLSRSQKNTMYLIEDVFLKNNVDFISMQESFDTTTSFGRAMIGILSVFAQLERDNITERMSMGKLERVKRGYYMGGGNVPFGYEYNQITGELEIQETQALAVKRMFELFLSGQAINKIVSILKKEFPVFEDSFMDSTVRRRLQSHYYCGKQKYQNKVYDAKHEPIVSIKEFNKVQRLISNRPHSNAFNHSYLFSGLIMCHKCGKPYNGYESVRTANGKKYKHKYYRCSCRTYKHKQKYGWACSGKSYRCDFLDAAIMSEIKKRAENSKFALKENNNEIDNKPIIREIARLNAQQSKLLDLYLSDKISTIILDSKTDELKDKIEKLELQLNQTVSKKDKEEFEKSLEELVDHFEEMDFSTRRSLIENIIEKIEVIDNEITIYFYVSI

SEQ ID NO: 7648 - protein, 466 aa, Unknown
  Description of Unknown: Integrase B7649 sequence
  PTHR30461:SF3,IPR036162,PS51737,IPR011109,PTHR30461, PS00397,PF00239,G3DSA:1.10.10.2600,IPR006119,SSF53041, SM00857,IPR025827,IPR038109,PS51736,cd03768, IPR006118,PF13408,G3DSA:3.40.50.1390,PF07508,Coil
MRRAALYIRVSTLEQAQEGYSVGEQKERLIAYCKAKDWIIADIYVDGGYTGSNLNRPGIQKLISETDKFDLVLVYKLDRLSRSQRDTLYLIEEVFRPKGVDFISMQESFDTSTPFGKAMIGLLAVFAQLEREQIKERTWMGRVARAKTGLHHGGGHIPIGYEYEDGHLVINPYEAEQVRKIYEWYLAGDSLKTITDKLQEAGYTNKYSSYNSWTSVRNILGNETYTGRLHFGDVIVDNAHEPIISKEQFDAAQVLRGKRQEQYGGQAFQSKHLLAGLIYCGHCGGRYYLRNTGKYSYYACYSRTKQMKSMVKDPNCMNKIWKGAELEAIVDARIRELLSSPEMAAEIATSRSKPAPVSKNADIEKRLREIDKQISKLMELYQHDDIPPELLGERINKLYNERTALESTLAPVVEDEAMPFDLVEALISDAAQVWDFADESQKRRILQSLVSRIVLTDDDVKIEWAF

SEQ ID NO: 7649 - protein, 466 aa, Unknown
  Description of Unknown: Integrase B7650 sequence
  PTHR30461:SF3,IPR036162,PS51737,IPR011109,PTHR30461, PS00397,PF00239,G3DSA:1.10.10.2600,IPR006119,SSF53041, SM00857,IPR025827,IPR038109,PS51736,cd03768, IPR006118,PF13408,G3DSA:3.40.50.1390,PF07508,Coil
MNRAALYIRVSTLEQAQEGYSVGEQKERLIAYCKAKDWIIADIYVDGGYTGSNLNRPGIQKLISETDKFDLVLVYKLDRLSRSQRDTLYLIEEVFRPKGVDFISMQESFDTSTPFGKAMIGLLAVFAQLEREQIKERTWMGRVARAKTGLHHGGGHIPIGYEYEDGHLVINPYEAEQVRKIYEWYLAGDSLKTITDKLQEVGYTNKYSSYNSWTSVRNILGNETYTGRLHFGDVIVDNAHEPIISKEQFDAAQVLRGKRQEQYGGQAFQSKHLLAGLIYCGHCGGRYYLRNTGKYSYYACYSRTKQMKSMVKDPNCMNKIWKGAELEAIVDAQIRELLSSPEMAAEIATSRSKPAPVSKNADIEKRLREIDKQIGKLMELYQHDDIPPELLGERINKLYNERTALESTLAPVVEDEAMPFDLVEALISDAAQVWDFADESQKRRILQSLVSRIVLTDDDVKIEWAF

SEQ ID NO: 7650 - protein, 466 aa, Unknown
  Description of Unknown: Integrase B7651 sequence
  PTHR30461:SF3,IPR036162,PS51737,IPR011109,PTHR30461, PS00397,PF00239,G3DSA:1.10.10.2600,IPR006119,SSF53041, SM00857,IPR025827,IPR038109,PS51736,cd03768, IPR006118,PF13408,G3DSA:3.40.50.1390,PF07508,Coil
MNRAALYIRVSTLEQAQEGYSVGEQKERLIAYCKAKDWIIADIYVDGGYTGSNLNRPGIQKLISETDKFDLVLVYKLDRLSRSQRDTLYLIEEVFRPKGVDFISMQESFDTSTPFGKAMIGLLAVFAQLEREQIKERTWMGRVARAKTGLHHGGGHIPIGYEYEDGHLVINPYEAEQVRKIYEWYLAGDSLKTITDKLQEAGYTNKYSSYNSWTSVRNILGNETYTGRLHFGDVIVDNAHEPIISKEQFDAAQVLRGKRQEQYGGQAFQSKHLLAGLIYCGHCGGRYYLRNTGKYSYYACYSRTKQMKSMVKDPNCMNKIWKGAELEAIVDARIRELLSSPEMAAEIAASRSKPTPVSKNADIEKRLREIDKQIGKLMELYQHDDIPPELLGERINKLYNERTALESTLAPVVEDEAMPFDLVEALISDAAQVWDFADESQKRRILQSLVSRIVLTDDDVKIEWAF

SEQ ID NO: 7651 - protein, 466 aa, Unknown
  Description of Unknown: Integrase B7652 sequence
  PTHR30461:SF3,IPR036162,PS51737,IPR011109,PTHR30461, PS00397,PF00239,G3DSA:1.10.10.2600,IPR006119,SSF53041, SM00857,IPR025827,IPR038109,PS51736,cd03768, IPR006118,PF13408,G3DSA:3.40.50.1390,PF07508,Coil
MNRAALYIRVSTLEQAQEGYSVGEQKERLIAYCKAKDWIIADIYVDGGYTGSNLNRPGIQKLISETDKFDLVLVYKLDRLSRSQRDTLYLIEEVFRPKGVDFISMQESFDTSTPFGKAMIGLLAVFAQLEREQIKERTWMGRVARAKTGLHHGGGHIPIGYEYEDGHLVINPYEAEQVRKIYEWYLAGDSLKTITDKLQEVGYTNKYSSYNSWTSVRNILGNETYTGRLHFGDVIVDNAHEPIISKEQFDAAQVLRGKRQEQYGGQAFQSKHLLAGLIYCGHCGGRYYLRNTGKYSYYACYSRTKQMKSMVKDPNCMNKIWKGAELEALVDARIRELLSSPEMAAEIATSRSKPAPVSKNADIEKRLREIDKQIGKLMELYQHDDIPPELLGERINKLYNERTALESTLAPVVEDEAMPFDLVEALISDAAQVWDFADESQKRRILQSLVSRIVLTDDDVKIEWAF

SEQ ID NO: 7652 - protein, 466 aa, Unknown
  Description of Unknown: Integrase B7653 sequence
  PTHR30461:SF3,IPR036162,PS51737,IPR011109,PTHR30461, PS00397,PF00239,G3DSA:1.10.10.2600,IPR006119,SSF53041, SM00857,IPR025827,IPR038109,PS51736,cd03768, IPR006118,PF13408,G3DSA:3.40.50.1390,PF07508,Coil
MNRAALYIRVSTLEQAQEGYSVGEQKERLIAYCKAKDWIIADIYVDGGYTGSNLNRPGIQKLISETDKFDLVLVYKLDRLSRSQRDTLYLIEEIFRPKGVDFISMQESFDTSTPFGKAMIGLLAVFAQLEREQIKERTWMGRVARAKTGLHHGGGYIPIGYEYEDGHLVVNPYEAEQVRKIYEWYLAGASLKTITDRLQEAGYTNKYSSYTSWSSVRNILGNETYTGRLHFGDVVVDHAHEAIISTEQFNAAQVLRGKKQEQYGTAFQSKHLLTGLIFCGHCGGRYYLRNTGKYTYYACYSRTKQIKSMVKDPNCKNKIWKGSELEPIIDAKIRELLSSPQMAAEIAAARKPKPATGSRNTEVEKRLREIDKQIGKLMELYQHDDIPAELLGERINKLYNERTALESSLTPVVEDEVTPFDLAEALISDAAQVWDFADENQKRRILQSLISRIVLTDDDVEIEWAF

SEQ ID NO: 7653 - protein, 466 aa, Unknown
  Description of Unknown: Integrase B7654 sequence
  PTHR30461:SF3,SM00857,IPR036162,G3DSA:3.40.50.1390,IPR006119, SSF53041,PTHR30461,Coil,PS51736,cd00338, PF00239
MAPYNVLNKNKILRAGLFERVSTEEQSRFGYSIATQVEALEEHAAKNRMKIVDHYCDAGVSGGIAYKKRPEMMRLLQDVEAGKIDIILFTRLDRWFRNIKEYFKVQEILEEHNVEWKAIWEDYDTRTANGRMAITIFLAIAQNEREKTSERIQVVFENKRKNKESFFGKSSTPFGYMEQKDEEGITRLVKDPELEPVLQMFWDIAVKYENVNKAAKMVNLEYGIKKNKNKWMELSKKEIYTGNYKGVEGYCPSYVSVEDWLKLQNRKIPRQSKSDRVYLFTGLIECPVCHNNLASTYCVHKQPDGSKREYHNYRCQFKESYVCKYNHTFSELKVEKWLLKNIRNLMHNEIARVEIEKTKPRPRPKTNVAALKEQLRRLEVVYMTGNKPDEEYIKEQKELNNAIKKAENETPKTDADKDLSMLHEILSTDFESVYKTLSAEDRRRFWRGLINRIYLDGNKISHVDFN

SEQ ID NO: 7654 - protein, 466 aa, Unknown
  Description of Unknown: Integrase B7655 sequence
  PTHR30461:SF3,IPR036162,PS51737,IPR011109, PTHR30461,PS00397,PF00239,G3DSA:1.10.10.2600, IPR006119,SSF53041,SM00857,IPR025827,IPR038109,PS51736 ,cd03768,IPR006118,PF13408,G3DSA:3.40.50.1390,PF07508,Coil
MNRAALYIRVSTLEQAQEGYSVGEQKERLIAYCKAKDWIIADIYVDGGYTGSNLNRPGIQKLISETDKFDLVLVYKLDRLSRSQRDTLYLIEEVFRPKGVDFISMQESFDTSTPFGKAMIGLLAVFAQLEREQIKERTWMGRVARAKTGLHHGGGHIPIGYEYEDGHLVINPYEAEQVRKIYEWYLAGDSLKTITDKLQEAGYTNKYSSYNSWTSVRNILGNETYTGRLHFGDVIVDNAHEPIIGKEQFDAAQVLRGKRQEQYGGQAFQSKHLLAGLIYCGHCGGRYYLRNTGKYSYYACYSRTKQMKSMVKDPNCMNKIWKGAELEAIVDARIRELLSSPEMATEIAASRSKPTPVSKNADIEKRLREIDKQIGKLMELYQHDDIPPELLGERINKLYNERTALESTLAPVVEDEAMPFDLVEALISDAAQVWDFADESQKRRILQSLVSRIVLTDDDVQIEWAF

SEQ ID NO: 7655 - protein, 466 aa, Unknown
  Description of Unknown: Integrase B7656 sequence
  PTHR30461:SF3,SM00857,IPR036162,G3DSA:3.40.50.1390,IPR006119, SSF53041,PTHR30461,Coil,PS51736,cd00338, PF00239
MAPYNVLNKNKILRAGLFERVSTEEQSKFGYSIAAQVEALEEHAAKNRMKIVDHYCDAGVSGGIAYKKRPEMMRLLQDVADGKIDIILFTRLDRWFRNIKEYFKVQEILEEHNVEWLAIWEDYRTDTANGRMAITIFLAIAQNEREKTSERIQVVFENKRKNKESFFGKSSTPFGYVEQKDEDGITRLVKDPELEPALQMFWDIAVKYENVNKAAKMVNLEYGIKKNKNKWMELSKKEIYTGNYRGVEGYCPAYVSVEDWLKLQNRKIPRQSKSDRVYLFTGLIECPVCHNNLASTYCVHKQPDGSKREYHNYRCQFKESYVCKYNHTFSELKIEKWLLKNIRNLMHEEVARVEIEKTKPRPKPKTNIAALKEQLRRLEVVYMTGNKPDEEYIKEQKELNNAIKKAESETPKTDADKDLTMLHEILSTDFESVYKTLSAEDRRRFWRGLINRIYLDGNKISYVDFN

SEQ ID NO: 7656 - protein, 466 aa, Unknown
  Description of Unknown: Integrase B7657 sequence
  PTHR30461:SF3,IPR036162,PS51737,IPR011109, PTHR30461,PS00397,PF00239,G3DSA:1.10.10.2600, IPR006119,SSF53041,SM00857,IPR025827,IPR038109,PS51736 ,cd03768,IPR006118,PF13408,G3DSA:3.40.50.1390,PF07508,Coil
MNRAALYIRVSTLEQAQEGYSVGEQKERLIAYCKAKDWIIADIYVDGGYTGSNLNRPGIQKLMSETDKFDLVLVYKLDRLSRSQRDTLYLIEEVFRPKGVDFISMQESFDTSTPFGKAMIGLLAVFAQLEREQIKERTWMGRVARAKTGLHHGGGHIPIGYEYEDGHLVINPYEAEQVRKIYEWYLAGDSLKTITDKLQEAGYTNKYSSYNSWTSVRNILGNETYTGRLHFGDVIVDNAHEAIISKEQFNAAQVIRGKRQEQYGGQAFQSKHLLAGLIYCGHCGGRYYLRNTGKYSYYACYSRTKQMKSMVKDPNCMNKIWKGAELEAIVDARIRELLRSPEMAADITASRSKPVPVSKNADIEKRLREIDKQIGKLMELYQHDDIPPELLGERINKLYNERTALESTLAPVVEDEAMPFDLVEALIADAAQVWDFADEGQKRRILQSLVSRIILTDDDVKIEWAF

SEQ ID NO: 7657 - protein, 466 aa, Unknown
  Description of Unknown: Integrase B7658 sequence
  PTHR30461:SF3,SM00857,IPR036162,G3DSA:3.40.50.1390,IPR006119, SSF53041,PTHR30461,Coil,PS51736,cd00338, PF00239
MAPYNVLNKNKILRAGLFERVSTEEQSRFGYSIATQVEALEEHAAKNRMKIVDHYCDAGVSGGIAYKKRPEMMRLLQDVEAGKIDIILFTRLDRWFRNIKEYFKVQEILEEHNVEWKAIWEDYDTRTANGRMAITIFLAIAQNEREKTSERIQVVFENKRKNKESFFGKSSTPFGYMEQKDEEGITRLVKDPELEPALQMFWDIAVKYENVNKAAKMVNLEYGIKKNKNKWMELSKKEIYTGNYRGVEGYCPSYVSVEDWLKLQNRKIPRQSKSDRVYLFTGLIECPVCHNNLASTYCVHKQPDGSKREYHNYRCQFKESYVCKYNHTFSELKVEKWLLKNIRNLMHNEIARVEIEKTKPRPRPKTNVAALKEQLRRLEVVYMTGNKPDEEYIKEQKELNNAIKKAENETPKTDADKDLSMLHEILSTDFESVYKTLSAEDRRRFWRGLINRIYLDGNKISHVDFN

SEQ ID NO: 7658 - protein, 466 aa, Unknown
  Description of Unknown: Integrase B7659 sequence
  PTHR30461:SF3,IPR036162,PS51737,IPR011109, PTHR30461,PS00397,PF00239,G3DSA:1.10.10.2600, IPR006119,SSF53041,SM00857,IPR025827,IPR038109,PS51736 ,cd03768,IPR006118,PF13408,G3DSA:3.40.50.1390,PF07508,Coil
MNRAALYIRVSTLEQAQEGYSVGEQKERLIAYCKAKDWIIADIYVDGGYTGSNLNRPGIQKLISETDKFDLVLVYKLDRLSRSQRDTLYLIEEVFRPKGVDFISMQESFDTSTPFGKAMIGLLAVFAQLEREQIKERTWMGRVARAKTGLHHGGGHIPIGYEYEDGHLVINPYEAEQVRKIYEWYLAGDSLKTITDKLQEAGYTNKYSSYNSWTSVRNILGNETYTGRLHFGDVIVDNAHEPIISKEQFDAAQVLRGKRQEQYGGQAFQSKHLLAGLIYCGHCGGRYYLRNTGKYSYYACYSRTKQMKSMVKDPNCMNKIWKGAELEAIVDAQIRELLSSPEMAAEIATSRSKPAPVSKNADIEKRLREIDKQIGKLMELYQHDDIPPELLGERINKLYNERTALESTLAPVVEDEAIPFDLVEALISDAAQVWDFADESQKRRILQSLVSRIVLTDDDVKIEWAF

SEQ ID NO: 7659 - protein, 466 aa, Unknown
  Description of Unknown: Integrase B7660 sequence
  PTHR30461:SF3,IPR036162,PS51737,IPR011109,PTHR30461, PS00397,PF00239,G3DSA:1.10.10.2600,IPR006119,SSF53041, SM00857,IPR025827,IPR038109,PS51736,cd03768, IPR006118,PF13408,G3DSA:3.40.50.1390,PF07508
MKRVGIYCRVSTDGQRENTSIPEQKEKLLAFCKAKGWICVDMFIDPGYSGASLERPAMERLMQSVIDKKIDVVLVTKLDRLSRSQKDTLYLIEDLFIPNDVDFVSVAESFDTTTSYGRAMLGILSAFSQLERELISERTFSGRVGRAKQGKWHGGGTEPIGYDYVDGELVVNRKEADQVRRVYELYASGVSITAICERMEGEKTKHGDWHHPETVANVLDNPLYSGTVHFDEIKNPGLHTAIIPKDLEETVRTIRSRIGKYPMKESQYMLTGLVYCHKCGARYFVKKNPNGNKFYCCHSRAKVNKKMVRDPLCKNKNWPIKDLEKIVYKEIKRLAKNPNLIRNMKKEPPKVGSSSNAVHEEIDGINTEIGRLMDLYQQNDQLLQVGEIAERIDDLYQRKVSLLKVSPSEGVCVRGFSKERAVLVVSDLLAAMRESNIDFVRYSLLQLIDRIEVDEENVYFSWSFAD

SEQ ID NO: 7660 - protein, 466 aa, Unknown
  Description of Unknown: Integrase B7661 sequence
  PTHR30461:SF3,IPR036162,PS51737,IPR011109,PTHR30461, PS00397,PF00239,G3DSA:1.10.10.2600,IPR006119,SSF53041, SM00857,IPR025827,IPR038109,PS51736,cd03768, IPR006118,PF13408,G3DSA:3.40.50.1390,PF07508,Coil
MNRAALYIRVSTLEQAQEGYSVGEQKERLIAYCKAKDWIIADIYVDGGYTGSNLNRPGIQKLISETNKFDLVLVYKLDRLSRSQRDTLYLIEEVFRPKGVDFISMQESFDTSTPFGKAMIGLLAVFAQLEREQIKERTWMGRVARAKTGLHHGGGHIPIGYEYEDGHLVINPYEAEQVRKIYEWYLAGDSLKTITDKLQEAGYTNKYSSYNSWTSVRNILGNETYTGRLHFGDVIVDNAHEPIISKEQFDAAQVLRGKRQEQYGGQAFQSKHLLAGLIYCGHCGGRYYLRNTGKYSYYACYSRTKQMKSMVKDPNCMNKIWKGAELEAIVDARIRELLSSPEMATEIAASRSKPTPVSKNADIEKRLREIDKQIGKLMELYQHDDIPPELLGERINKLYNERTALESTLAPVVEDEAMPFDLVEALISDAAQVWDFADESQKRRILQSLVSRIVLTDDDVKIEWAF

SEQ ID NO: 7661 - protein, 466 aa, Unknown
  Description of Unknown: Integrase B7662 sequence
  PTHR30461:SF3,IPR036162,PS51737,IPR011109,PTHR30461, PS00397,PF00239,G3DSA:1.10.10.2600,IPR006119,SSF53041, cd00338,SM00857,IPR025827,IPR038109,PS51736, IPR006118,PF13408,G3DSA:3.40.50.1390,Coil
MEKIIKKIIRVVLYIRVSSEEQARWGYSLEAQKERLIEYCKEKGYKIIAIYIDAGKTARTKIKNRKELMKLVDDSKKDMFDRVIIWKLDRWFRNVADYYKIQEVLESNNVDWECSDEDYNTTTAQGRYALNLKLADAQNESDKTSERIKFVNKSMVQNKRPIQGSQCFPMGLKVVGEKRNKKVVKDEEKEVVVNDMFDSIENTMCLRQTLIYINNKYDLTIRYANMKSYLRNTLYYGFYRGVEDYCPAYLTKERWDRIQEILDKNSKDNKNKFSYIFSGLVRCKKCGCSMSGCTHRNIRINKSGKRVINDYPYYRCNKANTSALCENKKRLSQNKLEKWLLEHFHEELAKEIDSIESITEEKKPTKKIDVEKVRAKIERLNDLYIIGRITKEKYDSDYKKYNEEIESANIIKEEVGDLSKYKEILANNSVLDIYNKLNDNAKRVFWSNYIDYIIQDDVNEFKIIFK

SEQ ID NO: 7662 - protein, 466 aa, Unknown
  Description of Unknown: Integrase B7663 sequence
  PTHR30461:SF3,IPR036162,PS51737,IPR011109,PTHR30461, PS00397,PF00239,G3DSA:1.10.10.2600,IPR006119,SSF53041, SM00857,IPR025827,IPR038109,PS51736,cd03768, IPR006118,PF13408,G3DSA:3.40.50.1390,PF07508,Coil
MNRAALYIRVSTLEQAQEGYSVGEQKERLIAYCKAKDWIIADIYVDGGYTGSNLNRPGIQKLISETDKFDLVLVYKLDRLSRSQRDTLYLIEEIFRPKGVDFISMQESFDTSTPFGKAMIGLLAVFAQLEREQIKERTWMGRVARAKTGLHHGGGYIPIGYEYEDGHLVINPYEAEQVRKIYEWYLAGASLKTITDRLQEAGYTNKYSSYTSWSSVRNILGNETYTGRLHFGDVVVDHAHEAIISTEQFNAAQVLRGKKQEQYGTAFQSKHLLTGLIFCGHCGGRYYLRNTGKYTYYACYSRTKQIKSMVKDPNCKNKIWKGSELEPIIDAKIRELLSSPQMAAEIAAARKPKPATGSRNTEVEKRLREIDKQIGKLMELYQHDDIPAELLGERINKLYNERTALESSLTPVVEDEVTPFDLAEALISDAAQVWDFADENQKRRILQSLISRIVLTDDDVKIEWAF

SEQ ID NO: 7663 - protein, 466 aa, Unknown
  Description of Unknown: Integrase B7664 sequence
  PTHR30461:SF3,IPR036162,PS51737,IPR011109,PTHR30461, PS00397,PF00239,G3DSA:1.10.10.2600,IPR006119,SSF53041, SM00857,IPR025827,IPR038109,PS51736,cd03768, IPR006118,PF13408,G3DSA:3.40.50.1390,PF07508,Coil
MNRAALYIRVSTLEQAQEGYSVGEQKERLIAYCKAKDWIIADIYVDGGYTGSNLNRPGIQKLISETDKFDLVLVYKLDRLSRSQRDTLYLIEEVFRPKGVDFISMQESFDTSTPFGKAMIGLLAVFAQLEREQIKERTWMGRVARAKTGLHHGGGHIPIGYEYEDGHLVINPYEAEQVRKIYEWYLAGDSLKTITDKLQEVGYTNKYSSYNSWTSVRNILGNETYTGRLHFGDVIVDNAHEPIISKEQFDAAQVLRGKRQEQYGGQAFQSKHLLAGLIYCGHCGGRYYLRNTGKYSYYACYSRTKQMKSMVKDPNCMNKIWKGAELEAIVDAQIRELLSSPEMAAEITTSRSKPAPVSKNADIEKRLREIDKQIGKLMELYQHDDIPPELLGERINKLYNERTALESTLAPVVEDEAMPFDLVEALISDAAQVWDFADESQKRRILQSLVSRIVLTDDDVKIEWAF

SEQ ID NO: 7664 - protein, 466 aa, Unknown
  Description of Unknown: Integrase B7665 sequence
  PTHR30461:SF3,IPR036162,PS51737,IPR011109,PTHR30461, PS00397,PF00239,G3DSA:1.10.10.2600,IPR006119,SSF53041, SM00857,IPR025827,IPR038109,PS51736,cd03768, IPR006118,PF13408,G3DSA:3.40.50.1390,PF07508,Coil
MNRAALYIRVSTLEQAQEGYSVGEQKERLIAYCKAKDWIIADIYVDGGYTGSNLNRPGIQKLISETDKFDLVLVYKLDRLSRSQRDTLYLIEEVFRPKGVDFISMQESFDTSTPFGKAMIGLLAVFAQLEREQIKERTWMGRVARAKTGLHHGGGHIPIGYEYEDGHLVINPYEAEQVRKIYEWYLSGDSLKTITDKLQEAGYTNKYSSYNSWTSVRNILGNETYTGRLHFGDVIVDNAHEPIISKEQFDTAQVLRGKRQEQYGGQAFQSKHLLAGLIYCGHCGGRYYLRNTGKYSYYACYSRTKQMKSMVKDPNCMNKIWKGAELEAIVDAQIRELLSSPEMAAEIATSRSKPAPVSKNADIEKRLREIDKQIGKLMELYQHDDIPPELLGERINKLYNERTALESTLAPVVEDEAMPFDLVEALISDAAQVWDFADESQKRRILQSLVSRIVLTDDDVKIEWAF

SEQ ID NO: 7665 - protein, 466 aa, Unknown
  Description of Unknown: Integrase B7666 sequence
  PTHR30461:SF3,IPR036162,PS51737,IPR011109,PTHR30461, PS00397,PF00239,G3DSA:1.10.10.2600,IPR006119,SSF53041, SM00857,IPR025827,IPR038109,PS51736,cd03768, IPR006118,PF13408,G3DSA:3.40.50.1390,PF07508,Coil
MNRAALYIRVSTLEQAQEGYSVGEQKERLIAYCKAKDWIIADIYVDGGYTGSNLNRPGIQKLISETDKFDLVLVYKLDRLSRSQRDTLYLIEEVFRPKGVDFISMQESFDTSTPFGKAMIGLLAVFAQLEREQIKERTWMGRVARAKTGLHHGGGHIPIGYEYEDGHLVINPYEAEQVRKIYEWYLAGDSLKTITDKLQEVGYTNKYSSYNSWTSVRNILGNETYTGRLHFGDVTVDNAHEPIITKEQFDAAQVLRGKRQEQYGGQAFQSKHLLAGLIYCGHCGGRYYLRNTGKYSYYACYSRTKQMKSMVKDPNCKNKIWKGAELEAIVDARIRELLSSPEMAAEIATSRSKPAPVSKNADIEKRLREIDKQIGKLMELYQHDDIPPELLGERINKLYNERTALESTLAPVVEDEAMPFDLVEALISDAAQVWDFADESQKRRILQSLVSRIVLTDDDVQIEWAF

SEQ ID NO: 7666 - protein, 466 aa, Unknown
  Description of Unknown: Integrase B7667 sequence
  PTHR30461:SF3,IPR036162,PS51737,IPR011109,PTHR30461, PS00397,PF00239,G3DSA:1.10.10.2600,IPR006119,SSF53041, SM00857,IPR025827,IPR038109,PS51736,cd03768, IPR006118,PF13408,G3DSA:3.40.50.1390,PF07508,Coil
MNRAALYIRVSTLEQAQEGYSVGEQKERLIAYCKAKDWIIADIYVDGGYTGSNLNRPGIQKLISETDKFDLVLVYKLDRLSRSQRDTLYLIEEVFRPKGVDFISMQESFDTSTPFGKAMIGLLAVFAQLEREQIKERTWMGRVARAKTGLHHGGGHIPIGYEYEDGHLVINPYEAKQVRKIYEWYLAGDSLKTITDKLQEAGYMNKYSSYNSWTSVRNILGNETYTGRLHFGDVIVDNAHEPIISKEQFDAAQVLRGKRQEQYGGQAFQSKHLLAGLIYCGHCGGRYYLRNTGKYSYYACYSRTKQMKSMVKDPNCMNKIWKGAELEAIVDARIRELLSSPEMAAEIAASRSKPTPVSKNADIEKRLREIDKQIGKLMELYQHDDIPPELLGERINKLYNERTALESTLAPVVEDEAMPFDLVEALISDAAQVWDFADESQKRRILQSLVSRIVLTDDDVKIEWAF

SEQ ID NO: 7667 - protein, 466 aa, Unknown
  Description of Unknown: Integrase B7668 sequence
  PTHR30461:SF3,IPR036162,PS51737,IPR011109,PTHR30461, PS00397,PF00239,G3DSA:1.10.10.2600,IPR006119,SSF53041, SM00857,IPR025827,IPR038109,PS51736,cd03768, IPR006118,PF13408,G3DSA:3.40.50.1390,PF07508,Coil
MNRAALYIRVSTLEQAQEGYSVGEQKERLIAYCKAKDWIIADIYVDGGYTGSNLNRPGIQKLISETDKFDLVLVYKLDRLSRSQRDTLYLIEEVFRPKGVDFISMQESFDTSTPFGKAMIGLLAVFAQLEREQIKERTWMGRVARAKTGLHHGGGHIPIGYEYEDGHLVINPYEAEQVRKIYEWYLAGDSLKTITDKLQEAGYTNKYSSYNSWTSVRNILGNETYTGRLHFGDVIVDNAHEPIISKEQFDAAQVLRGKRQEQYGGQAFQSKHLLAGLIYCGHCGGRYYLRNTGKYSYYACYSRTKQMKSMVKDPNCMNKIWKGAELEAIVDAQIRELLSSPEMAAEIATSRSKPAPVSKNADIEKRLREIDKQIGKLMELYQHDDIPPELLGERINKLYNERTALESTLAPVVEDEAMPFDLVEALISDAAQVWDFADESQKRRILQSLISRIVLTDDDVKIEWAF

SEQ ID NO: 7668 - protein, 466 aa, Unknown
  Description of Unknown: Integrase B7669 sequence
  PTHR30461:SF3,IPR036162,PS51737,IPR011109,PTHR30461, PS00397,PF00239,G3DSA:1.10.10.2600,IPR006119,SSF53041, SM00857,IPR025827,IPR038109,PS51736,cd03768, IPR006118,PF13408,G3DSA:3.40.50.1390,PF07508,Coil
MNRAALYIRVSTLEQAQEGYSVGEQKERLIAYCKAKDWIIADIYVDGGYTGSNLNRPGIQKLISETDKFDLVLVYKLDRLSRSQRDTLYLIEEVFRPKGVDFISMQESFDTSTPFGKAMIGLLAVFAQLEREQIKERTWMGRVARAKTGLHHGGGHIPIGYEYEDGHLVINPYEAEQVRKIYEWYLAGDSLKTITDKLQEAGYTNKYSSYNSWTSVRNILGNETYTGRLHFGDVIVDNAHEPIISKEQFDAAQVLRGKRQEQYGGQAFQSKHLLAGLIYCGHCGGRYYLRNTGKYSYYACYSRTKQMKSMVKDPNCMNKIWKGAELEAIVDARIRELLSSPEMAAEIATSRSKPAPVSKNADIEKRLREIDKQIGKLMELYQHDDIPPELLGERINKLYNERTALESTLAPVVEDEAMPFDLVEALISDAAQVWDFADESQKRRILQSLVSRIVLTDDDVKIEWAF

SEQ ID NO: 7669 - protein, 466 aa, Unknown
  Description of Unknown: Integrase B7670 sequence
  PTHR30461:SF3,IPR036162,PS51737,IPR011109,PTHR30461, PS00397,PF00239,G3DSA:1.10.10.2600,IPR006119,SSF53041, SM00857,IPR025827,IPR038109,PS51736,cd03768, IPR006118,PF13408,G3DSA:3.40.50.1390,PF07508,Coil
MNRAALYIRVSTLEQAQEGYSVGEQKERLIAYCKAKDWIIADIYVDGGYTGSNLNRPGIQKLISETDKFDLVLVYKLDRLSRSQRDTLYLIEEVFRPKGVDFISMQESFDTSTPFGKAMIGLLAVFAQLEREQIKERTWMGRVARAKTGLHHGGGHIPIGYEYEDGHLVINPYEAEQVRKIYEWYLAGDSLKTITDKLQEVGYTNKYSSYNSWTSVRNILGNETYTGRLHFGDVIVDSAHEPIISKEQFDAAQVLRGKRQEQYGGQAFQSKHLLAGLIYCGHCGGRYYLRNTGKYSYYACYSRTKQMKSMVKDPNCMNKIWKGAELEAIVDAQIRELLSSPEMAAEIATSRSKPAPVSKNADIEKRLREIDKQIGKLMELYQHDDIPPELLGERINKLYNERTALESTLAPVVEDEAMPFDLVEALISDAAQVWDFADESQKRRILQSLVSRIVLTDDDVKIEWAF

SEQ ID NO: 7670 - protein, 466 aa, Unknown
  Description of Unknown: Integrase B7671 sequence
  PTHR30461:SF3,IPR036162,PS51737,IPR011109,PTHR30461, PS00397,PF00239,G3DSA:1.10.10.2600,IPR006119,SSF53041, SM00857,IPR025827,IPR038109,PS51736,cd03768, IPR006118,PF13408,G3DSA:3.40.50.1390,PF07508,Coil
MPQKTLVFGYVRVSTENQLENYSIEEQISRLKSYCAAKDMVLLKIYTDGGYSGGNTDRPALKQMLADIKTVNVDAVLVYKLDRLSRSQKDTLTLIEDEFLAHDVDFISINENFDTSTPFGKAMIGMLSVFAQLEKDQITERFTMGRIGRCKAGYFHGGGNAPYGYTYENGDLVINYTEAENVKKVYSMFLSGKSINAIYREMENINGKGWSARKVSNILSNVIYIGKVKFAKNEYDGNHEPIISADTFEAAQKLLNSPDRENAKTSAQKTPFRANYLLSSLVYCSRCGARYSANHGYYKCYSRSKSSKQFITDPNCKNDNWKIEELDKLVLSEIYNLIKKPQLINKLASKAKQNNTPYDRKKLEKRLRELERQMENLLDLYQLGNIPMELLSTRIHNIDVEKGIIQKQLETSSGNSSTSIEAFKASLASFSELFDISPIETQRLIVSSLIQAVNVDGQQVSVVWRI

SEQ ID NO: 7671 - protein, 466 aa, Unknown
  Description of Unknown: Integrase B7672 sequence
  PTHR30461:SF3,IPR036162,PS51737,IPR011109,PTHR30461, PS00397,PF00239,G3DSA:1.10.10.2600,IPR006119,SSF53041, SM00857,IPR025827,IPR038109,PS51736,cd03768, IPR006118,PF13408,G3DSA:3.40.50.1390,PF07508,Coil
MNRAALYIRVSTLEQAQEGYSVGEQKERLIAYCKAKDWIIADIYVDGGYTGSNLNRPGIQKLISETDKFDLVLVYKLDRLSRSQRDTLYLIEEVFRPKGVDFISMQESFDTSTPFGKAMIGLLAVFAQLEREQIKERTWMGRVARAKTGLHHGGGHIPIGYEYEDGHLVINPYEAEQVRKIYEWYLAGDSLKTITDKLQEAGYTNKYSSYNSWTSVRNILGNETYTGRLHFGDVIVDNAHEPIISKEQFDAAQVLRGKRQEQYGGQAFQSKHLLAGLIYCGHCGGRYYLRNTGKYSYYACYSRTKQMKSMVKDPNCMNKIWKGAELEAIVDARIRELLSSPEMSAEIAASRSKPTPVSKNADIEKRLREIDKQIGKLMELYQHDDIPPELLGERINKLYNERTALESTLAPVVEDEAMPFDLVEALISDAAQVWDFADESQKRRILQSLVSRIVLTDDDVKIEWAF

SEQ ID NO: 7672 - protein, 466 aa, Unknown
  Description of Unknown: Integrase B7673 sequence
  PTHR30461:SF3,IPR036162,PS51737,IPR011109,PTHR30461, PS00397,PF00239,G3DSA:1.10.10.2600,IPR006119,SSF53041, SM00857,IPR025827,IPR038109,PS51736,cd03768, IPR006118,PF13408,G3DSA:3.40.50.1390,PF07508
MMKGACYVRVSTENQLENYSIEEQTERLTAYCKAKDITIVKFYTDGGYSGGNVNRPGLQQMLGDIAAGIIDTVIVYKLDRLSRSQKDTLMLIEDKFLANHVDFVSINENFDTSTPFGRAMIGILSVFAQLEKDQITERFTMGRVGRARNGYFHGGAYAPTGYDYADGNLVVNEYEALQVRELYERFASGHTLHSCWIYMQDKYTTKYGGWKSETLVRNVLKNEVYLGKVKFKGKLYSGNHTPIISQDLYDRVQQMFLNSSKSDAAQTGRTYTRSPFKAKTLLSNLIYCQKCGARFHGEHGNYSCYSRTKGDKRYVIDPDCKNKKWKIEELDALVIHYITNLDFNELQPEPDALQEQQPLKPDYNARITEIDKQVEKLIELYQIGGIPINVISERIQSLAKEKNTLTEILEAPQPEALTLQDLRAAKDRFVNLLESGDLQEKRYCLTILIDKILIDDDAINIILRKI

SEQ ID NO: 7673 - protein, 465 aa, Unknown
  Description of Unknown: Integrase B7674 sequence
  PTHR30461:SF3,SM00857,G3DSA:1.10.10.2600,IPR036162,PF13408, PS51737,G3DSA:3.40.50.1390,IPR025827,IPR006119,IPR038109, PF07508,IPR011109,SSF53041,PTHR30461,PS51736, cd00338,PF00239
MKGNAGDTIVKKIDLSPELVRVALYIRVSGEEQKIKGLSLEAQQERLEAYARERGWVIVGIYIDAAKTARKNIHKRTDFQRMMDSVKRDEVDILLFCRLDRWFRSVADYYKIMEVLEAHNCDWKTTDEEYDTTTANGRLYINVKLSIAQNEADIDGERIDVVFDSKIAHGTVVSGSAPFGFRVNEEKRLEVVPEDAAIVQDAFNYFETSISQRATVRYIRETYGVNWCDATFRRMLKEKLYTGVYDRGGRFNDHFCPAIISKQQFDRVQALLERNARSVPSGKVYIFTSILTCAECGHKLVGYKSSDYYYYRCNQHFQRGRCSHNHSAREDVVEKWLFEHLVEELERCQLEWEVAAAKKKASVARTDKAALKRKLTKLKELYVNDLIDIEDYKRDYQIYTAALKQIPEPSIEPPPDFAAVRRLLDNDFKTIYENLTREEKRTLWRSVIKEIRIDNDQNITGVVFG

SEQ ID NO: 7674 - protein, 465 aa, Unknown
  Description of Unknown: Integrase B7675 sequence
  PTHR30461:SF3,IPR036162,PS51737,IPR011109,PTHR30461, PS00397,PF00239,G3DSA:1.10.10.2600,IPR006119,SSF53041, SM00857,IPR025827,IPR038109,PS51736,cd03768, IPR006118,PF13408,G3DSA:3.40.50.1390,PF07508
MIKGACYVRVSTENQLENYSIEEQTERLTAYCKAKDITIVKFYTDGGYSGGNVNRPGLQQMLGDIAAGIIDTVIVYKLDRLSRSQKDTLMLIEDKFLANHVDFVSINENFDTSTPFGRAMIGILSVFAQLEKDQITERFTMGRVGRARNGYFHGGAYAPTGYDYADGNLVVNEYEALQVRELYERFASGHTLHSCWIYMQDKYTTKYGGWKSETLVRNVLKNEVYLGKVKFKGKLYSGNHTPIISQDLYDRVQQMFLNSSKSDAAIGRTYTRSPFKAKTLLSNLIYCQKCGARFHGEHGNYSCYSRTKGDKRYVIDPDCKNKKWKIEELDALVIHYITNLDFNELQPEPDALQEHQPLKPDYKARITEIDKQVEKLIELYQIGGIPINVISERIQSLAKEKNTLTEILEAPQPEALTLQDLRAAKDRFVNLLESGDLQEKRYCLTILIDKILIDDDAINIILRKI

SEQ ID NO: 7675 - protein, 465 aa, Unknown
  Description of Unknown: Integrase B7676 sequence
  PTHR30461:SF3,SM00857,G3DSA:1.10.10.2600,IPR036162,PF13408, PS51737,IPR025827,G3DSA:3.40.50.1390,IPR006119,IPR038109, PF07508,IPR011109,SSF53041,PTHR30461,PS51736, cd00338,PF00239
MKGNAGDTIVKKIDLSPELVRVALYIRVSGEEQKIKGLSLEAQQERLEAYARERGWVIVGIYIDAAKTARKNIHKRTDFQRMMDSVKRDEVDILLFCRLDRWFRSVADYYKIMEVLEAHNCDWKTTDEEYDTTTANGRLYINVKLSIAQNEADIDGERIDVVFDSKIAHGTVVSGSAPFGFRVNEGKRLEVVPEDAAIVQDAFNYFETSISQRATVRYIRETYGVNWCDATFRRMLKEKLYTGVYDRGGRFNDHFCPAIISKQQFDRVQALLERNARSVPSGKVYIFTSILTCAECGHKLVGYKSSDYYYYRCNQHFQRGRCSHNHSAREDVVEKWLFEHLAEELERCQLEWEVAAAKKKASVARTDKAALKRKLTKLKELYVNDLIDIEDYKRDYQIYTAALKQIPEPSIEPPPDFAAVRRLLDNDFKTIYENLTREEKRTLWRSVIKEIRIDNDQNITGVVFG

SEQ ID NO: 7676 - protein, 465 aa, Unknown
  Description of Unknown: Integrase B7677 sequence
  PTHR30461:SF3,SM00857,G3DSA:1.10.10.2600,IPR036162,PF13408, IPR025827,G3DSA:3.40.50.1390,PS51737,IPR006119,IPR038109, PF07508,SSF53041,IPR011109,PTHR30461,Coil, PS51736,cd00338,PF00239
MKRAKAYMRMSTDKQEHSIESQWRLIKEFADRNGYTIVGKYEDEGISGRAAEKRPAFMQMIDDSDSGDFDTVLIYDSSRFARNLKDAIVYKSILKQNGVDLISITEPILDDDNALITDALLGAMNEMYSRKLSKNVRRGQEQKILRGEVFTKPPFGYIRPAPGATFEIVPDEAKIVEYIFDQYRDGKTAFRLAVELSGAGVMTRRGNPFDSRQVEYILTNVIYKGYMRVKSNGTEYCIKADHPAIIPEDVFDRTQELYADRKSKLGKKQMPREMHRHWLSGKIRCGVCGGAYSYNRSYGGRKDNFRCTNRMKGKCMQSPCIRVPILENLFLQALHDTIKNPELFDAFLIPSECPVTRDYDADIRRLTLSLKRAKDAYLSGIDSLEEYKTNKKHFESEIAKTKEEKEKSSLPPKPDFDRLRERLLSAYHLLTSDADLEAKQACMENLVSKIIINGPDKSITPCFYY

SEQ ID NO: 7677 - protein, 465 aa, Unknown
  Description of Unknown: Integrase B7678 sequence
  PTHR30461:SF3,SM00857,G3DSA:1.10.10.2600,IPR036162,PF13408, PS51737,IPR025827,G3DSA:3.40.50.1390,IPR006119,IPR038109, PF07508,IPR011109,SSF53041,PTHR30461,PS51736, cd00338,PF00239
MKGNAGDTIVKKIDLSPELVRVALYIRVSGEEQKIKGLSLEAQQERLEAYARERGWVIVGIYIDAAKTARKNIHKRTDFQRMMDSVKRDEVDILLFCRLDRWFRSVADYYKIMEVLEAHNCDWKTTDEEYDTTTANGRLYINVKLSIAQNEADIDGERIDVVFDSKIAHGTVVSGSAPFGFRVNEEKRLEVVPEDAAIVQDAFNYFETSISQRATVRYIRETYGVNWCDATFRRMLKEKLYTGVYDRGGRFNDHFCPAIISKQQFDRVQALLERNARSVPSGKVYIFTSILTCAECGHKLVGYKSSDYYYYRCNQHFQRGRCSHNHSAREDVVEKWLFEHLAEELERCQLEWEVAAAKKKASVARTDKAALKRKLTKLKELYVNDLIDIEDYKRDYQIYTAALKQIPEPSIEPPPDFAAVRRLLDNDFKTIYENLTREEKRTLWRSVIKEIRIDNDQNITGVVFG

SEQ ID NO: 7678 - protein, 465 aa, Unknown
  Description of Unknown: Integrase B7679 sequence
  PTHR30461:SF3,SM00857,G3DSA:1.10.10.2600,IPR036162,PF13408, PS51737,G3DSA:3.40.50.1390,IPR025827,IPR006119,IPR038109, PF07508,IPR011109,SSF53041,PTHR30461,PS51736, cd00338,PF00239
MKGNAGDTIVKKIDLSPELVRVALYIRVSGEEQKIKGLSLEAQQERLEAYARERGWVIVGIYIDAAKTARKNIHKRTEFQRMMDSVKRDEVDILLFARLDRWFRSVADYYKVMEILQAHNCDWKTTDEEYDTTTANGRLYINVKLSIAQNEADIDGERIDVVFDSKIAHGTVVSGSAPFGFRVNEEKRLEVVPEDAAIVQDAFNYFESTVSQRATVRYVRETYGVNWCDATFRRMLKEKLYTGVYDRGGRYNDQFCPAIINRQQFDRVQALLTRNVRSAPSGKVYIFTSILTCAECGHKLVGYKSSDYFYYRCNQHFQRGRCSHNHSAREDVVEQWLFEHLGEELERCQLEWDVEATKKKASVARTDKAALKRKLTKLKELYVNDLIDIEDYKKDYQIYVSALNQIPEPAQEAPPDFAAVRRLLDNSFRTIYDTLTREEKRTLWRSVIKEIRIDNDQNITGVVFG

SEQ ID NO: 7679 - protein, 465 aa, Unknown
  Description of Unknown: Integrase B7680 sequence
  PTHR30461:SF3,SM00857,G3DSA:1.10.10.2600,IPR036162,PF13408, PS51737,G3DSA:3.40.50.1390,IPR025827,IPR006119,IPR038109, PF07508,IPR011109,SSF53041,PTHR30461,PS51736, cd00338,PF00239
MKGNAGDTIVKKIDLSPELVRVALYIRVSGEEQKIKGLSLEAQQERLEAYARERGWVIVGIYIDAAKTARKNIHKRTDFQRMMDSVKRDEVNILLFCRLDRWFRSVADYYKIMEVLEAHNCDWKTTDEEYDTTTANGRLYINVKLSIAQNEADIDGERIDVVFDSKIAHGTVVSGSAPFGFRVNEEKRLEVVPEDAAIVQDAFNYFETSISQRATVRYIRETYGVNWCDATFRRMLKEKLYTGVYDRGGRFNDHFCPAIISKQQFDRVQALLERNARSVPSGKVYIFTSILTCAECGHKLVGYKSSDYYYYRCNQHFQRGRCSHNHSAREDVVEKWLFEHLAEELERCQLEWEVAAAKKKASVARTDKAALKRKLTKLKELYVNDLIDIEDYKRDYQIYTAALKQIPEPSIEPPPDFAAVRRLLDNDFKTIYENLTREEKRTLWRSVIKEIRIDNDQNITGVVFG

SEQ ID NO: 7680 - protein, 465 aa, Unknown
  Description of Unknown: Integrase B7681 sequence
  PTHR30461:SF3,SM00857,IPR006118,IPR036162,PF13408, PS51737,G3DSA:3.40.50.1390,Coil,IPR025827,IPR006119, IPR011109,SSF53041,PTHR30461,PS00397,PS51736, cd00338,PF00239
MPEKILRCAIYIRVSTFEQSVHGKSLQAQKECLEQYATDNNMSIVGVYADEGKTARKELKKRKAIHALVEDVKRDKIDVIIFWRLDRWFRNLSDFYKVQDVLDEHGVRWISVSEPGINMETRDGRLQLNVVLSIGQNEVDTTSERIKFVNEASIRQRKLIFGDANMPFGYKTGVVDGKKCMVKDPETEHMVEDFFNYFRIHNSKKGAVRYMQEVYGIDFSYGMLRTMLSSEFYKGTYRGYPYCPAYLSEKEWNEMQTISKRNIKSTPSGRVYLFTGLMRCPVCGQKLVGTGCSSIINRKTGEKRTYCYYRCNRALKDHICTYRHRVSQNLIEKYLLENLEREYEKYKVRTNQISEELKKQKKAKDPKKLRKEMERLNLLFQKGRISFEYYDTEYNRLEEEYVHSSNPCQQKEEARNTRYIEELLQTDFRQMYNSLSLENRRSFWRSTIQEIYLNDDNTIKAVDFL

SEQ ID NO: 7681 - protein, 465 aa, Unknown
  Description of Unknown: Integrase B7682 sequence
  PTHR30461:SF3,SM00857,G3DSA:1.10.10.2600,IPR036162,PF13408, PS51737,IPR025827,G3DSA:3.40.50.1390,IPR006119,IPR038109, PF07508,IPR011109,SSF53041,PTHR30461,PS51736, cd00338,PF00239
MKGNAGDTIVKKIDLSPELVRVALYIRVSGEEQKIKGLSLEAQQERLEAYARERGWVIVGIYIDAAKTARKNIHKRTDFQRMMDSVKRDEVDILLFCRLDRWFRSVADYYKIMEVLEAHNCDWKTTDEEYDTTTANGRLYINVKLSIAQNEADIDGERIDVVFDSKIAHGTVVSGSAPFGFRVNEGKRLEVVPEDAAIVQDAFNYFETSISQRATVRYIRETYGVNWCDATFRRMLKEKLYTGVYDRGGRFNDHFCPAIISKQQFDRVQALLERNARSVPSGKVYIFTSILTCAECGHKLVGYKSSDYYYYRCNQHFQRGRCSHNHSAREDVVEKWLFEHLAEELECCQLEWEVAAAKKKASVARTDKAALKRKLTKLKELYVNDLIDIEDYKRDYQIYTAALKQIPEPSIEPPPDFAAVRRLLDNDFKTIYENLTREEKRTLWRSVIKEIRIDNDQNITGVVFG

SEQ ID NO: 7682 - protein, 465 aa, Unknown
  Description of Unknown: Integrase B7683 sequence
  PTHR30461:SF3,SM00857,G3DSA:1.10.10.2600,IPR036162,PF13408, PS51737,IPR025827,G3DSA:3.40.50.1390,IPR006119,IPR038109, PF07508,IPR011109,SSF53041,PTHR30461,PS51736, cd00338,PF00239
MKGNAGDTIVKKIDLSPELVRVALYIRVSGEEQKIKGLSLEAQQERLEAYARERGWVIVGIYIDAAKTARKNIHKRTDFQRMMDSVKRDEVDILLFCRLDRWFRSVADYYKIMEVLEAHNCDWKTTDEEYDTTTANGRLYINVKLSIAQNEADIDGERIDVVFDSKIAHGTVVSGSAPFGFRVNEEKRLEVVPEDAAIVQDAFNYFETSISQRATVRYIRETYGVNWCDATFRRMLKEKLYTGVYDRGGRFNDHFCPAIISKQQFDRVQALLERNARSAPSGKVYIFTSILTCAECGHKLVGYKSSDYYYYRCNQHFQRGRCSHNHSAREDVVEKWLFEHLAEELERCQLEWEVAAAKKKASVARTDKAALKRKLTKLKELYVNDLIDIEDYKRDYQIYTAALKQIPEPSIEPPPDFAAVRRLLDNDFKTIYENLTREEKRTLWRSVIKEIRIDNNQNITGVVFG

SEQ ID NO: 7683 - protein, 465 aa, Unknown
  Description of Unknown: Integrase B7684 sequence
  PTHR30461:SF3,SM00857,G3DSA:1.10.10.2600,IPR036162,PF13408, PS51737,G3DSA:3.40.50.1390,IPR025827,IPR006119,IPR038109, PF07508,SSF53041,IPR011109,PTHR30461,Coil, PS51736,cd00338,PF00239
MTNYRKLRVATYTRVSTLEQAEEGYSIQEQQDKLEKYCELKDWTITHRYSDPGFSGSNIKRPGIRELIAAAKQGDFDLVLVYKLDRLSRSQKDTLYLIEDVFQANQVDFVSLSENFDTSTPFGKAMIGILSVFAQLEREQIKERMTMGKIGRAKSGKAMGWSNVPFGYNLVGDVYEVDEFQATIVKRIFSEYLSGDSPITIAKRLNDEGHLGKGTRWSWKTVRDILMNIVYTGYISFKGELYPGMHKPIIDMETYKNAQTQLEIRRVNADNPRPFRAKYMLSGLLKCYYCGSTLRIGVSINQRTKARSYRYNCPSSHPRKKSTYKQKATCPSKLVRKGEIEKQVIEEIEKLPKNFKHKKAPTVDVDAVKKQIKAIKSKQSKLMDLYLIDGIDMEELNRRNGEFNKQIEALNKNLSAVPTEPDVAEALSQAKNISELSYDEQKKLVRLLISEIEVANDSIKIHWRF

SEQ ID NO: 7684 - protein, 465 aa, Unknown
  Description of Unknown: Integrase B7685 sequence
  PTHR30461:SF3,SM00857,G3DSA:1.10.10.2600,IPR036162,PF13408, PS51737,IPR025827,G3DSA:3.40.50.1390,IPR006119,IPR038109, PF07508,IPR011109,SSF53041,PTHR30461,PS51736, cd00338,PF00239
MKGNAGDTIVKKIDLSPELVRVALYIRVSGEEQKIKGLSLEAQQERLEAYARERGWVIVGIYIDAAKTARKNIHKRTDFQRMMDSVKRDEVNILLFCRLDRWFRSVADYYKIMEVLEAHNCGWKTTDEEYDTTTANGRLYINVKLSIAQNEADIDGERIDVVFDSKIAHGTVVSGSAPFGFRVNEEKRLEVVPEDAAIVQDAFNYFETSISQRATVRYIRETYGVNWCDATFRRMLKEKLYTGVYDRGGRFNDHFCPAIISKQQFDRVQALLERNARSVPSGKVYIFTSILTCAECGHKLVGYKSSDYYYYRCNQHFQRGRCSHNHSAREDVVEKWLFEHLAEELERCQLEWEVAAAKKKASVARTDKAALKRKLTKLKELYVNDLIDIEDYKRDYQIYTAALKQIPEPSIEPPPDFAAVRRLLDNSFRTIYDTLTREEKRTLWRSVIKEIRIDNDQNITGVVFG

SEQ ID NO: 7685 - protein, 465 aa, Unknown
  Description of Unknown: Integrase B7686 sequence
  PTHR30461:SF3,IPR036162,PS51737,IPR011109,PTHR30461, PS00397,PF00239,G3DSA:1.10.10.2600,IPR006119,SSF53041, cd00338,SM00857,IPR025827,IPR038109,PS51736, IPR006118,PF13408,G3DSA:3.40.50.1390,Coil
MKGNYIETVAAYVRVSTQEQKLHGLSLDAQKMKLQEYADNHNMHIVEWYLDEGVSGRKLIKKRPALQQMINDAEQGKFTRIIFIKLDRFFRSVAEYHECMKRISPVVWTTTEEQYDLSTANGRMLVNMKLTIAELEADQTGERITLVNEYKRSTGQPLTGSMPLGYMIETDPATGRKKIVKNPDEAPIVEDLLQYTFTHQSKRKTLKYLKDKYNLGISYNTLSLLLKNTFLYGEYRGNTAYTEGYITKEQFLKLQDITRRNVKSNSDNEPYIFSGLIKCPYCGRRLAGRRATVKNPNGNIFKYKTYGCANNRSNFRCSFNKSIYESTLERLILDNIEQYFEELKVKNAEIQDSKTVKTQGESIDDINNQIDRLNYSWQTGKIRKVEQYEQQYNKLIERLKEAEKGQQEVVTRDYSKIDSILQSGWKGIYQALDAEHKRAFWRSFIQSIEVTWTTEIKRIDKVNFF

SEQ ID NO: 7686 - protein, 465 aa, Unknown
  Description of Unknown: Integrase B7687 sequence
  PTHR30461:SF3,SM00857,G3DSA:1.10.10.2600,IPR036162,PF13408, PS51737,G3DSA:3.40.50.1390,IPR025827,IPR006119,IPR038109, PF07508,IPR011109,SSF53041,PTHR30461,Coil, PS51736,cd00338,PF00239
MTSYRKLRVATYTRVSTLEQAEEGYSIQEQQDKLEKYCELKDWTITHRYSDPGFSGSNIKRPGIRELIAAAKQGDFDLVLVYKLDRLSRSQKDTLYLIEDVFQANQVDFVSLSENFDTSTPFGKAMIGILSVFAQLEREQIKERMTMGKIGRAKSGKAMGWSNVPFGYNLAGDVYEVDEFQATIVKRIFAEYLSGDSPVTIAKRLNDEGHLGKGTRWSWKTVRDILMNVVYTGYISFKGELYPGMHKPIIDMETYKNAQTQLEIRRVNADNPRPFRAKYMLSGLLKCHYCGSTLVIGVSINQRTKARSYRYNCPSSHPRKNSTYKQKASCPSKFIYKETVEKQVIEEIEKLPKNFKHKKAPTVDVDAVKKQIKTIKSKQSKLMDLYLIDGIDMEELNRRNDEFNKQIEALNKNLSTVPTEPDVTEALNQAKNISELSYDEQKKLVRLLISEIEVANDSIKIHWRF

SEQ ID NO: 7687 - protein, 465 aa, Unknown
  Description of Unknown: Integrase B7688 sequence
  PTHR30461:SF3,SM00857,G3DSA:1.10.10.2600,IPR036162,PF13408, PS51737,G3DSA:3.40.50.1390,IPR025827,IPR006119,IPR038109, PF07508,IPR011109,SSF53041,PTHR30461,PS51736, cd00338,PF00239
MKGNAGDTIVKKIDLSPELVRVALYIRVSGEEQKIKGLSLEAQQERLEAYARERGWVIVGIYIDAAKTARKNIHKRTDFQRMMDSVKRDEVNILLFCRLDRWFRSVADYYKIMEVLEAHNCDWKTTDEEYDTTTANGRLYINVKLSIAQNEADIDGERIDVVFDSKIAHGTVVSGSAPFGFRVNEEKRLEVVPEDAAIVQDAFNYFETSISQRATVRYIRETYGVNWCDATFRRMLKEKLYTGVYDRGGRFNDHFCPAIISKQQFDRVQALLERNARSVPSGKVYIFTSILTCAECGHKLVGYKSSDYYYYRCNQHFQRGRCSHNHSAREDVVEKWLFEHLAEELERCQLEWEVAAAKKKASVARTDKAALKRKLTKLKELYVNDLIDIEDYKRDYQIYTAALKQIPEPSIEPPPDFAAVRRLLDNDFKTIYENLTREEKRTLWRSAIKEIRIDNDQNITGVVFG

SEQ ID NO: 7688 - protein, 465 aa, Unknown
  Description of Unknown: Integrase B7689 sequence
  PTHR30461:SF3,SM00857,IPR006118,IPR036162,PF13408, PS51737,G3DSA:3.40.50.1390,IPR025827,PS00397,IPR006119, IPR011109,SSF53041,PTHR30461,Coil,PS51736, cd00338,PF00239
MPEKILRCAIYIRVSTFEQSVHGKSLQAQKEYLEHYAKEHNLSVVGVYADEGKTARKELKKRKAIHALIEDVKQEKIDVILFWRLDRWFRSLADFYKVQDVLDEYGVRWISASEPGINMETRDGRLQLNVVLSFGQNEVDTTSERIKFVNEASIKNGRLIFGEANMPFGYKSGVVDGKKCMIKDPETERMVIDFFRHYKKHQGKQDALKYMQRTYGIYFSYGMLKTMLSSEFYKGTYRGYPYCPAYLTEKEWNEIQEISVRNVKRAPSGRVYLFTSLMRCPSCGQKLVGTGCSSISNRKTGKKRTYCYYRCNKALADHLCPNRHRVSQNLIEQYLLENLSSEYEKYKIRSNKINEEKKKVRKAKNPAQLSKEMERLNLLFQKGRISFDYYDEEYQRLEEELAFAASDPSLEEPKRNYSELEKLLRTDFKEMYDSLSLENRRAFWRSIIKQIHLNDDCTIKEVDFL

SEQ ID NO: 7689 - protein, 465 aa, Unknown
  Description of Unknown: Integrase B7690 sequence
  PTHR30461:SF3,SM00857,G3DSA:1.10.10.2600,IPR036162,PF13408, PS51737,IPR025827,G3DSA:3.40.50.1390,IPR006119,IPR038109, PF07508,IPR011109,SSF53041,PTHR30461,PS51736, cd00338,PF00239
MKGNAGDTIVKKIDLSPELVRVALYIRVSGEEQKIKGLSLEAQQERLEAYARERGWVIVGIYIDAAKTARKNIHKRTDFQRMMDSVKRDEVDILLFCRLDRWFRSVADYYKIMEVLEAHNCDWKTTDEEYDTTTANGRLYINVKLSIAQNEADIDGERIDVVFDSKIAHGTVVSGSAPFGFRVNEGKRLEVVPEDAAIVQDAFNYFETSISQRATVRYIRETYGVNWCDATFRRMLKEKLYTGVYDRGGRFNDHFCPAIISKQQFDRVQALLERNARSVPSGKVYIFTSILTCAECGHKLVGYKSSDYYYYRCNQHFQRGRCSHNHSAREDVVEKWLFEHLTEELERCQLEWEVAAAKKKASVARTDKAALKRKLTKLKELYVNDLIDIEDYKRDYQIYTAALKQIPEPSIEPPPDFAAVRRLLDNDFKTIYENLTREEKRTLWRSVIKEIRIDNDQNITGVVFG

SEQ ID NO: 7690 - protein, 465 aa, Unknown
  Description of Unknown: Integrase B7691 sequence
  PTHR30461:SF3,SM00857,G3DSA:1.10.10.2600,IPR036162,PF13408, IPR025827,G3DSA:3.40.50.1390,PS51737,IPR006119,IPR038109, PF07508,IPR011109,SSF53041,PTHR30461,PS51736, cd00338,PF00239
MKGNAGDTIVKKIDLSPELVRVALYIRVSGEEQKIKGLSLEAQQERLEAYARERGWVIVGIYIDAAKTARKNIHKRTDFQRMMDSVKRDEVDILLFCRLDRWFRSVADYYKIMEVLEAHNCDWKTTDEEYDTTTANGRLYINVKLSIAQNEADIDGERIDVVFDSKIAHGTVVSGSAPFGFRVNEEKRLEVVPEDAAIVQDAFNYFETSISQRATVRYIRETYGVNWCDATFRRMLKEKLYTGVYDRGGRYNDQFCPAIISRQQFDRVQALLTRNVRSAPSGKVYIFTSILTCAECGHKLVGYKSSDYYYYRCNQHFQRGRCSHNHSAREDVVEKWLFEHLVEELERCQLEWEVAAAKKKASVARTDKAALKRKLTKLKELYVNDLIDIEDYKRDYQIYTAALKQIPEPSIEPSPDFAAVRRLLDNDFKTIYENLTREEKRTLWRSVIKEIRIDNDQNITGVVFG

SEQ ID NO: 7691 - protein, 465 aa, Unknown
  Description of Unknown: Integrase B7692 sequence
  PTHR30461:SF3,SM00857,G3DSA:1.10.10.2600,IPR036162,PF13408, IPR025827,G3DSA:3.40.50.1390,PS51737,IPR006119,IPR038109, PF07508,SSF53041,IPR011109,PTHR30461,PS51736, cd00338,PF00239
MKGNAGDTIVKKIDLSPELVRVALYIRVSGEEQKIKGLSLEAQQERLEAYARERGWVIVGIYIDAAKTARKNIHKRTDFQRMMDSVKRDEVDILLFCRLDRWFRSVADYYKIMEVLEAHNCDWKTTDEEYDTTTANGRLYINVKLSIAQNEADIDGERIDVVFDSKIAHGTVVSGSAPFGFRVNEEKQLEVVPEDAAIVQDAFNYFETSISQRATVRYIRETYGVNWCDATFRRMLKEKLYTGVYDRGGRFNDHFCPAIISKQQFDRVQALLERNARSVPSGKVYIFTSILTCAECGHKLVGYKSSDYYYYRCNQHFQRGRCSHNHSAREDVVEKWLFEHLAEELERCQLEWEVAAAKKKASIARTDKAALKRKLTKLKELYVNDLIDIEDYKRDYQIYTAALKQIPEPSIEPPPDFAAVRRLLDNDFKTIYENLTREEKRTLWRSVIKEIRIDNDQNITGVVFG

SEQ ID NO: 7692 - protein, 465 aa, Unknown
  Description of Unknown: Integrase B7693 sequence
  PTHR30461:SF3,SM00857,G3DSA:1.10.10.2600,IPR036162,PF13408, IPR025827,PS51737,G3DSA:3.40.50.1390,IPR006119,IPR038109, PF07508,IPR011109,SSF53041,PF00239,PTHR30461, PS51736,Coil,cd00338
MKGNAGDTIVKKIVLSPELVRVALYIRVSGEEQKIKGLSLEAQQERLEAYARERGWVIVGIYIDAAKTARKNIHKRTEFQRMMDSVKRDEVDILLFARLDRWFRSVADYYKVMEILQAHNCDWKTTDEEYDTTTANGRLYINVKLSIAQNEADIDGERIDVVFDSKIAHGTVVSGSAPFGFRVNEEKRLEVVPEDAAIVQDAFNYFENTVSQRATVRYVRETYGVNWCDATFRRMLKEKLYTGVYDRGGRYNDQFCPAIIDRQQFDRVQALLTRNVRSAPSGKVYIFTSILTCAECGHKLVGYKSSDYFYYRCNQHFQRGRCSHNHSAREDVVEQWLFEHLGEELERCQLEWDVEAAKKKASVARTDKAALKRKLTKLKELYVNDLIDIEDYKKDYQIYVSALNQIPEPAQEAPPDFAAVRRLLDNSFRTIYDTLTREEKRTLWRSVIKEIRIDNDQNITGVVFG

SEQ ID NO: 7693 - protein, 465 aa, Unknown
  Description of Unknown: Integrase B7694 sequence
  PTHR30461:SF3,SM00857,G3DSA:1.10.10.2600,IPR036162,PF13408, PS51737,IPR025827,G3DSA:3.40.50.1390,IPR006119,IPR038109, PF07508,IPR011109,SSF53041,PTHR30461,PS51736, cd00338,PF00239
MKGNAGDTIVKKIDLSPELVRVALYIRVSGEEQKIKGLSLEAQQERLEAYARERGWVIVGIYIDAAKTARKNIHKRTDFQRMMDSVERDEVDILLFCRLDRWFRSVADYYKIMEVLEAHNCDWKTTDEEYDTTTANGRLYINVKLSIAQNEADIDGERIDVVFDSKIAHGTVVSGSAPFGFRVNEEKRLEVVPEDAAIVQDAFNYFETSISQRATVRYIRETYGVNWCDATFRRMLKEKLYTGVYDRGGRFNDHFCPAIISKQQFDRVQALLERNARSVPSGKVYIFTSILTCAECGHKLVGYKSSDYYYYRCNQHFQRGRCSHNHSAREDVVEKWLFEHLAEELERCQLEWEVAAAKKKASIARTDKAALKRKLTKLKELYVNDLIDIEDYKRDYQIYTAALKQIPEPSIEPPPDFAAVRRLLDNDFKTIYENLTREEKRTLWRSVIKEIRIDNDQNITGVVFG

SEQ ID NO: 7694 - protein, 465 aa, Unknown
  Description of Unknown: Integrase B7695 sequence
  PTHR30461:SF3,SM00857,G3DSA:1.10.10.2600,IPR036162,PF13408, PS51737,IPR025827,G3DSA:3.40.50.1390,IPR006119,IPR038109, PF07508,IPR011109,SSF53041,PTHR30461,PS51736, cd00338,PF00239
MKGNAGDTIVKKIDLSPELVRVALYIRVSGEEQKIKGLSLEAQQERLEAYARERGWVIVGIYIDAAKTARKNIHKRTDFQRMMDSVKRDEVDILLFCRLDRWFRSVADYYKIMEVLEAHNCDWKTTDEEYDTTTANGRLYINVKLSIAQNEADIDGERIDVVFDSKIAHGTVVSGSAPFGFRVNEEKRLEVVPEDAAIVQDAFNYFETSISQRATVRYIRETYGVNWCDATFRRMLKEKLYTGVYDRGGRFNDHFCPAIISKQQFDRVQALLERNARSVPSGKVYIFTSILTCAECGHKLVGYKSSDYYYYRCNQHFQRGRCSHNHSAREDVVEKWLFEHLAEELERCQLEWEVAAAKKKASVARTDKAALKRKLTKLKELYVNDLIDIEDYKRDYQIYTAALKQIPEPSIEPPPDFAAVRKLLDNDFKTIYENLTREEKRTLWRSVIKEIRIDNDQNITGVVFG

SEQ ID NO: 7695 - protein, 465 aa, Unknown
  Description of Unknown: Integrase B7696 sequence
  PTHR30461:SF3,SM00857,G3DSA:1.10.10.2600,IPR036162,PF13408, IPR025827,G3DSA:3.40.50.1390,PS51737,IPR006119,IPR038109, PF07508,IPR011109,SSF53041,PTHR30461,PS51736, cd00338,PF00239
MKGNAGDTIVKKIDLSPELVRVALYIRVSGEEQKIKGLSLEAQQERLEAYARERGWVIVGIYIDAAKTARKNIHKRTDFQRMMDSVKRDEVDILLFCRLDRWFRSVADYYKIMEVLEAHNCDWKTTDEEYDTTTANGRLYINVKLSIAQNEADIDGERIDVVFDSKIAHGTVVSGSAPFGFRVNEGKRLEVVPEDAAIVQDAFNYFETSISQRATVRYIREAYGVNWCDATFRRMLKEKLYTGVYDRGGRFNDHFCPAIISKQQFDRVQALLERNARSVPSGKVYIFTSILTCAECGHKLVGYKSSDYYYYRCNQHFQRGRCSHNHSAREDVVEKWLFEHLAEELERCQLEWEVAAAKKKASVARTDKAALKRKLTKLKELYVNDLIDIEDYKRDYQIYTAALKQIPEPSIEPPPDFAAVRRLLDNDFKTIYENLTREEKRTLWRSVIKEIRIDNDQNITGVVFG

SEQ ID NO: 7696 - protein, 465 aa, Unknown
  Description of Unknown: Integrase B7697 sequence
  PTHR30461:SF3,SM00857,G3DSA:1.10.10.2600,IPR036162,PF13408, PS51737,G3DSA:3.40.50.1390,IPR025827,IPR006119,IPR038109, PF07508,IPR011109,SSF53041,PTHR30461,Coil, PS51736,cd00338,PF00239
MKGNAGDTIVKKIDLSPELVRVALYIRVSGEEQKIKGLSLEAQQERLEAYARERGWVIVGIYIDAAKTARKNIHKRTDFQRMMDSVKRDEVNILLFCRLDRWFRSVADYYKIMEVLEAHNCDWKTTDEEYDTTTANGRLYINVKLSIAQNEADIDGERIDVVFDSKIAHGTVVSGSAPFGFRVNEEKRLEVVPEDAAIVQDAFNYFETSISQRATVRYIRETYGVNWCDATFRRMLKEKLYTGVYDRGGRFNDHFCPAIISKQQFDRVQALLERNARSVPSGKVYIFTSILTCAECGHKLVGYKSSDYYYYRCNQHFQRGRCSHNHSAREDVVEKWLFEHLAEELERCQLEWEVAAAKKKASVARTDKAALKRKLAKLKELYVNDLIDIEDYKRDYQIYTAALKQIPEPSIEPPPDFAAVRRLLDNDFKTIYENLTREEKRTLWRSAIKEIRIDNDQNITGVVFG

SEQ ID NO: 7697 - protein, 465 aa, Unknown
  Description of Unknown: Integrase B7698 sequence
  PTHR30461:SF3,SM00857,G3DSA:1.10.10.2600,IPR036162,PF13408, PS51737,IPR025827,G3DSA:3.40.50.1390,IPR006119,IPR038109, PF07508,IPR011109,SSF53041,PTHR30461,PS51736, cd00338,PF00239
MKGNAGGTIVKKIDLSPELVRVALYIRVSGEEQKIKGLSLEAQQERLEAYARERGWVIVGIYIDAAKTARKNIHKRTDFQRMMDSVKRDEVDILLFCRLDRWFRSVADYYKIMEVLEAHNCDWKTTDEEYDTTTANGRLYINVKLSIAQNEADIDGERIDVVFDSKIAHGTVVSGSAPFGFRVNEGKRLEVVPEDAAIVQDAFNYFETSISQRATVRYIRETYGVNWCDATFRRMLKEKLYTGVYDRGGRFNDHFCPAIISKQQFDRVQALLERNARSVPSGKVYIFTSILTCAECGHKLVGYKSSDYYYYRCNQHFQRGRCSHNHSAREDVVEKWLFEHLAEELERCQLEWEVAAAKKKASVARTDKAALKRKLTKLKELYVNDLIDIEDYKRDYQIYTAALKQIPEPSIEPPPDFAAVRRLLDNDFKTIYENLTREEKRTLWRSVIKEIRIDNDQNITGVVFG

SEQ ID NO: 7698 - protein, 465 aa, Unknown
  Description of Unknown: Integrase B7699 sequence
  PTHR30461:SF3,SM00857,G3DSA:1.10.10.2600,IPR036162,PF13408, IPR025827,G3DSA:3.40.50.1390,PS51737,IPR006119,IPR038109, PF07508,SSF53041,IPR011109,PTHR30461,PS51736, cd00338,PF00239
MKGNAGDTIVKKIDLSPELVRVALYIRVSGEEQKIKGLSLEAQQERLEAYARERGWVIVGIYIDAAKTARKNIHKRTDFQRMMDSVKRDEVDILLFCRLDRWFRSVADYYKIMEVLEAHNCDWKTTDEEYDTTTANGRLYINVKLSIAQNEADIDGERIDVVFDSKIAHGTVVSGSAPFGFRVNEGKRLEVVPEDASIVQDAFNYFETSISQRATVRYIRETYGVNWCDATFRRMLKEKLYTGVYDRGGRFNDHFCPAIISKQQFDRVQALLERNARSVPSGKVYIFTSILTCAECGHKLVGYKSSDYYYYRCNQHFQRGRCSHNHSAREDVVEKWLFEHLAEELERCQLEWEVAAAKKKASVARTDKAALKRKLTKLKELYVNDLIDIEDYKRDYQIYTAALKQIPEPSIEPPPDFAAVRRLLDNDFKTIYENLTREEKRTLWRSVIKEIRIDNDQNITGVVFG

SEQ ID NO: 7699 - protein, 465 aa, Unknown
  Description of Unknown: Integrase B7700 sequence
  PTHR30461:SF3,SM00857,G3DSA:1.10.10.2600,IPR036162,PF13408, PS51737,IPR025827,G3DSA:3.40.50.1390,IPR006119,IPR038109, PF07508,IPR011109,SSF53041,PTHR30461,PS51736, cd00338,PF00239
MKGNAGDTIVKKIDLSPELVRVALYIRVSGEEQKIKGLSLEAQQERLEAYARERGWVIVGIYIDAAKTARKNIHKRTDFQRMMDSVKRDEVDILLFCRLDRWFRSVADYYKIMEVLEAHNCDWKTTDEEYDTTTANGRLYINVKLSIAQNEADIDGERIDVVFDSKIAHGTVVSGSAPFGFRVNEGKRLEVVPEDAAIVQDAFNYFETSISQRATVRYIRETYGVNWCDATFRRMLKEKLYTGVYDRGGRFNDHFCPAIISKQQFDRVQALLERNARSVPSGKVYIFTSILTCAECGHKLVGYKSSDYYYYRCNQHFQRGRCSHNHSAREDVVEKWLFEHLAEELERCQLEWEVAAAKKKASVARTDKAALKRKLTKLKELYVNDLIDIEDYKRDYQIYTAALKQIPEPSIEPPPDFAAVRRLLDNDFKTIYENLTREEKRTLWRSVIKEIRIDNDRNITGVVFG

SEQ ID NO: 7700 - protein, 465 aa, Unknown
  Description of Unknown: Integrase B7701 sequence
  PTHR30461:SF3,SM00857,IPR006118,IPR036162,PF13408, PS51737,G3DSA:3.40.50.1390,IPR025827,PS00397,IPR006119, IPR011109,SSF53041,PTHR30461,Coil,PS51736, cd00338,PF00239
MPEKILRCAIYIRVSTFEQSVHGKSLQAQKEYLEHYAKEHNMSVVGVYADEGKTARKELKKRKAIHALIEDVTQEKIDVILFWRLDRWFRSLADFYKVQDVLDEYGVRWISASEPGINMETRDGRLQLNVVLSFGQNEVDTTSERIKFVNEASIKNGRLIFGEANMPFGYKSGVVDGKKCMIKDPETERMVIDFFRHYKKHQGKQDALKYMQRTYGIYFSYGMLKTMLSSEFYKGTYRGYPYCPAYLTEKEWNEIQEISVRNVKRAPSGRVYLFTSLMRCPSCGQKLVGTGCSSISNRKTGKKRTYCYYRCNKALADHLCPNRHRVSQNLIEQYLLENLSSEYEKYKIRSNKINEEKKKVRKAKNPAQLSKEMERLNLLFQKGRISFDYYDEEYQRLEEELAFAASDPSLEEPKRNYSELEKLLRTDFKEMYDSLSLENRRAFWRSIIKQIHLNDDCTIKEVDFL

SEQ ID NO: 7701 - protein, 465 aa, Unknown
  Description of Unknown: Integrase B7702 sequence
  PTHR30461:SF3,SM00857,G3DSA:1.10.10.2600,IPR036162,PF13408, PS51737,G3DSA:3.40.50.1390,IPR025827,IPR006119,IPR038109, PF07508,IPR011109,SSF53041,PTHR30461,PS51736, cd00338,PF00239
MKGNAGDTIVKKIDLSPELVRVALYIRVSGEEQKIKGLSLEAQQERLEAYARERGWVIVGIYIDAAKTARKNIHKRTDFQRMMDSVKRDEVNILLFCRLDRWFRSVADYYKIMEVLEAHNCDWKTTDEEYDTTTANGRLYINVKLSIAQNEADIDGERIDVVFDSKIAHGTVVSGSAPFGFRVNEEKRLEVVPEDAAIVQDAFNYFETSISQRATVRYIRETYGVNWCDATFRRMLKEKLYTGVYDRGGRFNDHFCPAIISKQQFDRVQALLERNARSVPSGKVYIFTSILTCAECGHKLVGYKSSDYYYYRCNQHFQRGRCSHNHSAREDVVEKWLFEHLAEELERCQLEWEVAAAKKKASVARTDKAALKRKLTKLKELYVNDLIDIEDYKRDYQIYTAALKQIPEPSIEPPPDFAAVRRLLDNDFKTIYENLTREEKRTLWRSVIKEIRIDNDQNIAGVVFG

SEQ ID NO: 7702 - protein, 465 aa, Unknown
  Description of Unknown: Integrase B7703 sequence
  PTHR30461:SF3,SM00857,G3DSA:1.10.10.2600,IPR036162,PF13408, IPR025827,G3DSA:3.40.50.1390,PS51737,IPR006119,IPR038109, PF07508,SSF53041,IPR011109,PF00239,PTHR30461, PS51736,Coil,cd00338
MKGNAGDTIVKKIDLSPELVRVALYIRVSGEEQKIKGLSLEAQQERLEAYARERGWVIVGIYIDAAKTARKNIHKRTDFQRMMDSVKRDEVDILLFCRLDRWFRSVADYYKIMEVLEAHNCDWKTTDEEYDTTTANGRLYINVKLSIAQNEADIDGERIDVVFDSKIAHGTVVSGSAPFGFRVNEEKRLEVVPEDAAIVQDAFNYFETSISQRATVRYIRETYGVNWCDATFRRMLKEKLYTGVYDRGGRFNDHFCPAIISKQQFDRVQALLERNARSVPSGKVYIFTSILTCAECGHKLVGYKSSDYFYYRCNQHFQRGRCSHNHSAREDVVEQWLFEHLGEELDRCQLEWDVEAAKKKASVARTDKAALKRKLTKLKELYVNDLIDIEDYKKDYQIYVSALNQIPEPAQEAPPDFAAVRRLLDNSFRTIYDTLTREEKRTLWRSVIKEIRIDNDQNITGVVFG

SEQ ID NO: 7703 - protein, 465 aa, Unknown
  Description of Unknown: Integrase B7704 sequence
  PTHR30461:SF3,SM00857,G3DSA:1.10.10.2600,IPR036162,PF13408, PS51737,IPR025827,G3DSA:3.40.50.1390,IPR006119,IPR038109, PF07508,IPR011109,SSF53041,PTHR30461,PS51736, cd00338,PF00239
MKGNAGDTIVKKIDLSPELVRVALYIRVSGEEQKIKGLSLEAQQERLEAYARERGWVIVGIYIDAAKTARKNIHKRTDFQRMMDSVKRDEVDILLFCRLDRWFRSVADYYKIMEVLEAHNCDWKTTDEEYDTTTANGRLYINVKLSIAQNEADIDGERIDVVFDSKIAHGTVVSGSAPFGFRVNEEKRLEVVPEDAAIVQDAFNYFETSISQRATVRYIRETYGVNWCDATFRRMLKEKLYTGVYDRGGRFNDHFCPAIISKQQFDRVQALLERNARSVPSGKVYIFTSILTCAECGHKLVGYKSSDYYYYRCNQHFQRGRCSHNHSAREDVVEKWLFEHLAEELERCQLEWEVAAAKKKASIARTDKAALKRKLTKLKELYVNDLIDIEDYKRDYQIYTAALKQIPEPSIEPPPDFAAVRRLLDNDFKTIYENLTREEKRTLWRSVIKEIRIDNDQNITGVVFG

SEQ ID NO: 7704 - protein, 465 aa, Unknown
  Description of Unknown: Integrase B7705 sequence
  PTHR30461:SF3,SM00857,G3DSA:1.10.10.2600,IPR036162,PF13408, PS51737,G3DSA:3.40.50.1390,IPR025827,IPR006119,IPR038109, PF07508,IPR011109,SSF53041,PTHR30461,PS51736, cd00338,PF00239
MKGNAGDTIVKKIDLSPELVRVALYIRVSGEEQKIKGLSLEAQQERLEAYARERGWVIVGIYIDAAKTARKNIHKRTDFQRMMDSVKRDEVDILLFCRLDRWFRSVADYYKIMEVLEAHNCDWKTTDEEYDTTTANGRLYINVKLSIAQNEADIDGERIDVVFDSKIAHGTVVSGSAPFGFRVNEGKRLEVVPEDAAIVQDAFNYFETSISQRATVRYIRETYGVNWCDATFRRMLKEKLYTGVYDRGGRFNDHFCPAIISKQQFDRVQALLERNARSVPSGKVYIFTSILTCTECGHKLVGYKSSDYYYYRCNQHFQRGRCSHNHSAREDVVEKWLFEHLAEELERCQLEWEVAAAKKKASVARTDKAALKRKLTKLKELYVNDLIDIEDYKRDYQIYTAALKQIPEPSIEPPPDFAAVRRLLDNDFKTIYENLTREEKRTLWRSVIKEIRIDNDQNITGVVFG

SEQ ID NO: 7705 - protein, 465 aa, Unknown
  Description of Unknown: Integrase B7706 sequence
  PTHR30461:SF3,SM00857,IPR006118,IPR036162,PF13408, IPR025827,G3DSA:3.40.50.1390,PS51737,IPR006119,SSF53041, IPR011109,PF00239,PTHR30461,PS00397,PS51736, Coil,cd00338
MPEKILRCAIYIRVSTFEQSVHGKSLQAQKEYLEHYAKEHNMSVVGVYADEGKTARKELKKRKAIHALIEDVKQEKIDVILFWRLDRWFRSLADFYKVQDVLDEYGVRWISASEPGINMETRDGRLQLNVVLSFGQNEVDTTSERIKFVNEASIKNGRLIFGEANMPFGYKSGVVDGKKCMIKDPETERMVIDFFRHYKKHQGKQDALKYMQRTYGIYFSYAMLKTMLSSEFYKGTYRGYPYCPAYLTEKEWNEIQEISVRNVKRAPSGRVYLFTSLMRCPSCGQKLVGTGCSSISNRKTGKKRTYCYYRCNKALADHLCPNRHRVSQNLIEQYLLENLSSEYEKYKIRSNKINEEKKKVRKAKNPAQLSKEMERLNLLFQKGRISFDYYDEEYQRLEEELAFAASDPSLEEPKRNYSELEKLLRTDFKEMYDSLSLENRRAFWRSIIKQIHLNDDCTIKEVDFL

SEQ ID NO: 7706 - protein, 465 aa, Unknown
  Description of Unknown: Integrase B7707 sequence
  PTHR30461:SF3,SM00857,G3DSA:1.10.10.2600,IPR036162,PF13408, IPR025827,G3DSA:3.40.50.1390,PS51737,IPR006119,IPR038109, PF07508,SSF53041,IPR011109,PTHR30461,Coil, PS51736,cd00338,PF00239
MELVTKNRVIIYNRVSTIMQDKNESLTEQTDECIRYCNEKGYNIIKILKDVKSGTKDDREGYLELKKHIKRRDFDILVVLETSRIARKMKELVLFFSLLNENNIDYVSIREPNYNTTTPDGKFAMNIRLGLIQFERDNTAERVTDRLYFKASKGQWVNGKPPIGYKLVNKRLEIDEEKAEIVRNIYEDFLNGYSLNQINNKLQFSWGSKQVKRILTNPTYKGYIRYGTRNNRKKNNREAFIVKGWHEAIITEDKWEKVQEMYKSLNRKASNTKPTLLGGLLKCKECGNNYIRKRGGSYDKNLYYGCNLNNLRYSDKFFYKDIPECSSATIKGDLLEKAVIDTLKKQINDLNFNDIEIEKKRQVNIKQIDSSINKFKNRLNKIYELYIEDEISKDKYLKDKKDIEARIISLEKQKKSFGEIEVEKSNNEMIQEYFSKIEENKNIHIKTHVDTCAPINLFIFLFSIK

SEQ ID NO: 7707 - protein, 465 aa, Unknown
  Description of Unknown: Integrase B7708 sequence
  PTHR30461:SF3,SM00857,G3DSA:1.10.10.2600,IPR036162,PF13408, IPR025827,G3DSA:3.40.50.1390,PS51737,IPR006119,IPR038109, PF07508,SSF53041,IPR011109,PTHR30461,PS51736, cd00338,PF00239
MKGNAGDTIVKKIDLSPELVRVALYIRVSGEEQKIKGLSLEAQQERLEAYARERGWVIVGIYIDAAKTARKNIHKRTDFQRMMDSVKRDEVDILLFCRLDRWFRSVADYYKIMEVLEAHNCDWKTTDEEYDTTTANGRLYINVKLSIAQNEADIDGERIDVVFDSKIAHGTVVSGSAPFGFRVNEEKRLEVVPEDAAIVQDAFNYFETSISQRATVRYIRETYGVNWCDATFRRILKEKLYTGVYDRGGRFNDHFCPAIISKQQFDRVQALLERNARSVPSGKVYIFTSILTCAECGHKLVGYKSSDYYYYRCNQHFQRGRCSHNHSAREDVVEKWLFEHLAEELERCQLEWEVAAAKKKASVARTDKAALKRKLTKLKELYVNDLIDIEDYKRDYQIYTAALKQIPEPSIEPPPDFAAVRRLLDNDFKTIYENLTREEKRTLWRSVIKEIRIDNDQNITGVVFG

SEQ ID NO: 7708 - protein, 465 aa, Unknown
  Description of Unknown: Integrase B7709 sequence
  PTHR30461:SF3,SM00857,G3DSA:1.10.10.2600,IPR036162,PF13408, PS51737,G3DSA:3.40.50.1390,IPR025827,IPR006119,IPR038109, PF07508,IPR011109,SSF53041,PTHR30461,PS51736, cd00338,PF00239
MKGNAGDTIVKKIDLSPELVRVALYIRVSGEEQKIKGLSLEAQQERLEAYARERGWVIVGIYIDAAKTARKNIHKRTDFQRMMDSVKRDEVDILLFCRLDRWFRSVADYYKIMEVLEAHNCDWKTTDEEYDTTTANGRLYINVKLSIAQNEADIDGERIDVVFDSKIAHGTVVSGSAPFGFRVNEGKRLEVVPEDAAIVQDAFNYFETSISQRATVRYIRETYGVNWCDATFRRMLKEKLYTGVYDRGGRFNDHFCPAIISKQQFDRVQALLERNARSVPSGKVYIFTSILACAECGHKLVGYKSSDYYYYRCNQHFQRGRCSHNHSAREDVVEKWLFEHLAEELERCQLEWEVAAAKKKASVARTDKAALKRKLTKLKELYVNDLIDIEDYKRDYQIYTAALKQIPEPSIEPPPDFAAVRRLLDNDFKTIYENLTREEKRTLWRSVIKEIRIDNDQNITGVVFG

SEQ ID NO: 7709 - protein, 465 aa, Unknown
  Description of Unknown: Integrase B7710 sequence
  PTHR30461:SF3,SM00857,IPR006118,IPR036162,PF13408, IPR025827,PS51737,Coil,G3DSA:3.40.50.1390,IPR006119, IPR011109,SSF53041,PTHR30461,PS00397,PS51736, cd00338,PF00239
MPEKILRCAIYIRVSTFEQSVHGKSLQAQKEYLEHYAKEHNMSVVGVYADEGKTARKELKKRKAIHALIEDVKQEKIDVILFWRLDRWFRSLADFYKVQDVLDEYDVRWISASEPGINMETRDGRLQLNVVLSFGQNEVDTTSERIKFVNEASIKNGRLIFGEANMPFGYKSGVVDGKKCMIKDPETERMVIDFFRHYKKHQGKQDALKYMQRTYGIYFSYGMLKTMLSSEFYKGTYRGYPYCPAYLTEKEWNEIQEISVRNVKRAPSGRVYLFTSLMRCPSCGQKLVGTGCSSISNRKTGKKRTYCYYRCNKALADHLCPNRHRISQNLIEQYLLENLSSEYEKYKIRSNKINEEKKKVRKAKNPAQLSKEMERLNLLFQKGRISFDYYDEEYQRLEEELAFAASDPSLEEPKRNYSELEKLLRTDFKEMYDSLSLENRRAFWRSIIKQIHLNDDCTIKEVDFL

SEQ ID NO: 7710 - protein, 465 aa, Unknown
  Description of Unknown: Integrase B7711 sequence
  PTHR30461:SF3,IPR036162,PS51737,IPR011109,PTHR30461, PS00397,PF00239,G3DSA:1.10.10.2600,IPR006119,SSF53041, SM00857,IPR025827,IPR038109,PS51736,cd03768, IPR006118,PF13408,G3DSA:3.40.50.1390,PF07508,Coil
MARRKTALKNVSASARVTKVAIYIRVSTIHQVDKDSIPMQKKDLIAYCQLILGTDNYEIFEDAGYSGKNTDRPAFQDMMGRIRKGEFTHVLVWKIDRISRNLLDFAEMYEELQSLRVTFVSKNEQFDTSTAIGEAMLKIVLVFAELERNMTSERVTATMISRANNGQWNGGRVPFGYSYDSETSTFSIREDEAPICRKLKDLYLGNKFLVYTARALNAAGYKTRSGADWTATTVWIIASSPFYAGIYRYNRYKGTENRTLNPEDEWVMIPNHHPAIFTLEEHEAMKTSLKINSKNIDNPVGRMHTTSNVHIFQRIAYCGKCRNKMVSTPGRKHADGYRPSNYSCPLRRKSNKCDNATVSDMIVGEFIINYILNMLNAKKTFSNIDTPEELQKHLLIGSTFSDISSIKKDGLNDFFNLLSRYGSDNSYFFAIKKPRKKKASVDPELASLRKEKEKQERALQRLQDL

SEQ ID NO: 7711 - protein, 465 aa, Unknown
  Description of Unknown: Integrase B7712 sequence
  PTHR30461:SF3,SM00857,G3DSA:1.10.10.2600,IPR036162,PF13408, IPR025827,G3DSA:3.40.50.1390,PS51737,IPR006119,IPR038109, PF07508,SSF53041,IPR011109,PTHR30461,PS51736, cd00338,PF00239
MKGNAGDTIVKKIDLSPELVRVALYIRVSGEEQKIKGLSLEAQQERLEAYARERGWVIVGIYIDAAKTARKNIHKRTDFQRMMDSVKRDEVDILLFCRLDRWFRSVADYYKIMEVLEAHNCDWKTTDEEYDTTTANGRLYINVKLSIAQNEADIDGERIDVVFDSKIAHGTVVSGSAPFGFRVNDGKRLEVVPEDAAIVQDAFNYFETSISQRATVRYIRETYGVNWCDATFRRMLKEKLYTGVYDRGGRFNDHFCPAIISKQQFDRVQALLERNARSVPSGKVYIFTSILTCAECGHKLVGYKSSDYYYYRCNQHFQRGRCSHNHSAREDVVEKWLFEHLAEELERCQLEWEVAAAKKKASVARTDKAALKRKLTKLKELYVNDLIDIEDYKRDYQIYTAALKQIPEPSIEPPPDFAAVRRLLDNDFKTIYENLTREEKRTLWRSVIKEIRIDNDQNITGVVFG

SEQ ID NO: 7712 - protein, 465 aa, Unknown
  Description of Unknown: Integrase B7713 sequence
  SM00857,G3DSA:1.10.10.2600,IPR036162,PS51737,G3DSA:3.40.50.1390, IPR006119,IPR038109,PF07508,IPR011109,SSF53041, PF00239,PTHR30461,PS51736,Coil,cd00338
MKETKKAIAYFRVSTDMQRDDLSLETQEKGGEIFARDNGIEVIKKFTDVMSGGNRNRKGFLEAQKYLEEHKDEIDYFIAYDVSRIARDAFAFLSLFNKLNILGVKLKLINNPNLDSDSPMGKLILTILAAIFEFFRFDNADRVRDNMIIRVKEGKRMNNAPFGYKMIDKKMVVVPEEAELIKFIYNEYLKGHGIVALERMTGKDRSSIKQWLNNKVYAGYNVFGARKMNKTTFKPMKNPDTNKIVEAKGDWEAIIDLETWEKVATRMNNNKEFRIRNTEKTSYLLSGLLFHTCGSKFRGNAGRKGTNYYRCIGCNRSIKTDTIDEKVLNELFNNEFLKELNKSTGKVENKKEKELIKLKNYKISLKNKEKKLIDLYTEDLISKDEYINRKNEIKNSIIDTEAKTILLESEKEEKKQNIDFAKMFVIALSNLKNTESKQEANKILKMIIKKIEIDDNKEVFIHLNF

SEQ ID NO: 7713 - protein, 465 aa, Unknown
  Description of Unknown: Integrase B7714 sequence
  PTHR30461:SF3,SM00857,IPR006118,IPR036162,PF13408, PS51737,G3DSA:3.40.50.1390,IPR025827,PS00397,IPR006119, IPR011109,SSF53041,PTHR30461,Coil, PS51736,cd00338,PF00239
MPEKILRCAIYIRVSTFEQSVHGKSLQAQKEYLEHYAKEHNMSVVGVYADEGKTARKELKKRKAIHALIEDVKQEKIDVILFWRLDRWFRSLADFYKVQDVLDEYGVRWISASEPGINMETRDGRLQLNVVLSFGQNEVDTTSERIKFVNEASIKNGRLIFGEANMPFGYKSGVVDGKKCMIKDPETERMVIDFFRHYKKHQGKQDALKYMQRTYGIYFSYGMLKTMLSSEFYKGTYRGYPYCPAYLTEKEWNEIQEISVRNVKRAPSGRVYLFTSLMRCPSCGQKLVGTGCSSISNRKTGKKRTYCYYRCNKALADHLCPNRHRVSQNLIEQYLLENLSSEYEKYKIRSNKINEEKKKVRKAKNPAQLSKEMERLNLLFQKGRISFDYYDEEYQRLEEELAFAASDPSLEEPKRNYSELEKLLRTDFKEMYDSLSLENRRAFWRSIIKQIHLNDDCTIKEVDFL

SEQ ID NO: 7714 - protein, 465 aa, Unknown
  Description of Unknown: Integrase B7715 sequence
  PTHR30461:SF3,SM00857,G3DSA:1.10.10.2600,IPR036162,PF13408, PS51737,IPR025827,G3DSA:3.40.50.1390,IPR006119,IPR038109, PF07508,IPR011109,SSF53041,PTHR30461,PS51736, cd00338,PF00239
MKGNAGDTIVKKIDLSPELVRVALYIRVSGEEQKIKGLSLEAQQERLEAYARERGWVIVGIYIDAAKTARKNMHKRTDFQRMMDSVKRDEVDILLFCRLDRWFRSVADYYKIMEVLEAHNCDWKTTDEEYDTTTANGRLYINVKLSIAQNEADIDGERIDVVFDSKIAHGTVVSGSAPFGFRVNEEKRLEVVPEDAAIVQDAFNYFETSISQRATVRYIRETYGVNWCDATFRRMLKEKLYTGVYDRGGRFNDHFCPAIISKQQFDRVQALLERNARSVPSGKVYIFTSILTCAECGHKLVGYKSSDYYYYRCNQHFQRGRCSHNHSAREDVVEKWLFEHLAEELERCQLEWEVAAAKKKASIARTDKAALKRKLTKLKELYVNDLIDIEDYKRDYQIYTAALKQIPEPSIEPPPDFAAVRRLLDNDFKTIYENLTREEKRTLWRSVIKEIRIDNDQNITGVVFG

SEQ ID NO: 7715 - protein, 465 aa, Unknown
  Description of Unknown: Integrase B7716 sequence
  PTHR30461:SF3,SM00857,IPR006118,IPR036162,PF13408, IPR025827,PS51737,G3DSA:3.40.50.1390,IPR006119,IPR011109, SSF53041,PF00239,PTHR30461,PS00397,PS51736, Coil,cd00338
MPEKILRCAIYIRVSTFEQSVHGKSLQAQKECLEQYATDNNMSIVGVYADEGKTARKELKKRKAIHALVEDVKRDKIDVIIFWRLDRWFRNLSDFYKVQDVLDEHGVRWISVSEPGINMETRDGRLQLNVVLSIGQNEVDTTSERIKFVNEASIRQRKLIFGDANMPFGYKTGVVDGKKCMVKDSETEHMVEDFFNYFRIHNSKKGAVRYMQEAYGIDFSYGMLRTMLSSEFYKGTYRGYPYCPAYLSEKEWNEMQTISKRNIKSTPSGRVYLFTGLMRCPVCGQKLVGTGCSSIINRKTGEKRTYCYYRCNRALIDHICTYRHRVSQNLIEKYLLENLEREYEKYKVRTNQISEELKKQKKAKDPKKLRKEMERLNLLFQKGRISFEYYDTEYNRLEEEYVHSSNPCQQKEEARNTRYIEELLQTDFRQMYNSLSLENRRSFWRSTIQEIYLNDDNTIKAVDFL

SEQ ID NO: 7716 - protein, 465 aa, Unknown
  Description of Unknown: Integrase B7717 sequence
  PTHR30461:SF3,SM00857,IPR006118,IPR036162,PF13408, PS51737,IPR025827,Coil,G3DSA:3.40.50.1390,IPR006119, IPR011109,SSF53041,PTHR30461,PS00397,PS51736, cd00338,PF00239
MPEKILRCAIYIRVSTFEQSVHGKSLQAQKEYLEHYAKEHNMSVVGVYADEGKTARKELKKRKAIHALIEDVKQEKIDVILFWRLDRWFRSLADFYKVQDVLDDYGVRWISASEPGINMETRDGRLQLNVVLSFGQNEVDTTSERIKFVNEASIKNGRLIFGEANMPFGYKSGVVDGKKCMIKDPETERMVIDFFRHYKKHQGKQDALKYMQRTYGIYFSYGMLKTMLSSEFYKGTYRGYPYCPAYLTEKEWNEIQEISVRNVKRAPSGRVYLFTSLMRCPSCGQKLVGTGCSSISNRKTGKKRTYCYYRCNKALADHLCPNRHRVSQNLIEQYLLENLSSEYEKYKIRSNKINEEKKKVRKAKNPAQLSKEMERLNLLFQKGRISFDYYDEEYQRLEEELAFAASDPSLEEPKRNYSELEKLLRTDFKEMYDSLSLENRRAFWRSIIKQIHLNDDCTIKEVDFL

SEQ ID NO: 7717 - protein, 465 aa, Unknown
  Description of Unknown: Integrase B7718 sequence
  SM00857,G3DSA:1.10.10.2600,IPR036162,PS51737,G3DSA:3.40.50.1390, IPR006119,IPR038109,PF07508,IPR011109,SSF53041, PF00239,PTHR30461,PS51736,Coil,cd00338
MKETKKAIAYFRVSTDMQRDDLSLETQEKGGEIFARDNGIEIVKKFTDVMSGGNRNRKGFLEAQKYLEDHKNEIDYFIAYDVSRIARDAFAFLSLFNKLNILGVKLKLINNPNLDSDSPMGKLILTILAAIFEFFRFDNADRVRDNMIIRVKEGKRMNNAPFAYRMVNKKMVVVPEEAELIKFIYNEYLKGHGIVALERMTGKDRSSIKQWLNNKVYAGYNVFGARKMNKTTFKPMKNPDTNKIVEAKGDWEPIIDIETWEKVAARMNNNREFRIRNVEKTSYLLSGLLFHTCGSKFRGNAGRKGTNYYRCIGCNKSIKTDTIDEKVLNELFNNEFLKELNKSTGKVENKKEKALIKLRNYKASLKNKEKKLIDLYTEDLISKDEYINRKNEIKNSIINTEAELILLENEKEEKKQNIDFAKMFIAALSNLKNAESKQEANKILKIIIKKIEIDENKEVFIHLNF

SEQ ID NO: 7718 - protein, 465 aa, Unknown
  Description of Unknown: Integrase B7719 sequence
  PTHR30461:SF3,SM00857,G3DSA:1.10.10.2600,IPR036162,PF13408, PS51737,G3DSA:3.40.50.1390,IPR025827,IPR006119,IPR038109, PF07508,IPR011109,SSF53041,PTHR30461, PS51736,cd00338,PF00239
MKGNAGDTIVKKIDLSPELVRVALYIRVSGEEQKIKGLSLEAQQERLEAYARERGWVIVGIYIDAAKTARKNIHKRTDFQRMMDSVKRDEVDILLFCRLDRWFRSVADYYKIMEVLEAHNCDWKTTDEEYDTTTANGRLYINVKLSIAQNEADIDGERIDVVFDSKIAHGTVVSGSAPFGFRVNEEKRLEVVPEDAAIVQDAFNYFETSISQRATVRYIRETYGVNWCDATFRRMLKEKLYTGVYDRGGRFNDHFCPAIISKQQFDRVQALLERNARSVPSGKVYIFTSILTCAECGHKLVGYKSSDYYYYRCSQHFQRGRCSHNHSAREDVVEKWLFEHLAEELERCQLEWEVAAAKKKASIARTDKAALKRKLTKLKELYVNDLIDIEDYKRDYQIYTAALKQIPEPSIEPPPDFAAVRRLLDNDFKTIYENLTREEKRTLWRSVIKEIRIDNDQNITGVVFG

SEQ ID NO: 7719 - protein, 465 aa, Unknown
  Description of Unknown: Integrase B7720 sequence
  SM00857,G3DSA:1.10.10.2600,IPR036162,PS51737,G3DSA:3.40.50.1390, IPR006119,IPR038109,PF07508,SSF53041,IPR011109, PF00239,PTHR30461,PS51736,Coil,cd00338
MKETKKAIAYFRVSTDMQRDDLSLETQEKGGEIFARDNGIEVIKKFTDVMSGGNRNRKGFLEAQKYLEEHKDEIDYFIAYDVSRIARDAFAFLSLFNKLNILGVKLKLITNPNLDSDSPMGKLILTILAAIFEFFRFDNADRVRDNMIIRVKEGKRMNNAPFAYRMVNKKMVVVPEEAELIKFIYAEYLKGHGIVALERMTGKDRSSIKQWLNNKVYAGYNVFGARKMNKTTFKPMKNPDTNKIVEAKGDWEAIIDIETWEKVAARMNNNREFRIRNVEKTSYLLSGLLFHSCGSKFRGNAGRKGTYYYRCIGCNRSIKTDIIDEKVLDELFNNEFLQELNKSTGKVENKKEKELIKLKNYKISLKNKEKKLIDLYTEDLISKDEYINRKNEIKNSIINTEAELILLENEKEEKKQNIDFAKMFIAALSNLKNAESKQEANKILKMIIKKIEIDDNKEVFIHLNF

SEQ ID NO: 7720 - protein, 465 aa, Unknown
  Description of Unknown: Integrase B7721 sequence
  PTHR30461:SF3,SM00857,IPR006118,IPR036162,PF13408, PS51737,G3DSA:3.40.50.1390,IPR025827,Coil,IPR006119, IPR011109,SSF53041,PTHR30461,PS00397, PS51736,cd00338,PF00239
MPEKILRCAIYIRVSTFEQSVHGKSLQAQKEYLEHYAKEHNMSVVGVYADEGKTARKELKKRKAIHALIEDVKQEKIDVILFWRLDRWFRSLADFYKVQDVLDEYGVRWISASEPGINMETRDGRLQLNVVLSFGQNEVDTTSERIKFVNEASIKNGRLIFGEANMPFGYKSGVVDGKKCMIKDPETERMVIDFFRHYKKHQGKQDALKYMQRTYGIYFSYGMLKTMLSSEFYKGTYRGYPYCPAYLTEKEWNEIQEISVRNVKRAPSGRVYLFTSLMRCPSCGQKLVGTGCSSISNRKTGKKRTYCYYRCNKALADHLCPNRHRVSQNLIEQYLLENLSSEYEKCKIRSNKINEEKKKVRKAKNPAQLSKEMERLNLLFQKGRISFDYYDEEYQRLEEELAFAASDPSLEEPKRNYSELEKLLRTDFKEMYDSLSLENRRAFWRSIIKQIHLNDDCTIKEVDFL

SEQ ID NO: 7721 - protein, 465 aa, Unknown
  Description of Unknown: Integrase B7722 sequence
  PTHR30461:SF3,SM00857,G3DSA:1.10.10.2600,IPR036162,PF13408, PS51737,IPR025827,G3DSA:3.40.50.1390,IPR006119,IPR038109, PF07508,SSF53041,IPR011109,PTHR30461,PS51736, cd00338,PF00239
MKGNAGDTIVKKIDLSPELVRVALYIRVSGEEQKIKGLSLEAQQERLEAYARERGWVIVGIYIDAAKTARKNIHKRTDFQRMIDSVKRDEVDILLFCRLDRWFRSVADYYKIMEVLEAHNCDWKTTDEEYDTTTANGRLYINVKLSIAQNEADIDGERIDVVFDSKIAHGTVVSGSAPFGFRVNEEKRLEVVPEDAAIVQDAFNYFETSISQRATVRYIRETYGVNWCDATFRRMLKEKLYTGVYDRGGRFNDHFCPAIISKQQFDRVQALLERNARSVPSGKVYIFTSILTCAECGHKLVGYKSSDYYYYRCNQHFQRGRCSHNHSAREYVVEKWLFEHLAEELERCQLEWEVAAAKKKASVARTDKAALKRKLTKLKELYVNDLIDIEDYKRDYQIYTAALKQIPEPNIEPPPDFAAVRRLLDNDFKTIYENLTREEKRTLWRSVIKEIRIDNDQNITGVVFG

SEQ ID NO: 7722 - protein, 465 aa, Unknown
  Description of Unknown: Integrase B7723 sequence
  PTHR30461:SF3,SM00857,G3DSA:1.10.10.2600,IPR036162,PF13408, PS51737,IPR025827,G3DSA:3.40.50.1390,IPR006119,IPR038109, PF07508,IPR011109,SSF53041,PTHR30461,Coil, PS51736,cd00338,PF00239
MANYRKLRVATYTRVSTLEQAEEGYSIQEQQDKLEKYCDLKDWTITHRYSDPGFSGSNIKRPGIRELIAAAKQGDFDLVLVYKLDRLSRSQKDTLYLIEDVFQANQVDFVSLSENFDTSTPFGKAMIGILSVFAQLEREQIKERMTMGKIGRAKSGKAMGWSNVPFGYNLVGDIYEIDEFQATVVKRIFSEYLSGDSPITIAKRLNDEGHLGKGTRWSWKTVRDILMNIVYTGYISFKGELYPGMHKPIIDMETYKNAQTQLEIRRVNADNPRPFRAKYMLSGLLKCHYCGSTLRIGVSINQRTKARSYRYNCPSSHPRKKSTYKKKAACPSKLVRKGEIEKQVIEEIEKLPKNFEHKKAPTVDVDAIKKQIKAIKGKQSKLMDLYLIDGIDMEELNRRNGEFNKQIEALNKNLSAVPTEPDVTEALNQAKNISELSYDEQKKLVRLLISEIEVANDSIKIHWRF

SEQ ID NO: 7723 - protein, 465 aa, Unknown
  Description of Unknown: Integrase B7724 sequence
  PTHR30461:SF3,SM00857,G3DSA:1.10.10.2600,IPR036162,PF13408, PS51737,G3DSA:3.40.50.1390,IPR025827,IPR006119,IPR038109, PF07508,IPR011109,SSF53041,PTHR30461,PS51736, cd00338,PF00239
MKGNAGDTIVKKIDLSPELVRVALYIRVSGEEQKIKGLSLEAQQERLEAYARERGWVIVGIYIDAAKTARKNIHKRTDFQRMMDSVKRDEVDILLFCRLDRWFRSVADYYKIMEVLEAHNCDWKTTDEEYDTTTANGRLYINVKLSIAQNEADIDGERIDVVFDSKIAHGTVVSGSAPFGFRVNEEKRLEVVPEDAAIVQDAFNYFETSISQRATVRYIRETYGVNWCDATFRRMLKEKLYTGVYDRGGRFNDHFCPAIISKQQFDRVQALLERNARSVPSGKVYIFTSILTCAECGHKLVGYKSSDYYYYRCNQHFQRGRCSHNHSAREDVVEKWLFEHLVEELERCQLEWEVAAAKKKASVARTDKAALKRKLTKLKELYVNDLIDIEDYKRDYQIYTAALKQIPEPSIEPPPDFAAVRRLLDNDFKTIYENLTREEKRTLWRSAIKEIRIDNDQNITGVVFG

SEQ ID NO: 7724 - protein, 465 aa, Unknown
  Description of Unknown: Integrase B7725 sequence
  PTHR30461:SF3,SM00857,G3DSA:1.10.10.2600,IPR036162,PF13408, PS51737,G3DSA:3.40.50.1390,IPR025827,IPR006119,IPR038109, PF07508,IPR011109,SSF53041,PTHR30461,PS51736, cd00338,PF00239
MKGNAGDTIVKKIDLSPELVRVALYIRVSGEEQKIKGLSLEAQQERLEAYARERGWVIVGIYIDAAKTARKNIHKRTDFQRMMDSVKRDEVDILLFCRLDRWFRSVADYYKIMEVLEAHNCNWKTTDEEYDTTTANGRLYINVKLSIAQNEADIDGERIDVVFDSKIAHGTVVSGSAPFGFRVNEEKRLKVVPEDAAIVQDAFNYFETSISQRATVRYIRETYGVNWCDATFRRMLKEKLYTGVYDRGGRFNDHFCPAIISKQQFDRVQALLERNARSVPSGKVYIFTSILTCAECGHKLVGYKSSDYYYYRCNQHFQRGRCSHNHSAREDVVEKWLFEHLVEELERCQLEWEVAAAKKKASVARTDKAALKRKLTKLKELYVNDLIDIEDYKRDYQIYTAALKQIPEPSIEPPPDFAAVRRLLDNDFKTIYENLTREEKRTLWRSVIKEIRIDNDQNITGVVFG

SEQ ID NO: 7725 - protein, 465 aa, Unknown
  Description of Unknown: Integrase B7726 sequence
  PTHR30461:SF3,SM00857,G3DSA:1.10.10.2600,IPR036162,PF13408, PS51737,IPR025827,G3DSA:3.40.50.1390,IPR006119,IPR038109, PF07508,IPR011109,SSF53041,PTHR30461,PS51736, cd00338,PF00239
MKGNAGDTIVKKIDLSPELVRVALYIRVSGEEQKIKGLSLEAQQERLEAYARERGWVIVGIYIDAAKTARKNIHKRTDFQRMMDSVKRDEVNILLFCRLDRWFRSVADYYKIMEVLEAHNCGWKTTDEEYDTTTANGRLYINVKLSIAQNEADIDGERIDVVFDSKIAHGTVVSGSAPFGFRVNEEKRLEVVPEDAAIVQDAFNYFETSISQRATVRYIRETYGVNWCDATFRRMLKEKLYTGVYDRGGRFNDHFCPAIISKQQFDRVQALLERNARSVPSGKVYIFTSILTCAECGHKLVGYKSSDYYYYRCNQHFQRGRCSHNHSAREDVVEKWLFEHLAEELERCQLEWEVAAAKKKASVARTDKAALKRKLTKLKELYVNDLIDIEDYKRDYQIYTAALKQIPEPSIEPPPDFAAVRRLLDNDFKTIYENLTREEKRTLWRSVIKEIRIDNDQNITGVVFG

SEQ ID NO: 7726 - protein, 465 aa, Unknown
  Description of Unknown: Integrase B7727 sequence
  PTHR30461:SF3,SM00857,G3DSA:1.10.10.2600,IPR036162,PF13408, PS51737,IPR025827,G3DSA:3.40.50.1390,IPR006119,IPR038109, PF07508,IPR011109,SSF53041,PTHR30461,PS51736, cd00338,PF00239
MKGNAGDTIVKKIDLSPELVRVALYIRVSGEEQKIKGLSLEAQQERLEAYARERGWVIVGIYIDAAKTARKNIHKRTDFQRMMDSVKRDEVDILLFCRLDRWFRSVADYYKIMEVLEAHNCDWKTTDEEYDTTTANGRLYINVKLSIAQNEADIDGERIYVVFDSKIAHGTVVSGSAPFGFRVNEEKRLEVVPEDAAIVQDAFNYFETSISQRATVRYIRETYGVNWCDATFRRMLKEKLYTGVYDRGGRFNDHFCPAIISKQQFDRVQALLERNARSVPSGKVYIFTSILTCAECGHKLVGYKSSDYYYYRCNQHFQRGRCSHNHSAREDVVEKWLFEHLVEELERCQLEWEVAAAKKKASVARTDKAALKRKLTKLKELYVNDLIDIEDYKRDYQIYTAALKQIPEPSIEPPPDFAAVRRLLDNDFKTIYENLTREEKRTLWRSVIKEIRIDNDQNITGVVFG

SEQ ID NO: 7727 - protein, 465 aa, Unknown
  Description of Unknown: Integrase B7728 sequence
  PTHR30461:SF3,SM00857,G3DSA:1.10.10.2600,IPR036162,PF13408, IPR025827,G3DSA:3.40.50.1390,PS51737,IPR006119,IPR038109, PF07508,SSF53041,IPR011109,PTHR30461,Coil, PS51736,cd00338,PF00239
MKGNAGDTIVKKIDLSPELVRVALYIRVSGEEQKIKGLSLEAQQERLEAYARERGWVIVGIYIDAAKTARKNIHKRTEFQRMMDSVKRDEVDILLFARLDRWFRSVADYYKVMEVLQAHNCDWKTTDEEYDTTTANGRLYINVKLSIAQNEADIDGERIDVVFDSKIAHGTVVSGSAPFGFRVNEEKRLEVVPEDAAIVQDAFNYFENTVSQRATVRYVRETYGVNWCDATFRRMLKEKLYTGVYDRGGRYNDQFCPAIIDRQQFDRVQALLTRNVRSAPSGKVYIFTSILTCAECGHKLVGYKSSDYFYYRCNQHFQRGRCSHNHSAREDVVEAWLFDHLGEELERCQLEWDVEAAKKKASVARTDKAALKRKLTKLKELYVNDLIDIEDYKKDYQIYVSALNQIPEPAQEAPPDFAAVRRLLDNSFRTIYDTLTREEKRTLWRSVIKEIRIDNDQNITGVVFG

SEQ ID NO: 7728 - protein, 465 aa, Unknown
  Description of Unknown: Integrase B7729 sequence
  PTHR30461:SF3,SM00857,G3DSA:1.10.10.2600,IPR036162,PF13408, IPR025827,G3DSA:3.40.50.1390,PS51737,IPR006119,IPR038109, PF07508,SSF53041,IPR011109,PTHR30461,PS51736, cd00338,PF00239
MKGNAGDTIVKKIDLSPELVRVALYIRVSGEEQKIKGLSLEAQQERLEAYARERGWVIVGIYIDAAKTARKNIHKRTDFQRMMDSVKRDEVDILLFCRLDRWFRSVADYYKIMEVLEAHNCDWKTTDEEYDTTTANGRLYINVKLSIAQNEADIDGERIDVVFDSKIAHGTVVSGSAPFGFRVNAGKRLEVVPEDAAIVQDAFNYFETSISQRATVRYIRETYGVNWCDATFRRMLKEKLYTGVYDRGGRFNDHFCPAIISKQQFDRVQALLERNARSVPSGKVYIFTSILTCAECGHKLVGYKSSDYYYYRCNQHFQRGRCSHNHSAREDVVEKWLFEHLAEELERYQLEWEVAAAKKKASVARTDKAALKRKLTKLKELYVNDLIDIEDYKRDYQIYTAALKQIPEPSIEPPPDFAAVRRLLDNDFKTIYENLTREEKRTLWRSVIKEIRIDNDQNITGVVFG

SEQ ID NO: 7729 - protein, 465 aa, Unknown
  Description of Unknown: Integrase B7730 sequence
  PTHR30461:SF3,SM00857,G3DSA:1.10.10.2600,IPR036162,PF13408, IPR025827,G3DSA:3.40.50.1390,PS51737,IPR006119,IPR038109, PF07508,IPR011109,SSF53041,PTHR30461,PS51736, cd00338,PF00239
MKGNAGDTIVKKIDLSPELVRVALYIRVSGEEQKIKGLSLEAQQERLEAYARERGWVIVGIYIDAAKTARKNIHKRTDFQRMMDSVKRDEVDILLFCRLDRWFRSVADYYKIMEVLEAHNCDWKTTDEEYDTTTANGRLYINVKLSIAQNEADIDGERIDVVFDSKIAHGTVVSGSAPFGFRVNEEKRLEVVSEDAAIVQDAFNYFETSISQRATVRYIREAYGVNWCDATFRRMLKEKLYTGVYDRGGRFNDHFCPAIISKQQFDRVQALLERNARSVPSGKVYIFTSILTCAECGHKLVGYKSSDYYYYRCNQHFQRGRCSHNHSAREDVVEKWLFEHLAEELERCQLEWEVAAAKKKASVARTDKAALKRKLTKLKELYVNDLIDIEDYKRDYQIYTAALKQIPEPSIEPPPDFAAVRRLLDNDFKTIYENLTREEKRTLWRSVIKEIRIDNDQNITGVVFG

SEQ ID NO: 7730 - protein, 464 aa, Unknown
  Description of Unknown: Integrase B7731 sequence
  PTHR30461:SF3,SM00857,G3DSA:1.10.10.2600,IPR036162,PF13408, PS51737,IPR025827,G3DSA:3.40.50.1390,IPR006119,IPR038109, IPR011109,SSF53041,PTHR30461,PS51736,cd00338, PF00239
MNSTYFRPQPELFGLRVVKYIRCSHDGQVLHGDTLEAQDALLDEFIKVNRMVLIDTFIDEALTARKKFTRRKEFVRLLDGVRAHNFDMILFTKLDRWFRNIGDYHKIQEILEANGVQWKAITESYDTTTTNGRLHINIRLSVAQDECDRDSDRIKDVFAYKLKNKTYLSGSLPRGLKLDDEKHVIIDPEWKQFALDMFDRFEQTNSKRGTLLYLKEKYGIYLCYDTISRNLRNSLYKGMYRDDPDFCEPLIEPERFDRIQVLGKRNVRQRYSNRTYIFTGLLICSSCNHYLVGQTTHRTLSDGTEKHYPSYRCNQRYQSHSCDRNRSYREDYVEEYLLQHIRPALSEYVAEYEVTGTNPVRKNPAAEAAKIRTKMQKLYELYMDDLIDRDTYKRDYSAFQEKLKELDSIVVAPSRDLADLKKLLEQDYEDIYRTFSPQEKNAFWKSFVQSITVHEDGEMDIVFL

SEQ ID NO: 7731 - protein, 464 aa, Unknown
  Description of Unknown: Integrase B7732 sequence
  PTHR30461:SF3,SM00857,IPR006118,IPR036162,PF13408, IPR025827,G3DSA:3.40.50.1390,PS51737,IPR006119,SSF53041, IPR011109,PF00239,PTHR30461,PS00397,PS51736, Coil,cd00338
MMTNKIIRCALYIRVSTAEQCMHGKSLEAQESYLQQYASDHNMIVVGVYADEGKTARKELKKRKAIHSLLEDVKAGKIDVILFWRLDRWFRNLSDFYKVQDILDEYGVRWMSASEPGINMETRDGRLQLNVVLSIGQNEVDTTSERIKFVNEASIRQGKLIFGDANMGYGYKSGIVDGRKCMIKDPEREETVNAFYKYFFKHQNKCATLRYIQDNYDPNFSWAIMRTLLSSEFYKGTYRGFPYCPPYLTEEQWNELQKVAHKNIKRAKSGRIYLFTSLIRCPVCGQLLCGTGCKSIINRKTREKRDYCYYRCSRAHNDRICTYRHRLSQNLIEQYLLDNLDTEYRKYQIRVKKIEEEKKKIAQTKTPEKLNAELERLNLLFQKGRVEWDYYSSEYDRIEQELKDLSRIKPEVKRDLSFLEDLLQSDFKTLYASLSPENRRAFWRSTIKQIHLNEDSTIKFVDFL

SEQ ID NO: 7732 - protein, 464 aa, Unknown
  Description of Unknown: Integrase B7733 sequence
  PTHR30461:SF3,cd00338,SM00857,IPR036162,PF13408, IPR025827,G3DSA:3.40.50.1390,PS51737,IPR006119,IPR011109, SSF53041,PTHR30461,PS51736,Coil,PF00239
MSSSYFRPQPELYGLRVVKYIRCSHEGQVLHGDTLEAQDTLLNEFIEVNRMVLVDTFVDEALTARKKFTKRKEFVRLLDGVRTHSFDLILFTKLDRWFRNISDYHKIQEILDANGVQWKAITESYDTTTTNGRLHINIRLSVAQDECDRDSDRIKDVFAYKLKNKSYISGRLPRGLKLDTNKHIIHDPDWKQWALDMFDHFESSGSIYSTFLFLTDKYGSLLRYDGVSRALKNPLYKGMYRDDPKFCDPLIDPERFDRLFDLAKKNVRQRKTRRYYIFTGLLVCSSCQHNLVPYTIPHTLADGTRKDYIFYRCGYHSSSRLCDRSRTYREEYIEQYLLDHVRPALSRYIAEYDVISSGASKKDPAAEVAKIRHKLEKLYDLFLDDLIEKDLYRQKYDELQNQLKECLEAPSVPVRDFSAVQELLSKNWEDMYCTFSKTEKNVFWKSFIKSIVVYEDGSMDINFL

SEQ ID NO: 7733 - protein, 464 aa, Unknown
  Description of Unknown: Integrase B7734 sequence
  PTHR30461:SF3,cd00338,SM00857,IPR006118,G3DSA:1.10.10.2600, IPR036162,PS51737,G3DSA:3.40.50.1390,IPR006119,IPR038109, PF07508,IPR011109,SSF53041,PTHR30461, PS00397,PS51736,Coil,PF00239
MKKQLKALIYARVSTVMQEEGDSLVYQKKKCEDFCSVKGYEIYKILEDVESGANDDRSGFIELQNEIARKNFDVLVVFESSRISRKTLTMLNFVLSLEENGIKFTSISQPELDTTTPTGMLFFQIQSSLGEYERKQISSRVKSSKWQRIKDGLWQGGSIPLGYKKENDNIVVDEKGANEVKSIFFHYLSSHSLKQTSRAFNKPIGSIKWILENPFYLGKLTYGKKEKNINTGIIKINSSYHVFEGKHPPIIDEETFDTVQKILTTKKRVIQSENVILFSGLIRCTCGEKMYKNTSMNKGSIRIRYYCKNCYKTIAYKKAEDIIIKALLDMKELEEINDVVDSENKILNDKMEIYKASMKQVNDERKKYINLYSKDYITIEDLDEKMQVTKSKIDDFTDKINKLQKVIDEEKITKNYNSNLETLKAVLKDMDKSDRIDLYNMFKLLIKKIDLISSKPPEFKIYLK

SEQ ID NO: 7734 - protein, 464 aa, Unknown
  Description of Unknown: Integrase B7735 sequence
  PTHR30461:SF3,IPR036162,PS51737,IPR011109,PTHR30461, PS00397,PF00239,G3DSA:1.10.10.2600,IPR006119,SSF53041, SM00857,IPR025827,IPR038109,PS51736,cd03768, IPR006118,PF13408,G3DSA:3.40.50.1390,PF07508,Coil
MKRAALYIRVSTMEQAKEGYSIPAQTDKLKAFAKAKDMAVTKVYTDPGFSGAKMERPALQEMISDIQNKKIDVVLVYKLDRLSRSQKNTLYLIEDVFLKNNVDFISMQESFDTSTPFGRATIGMLSVFAQLERDTITERMHMGRTERAKQGYYHGSGIVPLGYDYVDGELIINDYEAQIIQEIYDLYVNQGKGQQYITKRMVAKYPDKVKTLTIVKYALTNPLYIGKISWDGKVYDGHHTPIIDKSMYDKAQEIIVRKAQKGGEQHGNQLGLLLGITYCGKCGAKVFRYVSGGKKYRYNYYMCRSVKKMLPSLVKDWNCKQPSLRQEVVEKKVIDSLKSLDFKKIERELKQVENKTKSKITTINNQISKKHNEKQKILDLYQYGTFDVTMLNERMKKIDNEINALTANISNLEGTKSESLINKLETLKTFNWETETTENKILIIKEFVERIELFDDEVIIKYKF

SEQ ID NO: 7735 - protein, 464 aa, Unknown
  Description of Unknown: Integrase B7736 sequence
  PTHR30461:SF3,SM00857,IPR006118,IPR036162,PF13408, PS51737,IPR025827,G3DSA:3.40.50.1390,PS00397,IPR006119, SSF53041,IPR011109,PTHR30461,Coil,PS51736, cd00338,PF00239
MMTNKIIRCALYIRVSTAEQCMHGKSLEAQESYLQQYASDHNMIVVGVYADEGKTARKELKKRKAIHSLLEDVKAGKIDVILFWRLDRWFRNLSDFYKVQDILDEYGVRWMSASEPGINMETRDGRLQLNVVLSIGQNEVDTTSERIKFVNEASIRQGKLIFGDANMGYGYKSGIVDGRKCMVKDPEREETVNAFYKYFFKHQNKCATLRYIQDNYDPNFSWAIMRTLLSSEFYKGTYRGFPYCPPYLTEEQWNELQKIAHKNIKRAKSGRIYLFTSLIRCPVCGQLLCGTGCKSIINRKTREKRDYCYYRCSRAHNDRICTYKHRLSQNLIEQYLLDNLDTEYRKYQIRVKKIEEEKKKIAQTKTPEKLNAELERLNLLFQKGRVEWDYYSSEYDRIEQELKDLSKIKPEVKRDLSFLEDLLQSDFKTLYASLSPENRRAFWRSTIKQIHLNEDSTIKFVDFL

SEQ ID NO: 7736 - protein, 464 aa, Unknown
  Description of Unknown: Integrase B7737 sequence
  PTHR30461:SF3,SM00857,G3DSA:1.10.10.2600,IPR036162,PF13408, IPR025827,PS51737,G3DSA:3.40.50.1390,IPR006119,IPR038109, IPR011109,SSF53041,PTHR30461,PS51736,cd00338, PF00239
MNSTYFRPQPELFGLRVVKYIRCSHDGQVLHGDTLEAQDALLDEFIKVNRMVLIDTFIDEALTARKKFTRRKEFVRLLDGVRSHSFDMILFTKLDRWFRNIGDYHKIQEILEANGVQWKAITESYDTTTTNGRLHINIRLSVAQDECDRDSDRIKDVFAYKLKNKTYLSGSLPRGLKLDDEKHVIIDPEWKQFALDMFDHFEQTNSKRGTLLYLKEKYGIYLCYDTISRNLRNSLYKGMYRDDPDFCEPLIEPERFDRIQVLGKRNVRQRYSNRTYIFTGLLICSSCNHYLVGQTTHRTLSDGTEKHYPSYRCNQRYQSHSCDRNRSYREDYVEEYLLQHIRPALSEYVAEYEVTGTNPARKNPAAEAAKIRTKMQKLYELYMDDLIDRDTYKRDYSAFQEKLKELDSIVVAPSRDLADLKKLLEQDYEEIYRTFSPQEKNAFWKSFVQSITVHEDGEMDIVFL

SEQ ID NO: 7737 - protein, 464 aa, Unknown
  Description of Unknown: Integrase B7738 sequence
  PTHR30461:SF3,SM00857,G3DSA:1.10.10.2600,IPR036162,PF13408, IPR025827,PS51737,G3DSA:3.40.50.1390,IPR006119,IPR038109, IPR011109,SSF53041,PTHR30461,PS51736,cd00338, PF00239
MNSTYFRPQPELFGLRVVKYIRCSHDGQVLHGDTLEAQDALLDEFIKVNRMVLVDTFIDEALTARKKFTRRKEFVRLLDGVRSRSFDMILFTKLDRWFRNIGDYHKIQEILEANGVQWKAITESYDTTTTNGRLHINIRLSVAQDECDRDSDRIKDVFAYKLKNKTYLSGSLPRGLKLDDEKHVIIDPEWKQFALDMFDHFEQTNSKRGTLLYLKEKYGIYLCYDTISRNLRNSLYKGMYRDDPDFCEPLIEPERFDRIQVLGKRNVRQRYSNRTYIFTGLLICSSCNHYLVGQTTHRTLSDGTEKHYPSYRCNQRYQSHSCDRNHSYREDYVEEYLLQHIRPALSEYVAEYEVTGTNPARKNPAAEAAKIRTKMQKLYELYMDDLIDRDTYKRDYSAFQEKLKELDSIVVAPSRDLADLKKLLEQDYEEIYRTFSPQEKNAFWKSFVQSITVHEDGEMNIVFL

SEQ ID NO: 7738 - protein, 464 aa, Unknown
  Description of Unknown: Integrase B7739 sequence
  SM00857,G3DSA:1.10.10.2600,IPR036162,PS51737,G3DSA:3.40.50.1390, IPR006119,IPR038109,PF07508,IPR011109,SSF53041, PTHR30461,Coil,PS51736,cd00338,PF00239
MREVKKAIAYFRVSTDMQKEDLSLETQEKGGEIFARDNNIEIVKKFTDVMSGGNRNRKGFIEAQKYLEENQGEIDYFIAYDVSRIARDAFAFLSLFNKLNLLNVKLKLVNNPTLDSDSPMGKLILTILAAIFEFFRFDNADRVRDNMIVKVKEGKRMNNAPYGYRIIDKKMVIVPEEAELIKYIYQEYLKGHGIVALERMTGKDRSTIKQWLNNKVYAGYNIFGKRKMNKTTFKPMKNPDETKIVEAKGDWEPIIDIDTWEKVANRMSLNQELRMRNIEKTSYLLSGLLFHTCGSKFRGNAGRKGTYYYRCTGCSRSIKSDTLDKKVLDELFNSEFLDELNKIPLENNNKDSELKKLKAQKSKLKTREENLIELYADGDITKEQFKSKKVDIQNSLIDIEAKIIELENERNEVKQNLDFKKMFIEALSNLKNTESKQEANKILKQIIKKIEVNEEREVFIHLNF

SEQ ID NO: 7739 - protein, 464 aa, Unknown
  Description of Unknown: Integrase B7740 sequence
  PTHR30461:SF3,SM00857,IPR006118,IPR036162,PF13408, PS51737,G3DSA:3.40.50.1390,IPR025827,IPR006119,IPR011109, SSF53041,PF00239,PTHR30461,PS00397, PS51736,Coil,cd00338
MMTNKIIRCALYIRVSTAEQCMHGKSLEAQESYLQQYASDHNMIVVGVYADEGKTARKELKKRKAIHSLLEDVKAGKIDIILFWRLDRWFRNLSDFYKVQDILDEYGVRWMSASEPGINMETRDGRLQLNVVLSIGQNEVDTTSERIKFVNEASIRQGKLIFGDANMGYGYKSGIVDGRKCMVKDPEREETVNAFYKYFFKHQNKCATLRYIQDNYDPNFSWAIMRTLLSSEFYKGTYRGFPYCPPYLTEDQWNELQKIAHKNIKRAKSGRIYLFTSLIRCPVCGQLLCGTGCKSIINRKTREKRDYCYYRCSRAHNDRICTYRHRLSQNLIEQYLLDNLDTEYRKYQIRVKKIEEEKKKIAQTKTPEKLNAELERLNLLFQKGRVEWDYYSSEYDRIEQELKDLSRIKPEVKRDLSFLEDLLQSDFKTLYASLSPENRRAFWRSTIKQIHLNEDSTIKFVDFL

SEQ ID NO: 7740 - protein, 464 aa, Unknown
  Description of Unknown: Integrase B7741 sequence
  PTHR30461:SF3,SM00857,IPR006118,IPR036162,PF13408, IPR025827,G3DSA:3.40.50.1390,PS51737,Coil,IPR006119, IPR011109,SSF53041,PTHR30461,PS00397,PS51736, cd00338,PF00239
MMTNKIIRCALYIRVSTAEQCMHGKSLEAQESYLQQYASDHNMIVVGVYADEGKTARKELKKRKAIHSLLEDVKAGKIDIILFWRLDRWFRNLSDFYKVQDILDEYGVRWMSASEPGINMETRDGRLQLNVVLSIGQNEVDTTSERIKFVNEASIRQGKLIFGDANMGYGYKSGIVDGRKCMVKDPEREETVNAFYKYFFKHQNKCATLRYIQDNYDPNFSWAIMRTLLSSEFYKGTYRGFPYCPPYLTEEQWNELQKVAHKNIKRAKSGRIYLFTSLIRCPVCGQLLCGTGCKSIINRKTREKRDYCYYRCSRAHNDRICTYRHRLSQNLIEQYLLDNLDTEYRKYQIRVKKIEEEKKKIAQTKTPEKLNAELERLNLLFQKGRVEWDYYSSEYDRIEQELKGLSKIKPEVKRNLSFLEDLLQSDFKTLYASLSPENRRAFWRSTIKQIHLNEDSTIKFVDFL

SEQ ID NO: 7741 - protein, 464 aa, Unknown
  Description of Unknown: Integrase B7742 sequence
  PTHR30461:SF3,SM00857,G3DSA:1.10.10.2600,IPR036162,PF13408, IPR025827,G3DSA:3.40.50.1390,PS51737,IPR006119,IPR038109, SSF53041,IPR011109,PTHR30461,PS51736,cd00338, PF00239
MNSTYFRPQPELFGLRVVKYIRCSHDGQVLHGDTLEAQDALLDEFIKVNRMVLIDTFIDEALTARKKFTRRKEFVRLLDGVRAHSFDMILFTKLDRWFRNIGDYHKIQEILEANGVQWKAITESYDTTTTNGRLHINIRLSVAQDECDRDSDRIKDVFAYKLKNKTYLSGSLPRGLKLDDEKHVIIDPEWKQFVLDMFDHFEQTNSKRGTLLYLKEKYGIYLCYDTISRNLRNSLYKGMYRDDPDFCEPLIEPERFDRIQVLGKRNVRQRYSNRTYVFTGLLICSSCNHYLVGQTTHRTLSDGTEKHYPSYRCNQRYQSHSCDRNRSYREDYVEEYLLQHIRPALSEYVAEYEVTGTNPARKNPAAEAAKIRTKMQKLYELYMDDLIDRDTYKRDYSAFQEKLKELDSIVVAPSRDLADLKKLLEQDYEEIYRTFSPQEKNAFWKSFVQSITVHEDGEMDIVFL

SEQ ID NO: 7742 - protein, 464 aa, Unknown
  Description of Unknown: Integrase B7743 sequence
  PTHR30461:SF3,SM00857,G3DSA:1.10.10.2600,IPR036162,PF13408, IPR025827,G3DSA:3.40.50.1390,PS51737,IPR006119,IPR038109, SSF53041,IPR011109,PTHR30461,PS51736,cd00338, PF00239
MNSTYFRPQPELFGLRVVKYIRCSHDGQVLHGDTLEAQDALLDEFIKVNRMVLIDTFIDEALTARKKFTRRKEFVRLLDGVRAHNFDMILFTKLDRWFRNIGDYHKIQEILEANGVQWKAITESYDTTTTNGRLHINIRLSVAQDECDRDSDRIKDVFAYKLKNKTYLSGSLPRGLKLDDEKHVIIDPEWKQFALDMFDHFEQTNSKRGTLLYLKEKYGIYLCYDTISRNLRNSLYKGMYRDDPDFCDPLIEPERFDRIQVLGKRNVRQRYSNRTYIFTGLLICSSCNHYLVGQTTHRTLSDGTEKHYPSYRCNQRYQSHSCDRNRSYREDYVEEYLLQHIRPALSEYVAEYEVTGTNPARKNPAAEAAKIRTKMQKLYELYMDDLIDRDTYKRDYSAFQEKLKELDSIVVAPSRDLADLKKLLEQDYEEIYRTFSPQEKNAFWKSFVQSITVHEDGEMDIVFL

SEQ ID NO: 7743 - protein, 464 aa, Unknown
  Description of Unknown: Integrase B7744 sequence
  PTHR30461:SF3,IPR036162,PS51737,IPR011109,PTHR30461, PS00397,PF00239,G3DSA:1.10.10.2600,IPR006119,SSF53041, SM00857,IPR025827,IPR038109,PS51736,cd03768, IPR006118,PF13408,G3DSA:3.40.50.1390,PF07508,Coil
MKRAALYIRVSTMEQAKEGYSIPAQTDKLKAFAKAKDMAVTKVYTDPGFSGAKMERPALQEMISDIQNKKIDVVLVYKLDRLSRSQKNTLYLIEDVFLKNNVDFISMQESFDTSTPFGRATIGMLSVFAQLERDTITERMHMGRTERAKQGYYHGSGIVPLGYDYVDGELIINDYEAQIIQEIYDLYVNQGKGQQYITKRMVAKYPDKVKTLTIVKYALTNPLYIGKISWDGKVYDGHHTPIIDKSMYDKAQEIIARKAQKGGEQHGNQLGLLLGITYCGKCGAKVFRYVSGGKKYRYNYYMCRSVKKMLPSLVKDWNCKQPSLRQEVVEKKVIDSLKSLDFKKIERELKQVENKTKSKITTINNQISKKHNEKQKILDLYQYGTFDVTMLNERMKKIDNEINALTDNISNLEGTKSESLINKLETLKTFNWETETTENKILIIKEFVERIELFDDEVIIKYKF

SEQ ID NO: 7744 - protein, 464 aa, Unknown
  Description of Unknown: Integrase B7745 sequence
  PTHR30461:SF3,SM00857,IPR006118,IPR036162,PS51737, G3DSA:3.40.50.1390,Coil,IPR006119,IPR011109,SSF53041, PTHR30461,PS00397,PS51736,cd00338,PF00239
MMTNKIIRCALYIRVSTAEQCMHGKSLEAQESYLQQYASDHNMIVVGVYADEGKTARKELKKRKAIHSLLEDVKAGKIDIILFWRLDRWFRNLSDFYKVQDILDEYGVRWMSASEPGINMETRDGRLQLNVVLSIGQNEVDTTSERIKFVNEASIRQGKLIFGDANMGYGYKSGIADGRKCMIKDPEREETVNAFYKYFFKHQNKCATLRYIQDNYDPNFSWAIMRTLLSSEFYKGTYRGFPYCPPYLTEDQWNELQKIAHKNIKRAKSGRIYLFTSLIRCPVCGQLLCGNGCKSIINRKTREKRDYCYYRCSRAHNDRICTYRHRLSQNLIEQYLLDNLDTEYRKYQIRVKKIEEEKKKIAQTKTPEKLNAELERLNLLFQKGRVEWDYYSSEYDRIEQELKDLSRIKPEVKRNLSFLEDLLQSDFKTLYASLSPENRRAFWRSTIKQIHLNEDSTIKFVDFL

SEQ ID NO: 7745 - protein, 464 aa, Unknown
  Description of Unknown: Integrase B7746 sequence
  PTHR30461:SF3,SM00857,G3DSA:1.10.10.2600,IPR036162,PF13408, IPR025827,G3DSA:3.40.50.1390,PS51737,IPR006119,IPR038109, IPR011109,SSF53041,PTHR30461,PS51736, cd00338,PF00239
MNSTYFRPQPELFGLRVVKYIRCSHDGQVLHGDTLEAQDALLDEFIKVNRMVLVDTFIDEALTARKKFTRRKEFVRLLDGVRSRIFDMILFTKLDRWFRNIGDYHKIQEILEENGVQWKAITESYDTTTTNGRLHINIRLSVAQDECDRDSDRIKDVFAYKLKNKTYLSGSLPRGLKLDDEKHVIIDPEWKQFALDMFDHFEQTNSKRGTLLYLKEKYGIYLCYDTISRNLRNSLYKGMYRDDPDFCEPLIEPERFDRIQVLGKRNVRQRYSNRTYIFTGLLICSSCNHYLVGQTTHRTLSDGTEKHYPSYRCNQRYQSHSCDRNRSYREDYVEEYLLQHIRPALSEYVAEYEVTGTNPARKNPAAEAAKIRTKMQKLYELYMDDLIDRDTYKRDYSAFQEKLKELDSIVVAPSRDLADLKKLLEQDYEEIYRTFSPQEKNAFWKSFVQSITVHEDGEMDIVFL

SEQ ID NO: 7746 - protein, 464 aa, Unknown
  Description of Unknown: Integrase B7747 sequence
  PTHR30461:SF3,SM00857,IPR006118,IPR036162,PF13408, PS51737,G3DSA:3.40.50.1390,Coil,IPR025827,IPR006119, SSF53041,IPR011109,PTHR30461,PS00397,PS51736, cd00338,PF00239
MPEKILRCAIYIRVSTFEQSVHGKSLQAQKECLEQYATDNNMSIVGVYADEGKTARKELKKRKAIHALVEDVKRDKIDVIIFWRLDRWFRNLSDFYKVQDVLDDHGVRWISVSEPGINMETRDGRLQLNVVLSIGQNEVDTTSERIKFVNEASIRQRKLIFGDANMPFGYKTGVVDGKKCMVKDPETEHMVEDFFNYFRIHNSKKGAVRYMQEVYGIDFSYGMLRTMLSSEFYKGTYRGYPYCPAYLSEKEWNEMQTISKRNIKSTPSGRVYLFTGLIRCPVCGQKLVGTGCSSVINRKTWEKRTYCYYRCNRALKDHICTYRHRVSQNLVEKYLLENLEREYEKYKVRSNQISEELKKQKKAKDPEKLRKEMERLNLLFQKGRISFDYYDKEYQRLEREYSASAAFCEEEETRNLHYVEELLKTDFRQMYDSLSPENRRSFWRSTIQEIYLNDDNTIKAVDFL

SEQ ID NO: 7747 - protein, 464 aa, Unknown
  Description of Unknown: Integrase B7748 sequence
  PTHR30461:SF3,SM00857,G3DSA:1.10.10.2600,IPR036162,PF13408, PS51737,IPR025827,G3DSA:3.40.50.1390,IPR006119,IPR038109, IPR011109,SSF53041,PTHR30461,PS51736,cd00338, PF00239
MNSTYFRPQPELFGLRVVKYIRCSHDGQVLHGDTLEAQDALLDEFIKVNRMVLVDTFIDEALTARKKFTRRKEFVRLLDGVRAHSFDMILFTKLDRWFRNIGDYHKIQEILEENGVQWKAITESYDTTTTNGRLHINIRLSVAQDECDRDSDRIKDVFAYKLKNKTYLSGSLPRGLKLDDEKHVIIDPEWKQFALDMFDHFEQTNSKRGTLLYLKEKYGIYLCYDTISRNLRNSLYKGMYRDDPDFCEPLIEPERFDRIQVLGKRNVRQRYSNRTYVFTGLLICSSCNHYLVGQTTHRTLSDGTEKHYPSYRCNQRYQSHSCDRNRSYREDYVEEYLLQHIRPALSEYVAEYEVTGTNPARKNPAAEAAKIRTKMQKLYELYMDDLIDRDTYKRDYSAFQEKLKELDSIVVAPSRDLADLKKLLEQDYEEIYRTFSPQEKNAFWKSFVQSITVHEDGEMDIVFL

SEQ ID NO: 7748 - protein, 464 aa, Unknown
  Description of Unknown: Integrase B7749 sequence
  PTHR30461:SF3,SM00857,IPR036162,PF13408,IPR025827, G3DSA:3.40.50.1390,PS51737,IPR006119,SSF53041,IPR011109, PTHR30461,PS51736,cd00338,PF00239
MNSTYFRPQPELFGLRVVKYIRCSHDGQVLHGDTLEAQDALLDEFIKVNRMILVDTFVDEALTARKKFTRRKEFVRLLDGVRAHNFDMILFTKLDRWFRNIGDYHKIQEILEANGVQWKAITESYDTTTTNGRLHINIRLSVAQDECDRDSDRIKDVFSYKLKNKTYLSGSLPRGLKLDAEKHVVIDPEWHQFTLDMFDHFESTCSKRGTQLFLQEKYGIRVCYDTVVRYLRNPLFMGQYRDDPEFCEKTISRERFEHIQNLAIRNVRIRHTQQFYIFSGLLICSSCNHYMTGTVTYRTLADGKEKTYKSYRCNFKAQSKLCDRSKHYREEYVEEYMLQHIRPALSSYVADFEVTAAAAAKKDPAIEIAKVERKMKKLYDLFMDDLIDKASYRSEYEKFQSQIDKLRSCPAAPVRNLDSIKKMLSDDWETVYHTFSDQEKNVFWKSFVQSITVHEDGEMDIVFL

SEQ ID NO: 7749 - protein, 464 aa, Unknown
  Description of Unknown: Integrase B7750 sequence
  PTHR30461:SF3,IPR036162,PS51737,IPR011109, PTHR30461,PS00397,PF00239,G3DSA:1.10.10.2600, IPR006119,SSF53041,cd00338,SM00857,IPR025827,IPR038109 ,PS51736,IPR006118,PF13408,G3DSA:3.40.50.1390,Coil
MRRKTTAPVEKILLRVAIYIRVSTDKQVKDGDSMRDQLATGQKYIDSHENMILVDTYIDDGISGQKLKRDDFQRLLDDVRAGRIDLIIFTRLDRWFRNLRHYLNTQDILDKHGVSWTAIEQPYFDTSTPHGRAFVNNSMIWAELEAQNDSDRILDVFDDKVDNGEVLSGSTPIGYKIESKHLVPDDDAPTAVSIFQYYRKSGNLSMTLRYMESEFGLVRSAASLKNMLTNTKYIGEFRDNKNYCPAIIDRDLFFDVQRLLDINIKDGKKHDYIFGGLVVCDDCDHIMSGCQQRSAGRIRADDGTRTVYKYSVYRCRQGVNLHRCPNRKLVFEKTLESMLLDRVRPELENYIAEYEVANLPALRTDAKRRSVESKMQKLKDLYLNDLITMDEFKLDREKLLMQLEKINAEDSRPIKDLSYLKSFLKMDFESVYDSLSIPERRELWRSIVKEIRVDHDKNIHIIFL

SEQ ID NO: 7750 - protein, 464 aa, Unknown
  Description of Unknown: Integrase B7751 sequence
  PTHR30461:SF3,SM00857,IPR036162,PF13408,PS51737, IPR025827,G3DSA:3.40.50.1390,IPR006119,IPR011109,SSF53041, PTHR30461,PS51736,cd00338,PF00239
MNSTYFRPQPELFGLRVVKYIRCSHDGQVLHGDTLEAQDALLDEFIKVNRMILVDTFVDEALTARKKFTRRKEFVRLLDGVRAHNFDMILFTKLDRWFRNIGDYHKIQEILEANGVQWKAITESYDTTTTNGRLHINIRLSVAQDECDRDSDRIKDVFSYKLKNKTYLSGSLPRGLKLDAEKHVVIDPEWHQFALDMFDHFESTCSKRGTQLFLQEKYGIRVCYDTVVRYLRNPLFMGQYRDDPEFCEKTISRERFEHIQNLAIRNVRIRHTQQFYIFSGLLICSSCNHYMTGTVTYRTLADGKEKTYKSYRCNFKAQSKLCDRSKHYREEYVEEYMLQHIRPALSSYVADFEVTAAAAAKKDPAIEIAKVERKMKKLYDLFMDDLIDKASYRSEYEKFQSQIDKLRSCPATPVRNLDSIKKMLSDDWETVYHTFSDQEKNVFWKSFVQSITVHEDGEMDIVFL

SEQ ID NO: 7751 - protein, 464 aa, Unknown
  Description of Unknown: Integrase B7752 sequence
  PTHR30461:SF3,IPR036162,PS51737,IPR011109, PTHR30461,PS00397,PF00239,G3DSA:1.10.10.2600, IPR006119,SSF53041,SM00857,IPR025827,IPR038109,PS51736 ,cd03768,IPR006118,PF13408,G3DSA:3.40.50.1390,PF07508,Coil
MKRAALYIRVSTMEQAKEGYSIPAQTDKLKAFAKAKDMAVTKIYTDPGFSGAKMERPALQEMISDIQNKKIDVVLVYKLDRLSRSQKNTLYLIEDVFLKNNVDFISMQESFDTSTPFGRATIGMLSVFAQLERDTITERMHMGRTERAKQGYYHGSGIVPLGYDYVDGELIINDYEAQIIQEIYDLYVNQGKGQQYITKRMVAKYPDKVKTLTIVKYALTNPLYIGKISWDGKVYDGHHTPIIDKSMYDKAQEIIARMAQKGGEQHGNQLGLLLGITYCGKCGAKVFRYVSGGKKYRYNYYMCRSVKKMLPSLVKDWNCKQPSLRQEVVEKKVIDSLKSLDFKKIERELKQVENKTKSKITTINNQISKKHNEKQKILDLYQYGTFDVTMLNERMKKIDNEINALTANIANLEGTKSESLINKLETLKTFNWETETTENKILIIKEFVERIELFDDEVIIKYKF

SEQ ID NO: 7752 - protein, 464 aa, Unknown
  Description of Unknown: Integrase B7753 sequence
  PTHR30461:SF3,SM00857,IPR006118,IPR036162,PF13408, PS51737,G3DSA:3.40.50.1390,Coil,IPR025827,IPR006119, IPR011109,SSF53041,PTHR30461,PS00397,PS51736, cd00338,PF00239
MQEKILRCAIYIRVSTFEQSVHGKSLQAQEECLKQYAADHNMAVVGIYADEGKTARKELKKRKAIHALVEDVKQDKIDVIVFWRLDRWFRNLSDFYKVQDVLDEHGVRWISVSEPGINMETRDGRLQLNVVLSIGQNEVDTTSERIKFVNEASIRQKKLIFGDANMPFGYKTGVVDGKKCMVKDSETEHMVEDFFEYFRNHNSKKGAIRYMQETYGIDFSYGMLRTMLSSEFYKGTYRGYPYCPAYLSEKEWDEMQTISKRNIKNTPSGRIYLFTGLMRCPVCGQKLVGTGCSSIVNRKTRKKRTYCYYRCNRALIDHICTYRHRVSQNLIEKYLLENLEREYEKYKVRTNQISEELKKQKKTKDPEKLRKEMERLNLLFQKGRISYDYYDKEYQRLEEEHSASAAFPEEEETRSLHYVEELLETDFRQMYDTLSLENRRSFWRSTIQEIYLNEDNTIKGVDFI

SEQ ID NO: 7753 - protein, 464 aa, Unknown
  Description of Unknown: Integrase B7754 sequence
  PTHR30461:SF3,SM00857,G3DSA:1.10.10.2600,IPR036162,PF13408, IPR025827,G3DSA:3.40.50.1390,PS51737,IPR006119,IPR038109, SSF53041,IPR011109,PTHR30461,PS51736,cd00338, PF00239
MNSTYFRPQPELFGLRVVKYIRCSHDGQVLHGDTLEAQDALLDEFIKVNRMVLIDTFIDEALTARKKFTRRKEFVRLLDGVRSRSFDMILFTKLDRWFRNIGDYHKIQEILEENGVQWKAITESYDTTTTNGRLHINIRLSVAQDECDRDSDRIKDVFAYKLKNKTYLSGSLPRGLKLDDEKHVIIDPEWKQFALDMFDHFEQTNSKRGTLLYLKEKYGIYLCYDTISRNLRNSLYKGMYRDDPDFCEPLIESERFDRIQVLGKRNVRQRYSNRTYIFTGLLICSSCNHYLVGQTTHRTLSDGTEKHYPSYRCNQRYQSHSCDRNRSYREDYVEEYLLQHIRPVLSEYVAEYEVTGTNPARKNPAAEAAKIRTKMQKLYELYMDDLIDRDTYKRDYSAFQEKLKELDSIVVAPSRDLADLKKLLEQDYEEIYRTFSPQEKNAFWKSFVQSITVHEDGEMDIVFL

SEQ ID NO: 7754 - protein, 464 aa, Unknown
  Description of Unknown: Integrase B7755 sequence
  PTHR30461:SF3,SM00857,G3DSA:1.10.10.2600,IPR036162,PF13408, IPR025827,G3DSA:3.40.50.1390,PS51737,IPR006119,IPR038109, IPR011109,SSF53041,PTHR30461,PS51736,cd00338, PF00239
MNSTYFRPQPELFGLRVVKYIRCSHDGQVLHGDTLEAQDALLDEFIKVNRMVLVDTFIDEALTARKKFTRRKEFVRLLDGVRSRSFDMILFTKLDRWFRNIGDYHKIQEILEENGVQWKAITESYDTTTTNGRLHINIRLSVAQDECDRDSDRIKDVFAYKLKNKTYLSGSLPRGFKLDDEKHVIIDPEWKQFALDMFDHFEQTNSKRGTLLYLKEKYGIYLCYDTISRNLRNSLYKGMYRDDPDFCEPLIEPERFDRIQVLGKRNVRQRYSNRTYIFTGLLICSSCNHYLVGQTTHRTLSDGTEKHYPSYRCNQRYQSHSCDRNRSYREDYVEEYLLQHIRPALSEYVAEYEVTGTNPARKNPAAEAAKIRTKMQKLYELYMDDLIDRDTYKRDYSAFQEKLKELDSIVVAPSRDLADLKKLLEQDYEEIYRTFSPQEKNAFWKSFVQSITVHEDGEMDIVFL

SEQ ID NO: 7755 - protein, 464 aa, Unknown
  Description of Unknown: Integrase B7756 sequence
  SM00857,IPR006118,IPR036162,PF13408,IPR025827, G3DSA:3.40.50.1390,PS51737,IPR006119,IPR011109,SSF53041, PF00239,PTHR30461,PS00397,PS51736,Coil, cd00338
MKSKTLRCAIYIRVSTTEQMMHGKSLEAQKDYLIHYAKEHDMNIVGIYADEGKTARKELKRRKAIQELVKAVERDEIDVILFWRLDRWFRNLSDFYKVQDILDQHNVRWISASEPGINMETRDGRLQLNVVLSIGQNEVDTTSERIKFVNEASIRQGKVIFGDSNMPIGYIVGTVDGVKRMVKDPEKEDLVNAFYRYFRTHQSKMKTLKFIQENYDPTFSYSQLRNMLESDFYHGAYRDNPHYCPAYLTEKEWAEIQEISNRNVKHPSSGRVYLFSGMMRCPVCGQLLAGRGGSSIINRKTRETRTYCYYRCNKACIDHMCTYRHNVSQNLIEEYLISNLEEEYNRYKIQSQNIHSKADLPKKKRTPAQVKKEMQRLNLLFQKERIEWDYYNEEYEKLTTELSSLKESDQQPKTNFDNIEKILHNDFRKTYDNLSPENRRAFWRSIIKEIHINTSHEVTGIDFY

SEQ ID NO: 7756 - protein, 464 aa, Unknown
  Description of Unknown: Integrase B7757 sequence
  PTHR30461:SF3,SM00857,IPR006118,IPR036162,PF13408, IPR025827,PS00397,G3DSA:3.40.50.1390,PS51737,IPR006119, SSF53041,IPR011109,PTHR30461,Coil,PS51736, cd00338,PF00239
MQEKILRCAIYIRVSTFEQSVHGKSLQAQKECLEQYATDNNMSIVGVYADEGKTARKELKKRKAIHALIEDVKKDRIDVILFWRLDRWFRNLSDFYKVQDVLDEHGVRWISVSEPGINMETRDGRLQLNVVLSIGQNEVDTTSERIKFVNEASIRQKKLIFGDANMPFGYKTGVVDGKKCMVKDPETEHMVEDFFNYFRIHNSKKGAVRYMQETYGVDFSYGMLRTMLSSEFYKGTYRGYPYCPAYLSEKEWNEMQIISKRNIKNTPSGRIYLFTGLMRCPVCGQKLVGTGCSSIINRKTGEKRTYCYYRCNRALIDHICTYRHRVSQNLIEKYLLENLEREYEKYKVRSNQISEELKKEKKAKDPEKLRKEMERLNLLFQKGRISFDYYDKEYQRLEEEYSASAAFPEEEETRSLHYVEELLETDFRQMYDSLSLENRRSFWRSTIREIYLNEDNTIKCVDFI

SEQ ID NO: 7757 - protein, 464 aa, Unknown
  Description of Unknown: Integrase B7758 sequence
  PTHR30461:SF3,IPR036162,PS51737,IPR011109,PTHR30461, PS00397,PF00239,G3DSA:1.10.10.2600,IPR006119,SSF53041, cd00338,SM00857,IPR025827,IPR038109,PS51736, IPR006118,PF13408,G3DSA:3.40.50.1390,Coil
MSEKLKRCALYIRVSTAEQCMHGKSLEAQREYLARYAKDHGMIPVGVYADEGKTARKELKKRKAIHALLEDVKAGKIDVILFWRLDRWFRNMSDFYKVQDILDEYGVYWISASEPGINMETRDGRLQLNVVLSIGQNEVDTTSERIKFVNEASIRQGKVIFGDCNMPRGYKVGIVDGKKCMVKDPEQEEMVNAFYDYFEKHQAKQATLRYMQRNYDPTFSYSVLRTMLSSEFYKGTYRGIPYCPAYVSEERWARIQQISKKTAKQTPSGRIYYFSGMIRCPVCGQLLAGTGCRSIINRKTGEKKDYCYYRCNRAMIDRICTNRHRLSQNLIESYLLDNLEHEFNAYKIRVEDIKKQKTKERPKVRTEKQIDKEMERLNILFQKGRIDWDYYSDEYDALEKEKREIAVIVPEPEQDYTFIEELLQKDFRSIYNSLSPENRRAFWRNTIRQIHLTPEYTVDFVDFI

SEQ ID NO: 7758 - protein, 464 aa, Unknown
  Description of Unknown: Integrase B7759 sequence
  PTHR30461:SF3,SM00857,G3DSA:1.10.10.2600,IPR036162,PF13408, IPR025827,PS51737,G3DSA:3.40.50.1390,IPR006119,IPR038109, IPR011109,SSF53041,PTHR30461,PS51736,cd00338, PF00239
MNSTYFRPQPELFGLRVVKYIRCSHDGQVLHGDTLEAQDALLDEFIKVNRMVLIDTFIDEALTARKKFTRRKEFVRLLDGVRSRSFDMILFTKLDRWFRNIGDYHKIQEILEENGVQWKAITESYDTTTTNGRLHINIRLSVAQDECDRDSDRIKDVFAYKLKNKTYLSGSLPRGLKLDDEKHVIIDPEWKQFALDMFDHFEQTNSKRGTLLYLKEKYGIYLCYDTISRNLRNSLYKGMYRDDPDFCEPLIEPERFDRIQVLGKRNVRQRYSNRTYIFTGLLICSSCNHYLVGQTTHRTLSDGTEKHYPSYRCNQRYQSHSCDRNRSYREDYVEEYLLQHIRPALSEYVAEYEVTGTTPARKNPAAEAAKIRTKMQKLYELYMDDLIDRDTYKRDYSAFQEKLKELDSIVVAPSRDLADLKKLLEQDYEEIYRTFSPQEKNAFWKSFVQSITVHEDGEMDIVFL

SEQ ID NO: 7759 - protein, 464 aa, Unknown
  Description of Unknown: Integrase B7760 sequence
  PTHR30461:SF3,SM00857,IPR036162,PF13408,PS51737, IPR025827,G3DSA:3.40.50.1390,IPR006119,IPR011109,SSF53041, PF00239,PTHR30461,PS51736,Coil,cd00338
MNSTYFRPQPELFGLRVVKYIRCSHDGQVLHGDTLEAQDALLDEFIKVNRMVLIDTFIDEALTARKKFTRRKEFVRLLDGVRAHSFDMILFTKLDRWFRNIGDYHKIQEILEANGVQWKAITESYDTTTTNGRLHINIRLSVAQDECDRDSDRIKDVFAYKLKNKTYLSGSLPRGLKLDAEKHVVIDPEWHQFALDMFDRFEFTCSKRGTQLFLQEKYGIRVCYDTVVRYLRNPLFMGQYRDDPDFCEKTISRERFERIQNLAIRNVRIRHTQQFYIFSGLLICSSCNHYMTGTVTYRTLADGKEKTYKSYRCNFKAQSKLCDRSKHYREEYVEEYMLQHIRPALSSYVADFEVTAAAAAKKDPAIEIAKVERKMKKLYDLFMDDLIDKASYRNEYEKFQSQIDKLRSCPAAPVRNLDSIKKMLSDDWETVYHTFSDQEKNVFWKSFVQSITVHEDGEMDIVFL

SEQ ID NO: 7760 - protein, 464 aa, Unknown
  Description of Unknown: Integrase B7761 sequence
  PTHR30461:SF3,SM00857,G3DSA:1.10.10.2600,IPR036162,PF13408, IPR025827,PS51737,G3DSA:3.40.50.1390,IPR006119,IPR038109, PF07508,SSF53041,IPR011109,PTHR30461, PS51736,cd00338,PF00239
MRKCTAFALHNDIQIVGEYIDRAFSAKTDNRPSFQKMIKDSAKGEFDVIIVWKLDRFARNRYDSAHYKNILKKNGVKVVSATEAISSGAEGIILESVLEGMAEYYSAELAEKVSRGMKENALKCKYNGGSVPLGYYIDESKHFQIDSSVAPFVVECFEHYADGMTMKQLRDELNMKGVKNSRGGKLSIDVISRMLTNRKYLGEYTFQDITIKDGIPAIVSTSLFEKVQDRLTKTKKAPSSHKADDDYILTTKLFCGKCKSFMVGESGTNAQGKKYRYYKCVNHKKHQGCDMKSIRKDLIENMTIKYIREFLNDEDLINTLIDLAYDAQHKENEQLPLLRKQLAQTEKGIKNIVDAIEQGISTKSTRERLLDLEQRKNDIEMSISKESIENPMLTKKQFKFWFDQLKKLDISKSEQRQKLVDLFVNSIIIYDDHIKFFFNYKEHTETITFDELNNCSDLPDSPRP

SEQ ID NO: 7761 - protein, 464 aa, Unknown
  Description of Unknown: Integrase B7762 sequence
  SM00857,G3DSA:1.10.10.2600,IPR036162,PS51737,G3DSA:3.40.50.1390, IPR006119,IPR038109,PF07508,SSF53041,IPR011109, PF00239,PTHR30461,PS51736,Coil,cd00338
MREVKKAIAYFRVSTDMQKEDLSLETQEKGGEIFARDNNIEIVKKFTDVMSGGNRNRKGFIEAQKYLEENQGEIDYFIAYDVSRIARDAFAFLSLFNKLNLLNVKLKLINNPTLDSDSPMGKLILTILAAIFEFFRFDNADRVRDNMIVKVKEGKRMNNAPYGYRIIDKKMVIVPEEAELIKYIYQEYLKGHGIVALERMTGKDRSTIKQWLNNKVYAGYNIFGKRKMNKTTFKPMKNPDETKIVEAKGDWEPIIDIDTWEKVANRMSLNQELRMRNIEKTSYLLSGLLFHTCGSKFRGNAGRKGTYYYRCTGCSRSIKSDTLDKKVLDELFNSEFLDELNKIPLENNNKDNELKKLKAQKSKLKTREENLIELYADGDITKEQFKSKKVDIQNSLIDIEAKIIELENERNEVKQNLDFKKMFIEALSNLKNAESKQEANKILKQIIKKIEVNEEREVFIHLNF

SEQ ID NO: 7762 - protein, 464 aa, Unknown
  Description of Unknown: Integrase B7763 sequence
  PTHR30461:SF3,SM00857,IPR036162,PF13408,PS51737, G3DSA:3.40.50.1390,IPR025827,IPR006119,IPR011109,SSF53041, PTHR30461,PS51736,cd00338,PF00239
MNSTYFRPQPELFGLRVVKYIRCSHDGQVLHGDTLEAQDALLDEFIKVNRMILVDTFVDEALTARKKFTRRKEFVRLLDGVRAHNFDMILFTKLDRWFRNIGDYHKIQEILEANGVQWKAITESYDTTTTNGRLHINIRLSVAQDECDRDSDRIKDVFSYKLKNKTYLSGSLPRGLKLDAEKHVVIDPEWHQFALDMFDHFESTCSKRGTQLFLQEKYGIRVCYDTVVRYLRNPLFMGQYRDDPEFCEKTISRERFEHIQNLAIRNVRIRHTQQFYIFSGLLICSSCNHYMTGTVTYRTLADGKEKTYKSYRCNFKAQSKLCDRSKHYREEYVEEYMLQHIRPALSSYVADFEVTAAAAAKKDPAIEIAKVERKMKKLYDLFMDDLIDKASYRSEYEKFQSQIDKLRSCPAAPVRNLDSIKKMLSDDWETVYHTFSDQEKNVFWKSFVQSITVHEDGEMDIVFL

SEQ ID NO: 7763 - protein, 464 aa, Unknown
  Description of Unknown: Integrase B7764 sequence
  PTHR30461:SF3,SM00857,G3DSA:1.10.10.2600,IPR036162,PF13408, IPR025827,PS51737,G3DSA:3.40.50.1390,IPR006119,IPR038109, IPR011109,SSF53041,PTHR30461,PS51736,cd00338, PF00239
MNSTYFRPQPELFGLRVVKYIRCSHDGQVLHGDTLEAQDALLDEFIKVNRMVLVDTFVDEALTARKKFTRRKEFVRLLDGVRSHSFDMILFTKLDRWFRNIGDYHKIQEILEANGVQWKAITESYDTTTTNGRLHINIRLSVAQDECDRDSDRIKDVFAYKLKNKTYLSGSLPRGLKLDDEKHVIIDPEWKQFALDMFDHFEQTNSKRGTLLYLKEKYGIYLCYDTISRNLRNSLYKGMYRDDPDFCEPLIEPERFDRIQVLGKRNVRQRYSNRTYIFTGLLICSSCNHYLVGQTTHRTLSDGTEKHYPSYRCNQRYQSHSCDRNRSYREDYVEEYLLQHIRPALSEYVAEYEVTGTNPARKNPAAEAAKIRTKMQKLYELYMDDLIDRDTYKRDYSAFQEKLKELDSIVVAPSRDLADLKKLLEQDYEEIYRTFSPQEKNAFWKSFVQSITVHEDGEMDIVFL

SEQ ID NO: 7764 - protein, 464 aa, Unknown
  Description of Unknown: Integrase B7765 sequence
  PTHR30461:SF3,SM00857,IPR036162,PF13408,PS51737, G3DSA:3.40.50.1390,IPR025827,IPR006119,IPR011109,SSF53041, PF00239,PTHR30461,PS51736,Coil,cd00338
MNSTYFRPQPELFGLRVVKYIRCSHDGQVLHGDTLEAQDALLDEFIKVNRMVLIDTFIDEALTARKKFTRRKEFVRLLDGVRAHSFDMILFTKLDRWFRNIGDYHKIQEILEANGVQWKAITESYDTTTTNGRLHINIRLSVAQDECDRDSDRIKDVFAYKLKNKTYLSGSLPRGLKLDAEKHVVIDPEWHQFALDMFDRFESTCSKRGTQLFLQEKYGIRVCYDTVVRYLRNPLFMGQYRDDPDFCEKTISRERFERIQNLAIRNVRIRHTQQFYIFSGLLICSSCNHYMTGTVTYRTLADGKEKTYKSYRCNFKAQSKLCDRSKHYREEYVEEYMLQHIRPALSSYVADFEVTAAAAAKKDPAIEIAKVERKMKKLYDLFMDDLIDKASYRNEYEKFQSQIDKLRSCPAAPVRNLDSIKKMLSDDWETVYHTFSDQEKNVFWKSFVQSITVHEDGEMDIVFL

SEQ ID NO: 7765 - protein, 464 aa, Unknown
  Description of Unknown: Integrase B7766 sequence
  PTHR30461:SF3,SM00857,IPR006118,IPR036162,PF13408, PS51737,G3DSA:3.40.50.1390,IPR025827,IPR006119,IPR011109, SSF53041,PF00239,PTHR30461,PS00397, PS51736,Coil,cd00338
MQEKILRCAIYIRVSTFEQSVHGKSLQAQKECLKQYAADHNMAVVGIYADEGKTARKELKKRKAIHALVEDVKKDRIDVILFWRLDRWFRNLSDFYKVQDVLDAHGVRWISVSEPGINMETRDGRLQLNVVLSIGQNEVDTTSERIKFVNESSIRQKKLIFGDANMPFGYKTGVVDGKKCMVKDPETEHMVEDFFKYFKSHNSKKGAVRYMQEAYGIDFSYGMLRTMLSSEFYKGTYRGYPYCPAYLSEKEWNEMQIISKRNIKNTPSGRIYLFTGLMRCPVCGQKLVGTGCSSIIDRKTREKRTYCYYRCNRALKDHICTYRHRVSQNLIEKYLLENLEREYEKYKVRSNKISEELKKQKKAKDPKKLRKEMERLNILFQKGRISYDYYDKEYQRLEREYSASAAFCEEEETRNLHYVEELLKTDFRQMYDSLSPENRRSFWRSTIQEIYLNDDNTIKAVDFL

SEQ ID NO: 7766 - protein, 464 aa, Unknown
  Description of Unknown: Integrase B7767 sequence
  cd00338,SM00857,IPR006118,G3DSA:1.10.10.2600,IPR036162, PF13408,PS51737,G3DSA:3.40.50.1390,IPR025827,IPR006119, IPR038109,SSF53041,IPR011109,PTHR30461,PS00397, PS51736,Coil,PF00239
MKSKTLRCAIYIRVSTTEQMMHGKSLEAQKDYLIHYAKEHDMNIVGIYADEGKTARKELKRRKAIQELVKAVERDEIDVILFWRLDRWFRNLSDFYKVQDILDQHNVRWISASEPGINMETRDGRLQLNVVLSIGQNEVDTTSERIKFVNEASIRQGKVIFGDSNMPIGYMVGTVDGVKRMVKDPEKEDLVNAFYRYFRTHQSKMKTLKFIQENYDPTFSYSQLRNMLESDFYHGTYRDNPHYCPAYLTEKEWAEIQEISNRNVKHPSSGRVYLFSGMMRCPVCGQLLAGRGGSSIINRKTRETRTYCYYRCNKACIDHMCTYRHNVSQNLIEEYLISNLEEEYNRYKIQSQNIHSKADLPKKKRTPEQVKKEMQRLNLLFQKERIEWDYYNEEYEKLTTELSSLEESDQQPKTNFDNIEKILHNDFRKTYDNLSPENRRAFWRSIIKEIHINTNHEVTGIDFY

SEQ ID NO: 7767 - protein, 464 aa, Unknown
  Description of Unknown: Integrase B7768 sequence
  PTHR30461:SF3,SM00857,G3DSA:1.10.10.2600,IPR036162,PF13408, IPR025827,PS51737,G3DSA:3.40.50.1390,IPR006119,IPR038109, IPR011109,SSF53041,PTHR30461,PS51736,cd00338, PF00239
MNSTYFRPQPELFGLRVVKYIRCSHDGQVLHGDTLEAQDALLDEFIKVNRMVLIDTFIDEALTARKKFTRRKEFVRLLDGVRAHSFDMILFTKLDRWFRNIGDYHKIQEILEANGVQWKAITESYDTTTTNGRLHINIRLSVAQDECDRDSDRIKDVFAYKLKNKTYLSGSLPRGLKLDDEKHVIIDPEWKQFALDMFDHFEQTNSKRGTLLYLKEKYGIYLCYDTISRNLRNSLYKGMYRDDPDFCEPLIEPERFDRIQVLGKRNVRQRYSNRTYIFTGLLICSSCNHYLVGQTTHRTLSDGTEKHYPSYRCNQRYQSHSCDRNRSYREDYVEEYLLQHIRPALSEYVAEYEVTGTNPARKNPAAEAAKIRTKMQKLYELYMDDLIDRDTYKRDYSAFQEKLKELDSIVVAPSRDLADLKKLLEQDYEEIYRTFSPQEKNAFWKSFVQSITVHEDGEMDIVFL

SEQ ID NO: 7768 - protein, 464 aa, Unknown
  Description of Unknown: Integrase B7769 sequence
  PTHR30461:SF3,cd00338,SM00857,IPR036162,PF13408, PS51737,G3DSA:3.40.50.1390,IPR025827,IPR006119,SSF53041, IPR011109,PTHR30461,PS51736,Coil,PF00239
MNSTYFRPQPELFGLRVVKYIRCSHDGQVLHGDTLEAQDALLDEFIKVNRMVLIDTFIDEALTARKKFTRRKEFVRLLDGVRAHNFDMILFTKLDRWFRNIGDYHKIQEILEANGVQWKAITESYDTTTTNGRLHINIRLSVAQDECDRDSDRIKDVFSYKLKNKTYLSGSLPRGLKLDAEKHVVIDPEWHQFALDMFDHFESTCSKRGTQLFLQEKYGIRVCYDTVVRYLRNPLFMGQYRDDPEFCEKTISRERFEHIQNLAIRNVRIRHTQQFYIFSGLLICSSCNHYMTGTVTYRTLADGKEKTYKSYRCNFKAQSKLCDRSKHYREEYVEEYMLQHIRPALSSYVADFEVTAAAAAKKDPAIEIAKVERKMKKLYDLFMDDLIDKASYRNEYEKFQSQIDKLRSCPAAPVRNLDSIKKMLSDDWETVYHTFSDQEKNVFWKSFVQSITVHEDGEMDIVFL

SEQ ID NO: 7769 - protein, 464 aa, Unknown
  Description of Unknown: Integrase B7770 sequence
  PTHR30461:SF3,IPR036162,PS51737,IPR011109,PTHR30461, PS00397,PF00239,G3DSA:1.10.10.2600,IPR006119,SSF53041, SM00857,IPR025827,IPR038109,PS51736, cd03768,IPR006118,PF13408,G3DSA:3.40.50.1390,PF07508,Coil
MKRAALYIRVSTMEQAKEGYSIPAQTDKLKAFAKAKDMAVTKIYTDPGFSGAKMERPALQEMISDIQNKKIDVVLVYKLDRLSRSQKNTLYLIEDVFLKNNVDFISMQESFDTSTPFGRATIGMLSVFAQLERDTITERMHMGRTERAKQGYYHGSGIVPLGYDYVDGELIINDYEAQIIQEIYDLYVNQGKGQQYITKRMVAKYPDKVKTLTIVKYALTNPLYIGKISWDGKVYDGHHTPIIDKSMYDKAQEIIARKAQKGGEQHGNQLGLLLGITYCGKCGAKVFRYVSGGKKYRYNYYMCRSVKKMLPSLVKDWNCKQPSLRQEVVEKKVIDSLKSLDFKKIERELKQVENKTKSKITTINNQISKKHNEKQKILDLYQYGTFDVTMLNERMKKIDNEINALTANIANLEGTKSESLINKLETLKTFNWETETTENKILIIKEFVERIELFDDEVIIKYKF

SEQ ID NO: 7770 - protein, 464 aa, Unknown
  Description of Unknown: Integrase B7771 sequence
  PTHR30461:SF3,SM00857,G3DSA:1.10.10.2600,PS51736,IPR036162, PS51737,G3DSA:3.40.50.1390,PF13408,IPR025827,IPR006119, IPR038109,PF07508,IPR011109,SSF53041,PTHR30461, mobidb-lite,cd00338,PF00239
MNEKTMTLTRMEAPAQLPVRKRVAAYARVSMEKDAMLHSLAAQVSYYSERIQRNPEWEYAGVFADFGLTGTKETRPEFQRMLQECREGKIDLILVKSISRFARNTLTLLNTVRELKGLGIGVYFEEQKLDTLSGDGEFMLTILASFAQEESRSVSENCKWRIRKKFEQGIPTGFGMYGYKVRNGSFAIKPEEAAVVRRIFQMYLEGMGSVKIMKLLTEEGVPAPLGGLWNASVVMEMLKNEKYVGDLLLQKFYTNNHVEKKRFHNRGELPQYFVGEDHEPIIDRETFDAVQREIAWRTAQRKAAKAKRTATNAELSASAVEPSMSSSGNNSRETIPLTDRIYCGVCGKRYRYKVTRLGTPYAAPVWICSTFNYRGKAYCASKQIPEDILKELIASALGTVYTEDSVHHIEMHPGNRVLFVFQDGHTEEHFWEDHSRKDSWNEEKRQKAAEKTRIQHQKRKEQEQ

SEQ ID NO: 7771 - protein, 464 aa, Unknown
  Description of Unknown: Integrase B7772 sequence
  PTHR30461:SF3,SM00857,G3DSA:1.10.10.2600,IPR036162,PF13408, IPR025827,PS51737,G3DSA:3.40.50.1390,IPR006119,IPR038109, IPR011109,SSF53041,PTHR30461,PS51736,cd00338, PF00239
MNSTYFRPQPELFGLRVVKYIRCSHDGQVLHGDTLEAQDALLDEFIKVNRMVLIDTFIDEALTARKKFTRRKEFVRLLDGVRAHSFDMILFTKLDRWFRNIGDYHKIQEILEANGVQWKAITESYDTTTTNGRLHINIRLSVAQDECDRDSDRIKDVFAYKLKNKTYLSGSLPRGLKLDDEKHVIIDPEWKQFALDMFDHFEQTNSKRGTLLYLKEKYGIYLCYDTISRNLRNSLYKGMYRDDPDFCEPLIEPERFDRIQVLGKRNVRQRYSNRTYIFTGLLICSSCNHYLVGQTTHRTLSDGTEKHYPSYRCNQRYQSHSCDRNRSYREDYVEEYLLQHIRPALSEYVAEYEVTGTNPARKNPAAEAAKIRTKMQKLYELYMDDLIDRDTYKRDYSAFQEKLKELDSIVVAPSRDLADLKKLLEQDYEDIYRTFSPQEKNAFWKSFVQSITVHEDGEMDIVFL

SEQ ID NO: 7772 - protein, 464 aa, Unknown
  Description of Unknown: Integrase B7773 sequence
  PTHR30461:SF3,SM00857,G3DSA:1.10.10.2600,IPR036162,PF13408, IPR025827,PS51737,G3DSA:3.40.50.1390,IPR006119,IPR038109, IPR011109,SSF53041,PTHR30461,PS51736,cd00338, PF00239
MNSTYFRPQPELFGLRVVKYIRCSHDGQVLHGDTLEAQDALLDEFIKVNRMVLVDTFIDEALTARKKFTRRKEFVRLLDGVRAHNFGMILFTKLDRWFRNIGDYHKIQEILEANGVQWKAITESYDTTTTNGRLHINIRLSVAQDECDRDSDRIKDVFAYKLKNKTYLSGSLPRGLKLDDEKHVIIDPEWKQFALDMFDHFEQTNSKRGTLLYLKEKYGIYLCYDTISRNLRNSLYKGMYRDDPDFCEPLIEPERFDRIQVLGKRNVRQRYSNRTYIFTGLLICSSCNHYLVGQTTHRTLSDGTEKHYPSYRCNQRYQSHSCDRNRSYREDYVEEYLLQHIRPALSEYVAEYEVTGTNPARKNPAAEAAKIRTKMQKLYELYMDDLIDRDTYKRDYSAFQEKLKELDSIVVAPSRDLADLKKLLEQDYEEIYRTFSPQEKNAFWKSFVQSITVHEDGEMDIVFL

SEQ ID NO: 7773 - protein, 464 aa, Unknown
  Description of Unknown: Integrase B7774 sequence
  PTHR30461:SF3,SM00857,G3DSA:1.10.10.2600,IPR036162,PF13408, IPR025827,G3DSA:3.40.50.1390,PS51737,IPR006119,IPR038109, IPR011109,SSF53041,PTHR30461,PS51736,cd00338, PF00239
MNSTYFRPQPELFGLRVVKYIRCSHDGQVLHGDTLEAQDSLLDEFIAVNRMVLVDTFIDEALTARKKFTRRKEFVRLLDGVRSRSFDMILFTKLDRWFRNIGDYHKIQEILEANGVQWKAITESYDTTTTNGRLHINIRLSVAQDECDRDSDRIKDVFAYKLKNKTYLSGSLPRGLKLDDEKHVIIDPEWKQFALDMFDHFEQTNSKRGTLLYLKEKYGIYLCYDTISRNLRNSLYKGMYRDDPDFCEPLIEPERFDRIQVLGKRNVRQRYSNRTYIFTGLLICSSCNHYLVGQTTHRTLSDGTEKHYPSYRCNQRYQSHSCDRNHSYREDYVEEYLLQHIRPALSEYVAEYEVTGTNPARKNPAAEAAKIRTKMQKLYELYMDDLIDRDTYKRDYSAFQEKLKELDSIVVAPSRDLADLKKLLEQDYEEIYRTFSPQEKNAFWKSFVQSITVHEDGEMDIVFL

SEQ ID NO: 7774 - protein, 464 aa, Unknown
  Description of Unknown: Integrase B7775 sequence
  PTHR30461:SF3,SM00857,IPR036162,PF13408,PS51737, G3DSA:3.40.50.1390,IPR025827,IPR006119,IPR011109,SSF53041, PF00239,PTHR30461,PS51736,Coil,cd00338
MNSTYFRPQPELFGLRVVKYIRCSHDGQVLHGDTLEAQDALLDEFIKVNRMVLVDTFIDEALTARKKFTRRKEFVRLLDGVRSHSFDMILFTKLDRWFRNIGDYHKIQEVLEANGVQWKAITESYDTTTTNGRLHINIRLSVAQDECDRDSDRIKDVFAYKLKNKTYLSGSLPRGLKLDAEKHVVIDPEWHQFALDMFDHFESTCSKRGTQLFLQEKYGIRVCYDTVVRYLRNPLFMGQYRDDPDFCEKTISRERFEHIQNLAIRNVRIRHTQQFYIFSGLLICSSCNHYMTGTVTYRTLADGKEKTYKSYRCNFKAQSKLCDRSKHYREEYVEEYMLQHIRPALSSYVADFEVTAAAAAKKDPAIEIAKVERKMKKLYDLFMDDLIDKASYRNEYEKFQSQIDKLRSCPAAPVRNLDSIKKMLSDDWETVYHTFSDHEKNVFWKSFVQSITVHEDGEMDIVFL

SEQ ID NO: 7775 - protein, 464 aa, Unknown
  Description of Unknown: Integrase B7776 sequence
  PTHR30461:SF3,cd00338,SM00857,IPR006118,G3DSA:1.10.10.2600, IPR036162,PS51737,G3DSA:3.40.50.1390,IPR006119,IPR038109, PF07508,IPR011109,SSF53041,PTHR30461, PS00397,PS51736,Coil,PF00239
MKKQLKALIYARVSTVMQEEGDSLVYQKKKCEDFCSVKGYEIYKILEDVESGANDDRSGFIELQNEIARKNFDVLVVFESSRISRKTLTMLNFVLSLEENGIKFTSISQPELDTTTPTGMLFFQIQSSLGEYERKQISSRVKSSKWQRIKDGLWQGGSIPLGYKKENDNIVVDEKGVNEVKSIFFHYLSSHSLKQTSRAFNKPIGSIKWILENPFYLGKLTYGKKEKNINTGIIKINSSYHVFEGKHPPIIDEETFDTVQKILTTKKRVIQSENVLLFSGLIRCTCGEKMYKNTSMNKGNIRIRYYCKNCYKTIAYKKAEDIIIKALLDMKELEEINDVVDSENKILNDKMEIYKASMKQVNDERKKYINLYSKDYITIEDLDEKMQVTKSKIDDFTDKINKLQKVIDEEKITKNYNSNLETLKAVLKDMDKSDRIDLYNMFKLLIKKIDLISSKPPEFKIYLK

SEQ ID NO: 7776 - protein, 464 aa, Unknown
  Description of Unknown: Integrase B7777 sequence
  PTHR30461:SF3,SM00857,IPR006118,IPR036162,PF13408, IPR025827,G3DSA:3.40.50.1390,PS00397,PS51737,IPR006119, IPR011109,SSF53041,PTHR30461,Coil,PS51736, cd00338,PF00239
MQEKILRCAIYIRVSTFEQSVHGKSLQAQKECLKQYAADHNMAVVGIYADEGKTARKELKKRKAIHALVEDVKKDRIDVILFWRLDRWFRNLSDFYKVQDVLDAHGVRWISVSEPGINMETRDGRLQLNVVLSIGQNEVDTTSERIKFVNESSIRQKKLIFGDANMPFGYKTGVVDGKKCMVKDPETEHMVEDFFKYFKSHNSKKGAVRYMQEAYGIDFSYGMLRTMLSSEFYKGTYRGYPYCPAYLSEKEWNEMQIISKRNIKNTPSGRIYLFTGLMRCPVCGQKLVGTGCSSIIDRKTREKRTYCYYRCNRALIDHICTYRHRVSQNLVEKYLLENLEREYEKYKVRSNQIGEELKKQKKAKDPEKLRKEMERLNLLFQKGRISFDYYDKEYQRLEREYSASAAFCEEEETRNLHYVEELLKTDFRQMYDSLSPENRRSFWRSTIQEIYLNDDNTIKAVDFL

SEQ ID NO: 7777 - protein, 464 aa, Unknown
  Description of Unknown: Integrase B7778 sequence
  PTHR30461:SF3,SM00857,IPR036162,PF13408,PS51737, G3DSA:3.40.50.1390,IPR025827,IPR006119,SSF53041,IPR011109, PTHR30461,PS51736,cd00338,PF00239
MNSTYFRPQPELFGLRVCKYIRCSHDGQVLHGDTLEAQNALLDEFIKVNHMILVDTFVDEALTARKKFTRRKEFVRLLDGVRAHNFDMILFTKLDRWFRNIGDYHKIQEILEANGVQWKAITESYDTTTTNGRLHINIRLSVAQDECDRDSDRIKDVFAYKLKNKTYLSGSLPRGLKLDAEKHVVIDPEWHQFALDMFDHFESTCSKRGTQLFLQEKYGIRVCYDTVVRYLRNPLFMGQYRDDPEFCEKTISRERFEHIQNLAIRNVRIRHTQQFYIFSGLLICSSCNHYMTGTVTYRTLADGKEKTYKSYRCNFKAQSKLCDRSKHYREEYVEEYMLQHIRPALSSYVADFEVTAAAAAKKDPAVEIAKVERKMKKLYDLFMDDLIDKASYRKEYEKFQTQIDKLRSCPAAPVRNLDSVKKMLSDDWETVYHTFSDQEKNVFWKSFVQSITVHEDGEMDIVFL

SEQ ID NO: 7778 - protein, 464 aa, Unknown
  Description of Unknown: Integrase B7779 sequence
  PTHR30461:SF3,IPR036162,PS51737,IPR011109, PTHR30461,PS00397,PF00239,G3DSA:1.10.10.2600, IPR006119,SSF53041,SM00857,IPR025827,IPR038109,PS51736 ,cd03768,IPR006118,PF13408,G3DSA:3.40.50.1390,PF07508,Coil
MKRAALYIRVSTMEQAKEGYSIPAQTDKLKAFAKAKDMAVTKVYTDPGFSGAKMERPALQEMISDIQNKKIDVVLVYKLDRLSRSQKNTLYLIEDVFLKNNVDFISMQESFDTSTPFGRATIGMLSVFAQLERDTITERMHMGRTERAKQGYYHGSGIVPLGYDYVDGELIINDYEAQIIQEIYDLYVNQGKGQQYITKRMVAKYPDKVKTLTIVKYALTNPLYIGKISWDGKVYDGHHTPIIDKSMYDKAQEIIARKAQKGGEQHGNQLGLLLGITYCGKCGAKVFRYVSGGKKYRYNYYMCRSVKKMLPSLVKDWNCKQPSLRQEVVEKKVIDSLKSLDFKKIERELKQVENKTKSKITTINNQISKKHNEKQKILDLYQYGTFDVTMLNERMKKIDNEINALTANISNLEGTKSESLINKLETLKTFNWETETTENKILIIKEFVERIELFDDEVIIKYKF

SEQ ID NO: 7779 - protein, 464 aa, Unknown
  Description of Unknown: Integrase B7780 sequence
  PTHR30461:SF3,cd00338,SM00857,IPR036162,PF13408, PS51737,G3DSA:3.40.50.1390,IPR025827,IPR006119,IPR011109, SSF53041,PTHR30461,PS51736,Coil,PF00239
MNSTYFRPQPELFGLRVVKYIRCSHDGQVLHGDTLEAQDALLDEFIKVNRMVLVDTFIDEALTARKKFTRRKEFVRLLDGVRSHSFDMILFTKLDRWFRNIGDYHKIQEVLEANGVQWKAITESYDTTTTNGRLHINIRLSVAQDECDRDSDRIKDVFAYKLKNKTYLSGSLPRGLKLDAEKHVVIDPEWHQFALDMFDHFEFTCSKRGTQLFLQEKYGIRVCYDTVVRYLRNPLFMGQYRDDPDFCEKTISRERFERIQNLAIRNVRIRHTQQFYIFSGLLICSSCNHYMTGTVTYRTLADGKEKTYKSYRCNFKAQSKLCDRSKHYREEYVEEYMLQHIRPALSSYVADFEVTAAAAAKKDPAIEIAKVERKMKKLYDLFMDDLIDKASYRNEYEKFQSQIDKLRSCPAAPVRNLDSIKKMLSDDWETVYHTFSDQEKNVFWKSFVQSITVHEDGEMDIVFL

SEQ ID NO: 7780 - protein, 464 aa, Unknown
  Description of Unknown: Integrase B7781 sequence
  PTHR30461:SF3,SM00857,G3DSA:1.10.10.2600,IPR036162,PF13408, PS51737,G3DSA:3.40.50.1390,IPR025827,IPR006119,IPR038109, PF07508,IPR011109,SSF53041,PTHR30461, Coil,cd00338,PF00239
MTIIGEYCDRAISGKTDNRPNFQRLIKDSEKEQFEAVIMYTLDRFARNRYDSAIYKAKLKKNGVKVYYAKQPMPDTPEGIILESVLEGYAEYYSENLSRNIKRGMKENALQCLANGGAGMPLGYTVGKDRKYKIDPVGAKIVQEIFQMYADGMSATQIINECNRRGYKTSRGNDFNKNSLRTILKNDRYIGVYRFADVIVEDGVPPIISRELFEKVQAMFKHNYSARAKSKAKEDYLLTAKLFCGHCGSAMVGESGTSKSGKLHHYYKCIDRKRNHKCKKAVEKKDWIEELVVRFTVQKVLTDENIERIATKTMEIIEKESSDTSYLDELQNELKDIKKKIKNLMTAIEQGIITPSTKERMDELELEKNEVEGKIAREEMKKPLLTKERIMYWLYSFKSGDIDDVDYRRRVIDTLVNSVYVYDDGDKGRRIVFTFNISGQNTATLSCSDIACAAPPDGKLHFSL

SEQ ID NO: 7781 - protein, 464 aa, Unknown
  Description of Unknown: Integrase B7782 sequence
  PTHR30461:SF3,SM00857,IPR006118,IPR036162,PF13408, PS51737,G3DSA:3.40.50.1390,Coil,IPR025827,IPR006119, SSF53041,IPR011109,PTHR30461,PS00397,PS51736, cd00338,PF00239
MMTNKIIRCALYIRVSTAEQCMHGKSLEAQESYLQQYASDHNMIVVGVYADEGKTARKELKKRKAIHSLLEDVKAGKIDVILFWRLDRWFRNLSDFYKVQDILDEYGVRWMSASEPGINMETRDGRLQLNVVLSIGQNEVDTTSERIKFVNEASIRQGKLIFGDANMGYGYKSGIVDDRKCMVKDPEREETVNAFYKYFFKHQNKCATLRYIQDNYDPNFSWAIMRTLLSSEFYKGTYRGFPYCPPYLTEEQWNELQKIAHKNIKRAKSGRIYLFTSLIRCPVCGQLLCGTGCKSIINRKTREKRDYCYYRCSRAHNDRICTYRHRLSQNLIEQYLLDNLDTEYRKYQIRVKKIEEEKKKIAQTKTPEKLNAELERLNLLFQKGRVEWDYYSSEYDRIEQELKDLSKIKPEVKRDLSFLEDLLQSDFKTLYASLSPENRRAFWRSTIKQIHLNEDSTIKFVDFL

SEQ ID NO: 7782 - protein, 464 aa, Unknown
  Description of Unknown: Integrase B7783 sequence
  PTHR30461:SF3,SM00857,G3DSA:1.10.10.2600,IPR036162,PF13408, PS51737,G3DSA:3.40.50.1390,IPR025827,IPR006119,IPR038109, SSF53041,IPR011109,PTHR30461,PS51736,cd00338, PF00239
MNSTYFRPQPELFGLRVVKYIRCSHDGQVLHGDTLEAQDTLLDEFIKVNRMVLVDTFVDEALTARKKFTRRKEFVRLLDGVRSRSFDMILFTKLDRWFRNIGDYHKIQEILEENGVQWKAITESYDTTTTNGRLHINIRLSVAQDECDRDSDRIKDVFAYKLKNKTYLSGSLPRGLKLDDEKHVIIDPEWKQFALDMFDHFEQTNSKRGTLLYLKEKYGIYLCYDTISRNLRNSLYKGMYRDDPDFCEPLIEPERFDRIQVLGKRNVRQRYSNRTYIFTGLLICSSCNHYLVGQTTHRTLSGGTEKHYPSYRCNQRYQSHSCDRNRSYREDYVEEYLLQHIRPALSEYVAEYEVTGTTPARKNPAAEAAKIRTKMQKLYELYMDDLIDRDTYKRDYSAFQEKLKELDSIVVAPSRDLADLKKLLEQDYEEIYRTFSPQEKNAFWKSFVQSITVHEDGEMDIVFL

SEQ ID NO: 7783 - protein, 464 aa, Unknown
  Description of Unknown: Integrase B7784 sequence
  PTHR30461:SF3,SM00857,IPR036162,PF13408,IPR025827, PS51737,G3DSA:3.40.50.1390,IPR006119,IPR011109,SSF53041, PTHR30461,PS51736,cd00338,PF00239
MNSTYFRPQPELFGLRVVKYIRCSHDGQVLHGDTLEAQDALLDEFIKVNRMVLIDTFIDEALTARKKFTRRKEFVRLLDGVRAHNFDMILFTKLDRWFRNIGDYHKIQEILEANGVQWKAITESYDTTTTNGRLHINIRLSVAQDECDRDSDRIKDVFAYKLKNKTYLSGSLPRGLKLDAEKHVVIDPEWHQFALDMFDHFESTCSKRGTQLFLQEKYGIRVCYDTVVRYLRNPLFMGQYRDDPDFCEKTISRERFERIQNLAIRNVRIRHTQQFYIFSGLLICSSCNHYMTGTVTYRTLADGKEKTYKSYRCNFKAQSKLCDRSKHYREEYVEEYMLQHIRPALSSYVADFEVTAAAAAKKDPAIEIAKVERKMKKLYDLFMDDLIDKASYRKEYEKFQTQIDKLRSCPAAPVRNLDSVKKMLSDDWETVYHTFSDQEKNVFWKSFVQSITVHEDGEMDIVFL

SEQ ID NO: 7784 - protein, 464 aa, Unknown
  Description of Unknown: Integrase B7785 sequence
  SM00857,IPR006118,IPR036162,PF13408, IPR025827,G3DSA:3.40.50.1390,PS51737,IPR006119, IPR011109,SSF53041,PF00239,PTHR30461, PS00397,PS51736,Coil,cd00338
MKSKTLRCAIYIRVSTTEQMMHGKSLEAQKDYLIHYAKEHDMNIVGIYADEGKTARKELKRRKAIQELVKAVERDEIDVILFWRLDRWFRNLSDFYKVQDILDQHNVRWISASEPGINMETRDGRLQLNVVLSIGQNEVDTTSERIKFVNEASIRQGKVIFGDSNMPIGYIVGTVDGVKRMVKDPEKEDLVNAFYRYFRTHQSKMKTLKFIQENYDPTFSYSQLRNMLESDFYHGAYRDNPHYCPAYLTEKEWAEIQEISNRNVKHPSSGRVYLFSGMMRCPVCGQLLAGRGGSSIINRKTRETRTYCYYRCNKACIDHMCTYRHNVSQNLIEEYLISNLEEEYNRYKIQSQNIHSKADLPKKKRTPEQVKKEMQRLNLLFQKERIEWDYYNEEYEKLTTELSSLEESDQKPKTNFDNIEKILHNDFRKTYDNLSPENRRAFWRSIIKEIHINTSHEVTGIDFY

SEQ ID NO: 7785 - protein, 464 aa, Unknown
  Description of Unknown: Integrase B7786 sequence
  PTHR30461:SF3,SM00857,G3DSA:1.10.10.2600,IPR036162,PF13408, PS51737,IPR025827,G3DSA:3.40.50.1390,IPR006119,IPR038109, IPR011109,SSF53041,PTHR30461,PS51736,cd00338, PF00239
MNSTYFRPQPELFGLRVVKYIRCSHDGQVLHGDTLEAQDALLDEFIEVNRMVLVDTFVDEALTARKKFTRRKEFVRLLDGVRAHNFDMILFTKLDRWFRNIGDYHKIQEILEANGVQWKAITESYDTTTTNGRLHINIRLSVAQDECDRDSDRIKDVFAYKLKNKTYLSGSLPRGLKLDDEKHVIIDPEWKQFALDMFDHFEQTNSKRGTLLYLKEKYGIYLCYDTISRNLRNSLYKGMYRDDPDFCEPLIEPERFDRIQILGKRNVRQRYSNRTYIFTGLLICSSCNHYLVGQTTHRTLSDGTEKHYPSYRCNQRYQSHSCDRNRGYREDYVEEYLLQHIRPALSEYVAEYEVTGTNPARKNPAAEAAKIRTKMQKLYELYMDDLIDRDTYKRDYSAFQEKLKELDSIVVAPSRDLADLKKLLEQDYEEIYRTFSPQEKNAFWKSFVQSITVHEDGEMDIVFL

SEQ ID NO: 7786 - protein, 464 aa, Unknown
  Description of Unknown: Integrase B7787 sequence
  PTHR30461:SF3,SM00857,IPR036162,PF13408,PS51737, G3DSA:3.40.50.1390,IPR025827,IPR006119,IPR011109,SSF53041, PTHR30461,PS51736,cd00338,PF00239
MNSTYFRPQPELFGLRVVKYIRCSHDGQVLHGDTLEAQDALLDEFIKVNHMILVDTFVDEALTARKKFTRRKEFVRLLDGVRAHNFDMILFTKLDRWFRNIGDYHKIQEILEANGVQWKAITESYDTTTTNGRLHINIRLSVAQDECDRDSDRIKDVFSYKLKNKTYLSGSLPRGLKLDAEKHVVIDPEWNQFALDMFDHFESTCSKRGTQLFLQEKYGIRVCYDTVVRYLRNPLFMGQYRDDPEFCEKTISRERFEHIQNLAIRNVRIRHTQQFYIFSGLLICSSCNHYMTGTVTYRTLADGKEKTYKSYRCNFKAQSKLCDRSKHYREEYVEEYMLQHIRPALSSYVADFEVTAAAAAKKDPAIEIAKVERKMKKLYDLFMDDLIDKASYRSEYEKFQSQIDKLRSCPAAPVRNLDSIKKMLSDDWETVYHTFSDQEKNVFWKSFVQSITVHEDGEMDIVFL

SEQ ID NO: 7787 - protein, 464 aa, Unknown
  Description of Unknown: Integrase B7788 sequence
  PTHR30461:SF3,SM00857,IPR006118,IPR036162, PF13408,PS51737,IPR025827,Coil, G3DSA:3.40.50.1390,IPR006119,IPR011109,SSF53041, PTHR30461,PS00397,PS51736,cd00338,PF00239
MPEKILRCAIYIRVSTFEQSVHGKSLQAQKECLEQYATDNNMSIVGVYADEGKTARKELKKRKAIHALVEDVKRDKIDVIIFWRLDRWFRNLSDFYKVQDVLDDHGVRWISVSEPGINMETRDGRLQLNVVLSIGQNEVDTTSERIKFVNEASIRQKKLIFGDANMPFGYKTGVVDGKKCMVKDSETEHMVEDFFEYFRNHNSKKGAIRYMQETYGIDFSYGMLRTMLSSEFYKGTYRGYPYCPAYLSEKEWDEMQTISKRNIKNTPSGRIYLFTGLMRCPVCGQKLVGTGCSSIINRKTGEKRTYCYYRCNRALIDHICTYRHRVSQNLIEKYLLENLEREYEKYKVRTNQISEELKKQKKAKDPKKLRKEMERLNILFQKGRISYDYYDKEYQRLEREYSASAAFCEEEETRNLHYVEELLKTDFRQMYDSLSPENKRSFWRSTIQEIYLNDDNTIKAVDFL

SEQ ID NO: 7788 - protein, 464 aa, Unknown
  Description of Unknown: Integrase B7789 sequence
  PTHR30461:SF3,SM00857,IPR036162,PF13408,PS51737, IPR025827,G3DSA:3.40.50.1390,IPR006119,IPR011109,SSF53041, PF00239,PTHR30461,PS51736,Coil,cd00338
MNSTYFRPQPELFGLRVVKYIRCSHDGQVLHGDTLEAQDALLDEFIKVNHMILVDTFVDEALTARKKFTRRKEFVRLLDGVRAHNFDMILFTKLDRWFRNIGDYHKIQEILEANGVQWKAITESYDTTTTNGRLHINIRLSVAQDECDRDSDRIKDVFSYKLKNKTYLSGSLPRGLKLDAEKHVVIDPEWHQFALDMFDHFESTCSKRGTQLFLQEKYGIRVCYDTVVRYLRNPLFMGQYRDDPEFCEKTISRERFEHIQNLAIRNVRIRHTQQFYIFSGLLICSSCNHYMTGTVTYRTLADGKEKTYKSYRCNFKAQSKLCDRSKHYREEYVEEYMLQHIRPALSSYVADFEVTAAAAAKKDPAIEIAKVERKMKKLYDLFMDDLIDKASYRNEYEKFQSQIDKLRSCPAAPVRNLDSIKKMLSDDWETVYHTFSDQEKNVFWKSFVQSITVHEDGEMDIVFL

SEQ ID NO: 7789 - protein, 464 aa, Unknown
  Description of Unknown: Integrase B7790 sequence
  PTHR30461:SF3,SM00857,IPR006118,IPR036162,PF13408, IPR025827,G3DSA:3.40.50.1390,Coil,PS51737,IPR006119, SSF53041,IPR011109,PTHR30461,PS00397, PS51736,cd00338,PF00239
MPEKILRCAIYIRVSTFEQSVHGKSLQAQKECLEQYATDNNMSIVGVYADEGKTARKELKKRKAIHALVEDVKMDRIDVILFWRLDRWFRNLSDFYKVQDVLDDHGVRWISVSEPGINMETRDGRLQLNVVLSIGQNEVDTTSERIKFVNEASIRQKKLIFGDANMPFGYKSGIVDGKKCMVKDPETEHMVEDFFRYFKNHNTKKGAIRHMQETYGIDFSYGMLRTMLSSEFYKGTYRGYPYCPAYLSEKEWDEMQIISKRNIKNTPSGRVYLFTGLMHCPVCGQKLVGTGCSSIINRTTREKRTYCYYRCNRALIDHICTYRHRVSQNLVEKYLLENLEREYEKYKVRSNQIGEELKKQKKAKDPEKLRKEMERLNLLFQKGRISFDYYDKEYQRLEKEYSVSADFPEEEETRNLHYVEELLKTDFRQMYDSLSPENKRSFWRSTIQEIYLNDDNTIKAVDFL

SEQ ID NO: 7790 - protein, 464 aa, Unknown
  Description of Unknown: Integrase B7791 sequence
  PTHR30461:SF3,SM00857,G3DSA:1.10.10.2600,IPR036162,PF13408, IPR025827,G3DSA:3.40.50.1390,PS51737,IPR006119,IPR038109, SSF53041,IPR011109,PTHR30461,PS51736,cd00338, PF00239
MNSTYFRPQPELFGLRVVKYIRCSHDGQVLHGDTLEAQDALLDEFIKVNRMVLVDTFIDEALTARKKFTRRKEFVRLLDGVRAHSFDMILFTKLDRWFRNIGDYHKIQEILEANGVQWKAITESYDTTTTNGRLHINIRLSVAQDECDRDSDRIKDVFAYKLKNKTYLSGSLPRGLKLDEEKHVIIDPEWKQFALDMFDHFEQTNSKRGTLLYLKEKYGIYLCYDTIARNLRNPLYKGMYRDDPDFCEPLIEPERFDRIQVLGKRNVRQRYSNRTYIFTGLLICSSCNHYLVGQTTHRTLSDGTEKHYPSYRCNQRYQSHSCDRNRSYREDYVEEYLLQHIRPALSEYVAEYEVTGTNPARKNPAAEAAKIRTKMQKLYELYMDDLIDRDTYKRDYSAFQEKLKELDSIVVAPSRDLADLKKLLEQDYEEIYRTFSPQEKNAFWKSFVQSITVHEDGEMDIVFL

SEQ ID NO: 7791 - protein, 464 aa, Unknown
  Description of Unknown: Integrase B7792 sequence
  PTHR30461:SF3,cd00338,SM00857,IPR006118,IPR036162, PF13408,IPR025827,G3DSA:3.40.50.1390,PS51737,IPR006119, SSF53041,IPR011109,PTHR30461,PS00397,PS51736, Coil,PF00239
MQEKILRCAIYIRVSTFEQSVHGKSLQAQKECLKQYAADHNMAVVGIYADEGKTARKELKKRKAIHALVEDVKKDRIDVILFWRLDRWFRNLSDFYKVQDVLDDHGVRWISVSEPGINMETRDGRLQLNVVLSIGQNEVDTTSERIKFVNEASIRQRKLIFGDANMPFGYKTGVVDGKKCMVKDPETEHMVEDFFKYFRSHNSKKGAIRYMQETYGIDFSYGMLRTMLSSEFYKGTYRGYPYCPAYLSEKEWNEMQTISKRNIKTTPSGRIYLFTGLMRCPVCGQKLVGTGCSSIINRKTGEKRTYCYYRCNRALKDHICTYRHRVSQNLVEKYLLENLEREYEKYKVRSNQISEELKKEKKAKDPKKLRKEMERLNLLFQKGRISFDYYDKEYQRLEEEYSASTAFPEEEETRSLHYVEELLETDFRQMYDSLSPENKRSFWRSTIQEIYLNDDNTIKAVDFL

SEQ ID NO: 7792 - protein, 464 aa, Unknown
  Description of Unknown: Integrase B7793 sequence
  PTHR30461:SF3,SM00857,G3DSA:1.10.10.2600,IPR036162,PF13408, IPR025827,PS51737,G3DSA:3.40.50.1390,IPR006119,IPR038109, PF07508,IPR011109,SSF53041,PTHR30461,PS51736, cd00338,PF00239
MKGNAGDTIVKKIDLSPELVRVALYIRVSGEEQKIKGLSLEAQQERLEAYARERGWVIVGIYIDAAKTARKNIHKRTDFQRMMDSVKRDEVDILLFCRLDRWFRSVADYYKIMEVLEAHNCDWKTTDEEYDTTTANGRLYINVKLSIAQNEADIDGERIDVVFDSKIAHGTVVSGSAPFGFRVNEEKRLEVVPEDAAIVQDAFNYFETSISQRATVRYIRETYGVNWCDATFRRMLKEKLYTGVYDRGGRFNDHFCPTIISKQQFDRVQALLERNARSVPSGKVYIFTSILTCAECGHKLVGYKSSDYYYRCNQHFQRGRCSHNHSAREDVVEKWLFEHLVEELERCQLEWEVAAAKKKASVARTDKAALKRKLTKLKELYVNDLIDIEDYKRDYQIYTAALKQIPEPSIEPPPDFAAVRRLLDNDFKTIYENLTREEKRTLWRSVIKEIRIDNDQNITGVVFG

SEQ ID NO: 7793 - protein, 464 aa, Unknown
  Description of Unknown: Integrase B7794 sequence
  SM00857,G3DSA:1.10.10.2600,IPR036162,PS51737,G3DSA:3.40.50.1390, IPR006119,IPR038109,PF07508,SSF53041,IPR011109, PF00239,PTHR30461,PS51736,Coil,cd00338
MREVKKAIAYFRVSTDMQKEDLSLETQEKGGEIFARDNNIEIVKKFTDVMSGGNRNRKGFIEAQKYLEENQGEIDYFIAYDVSRIARDAFAFLSLFNKLNLLNVKLKLINNPTLDSDSPMGKLILTILAAIFEFFRFDNADRVRDNMIVKVKEGKRMNNAPYGYRIIDKKMVIVPEEAELIKYIYQEYLKGHGIVALERMTGKDRSTIKQWLNNKVYAGYNIFGKRKMNKTTFKPMKNPDETKIVEAKGDWEPIIDIDTWEKVANRMSLNQELRMRNIEKTSYLLSGLLFHTCGSKFRGNAGRKGTYYYRCTGCSRSIKSDTLDKKVLDELFNSEFLDELNKIPLENNNKDNELKKLKAQKSKLKTREENLIELYADGDITKKQFKSKKVDIQNSLIDIEAKIIELENERNEVKQNLDFKKMFIEALSNLKNAESKQEANKILKQIIKKIEVNEEREVFIHLNF

SEQ ID NO: 7794 - protein, 464 aa, Unknown
  Description of Unknown: Integrase B7795 sequence
  PTHR30461:SF3,SM00857,IPR006118,IPR036162,PF13408, PS51737,G3DSA:3.40.50.1390,Coil,IPR025827,IPR006119, IPR011109,SSF53041,PTHR30461,PS00397, PS51736,cd00338,PF00239
MPEKILRCAIYIRVSTFEQSVHGKSLQAQKECLEQYATDNNMSIVGVYADEGKTARKELKKRKAIHALVEDVKRDKIDVIIFWRLDRWFRNLSDFYKVQDVLDEHGVRWISVSEPGINMETRDGRLQLNVVLSIGQNEVDTTSERIKFVNEASIRQKKLIFGDANMPFGYKTGVVDGKKCMIKDPETEHMVEDFFNYFRIHNSKKGAVRYMQEAYGIDFSYGMLRTMLSSEFYKGTYRGYPYCPAYLSEKEWDEMQTISKRNIKSTPSGRVYLFTGLIRCPVCGQKLVGTGCSSIINRETREKRTYCYYRCNRALIDHICTYRHRMSQNLIEKYLLENLEREYEKYKVRSNQISEELKKQKKTKDPEKLRKEMERLNLLFQKGRISFDYYDNEYQRLEEEYSVSAAFPEEEETRSLHYVEELLKTDFRQMYDSLSLENRRSFWRSTIREIYLNEDNTIKCVDFI

SEQ ID NO: 7795 - protein, 464 aa, Unknown
  Description of Unknown: Integrase B7796 sequence
  PTHR30461:SF3,SM00857,G3DSA:1.10.10.2600,IPR036162,PF13408, PS51737,IPR025827,G3DSA:3.40.50.1390,IPR006119,IPR038109, IPR011109,SSF53041,PTHR30461,PS51736,cd00338, PF00239
MNSTYFRPQPELFGLRVVKYIRCSHDGQVLHGDTLEAQDALLDEFIKVNRMVLIDTFIDEALTARKKFTRRKEFVRLLDCVRAHNFDMILFTKLDRWFRNIGDYHKIQEILEANGVQWKAITESYDTTTTNGRLHINIRLSVAQDECDRDSDRIKDVFAYKLKNKTYLSGSLPRGLKLDDEKHVIIDPEWKQFALDMFDHFEQTNSKRGTLLYLKEKYGIYLCYDTISRNLRNSLYKGMYRDDPDFCEPLIEPERFDRIQVLGKRNVRQRYSNRTYIFTGLLICSSCNHYLVGQTTHRTLSDGTEKHYPSYRCNQRYQSHSCDRNRSYREDYVEEYLLQHIRPALSEYVAEYEVTGTTPARKNPAAEAAKIRTKMQKLYELYMDDLIDRDTYKRDYSAFQEKLKELDSIVVAPSRDLADLKKLLEQDYEEIYRTFSPQEKNAFWKSFVQSITVHEDGEMDIVFL

SEQ ID NO: 7796 - protein, 464 aa, Unknown
  Description of Unknown: Integrase B7797 sequence
  PTHR30461:SF3,SM00857,IPR006118,IPR036162,PF13408, IPR025827,G3DSA:3.40.50.1390,Coil,PS51737,IPR006119, SSF53041,IPR011109,PTHR30461,PS00397,PS51736, cd00338,PF00239
MPEKILRCAIYIRVSTFEQSVHGKSLQAQKECLEQYATDNNMSIVGVYADEGKTARKELKKRKAIHALVEDVKKDRIDVILFWRLDRWFRNLSDFYKVQDVLDEHGVRWISVSEPGINMETRDGRLQLNVVLSIGQNEVDTTSERIKFVNEASIRQKKLIFGDANMPFGYKTGVVDGKKCMVKDPETEHMVEDFFNYFRIHNSKKGAVRYMQETYGVDFSYGMLRTMLSSEFYKGTYRGYPYCPAYLSEKEWNEMQIISKRNIKNTPSGRIYLFTGLMRCPVCGQKLVGTGCSSIINRKTGEKRTYCYYRCNRALIDHICTYRHRVSQNLVEKYLLENLEREYEKYKVRSNQISEELKKQKKTKDPEKLRKEMERLNLLFQKGRISFDYYDKEYQRLEEEYSASAAFPEEEETRSLHYVEELLETDFRQMYDSLSLENRRSFWRSTIREIYLNEDNTIKCVDFI

SEQ ID NO: 7797 - protein, 464 aa, Unknown
  Description of Unknown: Integrase B7798 sequence
  PTHR30461:SF3,SM00857,IPR006118,IPR036162,PS51737, G3DSA:3.40.50.1390,Coil,IPR006119,IPR011109,SSF53041, PTHR30461,PS00397,PS51736,cd00338,PF00239
MMTNKIVRCALYIRVSTAEQCMHGKSLEAQESYLQQYASDHNMIVVGIYADEGKTARKELKKRKAIHSLLEDVKAGKIDVILFWRLDRWFRNLSDFYKVQDILDEYGVRWMSASEPGINMETRDGRLQLNVVLSIGQNEVDTTSERIKFVNEASIRQGKLIFGDANMGYGYKSGIVDGRKCMVKDPEREETVNAFYKYFFKHQNKCATLRYIQDNYDPNFSWSIMRTLLSSEFYKGTYRGFPYCPPYLTEEQWNELQKVAHKNIKRAKSGRIYLFTSLIRCPVCGQLLCGNGCKSIINRKTREKRDYCYYRCSRAHNDRICTYRHRLSQNLIEQYLLDNLDTEYRKYQIRVKKIEEEKKKIAQTKTPEKLNAELERLNLLFQKGRVEWDYYSSEYDRIEQELKDLSRIKPEVKRDLSFLEDLLQSDFKTLYASLSPENRRAFWRSTIKQIHLNEDSTIKFVDFL

SEQ ID NO: 7798 - protein, 464 aa, Unknown
  Description of Unknown: Integrase B7799 sequence
  SM00857,IPR006118,G3DSA:1.10.10.2600,IPR036162, PF13408,PS51737,IPR025827,G3DSA:3.40.50.1390, IPR006119,IPR038109,IPR011109,SSF53041, PF00239,PTHR30461,PS00397,PS51736,Coil,cd00338
MKSKTLRCAIYIRVSTTEQMMHGKSLEAQKDYLIHYAQEHDMNIVGVYADEGKTARKELKRRKAIQELVKAVERDEIDVILFWRLDRWFRNLSDFYKVQDILDQHNVRWISASEPGINMETRDGRLQLNVVLSIGQNEVDTTSERIKFVNEASIRQGKVIFGDSNMPIGYMVGTVDGVKRMVKDPEKEDLVNAFYRYFRTHQSKMKTLKFIQENYDPTFSYSQLRNMLESDFYHGTYRDNPHYCPAYLTEKEWAEIQEISNRNVKHPSSGRVYLFSGMMRCPVCGQLLAGRGGSSIINRKTRETRTYCYYRCNKACIDHMCTYRHNVSQNLIEEYLISNLEEEYNRYKIQSQNIHSKADIPKKKRTPEQVKKEMQRLNLLFQKERIEWDYYNEEYEKLTTELSSLEESDQKPKTNFDNIEKILHNDFRKTYDNLSPENRRAFWRSIIKEIHINTSHEVTGIDFY

SEQ ID NO: 7799 - protein, 464 aa, Unknown
  Description of Unknown: Integrase B7800 sequence
  SM00857,IPR006118,G3DSA:1.10.10.2600,IPR036162,PF13408, PS51737,G3DSA:3.40.50.1390,IPR025827,IPR006119,IPR038109, IPR011109,SSF53041,PF00239,PTHR30461,PS00397, PS51736,Coil,cd00338
MKSKTLRCAIYIRVSTTEQMMHGKSLEAQKDYLIHYAKEHDMNIVGIYADEGKTARKELKRRKAIQELVKAVERDEIDVILFWRLDRWFRNLSDFYKVQDILDQHNVRWISASEPGINMETRDGRLQLNVVLSIGQNEVDTTSERIKFVNEASIRQGKVIFGDSNMPIGYMVGTVDGVKRMVKDPEKEDLVNAFYRYFRTHQSKMKTLKFIQKNYDPTFSYSQLRNMLESDFYHGAYRDNSHYCPAYLTEKEWAEIQEISNRNVKHPSSGRVYLFSGMMRCPVCGQLLAGRGGSSIINRKTRETRTYCYYRCNKACIDHMCTYRHNVSQNLIEEYLISNLEEEYNRYKIQSQNIHSKADLPKKKRTPEQVKKEMQRLNLLFQKERIEWDYYNEEYEKLTTELSSLEESDQKPKTNFDNIEKILHNDFRKTYDNLSPENRRAFWRSIIKEIHINTSHEVTGIDFY

SEQ ID NO: 7800 - protein, 464 aa, Unknown
  Description of Unknown: Integrase B7801 sequence
  PTHR30461:SF3,cd00338,SM00857,IPR036162,PF13408, IPR025827,G3DSA:3.40.50.1390,PS51737,IPR006119,IPR011109, SSF53041,PTHR30461,PS51736,Coil,PF00239
MNSTYFRPQPELFGLRVVKYIRCSHDGQVLHGDTLEAQDALLDEFIKVNRMVLIDTFIDEALTARKKFTRRKEFVRLLDGVRAHSFNMILFTKLDRWFRNIGDYHKIQEILEANGVQWKAITESYDTTTTNGRLHINIRLSVAQDECDRDSDRIKDVFAYKLKNKTYLSGSLPRGLKLDAEKHVVIDPEWHQFALDMFDRFESTCSKRGTQLFLQEKYGIRVCYDTVVRYLRNPLFMGQYRDDPDFCEKTISRERFERIQNLAIRNVRIRHTQQFYIFSGLLICSSCNHYMTGTVTYRTLADGKEKTYKSYRCNFKAQSKLCDRSKHYREEYVEEYMLQHIRPALSSYVADFEVTAAAAAKKDPAIEIAKVERKMKKLYDLFMDDLIDKASYRNEYEKFQSQIDKLRSCPAAPVRNLDSIKKMLSDDWETVYHTFSDQEKNVFWKSFVQSITVHEDGEMDIVFL

SEQ ID NO: 7801 - protein, 464 aa, Unknown
  Description of Unknown: Integrase B7802 sequence
  PTHR30461:SF3,SM00857,G3DSA:1.10.10.2600,IPR036162,PF13408, IPR025827,PS51737,G3DSA:3.40.50.1390,IPR006119,IPR038109, IPR011109,SSF53041,PTHR30461,PS51736, cd00338,PF00239
MNSTYFRPQPELFGLRVVKYIRCSHDGQVLHGDTLEAQDALLDEFIKVNRMVLVDTFVDEALTARKKFTRRKEFVRLLDGVRSRSFDMILFTKLDRWFRNIGDYHKIQEILEENGVQWKAITESYDTTTTNGRLHINIRLSVAQDECDRDSDRIKDVFAYKLKNKTYLSGSLPRGLKLDDEKHVIIDPEWKQFALDMFDHFEQTNSKRGTLLYLKEKYGIYLCYDTISRNLRNSLYKGMYRDDPDFCEPLIEPERFDRIQVLGKRNVRQRYSNRTYIFTGLLICSSCNHYLVGQTTHRTLSDGTEKHYPSYRCNQRYQSHSCDRNRSYREDYVEEYLLQHIRPALSEYVAEYEVTGTTPARKNPAAEAAKIRTKMQKLYELYMDDLIDRDTYKRDYSAFQEKLKELDSIVVAPSRDLADLKKLLEQDYEEIYRTFSPQEKNAFWKSFVQSITVHEDGEMDIVFL

SEQ ID NO: 7802 - protein, 464 aa, Unknown
  Description of Unknown: Integrase B7803 sequence
  PTHR30461:SF3,SM00857,IPR006118,IPR036162,PF13408, PS51737,IPR025827,G3DSA:3.40.50.1390,PS00397,IPR006119, IPR011109,SSF53041,PTHR30461,Coil,PS51736, cd00338,PF00239
MQEKILRCAIYIRVSTFEQSVHGKSLQAQKECLEQYATDNNMSIVGVYADEGKTARKELKKRKAIHALVEDVKRDKIDVIIFWRLDRWFRNLSDFYKVQDVLDEHGVRWISVSEPGINMETRDGRLQLNVVLSIGQNEVDTTSERIKFVNEASIRQKKLIFGDANMPFGYKTGVVDGKKCMVKDSETEHMVEDFFEYFRNHNSKKGAIRYMQETYGIDFSYGMLRTMLSSEFYKGTYRGYPYCPAYLSEKEWDEMQTISKRNIKNTPSGRIYLFTGLMRCPVCGQKLVGTGCSSIINRKTGEKRTYCYYRCNRALIDHICTYRHRVSQNLIEKYLLENLEREYEKYKVRTNQISEELKKQKKAKDPKKLRKEMERLNILFQKGRISYDYYDKEYQRLEREYSASAAFCEEEETRNLHYVEELLKTDFRQMYDSLSPENKRSFWRSTIQEIYLNDDNTIKAVDFL

SEQ ID NO: 7803 - protein, 464 aa, Unknown
  Description of Unknown: Integrase B7804 sequence
  PTHR30461:SF3,SM00857,IPR006118,IPR036162,PF13408, IPR025827,G3DSA:3.40.50.1390,PS51737,PS00397,IPR006119, SSF53041,IPR011109,PTHR30461,Coil,PS51736, cd00338,PF00239
MQEKILRCAIYIRVSTFEQSVHGKSLQAQEECLKQYAADHNMAVVGIYADEGKTARKELKKRKAIHALVEDVKQDKIDVIVFWRLDRWFRNLSDFYKVQDVLDEHGVRWISVSEPGINMETRDGRLQLNVVLSIGQNEVDTTSERIKFVNESSIRQKKLIFGDANMPFGYKTGVVDGKKCMVKDPETEHMVEDFFNYFRIHNSKKGAVRYMQEAYGIDFSYGMLRTMLSSEFYKGTYRGYHYCPAYLSEKEWNEMQIISKRNIKNTPSGRIYLFTGLMRCPVCGQKLVGTGCSSIIDRKTREKRTYCYYRCNRALIDHICTYRHRVSQNLVEKYLLENLEREYEKYKVRSNQIGEELKKQKKAKDPEKLRKEMERLNLLFQKGRISFDYYDKEYQRLEKEYSVSADFPEEEETRSLHYVEELLKTDFRQMYDSLSPENKRSFWRSTIQEIYLNDDNTIKAVDFL

SEQ ID NO: 7804 - protein, 464 aa, Unknown
  Description of Unknown: Integrase B7805 sequence
  PTHR30461:SF3,SM00857,IPR006118,IPR036162,PF13408, IPR025827,G3DSA:3.40.50.1390,PS51737,IPR006119,SSF53041, IPR011109,PF00239,PTHR30461,PS00397,PS51736, Coil,cd00338
MPEKILRCAIYIRVSTFEQSVHGKSLQAQKECLEQYATDNNMSIVGVYADEGKTARKELKKRKAIHALIEDVKKDRIDVILFWRLDRWFRNLSDFYKVQDVLDEHGVRWISVSEPGINMETRDGRLQLNVVLSIGQNEVDTTSERIKFVNEASIRQRKLIFGDANMPFGYKTGVVDGKKCMVKDPETEHMVEDFFKYFKSHNSKKGAVRYMQETYGVDFSYGMLRTMLSSEFYKGTYRGYPYCPAYLSEKEWNEMQIISKRNIKNTPSGRIYLFTGLMRCPVCGQKLVGTGCSSIINRKTGEKRTYCYYRCNRALIDHICTYRHRVSQNLVEKYLLENLEREYEKYKVRSNQISEELKKQKKTKDPEKLRKEMERLNLLFQKGRISFDYYDKEYQRLEEEYSASAAFPEEEETRSLHYVEELLETDFRQMYDSLSPENKRSFWRSTIQEIYLNDDNTIKAVDFL

SEQ ID NO: 7805 - protein, 464 aa, Unknown
  Description of Unknown: Integrase B7806 sequence
  PTHR30461:SF3,SM00857,IPR036162,PF13408,IPR025827, G3DSA:3.40.50.1390,PS51737,IPR006119,IPR011109,SSF53041, PTHR30461,PS51736,cd00338,PF00239
MNSTYFRPQPELFGLRVVKYIRCSHDGQVLHGDTLEAQDALLDEFIKVNHMILVDTFVDEALTARKKFTRRKEFVRLLDGVRARNFDMILFTKLDRWFRNIGDYHKIQEILEANGVQWKAITESYDTTTTNGRLHINIRLSVAQDECDRDSDRIKDVFSYKLKNKTYLSGSLPRGLKLDAEKHVVIDPEWHQFALDMFDHFESTCSKRGTQLFLQEKYGIRVCYDTVVRYLRNPLFMGQYRDDPEFCEKTISRERFEHIQNLAIRNVRIRHTQQFYIFSGLLICSSCNHYMTGTVTYRTLADGKEKTYKSYRCNFKAQSKLCDRSKHYREEYVEEYMLQHIRPALSSYVADFEVTAAAAAKKDPAVEIAKVERKMKKLYDLFMDDLIDKASYRKEYEKFQSQIDKLRSCPATPVRNLDSVKKMLSDDWETVYHTFSDQEKNVFWKSFVQSITVHEDGEMDIVFL

SEQ ID NO: 7806 - protein, 464 aa, Unknown
  Description of Unknown: Integrase B7807 sequence
  PTHR30461:SF3,SM00857,IPR006118,IPR036162, PF13408,IPR025827,G3DSA:3.40.50.1390,PS51737, Coil,IPR006119,IPR011109,SSF53041, PTHR30461,PS00397,PS51736,cd00338,PF00239
MQEKILRCAIYIRVSTFEQSVHGKSLQAQKECLKQYAADHNMAVVGIYADEGKTARKELKKRKAIHALVEDVKQDKIDVIVFWRLDRWFRNLSDFYKVQDVLDEHGVRWISVSEPGINMETRDGRLQLNVVLSIGQNEVDTTSERIKFVNESSIRQKKLIFGDANMPLGYKTGIVDGKKCMVKDPETEHMVEDFFRYFKNHNTKKGAIRYMQETYGIDFSYSMLRTMLSSEFYKGTYRGYPYCPAYLSEKEWNEMQIISKRNIKNTPSGRIYLFTGLMRCPVCGQKLVGTGCSSIIDRKTREKRTYCYYRCNRALIDHICTYRHRVSQNLVEKYLLENLEREYEKYKVRSNQIGEELKKQKKAKDPEKLRKEMERLNLLFQKGRISFDYYDKEYQRLEKEYSVSADFPEEEETRNLHYVEELLETDFRQMYDTLSLENRRSFWRSTIQEIYLNEDNTIKGVDFI

SEQ ID NO: 7807 - protein, 464 aa, Unknown
  Description of Unknown: Integrase B7808 sequence
  PTHR30461:SF3,SM00857,IPR006118,IPR036162,PF13408, IPR025827,PS51737,G3DSA:3.40.50.1390,IPR006119,IPR011109, SSF53041,PF00239,PTHR30461,PS00397,PS51736, Coil,cd00338
MPEKILRCAIYIRVSTFEQSVHGKSLQAQKECLEQYATDNNMSIVSVYADEGKTARKELKKRKAIHALVEDVKMDRIDVILFWRLDRWFRNLSDFYKVQDVLDEHGVRWISVSEPGINMETRDGRLQLNVVLSIGQNEVDTTSERIKFVNESSIRQKKLIFGDANMPLGYKTGIVDGKKCMVKDPETEHMVEDFFRYFKNHNTKKGAIRYMQETYGIDFSYSMLRTMLSSEFYKGTYRGYPYCPAYLSEKEWNEMQIISKRNIKNTPSGRIYLFTGLMRCPVCGQKLVGTGCSSIINRKTGEKRTYCYYRCNRALIDHICTYRHRVSQNLIEKYLLENLEREYEKYKVRTNQISEELKKQKKAKDPEKLRKEMERLNLLFQKGRISFDYYDKEYQRLEKEYSVSADFPEEEETRNLHYVEELLKTDFRQMYDSLSPENKRSFWRSTIQEIYLNDDNTIKAVDFL

SEQ ID NO: 7808 - protein, 464 aa, Unknown
  Description of Unknown: Integrase B7809 sequence
  PTHR30461:SF3,SM00857,G3DSA:1.10.10.2600,IPR036162,PF13408, IPR025827,PS51737,G3DSA:3.40.50.1390,IPR006119,IPR038109, IPR011109,SSF53041,PTHR30461,PS51736,cd00338, PF00239
MNSTYFRPQPELFGLRVVKYIRCSHDGQVLHGDTLEAQDALLDEFIKVNRMVLVDTFIDEALTARKKFTRRKEFVRLLDGVRAHNFDMILFTKLDRWFRNIGDYHKIQEILEENGVQWKAITESYDTTTTNGRLHINIRLSVAQDECDRDSDRIKDVFAYKLKNKTYLSGSLPRGLKLDDEKHVIIDPEWKQFALDMFDHFEQTNSKRGTLLYLKEKYGIYLCYDTISRNLRNSLYKGMYRDDPDFCEPLIEPERFDRIQVLGKRNVRQRYSNRTYIFTGLLICSSCNHYLVGQTTHRTLSDGTEKHYPSYRCNQRYQSHSCDRNHSYREDYVEEYLLQHIRPALSEYVAEYEVTGTNPARKNPAAEAAKIRTKMQKLYELYMDDLIDRDTYKRDYSAFQEKLKELDSIVVAPSRDLADLKKLLEQDYEEIYRTFSPQEKNAFWKSFVQSITVHEDGEMDIVFL

SEQ ID NO: 7809 - protein, 464 aa, Unknown
  Description of Unknown: Integrase B7810 sequence
  PTHR30461:SF3,SM00857,G3DSA:1.10.10.2600,IPR036162,PF13408, PS51737,IPR025827,G3DSA:3.40.50.1390,IPR006119,IPR038109, IPR011109,SSF53041,PTHR30461,PS51736,cd00338, PF00239
MNSTYFRPQPELFGLRVVKYIRCSHDGQVLHGDTLEAQDALLDEFVKVNRMVLIDTFIDEALTARKKFTRRKEFVRLLDGVRAHNFDMILFTKLDRWFRNIGDYHKIQEILEANGVQWKAITESYDTTTTNGRLHINIRLSVAQDECDRDSDRIKDVFAYKLKNKTYLSGSLPRGLKLDDEKHVIIDPEWKQFALDMFDHFEQTNSKRGTLLYLKEKYGIYLCYDTISRNLRNSLYKGMYRDDPDFCEPLIEPERFDRIQVLGKRNVRQRYSNRTYIFTGLLICSSCNHYLVGQTTHRTLSDGTEKHYPSYRCNQRYQSHSCDRNRSCREDYVEEYLLQHIRPALSEYVAEYEVTGTNPARKNPAAEAAKIRTKMQKLYELYMDDLIDRDTYKRDYSAFQEKLKELDSIVVAPSRDLADLKKLLEQDYEEIYRTFSPQEKNAFWKSFVQSITVHEDGEMDIVFL

SEQ ID NO: 7810 - protein, 464 aa, Unknown
  Description of Unknown: Integrase B7811 sequence
  PTHR30461:SF3,SM00857,IPR036162,PF13408,PS51737, G3DSA:3.40.50.1390,IPR025827,IPR006119,IPR011109,SSF53041, PTHR30461,PS51736,cd00338,PF00239
MNSTYFRPQPELFGLRVVKYIRCSHDGQVLHGDTLEAQDALLDEFIKVNRMVLIDTFIDEALTARKKFTRRKEFVRLLDGVRAHSFDMILFTKLDRWFRNIGDYHKIQEILEANGVQWKAITESYDTTTTNGRLHINIRLSVAQDECDRDSDRIKDVFAYKLKNKTYLSGSLPRGLKLDAEKHVVIDPEWHQFALDMFDRFESTCSKRGTQLFLQEKYGIRVCYDTVVRYLRNPLFMGQYRDDPDFCEKTISRERFERIQNLAIRNVRIRHTQQFYIFSGLLICSSCNHYMTGTVTYRTLADGKEKTYKSYRCNFKAQSKLCDRSKHYREEYVEEYMLQHIRPALSSYVADFEVTAAAAAKKDPAIEIAKVERKMKKLYDLFMDDLIDKASYRKEYEKFQSQIDKLRSCPAAPVRNLDSIKKMLSDDWETVYHTFSDQEKNVFWKSFVQSITVHEDGEMDIVFL

SEQ ID NO: 7811 - protein, 464 aa, Unknown
  Description of Unknown: Integrase B7812 sequence
  cd00338,SM00857,IPR006118,G3DSA:1.10.10.2600, IPR036162,PF13408,PS51737,IPR025827, G3DSA:3.40.50.1390,IPR006119,IPR038109,IPR011109, SSF53041,PTHR30461,PS00397,PS51736,Coil,PF00239
MKSKTLRCAIYIRVSTTEQMMHGKSLEAQKDYLIHYAKEHDMNIVGIYADEGKTARKELKRRKAIQELVKAVERDEIDVILFWRLDRWFRNLSDFYKVQDILDQHNVRWISASEPGINMETRDGRLQLNVVLSIGQNEVDTTSERIKFVNEASIRQGKVIFGDSNMPIGYMVGTVDGVKRMVKDPEKEDLVNAFYRYFRTHQSKMKTLKFIQKNYDPTFSYSQLRNMLESDFYHGAYRDNSHYCPAYLTEKEWAEIQEISNRNVKHPASGRVYLFSGMMRCPVCGQLLAGRGGSSIINRKTRETRTYCYYRCNKACIDHMCTYRHNVSQNLIEEYLISNLEEEYNRYKIQSQNIHSKADLPKKKRTPEQVKKEMQRLNLLFQKERIEWDYYNEEYEKLTTELSSLEESDQQPKTNFDNIEKILHNDFRKTYDNLSPENRRAFWRSIIKEIHINTSHEVTGIDFY

SEQ ID NO: 7812 - protein, 464 aa, Unknown
  Description of Unknown: Integrase B7813 sequence
  PTHR30461:SF3,SM00857,G3DSA:1.10.10.2600,IPR036162,PF13408, PS51737,IPR025827,G3DSA:3.40.50.1390,IPR006119,IPR038109, IPR011109,SSF53041,PTHR30461,PS51736,cd00338, PF00239
MNSTYFRPQPELFGLRVVKYIRCSHDGQVLHGDTLEAQDALLDEFIAVNRMVLVDTFIDEALTARKKFTRRKEFVRLLDGVRSRSFDMILFTKLDRWFRNIGDYHKIQEILEANGVQWKAITESYDTTTTNGRLHINIRLSVAQDECDRDSDRIKDVFAYKLKNKTYLSGSLPRGLKLDDEKHVIIDPEWKQFALDMFDHFEQTNSKRGTLLYLKEKYGIYLCYDTISRNLRNSLYKGMYRDDPDFCEPLIEPERFDRIQVLGKRNVRQRYSNRTYIFTGLLICSSCNHYLVGQTTHRTLSDGTEKHYPSYRCNQRYQSHSCDRNHSYREDYVEEYLLQHIRPALSEYVAEYEVTGTNPARKNPAAEAAKIRTKMQKLYELYMDDLIDRDTYKRDYSAFQEKLKELDSIVVAPSRDLADLKKLLEQDYEEIYRTFSPQEKNAFWKSFVQSITVHEDGEMDIVFL

SEQ ID NO: 7813 - protein, 464 aa, Unknown
  Description of Unknown: Integrase B7814 sequence
  PTHR30461:SF3,SM00857,IPR006118,IPR036162,PF13408, PS51737,IPR025827,Coil,G3DSA:3.40.50.1390,IPR006119, IPR011109,SSF53041,PTHR30461,PS00397,PS51736, cd00338,PF00239
MMTNKIIRCALYIRVSTAEQCMHGKSLEAQESYLQQYASDHNMIVVGVYADEGKTARKELKKRKAIHSLLEDVKAGKIDIILFWRLDRWFRNLSDFYKVQDILDEYGVRWMSASEPGINMETRDGRLQLNVVLSIGQNEVDTTSERIKFVNEASIRQGKLIFGDANMGYGYKSGIVDGRKCMVKDPEREETVNAFYKYFFKHQNKCATLRYIQDNYDPNFSWAIMRTLLSSEFYKGTYRGFPYCPPYLTEEQWNELQKIAHKNIKRAKSGRIYLFTSLIRCPVCGQLLCGTGCKSIINRKTREKRDYCYYRCSRAHNDRICTYKHRLSQNLIEQYLLDNLDTEYRKYQIRVKKIEEEKKKIAQTKTPEKLNAELERLNLLFQKGRVEWDYYSSEYDRIEQELKNLRKIKPEVKRDLSFLENLLQSDFKTLYASLSPENRRAFWRSTIKQIHLNEDSTIKFVDFL

SEQ ID NO: 7814 - protein, 464 aa, Unknown
  Description of Unknown: Integrase B7815 sequence
  PTHR30461:SF3,SM00857,G3DSA:1.10.10.2600,IPR036162,PF13408, IPR025827,PS51737,G3DSA:3.40.50.1390,IPR006119,IPR038109, IPR011109,SSF53041,PTHR30461,PS51736,cd00338, PF00239
MNSTYFRPQPELFGLRVVKYIRCSHDGQVLHGDTLEAQDSLLDEFIKVNRMVLVDTFVDEALTARKKFTRRKEFVRLLDGVRSHSFDMILFTKLDRWFRNIGDYHKIQEILEANGVQWKAITESYDTTTTNGRLHINIRLSVAQDECDRDSDRIKDVFAYKLKNKTYLSGSLPRGLKLDDEKHVIIDPEWKQFALDMFDHFEQTNSKRGTLLYLKEKYGIYLCYDTISRNLRNSLYKGMYRDDPDFCEPLIEPERFDRIQVLGKRNVRQRYSNRTYIFTGLLICSSCNHYLVGQTTHRTLSDGTEKHYPSYRCNQRYQSHSCDRNRSYREDYVEEYLLQHIRPALSEYVAEYEVTGTNPARKNPAAEAAKIRTKMQKLYELYMDDLIDRDTYKRDYSAFQEKLKELDSIVVAPSRDLADLKKLLEQDYEEIYRTFSPQEKNAFWKSFVQSITVHEDGEMDIVFL

SEQ ID NO: 7815 - protein, 464 aa, Unknown
  Description of Unknown: Integrase B7816 sequence
  PTHR30461:SF3,SM00857,G3DSA:1.10.10.2600,IPR036162,PF13408, PS51737,G3DSA:3.40.50.1390,IPR025827,IPR006119,IPR038109, IPR011109,SSF53041,PTHR30461,PS51736,cd00338, PF00239
MNSTYFRPQPELFGLRVVKYIRCSHDGQVLHGDTLEAQDALLDEFIKVNRMVLVDTFIDEALTARKKFTRRKEFVRLLDCVRSHSFDMILFTKLDRWFRNIGDYHKIQEILEENGVQWKAITESYDTTTTNGRLHINIRLSVAQDECDRDSDRIKDVFAYKLKNKTYLSGSLPRGLKLDDEKHVIIDPEWKQFALDMFDHFEQTNSKRGTLLYLKEKYGIYLCYDTISRNLRNSLYKGMYRDDPDFCEPLIEPERFDRIQVLGKRNVRQRYSNRTYIFTGLLICSSCNHYLVGQTTHRTLSDGTEKHYPSYRCNQRYQSHSCDRNRSYREDYVEEYLLQHIRPALSEYVAEYEVTGTNPARKNPAAEAAKIRTKMQKLYELYMDDLIDRDTYKRDYSAFQEKLKELDSIVVAPSRDLADLKKLLEQDYEEIYRTFSPQEKNAFWKSFVQSITVHEDGEMDIVFL

SEQ ID NO: 7816 - protein, 464 aa, Unknown
  Description of Unknown: Integrase B7817 sequence
  PTHR30461:SF3,SM00857,G3DSA:1.10.10.2600,IPR036162,PF13408, PS51737,G3DSA:3.40.50.1390,IPR025827,IPR006119,IPR038109, IPR011109,SSF53041,PTHR30461,PS51736,cd00338, PF00239
MNSTYFRPQPELFGLRVVKYIRCSHDGQVLHGDTLEAQDALLDEFIKVNRMVLVDTFVDEALTARKKFTRRKEFVRLLDGVRAHNFDMILFTKLDRWFRNIGDYHKIQEILEANGVQWKAITESYDTTTTNGRLHINIRLSVAQDECDRDSDRIKDVFAYKLKNKTYLSGSLPRGLKLDDEKHVIIDPEWKQFALDMFDHFEQTNSKRGTLLYLKEKYGIYLCYDTISRNLRNSLYKGMYRDDPDFCEPLIEPERFDRIQVLGKRNVRQRYSNRTYIFTGLLICSSCNHYLVGQTTHRTLSDGTEKHYPSYRCNQMYQSHSCDRNRSYREDYVEEYLLQHIRPALSEYVAEYEVTGTNPARKNPAAEAAKIRTKMQKLYELYMDDLIDRDTYKRDYSAFQEKLKELDSIVVAPSRDLADLKKLLEQDYEEIYRTFSPQEKNAFWKSFVQSITVHEDGEMDIVFL

SEQ ID NO: 7817 - protein, 464 aa, Unknown
  Description of Unknown: Integrase B7818 sequence
  PTHR30461:SF3,cd00338,SM00857,IPR006118,IPR036162, PF13408,IPR025827,G3DSA:3.40.50.1390,PS51737,IPR006119, SSF53041,IPR011109,PTHR30461,PS00397,PS51736, Coil,PF00239
MPEKILRCAIYIRVSTFEQSVHGKSLQAQKECLEQYATDNNMSIVGVYADEGKTARKELKKRKAIHALIEDVKKDRIDVILFWRLDRWFRNLSDFYKVQDVLDEHGVRWISVSEPGINMETRDGRLQLNVVLSIGQNEVDTTSERIKFVNEASIRQKKLIFGDANMPFGYKTGVVDGKKCMVKDPETEHMVEDFFNYFRIHNSKKGAVRYMQESYGIDFSYGMLRTMLSSEFYKGTYRGYPYCPAYLSEKEWDEMQIISKRNIKTTPSGRIYLFTGLMRCPVCGQKLVGTGCSSIINRKTGEKRTYCYYRCNRALKDHICTYRHRVSQNLVEKYLLENLEREYEKYKVRSNQISEELKKQKKTKDPEKLRKEMERLNLLFQKGRISFDYYDKEYQRLEEEYSASAAFPEEEETRSLHYVEELLETDFRQMYDSLSPENKRSFWRSTIQEIYLNDDNTIKAVDFL

SEQ ID NO: 7818 - protein, 464 aa, Unknown
  Description of Unknown: Integrase B7819 sequence
  PTHR30461:SF3,cd00338,SM00857,IPR036162,PF13408, PS51737,IPR025827,G3DSA:3.40.50.1390,IPR006119,IPR011109, SSF53041,PTHR30461,PS51736,Coil,PF00239
MNSTYFRPQPELFGLRVVKYIRCSHDGQVLHGDTLEAQDALLDEFIKVNRMILVDTFVDEALTARKKFTRRKEFVRLLDGVRAHNFDMILFTKLDRWFRNIGDYHKIQEILEANGVQWKAITESYDTTTTNGRLHINIRLSVAQDECDRDSDRIKDVFSYKLKNKTYLSGSLPRGLKLDAEKHVVIDPEWHQFALDMFDHFESTCSKRGTQLFLQEKYGIRVCYDTVVRYLRNPLFMGQYRDDPEFCEKTISRERFEHIQNLAIRNVRIRHTQQFYIFSGLLICSSCNHYMTGTVTYRTLADGKEKTYKSYRCNFKAQSKLCDRSKHYREEYVEEYMLQHIRPALSSYVADFEVTAAAAAKKDPAIEIAKVERKMKKLYDLFMDDLIDKASYRNEYEKFQSQIDKLRSCPAVPVRNLDSIKKMLSDDWETVYHTFSNQEKNVFWKSFVQSITVHEDGEMDIVFL

SEQ ID NO: 7819 - protein, 464 aa, Unknown
  Description of Unknown: Integrase B7820 sequence
  PTHR30461:SF3,SM00857,G3DSA:1.10.10.2600,IPR036162,PF13408, IPR025827,PS51737,G3DSA:3.40.50.1390,IPR006119,IPR038109, IPR011109,SSF53041,PTHR30461,PS51736, cd00338,PF00239
MNSTYFRPQPELFGLRVVKYIRCSHDGQVLHGDTLEAQDALLDEFIKVNRMVLVDTFIDEALTARKKFTRRKEFVRLLDGVRAHNFDMILFTKLDRWFRNIGDYHKIQEILEANGVQWKAITESYDTTTTNGRLHINIRLSVAQDECDRDSDRIKDVFAYKLKNKTYLSGSLPRGLKLDDEKHVIIDPEWKQFALDMFDHFEQTNSKRGTLLYLKEKYGIYLCYDTISRNLRNSLYKGMYRDDPDFCEPLIEPERFDRIQVLGKRNVRQRYSNRTYIFTGLLICSSCNHYLVGQTTHRTLSDGTEKHYPSYRCNQRYQSHSCDRNRSYREDYVEEYLLQHIRPALSEYVAEYEVTGTNPARKNPAAEAAKIRTKMQKLYELYMDDLIDRDTYKRDYSAFQEKLKELDSIVVAPSRDLADLKKLLEQDYEEIYRTFSPQEKNAFWKSFVQSITVHEDGEMDIVFL

SEQ ID NO: 7820 - protein, 464 aa, Unknown
  Description of Unknown: Integrase B7821 sequence
  PTHR30461:SF3,SM00857,G3DSA:1.10.10.2600,IPR036162,PF13408, PS51737,G3DSA:3.40.50.1390,IPR025827,IPR006119,IPR038109, IPR011109,SSF53041,PTHR30461,cd00338,PF00239
MNSTYFRPQPELFGLRVCKYIRCSHDGQVLHGDTLEAQDALLDEFIKVNRMVLVDAFIDEALTARKKFTRRKEFVRLLDGVRAHNFNMILFTKLDRWFRNIGDYHKIQEILEANGVQWKAITESYDTTTTNGRLHINIRLSVAQDECDRDSDRIKDVFAYKLKNKTYLSGSLPRGLKLNEEKHVIIDPDWKQFALDMFDHFEQTNSKRGTLLYLKEKYGIYLCYDTIARNLRNPLYKGMYRDDPDFCEPLIEPERFDRIQVLGKRNVRQRYSNRTYIFTGLLICSSCNHYLVGQTTHRTLADGTEKHYPSYRCNQRYQSHSCDRNRSYREDCVEEYLLQHIRPALSEYVAEYEVTGTNPARKNPAAEAAKIRTKMQKLYELYMDDLIDRDTYKRDYSAFQEKLKELDSIVVAPSRDLADLKKLLEQDYEEIYRTFSPQEKNAFWKSFVQSITVHEDGEMDIVFL

SEQ ID NO: 7821 - protein, 464 aa, Unknown
  Description of Unknown: Integrase B7822 sequence
  PTHR30461:SF3,SM00857,IPR036162,PF13408,IPR025827, PS51737,G3DSA:3.40.50.1390,IPR006119,SSF53041,IPR011109, PTHR30461,PS51736,cd00338,PF00239
MNSSYFRSQPELYGLRVAKYIRCSHEGQVLHGDTLEAQDTLLNEFIEVNHMVLVDTFVDEALTARKRFAKRKEFVRLLDGVRTHSFDLILFTKLDRWFRNISDYHKIQEILDANGVQWKAITESYDTTTTNGRLHINIRLSVAQDECDRDSDRIKDVFAYKLKNKSYISGRLPRGLKLDADKHIIHDPEWKQWALDMFDHFESSGSIYSTFLYLTDKYGPLLRYDGVSRALKNSLYKGMYRDDPEFCDPLIDPERFDRLFDLAKKNVRQRKTRRYYIFTGLLVCSSCQHNLVPYTIPHTLADGTRKDYIFYRCGYHSSSRLCDRSRTYREEYIEQYLLDHVRPALSRYIAEYDVISSGASKKDPAAEAAKIRHKLEKLYDLFLDDLIEKDLYRQKYDDLQTQLKDCLTVPSAPVRDFSAIQELLSKNWEDMYCTFSKTEKNVFWKSFIKSIVVYEDGSMDINFL

SEQ ID NO: 7822 - protein, 464 aa, Unknown
  Description of Unknown: Integrase B7823 sequence
  PTHR30461:SF3,SM00857,G3DSA:1.10.10.2600,IPR036162,PF13408, IPR025827,PS51737,G3DSA:3.40.50.1390,IPR006119,IPR038109, IPR011109,SSF53041,PTHR30461,PS51736,cd00338, PF00239
MNSTYFRPQPELFGLRVVKYIRCSHDGQVLHGDTLEAQDALLDEFIKVNRMVLIDTFIDEALTARKKFTRRKEFVRLLDGVRSHSFDMILFTKLDRWFRNIGDYHKIQEILEANGVQWKAITESYDTTTTNGRLHINIRLSVAQDECDRDSDRIKDVFAYKLKNKTYLSGSLPRGLKLDDEKHVIIDPEWKQFALDMFDHFEQTNSKRGTLLYLKEKYGIYLCYDTISRNLRNSLYKGMYRDDPDFCEPLIEPERFDRIQVLGKRNVRQRYSNRTYIFTGLLICSSCNHYLVGQTTHRTLSDGTEKHYPSYRCNQRYQSHSCDRNRSYREDYVEEYLLQHIRPALSEYVAEYEVTGTNPARKNPAAEAAKIRTKMQKLYELYMDDLIDRDTYKRDYSAFQEKLKELDSIVVVPSRDLADLKKLLEQDYEEIYRTFSPQEKNAFWKSFVQSITVHEDGEMDIVFL

SEQ ID NO: 7823 - protein, 464 aa, Unknown
  Description of Unknown: Integrase B7824 sequence
  PTHR30461:SF3,SM00857,G3DSA:1.10.10.2600,IPR036162,PF13408, IPR025827,G3DSA:3.40.50.1390,PS51737,IPR006119,IPR038109, IPR011109,SSF53041,PTHR30461,PS51736,cd00338, PF00239
MNSTYFRPQPELFGLRVVKYIRCSHDGQVLHGDTLEAQDALLDEFIKVNRMVLIDTFIDEALTARKKFTRRKEFVRLLDGVRAHNFDMILFTKLDRWFRNIGDYHKIQEILEANGVQWKAITESYDTTTTNGRLHINIRLSVAQDECDRDSDRIKDVFAYKLKNKTYLSGSLPRGLKLDDEKHVIIDPEWKQFALDMFDHFEQTNSKRGTLLYLKEKYGIYLCYDTISRNLRNSLYKGMYRDDPDFCEPLIEPERFDRIQVLGKRNVRQRYSNRTYVFTGLLICSSCNHYLVGQTTHRTLSDGTEKHYPSYRCNQRYQSHSCDRNRSYREDYVEEYLLQHIRPALSEYVAEYEVTGTNPARKNPAAEAAKIRTKMQKLYGLYMDDLIDRDTYKRDYSAFQEKLKELDSIVVAPSRDLADLRKLLEQDYEEIYRTFSPQEKNAFWKSFVQSITVHEDGEMDIVFL

SEQ ID NO: 7824 - protein, 464 aa, Unknown
  Description of Unknown: Integrase B7825 sequence
  PTHR30461:SF3,SM00857,G3DSA:1.10.10.2600,IPR036162,PF13408, IPR025827,PS51737,G3DSA:3.40.50.1390,IPR006119,IPR038109, IPR011109,SSF53041,PTHR30461,PS51736,cd00338, PF00239
MNSTYFRPQPELFGLRVVKYIRCSHDGQVLHGDTLEAQDALLDEFIKVNRMVLIDTFIDEALTARKKFTRRKEFVRLLDGVRSHSFDMILFTKLDRWFRNIGDYHKIQEILEANGVQWKAITESYDTTTTNGRLHINIRLSVAQDECDRDSDRIKDVFAYKLKNKTYLSGSLPRGLKLDDEKHVIIDPEWKQFALDMFDHFEQTNSKRGTLLYLKEKYGIYLCYDTISRNLRNSLYKGMYRDDPDFCEPLIEPERFDRIQVLGKRNVRQRYSNRTYIFTGLLICSSCNHYLVGQTTHRTLSDGTEKHYPSYRCNQRYQSHSCDLNRSYREDYVEEYLLQHIRPALSEYVAEYEVTGTNPARKNPAAEAAKIRTKMQKLYELYMDDLIDRDTYKRDYSAFQEKLKELDSIVVAPSRDLADLKKLLEQDYEEIYRTFSPQEKNAFWKSFVQSITVHEDGEMDIVFL

SEQ ID NO: 7825 - protein, 464 aa, Unknown
  Description of Unknown: Integrase B7826 sequence
  SM00857,IPR006118,G3DSA:1.10.10.2600,IPR036162,PF13408, PS51737,G3DSA:3.40.50.1390,IPR025827,IPR006119,IPR038109, IPR011109,SSF53041,PF00239,PTHR30461,PS00397, PS51736,Coil,cd00338
MKSKTLRCAIYIRVSTTEQMMHGKSLEAQKDYLIHYAKEHDMNIVGIYADEGKTARKELKRRKAIQELVKAVERDEIDVILFWRLDRWFRNLSDFYKVQDILDQHNVRWISASEPGINMETRDGRLQLNVVLSIGQNEVDTTSERIKFVNEASIRQGKVIFGDSNMPIGYIVGTVDGVKRMVKDPEKEDLVNAFYRYFRTHQSKMKTLKFIQENYDPTFSYSQLRNMLESDFYHGTYRDNPHYCPAYLTEKEWAEIQEISNRNVKHPASGRVYLFSGMMRCPVCGQLLAGRGGSSIINRKTRETRTYCYYRCNKACIDHMCTYRHNVSQNLIEEYLISNLEEEYNRYKIQSQNIHSKADLPKKKRTPAQVKKEMQRLNLLFQKERIEWDYYNEEYEKLTTELSSLEESDQQPKTNFDNIEKILHNDFRKTYDNLSPENRRAFWRSIIKEIHINTSHEVTGIDFY

SEQ ID NO: 7826 - protein, 464 aa, Unknown
  Description of Unknown: Integrase B7827 sequence
  PTHR30461:SF3,SM00857,G3DSA:1.10.10.2600,IPR036162,PF13408, IPR025827,PS51737,G3DSA:3.40.50.1390,IPR006119,IPR038109, IPR011109,SSF53041,PTHR30461,PS51736,cd00338, PF00239
MNSTYFRPQPELFGLRVVKYIRCSHDGQVLHGDTLEAQDALLDEFIAVNRMVLVDTFIDEALTARKKFTRRKEFVRLLDGVRSRSFDMILFTKLDRWFRNIGDYHKIQEILEENGVQWKAITESYDTTTTNGRLHINIRLSVAQDECDRDSDRIKDVFAYKLKNKTYLSGSLPRGLKLDDEKHVIIDPEWKQFALDMFDHFEQTNSKRGTLLYLKEKYGIYLCYDTISRNLRNSLYKGMYRDDPDFCEPLIEPERFDRIQVLGKRNVRQRYSNRTYIFTGLLICSSCNHYLVGQTTHRTLSDGTEKHYPSYRCNQRYQSHSCDRNRSYREDYVEEYLLQHIRPALSEYVAEYEVTGTNPARKNPAAEAAKIRTKMQKLYELYMDDLIDRDTYKRDYSAFQEKLKELDSIVVAPSRDLADLKKLLEQDYEEIYRTFSPQEKNAFWKSFVQSITVHEDGEMDIVFL

SEQ ID NO: 7827 - protein, 464 aa, Unknown
  Description of Unknown: Integrase B7828 sequence
  PTHR30461:SF3,cd00338,SM00857,IPR036162,PF13408, IPR025827,G3DSA:3.40.50.1390,PS51737,IPR006119,SSF53041, IPR011109,PTHR30461,PS51736,Coil,PF00239
MSSSYFRPQPELYGLRVVKYIRCSHEGQVLHGDTLEAQDTLLNEFIEVNHMVLVDTFVDEALTARKRFTKRKEFVRLLDGVRTHSFDLILFTKLDRWFRNISDYHKIQEILDANGVQWKAITESYDTTTTNGRLHINIRLSVAQDECDRDSDRIKDVFAYKLKNKSYISGRLPRGLKLDADKHIIHDPEWKQWALDMFDHFESSGSIYSTFLFLTDKYGPLLRYDGVSRALKNPLYKGMYRDDPEFCDPLIDPERFDRLFDLAKKNVRQRKTRRYYIFTGLLVCSSCQHNLVPYTIPHTLADGTHKDYVSYRCGYHSSSRLCDRSRTYREEYIEQYLLDHVRPALSRYMAEYDVVSSSALKKDPAAEAAKIRHKLEKLYDLFLDDLIEKDLYRQKYDELQAQLKDCLAVPSTPVRDFSAVQELLSKNWEDMYCTFSKTEKNVFWKSFVESIIVYEDGSMDINFL

SEQ ID NO: 7828 - protein, 464 aa, Unknown
  Description of Unknown: Integrase B7829 sequence
  PTHR30461:SF3,SM00857,IPR036162,PF13408,PS51737, G3DSA:3.40.50.1390,IPR025827,IPR006119,IPR011109,SSF53041, PTHR30461,PS51736,cd00338,PF00239
MNSTYFRPQPELFGLRVVKYIRCSHDGQVLHGDTLEAQDALLDEFIKVNHMILVDTFVDEALTARKKFTRRKEFVRLLDGVRAHNFDMILFTKLDRWFRNIGDYHKIQEILEANGVQWKAITESYDTTTTNGRLHINIRLSVAQDECDRDSDRIKDVFSYKLKNKTYLSGSLPRGLKLDAEKHVVIDPEWHQFALDMFDHFESTCSKRGTQLFLQEKYGIRVCYDTVVRYLRNPLFMGQYRDDPEFCEKTISRERFEHIQNLAIRNVRIRHTQQFYIFSGLLICSSCNHYMTGTVTYRTLADGKEKTYKSYRCNFKAQSKLCDRSKHYREEYVEEYMLQHIRPALSSYVADFEVTAAAAAKKDPAIEIAKVERKMKKLYDLFMDDLIDKASYRSEYEKFQSQIDKLRSCPAAPVRNLDSIKKMLSDDWETVYHTFSDQEKNVFWKSFVQSITVHEDGEMDIVFL

SEQ ID NO: 7829 - protein, 464 aa, Unknown
  Description of Unknown: Integrase B7830 sequence
  PTHR30461:SF3,SM00857,G3DSA:1.10.10.2600,IPR036162,PF13408, IPR025827,PS51737,G3DSA:3.40.50.1390,IPR006119,IPR038109, IPR011109,SSF53041,PTHR30461,PS51736,cd00338, PF00239
MNSTYFRPQPELFGLRVVKYIRCSHDGQVLHGDTLEAQDALLDEFIKVNRMVLIDAFIDEALTARKKFTRRKEFVRLLDGVRAHSFDMILFTKLDRWFRNIGDYHKIQEILEANGVQWKAITESYDTTTTNGRLHINIRLSVAQDECDRDSDRIKDVFAYKLKNKTYLSGSLPRGLKLDDEKHVIIDPEWKQFALDMFDHFEQTNSKRGTLLYLKEKYGIYLCYDTISRNLRNSLYKGMYRDDPDFCEPLIEPERFDRIQVLGKRNVRQRYSNRTYIFTGLLICSSCNHYLVGQTTHRTLSDGTEKHYPSYRCNQRYQSHSCDRNRSYREDYVEEYLLQHIRPALSEYVAEYEVTGTNPARKNPAAEAAKIRTKMQKLYELYMDDLIDRDTYKRDYSAFQEKLKELDSIVVAPSRDLADLKKLLEQDYEDIYRTFSPQEKNAFWKSFVQSITVHEDGEMDIVFL

SEQ ID NO: 7830 - protein, 464 aa, Unknown
  Description of Unknown: Integrase B7831 sequence
  SM00857,G3DSA:1.10.10.2600,IPR036162,PS51737,G3DSA:3.40.50.1390, IPR006119,IPR038109,PF07508,SSF53041,IPR011109, PF00239,PTHR30461,PS51736,Coil,cd00338
MREVKKAIAYFRVSTDMQKEDLSLETQEKGGEIFARDNNIEIVKKFTDVMSGGNRNRKGFIEAQKYLEENQGEIDYFIAYDVSRIARDAFAFLSLFNKLNLLNVKLKLINNPTLDSDSPMGKLILTILAAIFEFFRFDNADRVRDNMIVKVKEGKRMNNAPYGYRIIDKKMVIVPEEAELIKYIYQEYLKGHGIVALERMTGKDRSTIKQWLNNKVYAGYNIFGKRKMNKTTFKPMKNPDETKIVEAKGDWEPIIDIDTWEKVANRMSLNQELRMRNIEKTSYLLSGLLFHTCGSKFRGNAGRKGTYYYRCTGCSRSIKSDTLDKKVLDELFNSEFLDELNKIPLENNNKDSELKKLKAQKSKLKTREENLIELYADGDITKEQFKSKKVDIQNSLIDIEAKIIELENERNEVKQNLDFKKMFIEALSNLKNAESKQEANKILKQIIKKIEVNEEREVFIHLNF

SEQ ID NO: 7831 - protein, 463 aa, Unknown
  Description of Unknown: Integrase B7832 sequence
  PTHR30461:SF3,SM00857,IPR006118,IPR036162,PF13408, PS51737,G3DSA:3.40.50.1390,IPR025827,Coil,IPR006119, IPR011109,SSF53041,PTHR30461,PS00397, PS51736,cd00338,PF00239
MPSKIERCAIYIRVSTAEQMMHGKSLEAQKQYLTNYAKEHNMTVAGVYADEGKTARKELKKRKAIHSLLEDVKAGKIDVIIFWRIDRWFRNLSDFYKVQEVLDDNNVHWISTSEPGINMETRDGRLQLNVVLSIGQNEVDTTSERIKFVNEASIRQGKLIFGDVNMGYGYKSGIIDGVKRMVKDPDREDTVNAFYRFFFKHHAKGLSMRYIQENYDPDFTWANMRTLLSSEFYKGTYRGIPYCPAYLTESEWNNLQEIQNANVKRAPSGRIYLFSGMINCPICGRRLSARGGSSIINRKTGAKKVYCYYRCNKAFIDHKCSYRHMVSQNLIERYLIDHLEYEYNKFKIKCEKIEKEQEKKKKVQTPEKLQKELERLNLLFQKGRIEWDYYSKEYDRIENELNELLNAAPELEPDYAYLEELLNTDFRTMYYNLTQENRRAFWHSIIREIHLNTDHTVDSVDFL

SEQ ID NO: 7832 - protein, 463 aa, Unknown
  Description of Unknown: Integrase B7833 sequence
  PTHR30461:SF3,SM00857,IPR006118,IPR036162,PF13408, IPR025827,PS51737,PS00397,G3DSA:3.40.50.1390,IPR006119, SSF53041,IPR011109,PTHR30461,Coil,PS51736, cd00338,PF00239
MTTKVERCAIYIRVSTTEQMMHGKSLEAQKEYLTNYAREHNMAVVGVYADEGKTARKELKKRKAIHSLLQDVEAGKIDVIIFWRIDRWFRNLSDFYKVQDILDNHNVRWISTSEPGINMETRDGRLQLNVVLSIGQNEVDTTSERIKFVNEASIRSGKLIFGDVNMGYGYKSGIVDGQKRMIKDPDREHVVDAFYKYFFKHQNKCATLRYIQETYDPDFSFGIMRTLLSSEFYKGTYRGFPYCPAYLTEDEWNKLQKIQKRNVKATPSGRIYLFAGMIRCPVCGQKLCGTGCSSIINRKTGAKRTYCYYRCNRAMIDHICSYRHRLSQNLVENYLLDNLENEYKNYKVKCEKIEKEKEKQKKKQSPEKLRKELDRLNFLFQKGRIEWDYYNEEYSRVESELNNLQKVLPEPAPNYSYLEELLNTDFRTMYDQLSQENRRAFWRSIIQEIHINEDSTITSVDFL

SEQ ID NO: 7833 - protein, 463 aa, Unknown
  Description of Unknown: Integrase B7834 sequence
  PTHR30461:SF3,SM00857,IPR036162,PF13408,IPR025827, G3DSA:3.40.50.1390,PS51737,IPR006119,IPR011109,SSF53041, PF00239,PTHR30461,PS51736,Coil,cd00338
MNTYFHPQPELYGLRVVKYIRCSHEGQVLHGDTLEAQDTLLNEFIEVNHMVLVDTFVDEALTARKRYTKRKEFVRLLDGVRAHAFDMILFTKLDRWFRNIGDYHKIQEILDVNGVQWKAITESYDTTTTNGRLHINIRLSVAQDECDRDSDRIKDVFAYKLKNKSYISGRLPRGLKLDADKHIIHDPEWKQWALDMFDHFESSGSIYSTFQFLTNKYGPLLRYDGVSRALKNPLYKGMYRDDPDFCDPLIDPERFDHLLELAKKNVRQRKTRRYYIFTGLLVCSSCQHNLVPYTIPHTLADGTHKDYVSYRCGYHSSSRLCDRSRTYREEYIEQYLLDHVRPALSCYMAEYDVVSSSASKKDPAAEAAKIRHKLEKLYDLFLDDLIEKDLYRQKYDELQAQLKECLEVPSAPVRDFSAVQELLSKNWEDMYCTFSKTEKNVFWKSFVESIIVYEDGSMDINFL

SEQ ID NO: 7834 - protein, 463 aa, Unknown
  Description of Unknown: Integrase B7835 sequence
  PTHR30461:SF3,SM00857,IPR006118,G3DSA:1.10.10.2600,IPR036162, PF13408,IPR025827,G3DSA:3.40.50.1390,Coil,PS51737, IPR006119,IPR038109,SSF53041,IPR011109, PTHR30461,PS00397,cd00338,PF00239
MTKPQTALLRVALYIRVSSDEQAERGDSIRDQKERGIKYIDDHQNMVLQDTYIDDGVSGQKLDRDDFTRLIGNVKAGLVDLIIFTKLDRWFRSLRHYLNIQVILDKYNVAWTAIDQPYFDTSTPYGRAFVAQSMTWAELEAQNGGLRVADVFRNKVVHGEVITGKVPRGYMIQNKHLVFSDEAPAMLDSIQYFHREQGLAKTVNYMRENHGINMSIQNLKNSILRNEKYTGRYRGNENYCPRLISDEMYQDIQRVLDNNSTIRSSQKYPYIFSGILICDECGHKMSGCHINVVSRRTSGKVYRYKYPAYECLQYRAYKKCSNGGEIREMRIEEYLLEHIREELSGYLVDFETGEAKRIDNRAKKNKIRRKLDRLKDLYLNEVINLEEYKKDRAEYEEQLAALPDMEQPIKNLKPLKQVLDCNFEIIYNNLNNEEKRAFWRSIIKEIRVSKSIGRNRKYQIIFL

SEQ ID NO: 7835 - protein, 463 aa, Unknown
  Description of Unknown: Integrase B7836 sequence
  PTHR30461:SF3,SM00857,IPR006118,IPR036162,PF13408, PS51737,G3DSA:3.40.50.1390,Coil,IPR025827,IPR006119, IPR011109,SSF53041,PTHR30461,PS00397,PS51736, cd00338,PF00239
MPSKIERCAIYIRVSTAEQMMHGKSLEAQKQYLTNYAKEHNMTVAGVYADEGKTARKELKKRKAIHSLLEDVKAGKIDVIIFWRIDRWFRNLSDFYKVQEVLDDNNVHWISTSEPGINMETRDGRLQLNVVLSIGQNEVDTTSERIKFVNEASIRQGKLIFGDVNMGYGYKSGIIDGVKRMVKDPDREDAVNAFYRFFFKHHAKGLSMRYIQENYDPDFTWANMRTLLSSEFYKGTYRGIPYCPAYLTESEWNNLQEIQNTNVKRAPSGRIYLFSGMINCPICGRRLSARGGSSIINRKTGAKKVYCYYRCNKAFIDHKCTYKHMVSQNLIEQYLIDHLEYEYNKFKIKCEKIEKEQEKKKKIQTPEKLQKELERLNLLFQKGRIEWDYYSKEYDRIENELNELLNAAPELEPDYAYLEELLNTDFRTMYYNLTQENRRAFWHSIIREIHLNTDHTVDSVDFL

SEQ ID NO: 7836 - protein, 463 aa, Unknown
  Description of Unknown: Integrase B7837 sequence
  PTHR30461:SF3,IPR036162,PS51737,IPR011109,PTHR30461, PS00397,PF00239,G3DSA:1.10.10.2600,IPR006119,SSF53041, cd00338,SM00857,IPR025827,IPR038109,PS51736, IPR006118,PF13408,G3DSA:3.40.50.1390,Coil
MRRKTTAHVEKILLRVAIYIRVSTDKQVKDGDSMRDQLATGQKYIDSHENMILVDTYIDDGISGQKLKRDDFQRLIDDVRAGRIDLIIFTRLDRWFRNLRHYLNTQDILDKHGVSWTAIEQPYFDTSTPHGRAFVNNSMIWAELEAQNDSDRILGVFDDKVDNGEVLSGSTPLGYTIVNKHLVPDDDAPTAVAIFQYYRKTGNLSMTLRYMESEFGLVRSAASLKNMLTNTKYIGEFRDNKNYCPAIIDRDLFFDVQRLLKINIKSGKKHDYIFSGLVVCDDCDHIMSGCQQRARGRVRADGTRIIYKYSVYRCRQGVNLHRCPNRKLVFETTLEKMLLERIRPELENYIAEYEVANLPALRTDAKRRSVEGKMQKLKDLYLNDLITMDEFKLDREKLLMQLEKINAEDSRPVKDLSYLKNFLKMDFESVYDSLSIPERRELWRSIVKEIRVDHDKNIHIIFL

SEQ ID NO: 7837 - protein, 463 aa, Unknown
  Description of Unknown: Integrase B7838 sequence
  PTHR30461:SF3,IPR036162,PS51737,IPR011109,PTHR30461, PS00397,PF00239,G3DSA:1.10.10.2600,IPR006119,SSF53041, cd00338,SM00857,IPR025827,IPR038109,PS51736, IPR006118,PF13408,G3DSA:3.40.50.1390,Coil
MRRKTTAPVEKILLRVAIYIRVSTDKQVKDGDSMRDQLATGQKYIDSHENMILVDTYIDDGISGQKLKRDDFQRLIDDVRAGRIDLIIFTRLDRWFRNLRHYLNTQDILDKHGVSWTAIEQPYFDTSTPHGRAFVNNSMIWAELEAQNDSDRILGVFDDKVDNGEVLSGSTPLGYKIVNKHLVPDDDAPTAVAIFQYYRKTGNLSMTLRYMESEFGLVRSAASLKNMLTNTKYIGEFRDNKNYCPAIIDRDLFFDVQRLLKINIKSGKKHDYIFSGLVVCDDCDHIMSGCQQRARGRVRADGTRIIYKYSVYRCRQGVNLHRCPNRKLVFETTLEKMLLERIRPELENYIAEYEVANLPALRTDAKRRSVEGKMQKLKDLYLNDLITMDEFKLDREKLLMQLEKINAEDSRPVKDLSYLKNFLKMDFESVYDSLSIPERRELWRSIVKEIRVDHDKNIHIIFL

SEQ ID NO: 7838 - protein, 463 aa, Unknown
  Description of Unknown: Integrase B7839 sequence
  PTHR30461:SF3,SM00857,IPR006118,IPR036162,PF13408, PS51737,IPR025827,PS00397,G3DSA:3.40.50.1390,IPR006119, IPR011109,SSF53041,PTHR30461,Coil,PS51736, cd00338,PF00239
MPSKIERCAIYIRVSTAEQMMHGKSLEAQKQYLTNYAKEHNMTVAGVYADEGKTARKELKKRKAIHSLLEDVKAGKIDVIIFWRIDRWFRNLSDFYKVQEVLDDNNVHWISTSEPGINMETRDGRLQLNVVLSIGQNEVDTTSERIKFVNEASIRQGKLIFGDVNMGYGYKSGIIDGVKRMVKDPDREDTVNAFYRFFFKHHAKGLSMRYIQENYDPDFTWANMRTLLSSEFYKGTYRGIPYCPAYLTESEWNNLQEIQNANVKRAPSGRIYLFSGMINCPICGRRLSARGGSSIINRKTGAKKVYCYYRCNKAFIDHKCTYKHMVSQNLIEQYLIEHLEYEYNKFKIKCEKIEKEQEKKKKIQTPEKLQKELERLNLLFQKGRIEWDYYSKEYDRIENELNELLNAAPELEPDYAYLEELLNTDFRTMYYNLTQENRRAFWHSIIREIHLNADHTVDSVDFL

SEQ ID NO: 7839 - protein, 463 aa, Unknown
  Description of Unknown: Integrase B7840 sequence
  PTHR30461:SF3,SM00857,IPR006118,IPR036162,PF13408, PS51737,IPR025827,PS00397,G3DSA:3.40.50.1390,IPR006119, IPR011109,SSF53041,PTHR30461,Coil,PS51736, cd00338,PF00239
MPSKIERCAIYIRVSTAEQMMHGKSLEAQKQYLTNYAKEHNMTVAGVYADEGKTARKELKKRKAIHALLEDVKAGKIDVIIFWRIDRWFRNLSDFYKVQEVLDDNNVHWISTSEPGINMETRDGRLQLNVVLSIGQNEVDTTSERIKFVNEASIRQGKLIFGDVNMGYGYKSGIIDGVKRMVKDPDREDTVNAFYRFFFKHHAKGLSMRYIQENYDPDFTWANMRTLLSSEFYKGTYRGIPYCPAYLTESEWNNLQEIQNANVKRAPSGRIYLFSGMINCPICGRRLSARGGSSIINRKTGAKKVYCYYRCNKAFIDHKCSYRHMVSQNLIERYLIDHLEYEYNKFKIKCEKIEKEQEKKKKVQTPEKLQKELERLNFLFQKGRIEWDYYSKEYDRIENELNELLNAAPELEPDYAYLEELLNTDFRTMYYNLTQENRRAFWHSIIREIHLNTDHTVDSVDFL

SEQ ID NO: 7840 - protein, 463 aa, Unknown
  Description of Unknown: Integrase B7841 sequence
  PTHR30461:SF3,SM00857,IPR006118,IPR036162,PF13408, PS51737,IPR025827,Coil,G3DSA:3.40.50.1390,IPR006119, IPR011109,SSF53041,PTHR30461,PS00397,PS51736, cd00338,PF00239
MSEKIKRCAIYIRVSTSEQMMHGKSIEAQREYLACYAKDHGMIVTGVYADEGKTARKELKKRKAIHALLEDVKAGKIDVILFWRLDRWFRNMSDFYKVQDILDEYGVYWISASEPGINMETRDGRLQLNVVLSIGQNEVDTTSERIKFVNEASIRQGKVIFGENNMPRGYKVGIVDGKKCMVKDPEQEEMVNAFYDYFEKHQAKQQTLRFIQRNYDPAFSYGMLRTMLSSEFYKGTYRGIPYCPAYLSEERWAHIQNISKKSIRRTRSGRVYYFTGLIRCPQCGQILCGTGCKSVVNRKTGEKRDYCYYRCNRAMIDRICTNQHRVSQNLIESYLLDNLENEFKTYKIRVENVKQQKKKAPPVRTEKQIDKELDRLNLLFQKGRIEWDYYSREYDSLEKEKEDLNSVTVDPEPDYSFIETLLQQDIRGIYRSLTPENKRAFWKNTIRQIYLKPDYTIDYVDFI

SEQ ID NO: 7841 - protein, 463 aa, Unknown
  Description of Unknown: Integrase B7842 sequence
  PTHR30461:SF3,SM00857,IPR036162,PF13408,IPR025827, PS51737,G3DSA:3.40.50.1390,IPR006119,IPR011109,SSF53041, PF00239,PTHR30461,PS51736,Coil,cd00338
MNTYFHPQPELYGLRVVKYIRCSHEGQVLHGDTLEAQDTLLNEFIETNHMVLVDTFVDEALTARKRYTKRKEFVRLLDGVRAHAFDMILFTKLDRWFRNIGDYHKIQEILDANSVQWKAITESYDTTTTNGRLHINIRLSVAQDECDRDSDRIKDVFAYKLKNKTYISGSLPRGLMLDEEKHVIIDPEWHQFALDMFDHFEATGSKRGTLLYLQEKYDMRLCYDTVVRNLRNPLYKGMYRDDPGFCECTITPERFDRIQLLGRKNVRHRKTNRTYIFTGLLICSSCKHYLVGAATTATLAHGVKKEYRSYRCNQRYQSHSCDRARTYREQDVEDYLLGHVRPALSQYIAQYEVSSSSMQKKDPAADAAKIRRKLEKLYDLFMDDLIDKESYREKYDDLQDQLKKCQAVVPVPRRDLSEVKSLLAQNWEEIYQAFTAAEKNTFWKSFIESILVHEDGSMDISFL

SEQ ID NO: 7842 - protein, 463 aa, Unknown
  Description of Unknown: Integrase B7843 sequence
  PTHR30461:SF3,SM00857,IPR006118,IPR036162,PF13408, PS51737,G3DSA:3.40.50.1390,Coil,IPR025827,IPR006119, IPR011109,SSF53041,PTHR30461,PS00397, PS51736,cd00338,PF00239
MPSKIERCAIYIRVSTAEQMMHGKSLEAQKQYLTNYAKEHNMTVAGVYADEGKTARKELKKRKAIHSLLEDVKAGKIDVIIFWRIDRWFRNLSDFYKVQEVLDDNNVHWISTSEPGINMETRDGRLQLNVVLSIGQNEVDTTSERIKFVNEASIRQGKLIFGDVNMGYGYKSGIIDGVKRMVKDPDREDTVNAFYRFFFKHHAKGLSMRYIQENYDPDFTWANMRTLLSSEFYKGTYRGIPYCPAYLTESEWNNLQEIQNANVKRAPSGRIYLFSGMINCPICGRRLSARGSSSIINRKTGAKKVYCYYRCNKAFIDHKCSYRHMVSQNLIERYLIDHLEYEYNKFKIKCEKIEKEQEKKKKVQTPEKLQKELERLNLLFQKGRIEWDYYSKEYDRIENELNELLNAAPELEPDYAYLEELLNTDFRTMYYNLTQENRRAFWHSIIREIHLNTDHTVDSVDFL

SEQ ID NO: 7843 - protein, 463 aa, Unknown
  Description of Unknown: Integrase B7844 sequence
  PTHR30461:SF3,cd00338,SM00857,IPR036162,PF13408, IPR025827,PS51737,G3DSA:3.40.50.1390,IPR006119,IPR011109, SSF53041,PTHR30461,PS51736,Coil,PF00239
MSFFTPNPQLFGLRVVKYIRCSHDDQVLHGDTLEAQDLILEDFIKVNRMILVDTFIDEALTARKRFNKRKEFVRLLNGVKAHDFDLIIFTKLDRWFRNIGDYHKIQEILEANGVQWKAVTENYDTTTTNGRLHINIRLSVAQDECDRDSDRIKDVFAYKLKNKTYVSGSLPRGLKLDAEKHVIIDPEWNCFALDMFDRFEATCSKRDTQLFLQEKYNIRVCYDTVARYLKNPLFKGQYRDDPDFCPATISPERFERIQKLAIRNVRIRHTQQFYIFSGLLICSSCNHYMCGTVTYRRMADGSEKMYKNYRCNFKAQSKLCDRGKTYREADLEEYMLTHIRPALSDYIAKYEVTAASTVQKNPVTEIAKIERKMKKLYDLFMDDLIDKEAYRSEYDKFKAQIEELQKCSTTAPMRSLDSVKKLLSEDWEAVYHTFSDREKNTFWKSFVESVLVYEDGSMDIRFL

SEQ ID NO: 7844 - protein, 463 aa, Unknown
  Description of Unknown: Integrase B7845 sequence
  PTHR30461:SF3,SM00857,IPR006118,IPR036162,PF13408, IPR025827,G3DSA:3.40.50.1390,PS51737,PS00397,IPR006119, SSF53041,IPR011109,PTHR30461,Coil, PS51736,cd00338,PF00239
MTTKVERCAIYIRVSTTEQMMHGKSLEAQKEYLTNYAKEHNMAVVGVYADEGKTARKELKKRKAIHSLLQDVEAGKIDVIIFWRIDRWFRNLSDFYKVQDILDNHNVRWISTSEPGINMETRDGRLQLNVVLSIGQNEVDTTSERIKFVNEASIRSGKLIFGDVNMGYGYKSGIVDGQKRMIKDPDREHVVDAFYKYFFKHQNKCATLRYIQETYDPDFSFGIMRTLLSSEFYKGTYRGFPYCPAYLTEDEWNKLQKIQKRNVKATPSGRIYLFAGMIRCPVCGQKLCGTGCSSIISRKTGAKRTYCYYRCNRAMIDHICSYRHRLSQNLVENYLLDNLENEYKNYKVKCEKIEKEKEKRKKKQSPDKLRKELDRLNFLFQKGRIDWDYYNEEYGRVESELNDLQSALPEPVTNYSYLEELLDTDFRTMYDQLSQENRRAFWRSIIQEIHVNEDNAITSVDFL

SEQ ID NO: 7845 - protein, 463 aa, Unknown
  Description of Unknown: Integrase B7846 sequence
  SM00857,IPR006118,IPR036162,G3DSA:3.40.50.1390,Coil, IPR006119,SSF53041,PTHR30461,PS00397,PS51736, cd00338,PF00239
MKVVTYLRVSTEMQKDRGSLETQRESLNEYCKKNNLNIIDSFEDVMSGGIADRDGILKIMAMLPLKKFEGVVVQNSDRISRDFKDGTLFFNDFRKHNVRLISVMEGPLDFRDDNTDAMAKIRLIFSEMERRKMRIRTKVSMAALANTDRYLGGGLLPHFKVKIINKEKKIVKNEETWDLERQKYLDILKYRSFKKVAELYCINYSTFLEQVRKVELIGHRMFGEFIKDPYTLKKVKNKDPFISSEKVLPALLTDEEFNLINALLKDNRKKFKNPKRKYLFSGLLYCSCGKKFAGNIVNKKTKSYYYYRCEGCKVFYNVDKLEINIKNAILSHPHLKLLNDTTFRLQDLQDKIELENKKLEDLVKRQREITQLLMDGLLDASTIKPELEKLKKLVDLSKQEIKKYENLILENSNFVITEDNISDLKELLFMENTDEIMEELQEILCLIVNRIIIKTLEDIEVIF

SEQ ID NO: 7846 - protein, 463 aa, Unknown
  Description of Unknown: Integrase B7847 sequence
  PTHR30461:SF3,IPR036162,PS51737,IPR011109, PTHR30461,PS00397,PF00239,G3DSA:1.10.10.2600, IPR006119,SSF53041,cd00338,SM00857,IPR025827,IPR038109 ,PS51736,IPR006118,PF13408,G3DSA:3.40.50.1390,Coil
MRRKTTAPVEKILLRVAIYIRVSTDKQVKDGDSMRGQLATGQKYIDSHENMILVDTYIDDGISGQKLKRDDFQRLIDDVRAGRIDLIIFTRLDRWFRNLRHYLNTQDILDKHGVSWTAIEQPYFDTSTPHGRAFVNNSMIWAELEAQNDSDRILGVFDDKVDNGEVLSGSTPLGYKIVNKHLVPDDDAPTAVAIFQYYRKTGNLSMTLRYMESEFGLVRSAASLKNMLTNTKYIGEFRDNKNYCPAIIDRDLFFDVQRLLKINIKSGKKHDYIFSGLVVCDDCDHIMSGCQQRARGRVRADGTRIIYKYSVYRCRQGVNLHRCPNRKLVFETTLEKMLLERIRPELENYIAEYEVANLPALRTDAKRRSVEGKMQKLKDLYLNDLITMDEFKLDREKLLMQLEKINAEDSRPVKDLSYLKNFLKMDFESVYDSLSIPERRELWRSIVKEIRVDHDKNIHIIFL

SEQ ID NO: 7847 - protein, 463 aa, Unknown
  Description of Unknown: Integrase B7848 sequence
  PTHR30461:SF3,IPR036162,PS51737,IPR011109,PTHR30461, PS00397,PF00239,G3DSA:1.10.10.2600,IPR006119,SSF53041, cd00338,SM00857,IPR025827,IPR038109,PS51736, IPR006118,PF13408,G3DSA:3.40.50.1390,Coil
MRRKTTAPVEKILLRVAIYIRVSTDKQVKDGDSMRDQLATGQKYIDSHENMILVDTYIDDGISGQKLKRDDFQRLIDDVRAGRIDLIIFTRLDRWFRNLRHYLNTQDILDKHGVSWTAIEQPYFDTSTPHGRAFVNNSMIWAELEAQNDSDRILGVFDDKVDNGEVLSGSTPLGYTIVNKHLVPDDDAPTAVAIFQYYRKTGNLSMTLRYMESEFGLVRSAASLKNMLTNTKYIGEFRDNKNYCPAIIDRDLFFDVQRLLKINIKSGKKHDYIFSGLVVCDDCDHIMSGCQQRARGRVRSDGTRIIYKYSVYRCRQGVNLHRCPNRKLVFETTLEKMLLERIRPELENYIAEYEVANLPALRTDAKRRSVEGKMQKLKDLYLNDLITMDEFKLDREKLLMQLEKINAEDSRPVKDLSYLKNFLKMDFESVYDSLSIPEKRELWRSIVKEIRVDHDKNIHIIFL

SEQ ID NO: 7848 - protein, 463 aa, Unknown
  Description of Unknown: Integrase B7849 sequence
  PTHR30461:SF3,SM00857,IPR006118,IPR036162,PF13408, PS51737,IPR025827,Coil,G3DSA:3.40.50.1390,IPR006119, IPR011109,SSF53041,PTHR30461,PS00397,PS51736, cd00338,PF00239
MPSKIERCAIYIRVSTAEQMMHGKSLEAQKQYLTNYAKEHNMTVAGVYADEGKTARKELKKRKAIHSLLEDVKAGKIDVIIFWRIDRWFRNLSDFYKVQEVLDDNNVRWISTSEPGINMETRDGRLQLNVVLSIGQNEVDTTSERIKFVNEASIRQGKLIFGDVNMGYGYKSGIIDGVKRMVKDPDREDTVNAFYRFFFKHHAKGLSMRYIQENYDPDFTWANMRTLLSSEFYKGTYRGIPYCPAYLTESEWNNLQEIQNANVKRAPSGRIYLFSGMINCPICGRRLSARGGSSIINRKTGAKKVYCYYRCNKAFIDHKCSYRHMVSQNLIERYLIDHLEYEYNKFKIKCEKIEKEQEKKKKVQTPEKLQKELERLNLLFQKGRIEWDYYSKEYDRIENELNELLNTAPELEPDYAYLEELLNTDFRTMYYNLTQENRRAFWHSIIREIHLNTDHTVDSVDFL

SEQ ID NO: 7849 - protein, 463 aa, Unknown
  Description of Unknown: Integrase B7850 sequence
  PTHR30461:SF3,SM00857,IPR006118,IPR036162,PS51737, G3DSA:3.40.50.1390,Coil,IPR006119,SSF53041,IPR011109, PTHR30461,PS00397,PS51736,cd00338,PF00239
MATKIERCAIYIRVSTTEQMMHGKSLEAQKEYLTNYASEHNMAVVGVYADEGKTARKELKKRKAIHSLLEDVKAGKIDVIIFWRLDRWFRNLSDFYRVQDILDSHNVRWISTSEPGINMETRDGRLQLNVVLSIGQNEVDTTSERIKFVNEASIRNGKLIFGDVNMGYGYKSGVVDGQKRMIKDPDREHVVDAFYKYFFKHQNKCATLRYIQETYDPDFSFGIMRTLLSSEFYKGTYRGFPYCPAYLTEDEWNKLQKIQKRNVKATPSGRIYLFAGMIRCPVCGQLLCGTGCSSIINRKTGAKRTYCYYRCNRAMIDHICSYRHRLSQNLVENYLLDNLENEYKNYKVKCEKIEKEKEKQKKKQSPEKLRKELERLNFLFQKGRIDWDYYNEEYGRVESELNNLQNALPEPVTNYGYLEELLDTDFRTMYDQLSQENRRAFWRSIIQEIHVNEDHAITSVDFL

SEQ ID NO: 7850 - protein, 463 aa, Unknown
  Description of Unknown: Integrase B7851 sequence
  PTHR30461:SF3,IPR036162,PS51737,IPR011109,PTHR30461, PS00397,PF00239,G3DSA:1.10.10.2600,IPR006119,SSF53041, cd00338,SM00857,IPR025827,IPR038109, PS51736,IPR006118,PF13408,G3DSA:3.40.50.1390,Coil
MRRKTTAPIEKILLRVAIYIRVSTDKQVKDGDSMRDQLATGQKYIDSHENMILVDTYIDDGISGQKLKRDDFQRLIDDVRAGRIDLIIFTRLDRWFRNLRHYLNTQDILDKHGVSWTAIEQPYFDTSTPHGRAFVNNSMIWAELEAQNDSDRILGVFDDKVDNGEVLSGSTPLGYTIVNKHLVPDDDAPTAVAIFQYYRKTGNLSMTLRYMESEFGLVRSAASLKNMLTNTKYIGEFRDNKNYCPAIIDRDLFFDVQRLLKINIKSGKKHDYIFSGLVVCDDCDHIMSGCQQRARGRVRADGTRIVYKYSVYRCRQGVNLHRCPNRKLVFETTLEKMLLERIRPELENYIAEYEVANLPALRTDAKRRSVEGKMQKLKDLYLNDLITMDEFKLDREKLLMQLEKINAEDSRPVKDLSYLKNFLKMDFESVYDSLSIPERRELWRSIVKEIRVDHDKNIHIIFL

SEQ ID NO: 7851 - protein, 463 aa, Unknown
  Description of Unknown: Integrase B7852 sequence
  PTHR30461:SF3,IPR036162,PS51737,IPR011109,PTHR30461, PS00397,PF00239,G3DSA:1.10.10.2600,IPR006119,SSF53041, cd00338,SM00857,IPR025827,IPR038109,PS51736, IPR006118,PF13408,G3DSA:3.40.50.1390,Coil
MRRKTTAPVEKILLRVAIYIRVSTDKQVKDGDSMRDQLATGQKYIDSHENMILVDTYIDDGISGQKLKRDDFQRLIDDVRASRIDLIIFTRLDRWFRNLRHYLNTQDILDRHGVSWTAIEQPYFDTSTPHGRAFVNNSMIWAELEAQNDSDRILGVFDDKVDNGEVLSGSTPLGYTIENKHLIPDDDAPTAVTIFQYYRKTGNLSMTLRYMESEFGLVRSAASLKNMLTNTKYIGEFRDNKEYCPAIIDHDLFYDVQRLLKINIKSGKKHDYIFSGLVVCDDCDHIMSGCQQRAGGRVRADGTRITYKYSVYRCRQGVNLHRCPNRKLVFETTLESMLLDRIRPELEKYIAEYEVANLPALRTDAKRRSVEGKMQKLKDLYLNDLITMDEFKLDREKLLMQLEKINAEDSRPVKDLSYLKNFLKMDFESVYDSLSIPERRELWRSIVKEIRVDHDKNIHIIFL

SEQ ID NO: 7852 - protein, 463 aa, Unknown
  Description of Unknown: Integrase B7853 sequence
  PTHR30461:SF3,IPR036162,PS51737,IPR011109,PTHR30461, PS00397,PF00239,G3DSA:1.10.10.2600,IPR006119,SSF53041, cd00338,SM00857,IPR025827,IPR038109,PS51736, IPR006118,PF13408,G3DSA:3.40.50.1390,Coil
MRRKTTAPVEKILLRVAIYIRVSTDKQVKDGDSMRDQLATGQKYIDNHENMILVDTYIDDGISGQKLKRDDFQRLIDDVRAGRIDLIIFTRLDRWFRNLRHYLNTQDILDKHGVSWTAIEQPYFDTSTPHGRAFVNNSMIWAELEAQNDSDRILGVFDDKVDNGEVLSGSTPLGYTIVNKHLVPDDDAPTAVAIFQYYRKTGNLSMTLRYMESEFGLVRSAASLKNMLTNTKYIGEFRDNKNYCPAIIDRDLFFDVQRLLKINIKSGKKHDYIFSGLVVCDDCDHIMSGCQQRARGRVRADGTRIIYKYSVYRCRQGVNLHRCPNRKLVFETTLEKMLLERIRPELENYIAEYEVANLPALRTDAKRRSVEGKMQKLKDLYLNDLITMDEFKLDREKLLMQLEKINAEDSRPVKDLSYLKNFLKMDFESVYDSLSIPERRELWRSIVKEIRVDHDKNIHIIFL

SEQ ID NO: 7853 - protein, 463 aa, Unknown
  Description of Unknown: Integrase B7854 sequence
  PTHR30461:SF3,cd00338,SM00857,IPR036162,PF13408, IPR025827,G3DSA:3.40.50.1390,PS51737,IPR006119,IPR011109, SSF53041,PTHR30461,PS51736,Coil,PF00239
MSFFTPNPQLFGLRVVKYIRCSHDDQVLHGDTLEAQDLILEDFIKVNRMILVDTFIDEALTARKRFNKRKEFVRLLNGVKAHDFDLIIFTKLDRWFRNIGDYHKIQEILEANGVQWKAVTENYDTTTTNGRLHINIRLSVAQDECDRDSDRIKDVFAYKLKNKTYVSGSLPRGLKLDAEKHVIIDPEWNCFALDMFDRFEATCSKRDTQLFLQEKYNIRVCYDTVARYLKNPLFKGQYRDDPDFCPATISPERFERIQKLAIRNVRIRHTQQFYIFSGLLICSSCNHYMCGTVTYRRMADGSEKMYKNYRCNFKAQSKLCDRGKTYREADLEEYMLAHIRPALSDYIAKYEVTAASTVQKNPVTEIAKIERKMKKLYDLFMDDLIDKEAYRSEYDKFKAQIEELQKCSTAAPMRSLDSVKKLLSEDWEAVYHTFSDREKNTFWKSFVESVLVYEDGSMDIRFL

SEQ ID NO: 7854 - protein, 463 aa, Unknown
  Description of Unknown: Integrase B7855 sequence
  PTHR30461:SF3,SM00857,IPR006118,IPR036162,PF13408, PS51737,PS00397,IPR025827,G3DSA:3.40.50.1390,IPR006119, IPR011109,SSF53041,PTHR30461,Coil, PS51736,cd00338,PF00239
MSEKIKRCAIYIRVSTSEQMMHGKSIEAQREYLACYAKDHGMIVTGVYADEGKTARKELKKRKAIHALLEDVKAGKIDVILFWRLDRWFRNMSDFYKVQDILDEYGVYWISASEPGINMETRDGRLQLNVVLSIGQNEVDTTSERIKFVNEASIRQGKVIFGENNMPRGYKVGIVDGKKCMVKDPEQEEMVNAFYDYFEKHQAKQQTLRFIQRNYDPAFSYGMLRTMLSSEFYKGTYRGIPYCPAYLSEERWAHIQNISKKSIRRTRSGRVYYFTGLIRCPQCGQILCGTGCKSVVNRKTGEKRDYCYYRCNRAMIDRICTNQHRVSQNLIESYLLDNLENEFKTYKIRVENVKQQKKKAPPVRTEKQIDKELDRLNLLFQKGRIEWDYYSREYDSLEKEKEDLNSVTVDPEPDYSFIETLLQQDFRDIYRSLTPENKRAFWKNTIRQIYLKPDYTIDYVDFI

SEQ ID NO: 7855 - protein, 463 aa, Unknown
  Description of Unknown: Integrase B7856 sequence
  PTHR30461:SF3,cd00338,SM00857,IPR036162,PF13408, IPR025827,PS51737,G3DSA:3.40.50.1390,IPR006119,SSF53041, IPR011109,PTHR30461,PS51736,Coil,PF00239
MSFFTPNPQLFGLRVVKYIRCSHDDQVLHGDTLEAQDLILEDFIKVNRMILVDTFIDEALTARKKFNKRKEFVRLLSGVKAHAFDLIIFTKLDRWFRNIGDYHKIQEILEANGVQWKAVTENYDTTTTNGRLHINIRLSVAQDECDRDSDRIKDVFAYKLKNKTYVSGSLPRGLKLDAEKHVIIDPEWNCFALDMFDRFEATCSKRDTQLFLQDKYNIRVCYDTVARYLKNPLFKGQYRDDPDFCPATISPERFERIQKLAIRNVRIRHTQQFYIFSGLLICSSCNHYMCGTVTYRRMADGSEKMYKNYRCNFKAQSKLCDRGKTYREADLEEYMLAHIRPALSDYIAKYEVTAASTVQKNPVTEIAKIERKMKKLYDLFMDDLIDKEAYRSEYDKFKAQIEELQKCSTAAPMRSLDSVKKLLSEDWEAVYHTFSDQEKNTFWKSFVESVLVYEDGSMDIRFL

SEQ ID NO: 7856 - protein, 463 aa, Unknown
  Description of Unknown: Integrase B7857 sequence
  PTHR30461:SF3,SM00857,IPR006118,IPR036162,PS51737, PS00397,G3DSA:3.40.50.1390,IPR006119,IPR011109,SSF53041, PTHR30461,Coil,PS51736,cd00338, PF00239
MTTKVERCAIYIRVSTTEQMMHGKSLEAQKEYLTNYAKEHNMAVVGIYADEGKTARKELKKRKAIHSLLQDVEAGKIDVIIFWRIDRWFRNLSDFYKVQDILDSHNVRWISTSEPGINMETRDGRLQLNVVLSIGQNEVDTTSERIKFVNEASIRNGKLIFGDVNMGYGYKSGIVDGQKRMVKDPDREHVVDAFYKYFFKHQNKCATLRYIQETYDPDFSFGIMRTLLSSEFYKGTYRGFPYCPAYLTEDEWNKLQKIQKRNVKATPSGRIYLFAGMIRCPVCGQLLCGTGCSSIINRKTGAKRTYCYYRCNRAMIDHICSYRHRLSQNLVENYLLDNLENEYKNYKVKCEKIEKEKEKQKKKQSPEKLRKELDRLNFLFQKGRIDWDYYNEEYGRIESELNDLQSALPEPVTNYGYLEELLDTDFRTMYDQLSQENRRVFWRSIIQEIHVNEDHAITSVDFL

SEQ ID NO: 7857 - protein, 463 aa, Unknown
  Description of Unknown: Integrase B7858 sequence
  PTHR30461:SF3,IPR036162,PS51737,IPR011109,PTHR30461, PS00397,PF00239,G3DSA:1.10.10.2600,IPR006119,SSF53041, cd00338,SM00857,IPR025827,IPR038109,PS51736, IPR006118,PF13408,G3DSA:3.40.50.1390,Coil
MRRKTTAPVEKILLRVAIYIRVSTDKQVKDGDSMRDQLATGQKYIDSHENMILVDAYIDDGISGQKLKRDDFQRLIDDVRAGRIDLIIFTRLDRWFRNLRHYLNTQDILDKHGVSWTAIEQPYFDTSTPHGRAFVNNSMIWAELEAQNDSDRILGVFDDKVDNGEVLSGSTPLGYTIVNKHLVPDDDAPTAVAIFQYYRKTGNLSMTLRYMESEFGLVRSAASLKNMLTNTKYIGEFRDNKNYCPAIIDRDLFFDVQRLLKINIKSGKKHDYIFSGLVVCDDCDHIMSGCQQRARGRVRADGTRIIYKYSVYRCRQGVNLHRCPNRKLVFETTLEKMLLERIRPELENYIAEYEVANLPALRTDAKRRSVEGKMQKLKDLYLNDLITMDEFKLDREKLLMQLEKINAEDSRPVKDLSYLKNFLKMDFESVYDSLSIPERRELWRSIVKEIRVDHDKNIHIIFL

SEQ ID NO: 7858 - protein, 463 aa, Unknown
  Description of Unknown: Integrase B7859 sequence
  PTHR30461:SF3,IPR036162,PS51737,IPR011109,PTHR30461, PS00397,PF00239,G3DSA:1.10.10.2600,IPR006119,SSF53041, cd00338,SM00857,IPR025827,IPR038109,PS51736, IPR006118,PF13408,G3DSA:3.40.50.1390,Coil
MRRKTTAPVEKILLRVAIYIRVSTDKQVKDGDSMRDQLATGQKYIDSHENMILVDTYIDDGISGQKLKRDDFQRLIDDVRAGRIDLIIFTRLDRWFRNLRHYLNTQDILDKHGVSWTAIEQPYFDTSTPHGRAFVNNSMIWAELEAQNDSDRILGVFDDKVDNGEVLSGSTPLGYTIVNKHLVPDDDAPTAVAIFQYYRKTGNLSMTLRYMESEFGLVRSAASLKNMLTNTKYIGEFRDNKNYCPAIIDRDLFFDVQRLLKINIKSGKKHDYIFSGLVVCDDCDHIMSGCQQRARGRVRADGTRIIYKYSVYRCRQGVNLHRCPNRKLVFETTLEKMLLERIRPELENYIAEYEVANLPALRTDAKRRSVEGKMQKLKDLYLNDLITMDEFKLDREKLLMQLEKINAEDSRPVKDLSYLKNFLKMDFESVYDSLSIPEKRELWRSIVKEIRVDHDKNIHIIFL

SEQ ID NO: 7859 - protein, 463 aa, Unknown
  Description of Unknown: Integrase B7860 sequence
  PTHR30461:SF3,SM00857,IPR006118,IPR036162,PF13408, IPR025827,PS51737,G3DSA:3.40.50.1390,PS00397,IPR006119, IPR011109,SSF53041,PTHR30461,Coil,PS51736, cd00338,PF00239
MPSKIERCAIYIRVSTAEQMMHGKSLEAQKQYLTNYAKEHNMTVAGVYADEGKTARKELKKRKAIHSLLEDVKAGKIDVIIFWRIDRWFRNLSDFYKVQEVLDDNNVRWISTSEPGINMETRDGRLQLNVVLSIGQNEVDTTSERIKFVNEASIRQGKLIFGDVNMGYGYKSGIIDGVKRMVKDPDREDTVNAFYRFFFKHHAKGLSMRYIQENYDPDFTWANMRTLLSSEFYKGTYRGIPYCPAYLTESEWNNLQEIQNANVKRAPSGRIYLFSGMINCPICGRRLSARGGSSIINRKTGAKKVYCYYRCNKAFIDHKCTYKHMVSQNLIEQYLIDHLEYEYNKFKIKCEKIEKEQEKKKKIQTPEKLQKELERLNLLFQKGRIEWDYYSKEYDRIETELNELLNAAPELEPDYAYLEELLNTDFRTMYYNLTQENRRAFWHSIIRKIHLNTDHTVDSVDFL

SEQ ID NO: 7860 - protein, 463 aa, Unknown
  Description of Unknown: Integrase B7861 sequence
  PTHR30461:SF3,SM00857,IPR006118,IPR036162,PF13408, IPR025827,G3DSA:3.40.50.1390,PS00397,PS51737,IPR006119, SSF53041,IPR011109,PTHR30461,Coil,PS51736, cd00338,PF00239
MTTKVERCAIYIRVSTTEQMMHGKSLEAQKEYLTNYAREHNMAIVGIYADEGKTARKELKKRKAIHSLIKDVEAGKIDVIIFWRIDRWFRNLSDFYKVQDILDSHNVRWISTSEPGINMETRDGRLQLNVVLSIGQNEVDTTSERIKFVNEASIRSGKLIFGDVNMGYGYKSGIVDGQKRMIKDPDREHVVNAFYEYFFKHQNKCATLRYIQETYDPDFSFGIMRTLLSSEFYKGTYRGFPYCPAYLTEDEWNKLQKIQKRNVKATPSGRIYLFAGMIRCPVCGQKLCGTGCSSIINRKTGAKRTYCYYRCNRAMIDHICSYRHRLSQNLVENYLLDNLEDEYKNYKVKCEKIEKEKEKQKKKQSPEKLRKELDRLNFLFQKGRIEWDYYNEEYGRVESELNDLQSVLPEPAPNYSYLEELLNTDFRTMYDQLSQENRRAFWRSIIQEIHINEDSTITSVDFL

SEQ ID NO: 7861 - protein, 463 aa, Unknown
  Description of Unknown: Integrase B7862 sequence
  PTHR30461:SF3,SM00857,IPR006118,IPR036162,PF13408, PS51737,IPR025827,G3DSA:3.40.50.1390,IPR006119,IPR011109, SSF53041,PF00239,PTHR30461,PS00397,PS51736, Coil,cd00338
MTTKIERCAIYIRVSTTEQMMHGKSLEAQKEYLTNYAREHNMAVVGVYADEGKTARKELKKRKAIHSLLQDVESGKIDVIIFWRIDRWFRNLSDFYKVQDILDNHNVRWISTSEPGINMETRDGRLQLNVVLSIGQNEVDTTSERIKFVNEASIRNGKLIFGDVNMGYGYKSGIVDGQKRMVKDPDREHVVDAFYKYFFKHQNKCATLRYIQETYDPDFSFGIMRTLLSSEFYKGTYRGFPYCPAYLTEDEWNKLQKIQKRNVKATPSGRIYLFAGLIRCPVCGQKLCGTGCSSIINRKTGAKRTYCYYRCNRAMIDHICSYRHRLSQNLVENYLLDNLENEYKNYKVKCEKIEKEKEKQKKKQSPEKLRKELDRLNFLFQKGRIDWDYYNEEYGRVESELNDLQNALPEPVTNYGYLEELLDTDFRTMYDQLSQENRRAFWRSIIQEIHVNEDHAITSVDFL

SEQ ID NO: 7862 - protein, 463 aa, Unknown
  Description of Unknown: Integrase B7863 sequence
  PTHR30461:SF3,SM00857,IPR006118,IPR036162,PF13408, IPR025827,PS51737,Coil,G3DSA:3.40.50.1390,IPR006119, IPR011109,SSF53041,PTHR30461,PS00397,PS51736, cd00338,PF00239
MSEKIKRCAIYIRVSTSEQMMHGKSLEAQREYLERYAKEHNMIVVGIYADEGKTARKELKKRKAIHALLEDVKAGKIDMILFWRLDRWFRNLSDFYKVQDILDEYDVHWLSASEPGINMETRDGRLQLNVVLSIGQNEVDTTSERIKFVNEASIRQGKLIFGEANMGFGYKSGIVDGVKRMIKDPETEEATEAFFKYLLTHQNKSETVRYMQKHYYPDFSYSMLRTMVSSEFYKGTYRGIPYCPAYITEQEWLQLQELSRKNIKQTPSGRIYLFSGLIRCPVCGQKLAGTGCSSIINRKTKEKRTYCYYRCNRAILDRLCTSRHRVSQNLIEKYLLENLSEEYKKYQIRYTKICEQKKKMKDTRTPEKLNKELDRLNLLFQKDRITWEYYSAEYDRIEKELKELSAIHPEPEKDFTYLEELLHSDFKKIYKQLTPENRRTFWRSTIEEIHLNEDYTVESVDFL

SEQ ID NO: 7863 - protein, 463 aa, Unknown
  Description of Unknown: Integrase B7864 sequence
  PTHR30461:SF3,SM00857,IPR006118,IPR036162,PF13408, IPR025827,G3DSA:3.40.50.1390,PS51737,IPR006119,SSF53041, IPR011109,PF00239,PTHR30461,PS00397,PS51736, Coil,cd00338
MSEKIKRCAIYIRVSTSEQMMHGKSLEAQREYLERYAKEHNMIVVGIYADEGKTARKELKKRKAIHALLEDVKAGKIDMILFWRLDRWFRNLSDFYKVQDILDEYDVHWLSASEPGINMETRDGRLQLNVVLSIGQNEVDTTSERIKFVNEASIRQGKLIFGEANMGFGYKSGIVDGVKRMIKDPETEEATEAFFKYLLSHQNKSETVRYMQKHYYPDFSYSMLRTMVSSEFYKGTYRGIPYCPAYITEQEWLQLQELSRKNIKQTPSGRIYLFSGLIRCPVCGQKLAGTGCSSIINRKTKEKRTYCYYRCNRAILDRLCTSRHRVSQNLIEKYLLENLSEEYKKYQIRYTKICEQKKKIKDTRTPEKLNKELDRLNLLFQKDRITWEYYSTEYDRIEKELKELSAIQPEAEKDFTYLEELLRSDFKKIYEQLTPENRRTFWRSTIGEIHLNEDYTVESVDFL

SEQ ID NO: 7864 - protein, 463 aa, Unknown
  Description of Unknown: Integrase B7865 sequence
  PTHR30461:SF3,SM00857,IPR006118,IPR036162,PF13408, PS51737,IPR025827,G3DSA:3.40.50.1390,Coil,IPR006119, IPR011109,SSF53041,PTHR30461,PS00397,PS51736, cd00338,PF00239
MPSKIERCAIYIRVSTAEQMMHGKSLEAQKQYLTNYAKEHNMTIVGVYADEGKTARKELKKRKAIHSLLEDVKAGKIDVIIFWRIDRWFRNLSDFYKVQEALDDNNVRWISTSEPGINMETRDGRLQLNVVLSIGQNEVDTTSERIKFVNEASIRQGKLIFGDVNMGYGYKSGIIDGVKRMVKDPDREDTVNAFYRFFFKHHAKGLSMRYIQENYDPDFTWANMRTLLSSEFYKGTYRGIPYCPAYLTESEWNNLQEIQNANVKRAPSGRIYLFSGMINCPICGRRLSARGGSSIINRKTGAKKVYCYYRCNKAFIDHKCTYKHMVSQNLIEQYLIEHLEYEYNKFKIKCKKIEKEQEKKKKIQTPEKLQKELERLNLLFQKGRIEWDYYSKEYDRIENELNELLNAAPELEPDYAYLEELLNTDFRTMYYNLTQENRRAFWHSIIREIHLNTDHTVDSVDFL

SEQ ID NO: 7865 - protein, 463 aa, Unknown
  Description of Unknown: Integrase B7866 sequence
  PTHR30461:SF3,SM00857,IPR006118,IPR036162,PF13408, IPR025827,G3DSA:3.40.50.1390,PS51737,IPR006119,SSF53041, IPR011109,PF00239,PTHR30461,PS00397,PS51736, Coil,cd00338
MPSKIERCAIYIRVSTAEQMMHGKSLEAQKQYLTNYAKEHNMTVAGVYADEGKTARKELKKRKAIHALLEDVKAGKIDVIIFWRIDRWFRNLSDFYKVQEVLDDNNVRWISTSEPGINMETRDGRLQLNVVLSIGQNEVDTTSERIKFVNEASIRQGKLIFGDVNMGYGYKSGIIDGVKRMVKDSDREDTVNAFYRFFFKHHAKGLSMRYIQENYDPDFTWANMRTLLSSEFYKGTYRGIPYCPAYLTESEWNNLQEIQNANVKRAPSGRIYLFSGMINCPICGRRLSARGGSSIINRKTGAKKVYCYYRCNKAFIDHKCTYKHMVSQNLIEQYLIDHLEYEYNKFKIKCEKIEKEQEKKKKFQTPEKLQKELERLNLLFQKGRIEWDYYSKEYDRIENELNELLNAAPELEPDYAYLEELLNTDFRTMYYNLTQENRRAFWHSIIREIHLNTDHTVDSVDFL

SEQ ID NO: 7866 - protein, 463 aa, Unknown
  Description of Unknown: Integrase B7867 sequence
  PTHR30461:SF3,SM00857,IPR006118,IPR036162,PF13408, IPR025827,PS51737,G3DSA:3.40.50.1390,Coil,IPR006119, IPR011109,SSF53041,PTHR30461,PS00397,PS51736, cd00338,PF00239
MPSKIERCAIYIRVSTAEQMMHGKSLEAQKQYLTNYAKEHNMTVAGVYADEGKTARKELKKRKAIHSLLEDVKAGKIDVIIFWRIDRWFRNLSDFYKVQEVLDNNNVRWISTSEPGINMETRDGRLQLNVVLSIGQNEVDTTSERIKFVNEASIRQGKLIFGDVNMGYGYKSGIICGVKRMVKDPDREDAVNAFYRFFFKHHAKGLSMRYIQENYDPDFTWANMRTLLSSEFYKGTYRGIPYCPAYLTESEWNNLQEIQNANVKRAPSGRIYLFSGMINCPICGRRLSARGGSSIINRKTGAKKVYCYYRCNKAFIDHKCSYRHMVSQNLIERYLIDHLEYEYNKFKIKCEKIEKDQEKKKKVQTPEKLQKELERLNLLFQKGRIEWDYYSKEYDRIENELNELLNAAPELEPDYAYLEELLNTDFRTMYYNLTQENRRAFWHSIIREIHLNADHTVDSVDFL

SEQ ID NO: 7867 - protein, 463 aa, Unknown
  Description of Unknown: Integrase B7868 sequence
  PTHR30461:SF3,SM00857,IPR006118,IPR036162,PF13408, PS51737,G3DSA:3.40.50.1390,Coil,IPR025827,IPR006119, IPR011109,SSF53041,PTHR30461,PS00397,PS51736, cd00338,PF00239
MPSKIERCAIYIRVSTAEQMMHGKSLEAQKQYLTNYAKEHNMTVAGVYADEGKTARKELKKRKAIHSLLEDVKAGKIDVIIFWRIDRWFRNLSDFYKVQEVLDNNNVRWISTSEPGINMETRDGRLQLNVVLSIGQNEVDTTSERIKFVNEASIRQGKLIFGDVNMGYGYKSGIIDGVKRMVKDPDREDTVNAFYRFFFKHHAKGLSMRYIQENYDPDFTWANMRTLLSSEFYKGTYRGIPYCPAYLTESEWNNLQEIQNANVKRAPSGRIYLFSGMINCPICGRRLSARGGSSIINRKTGAKKVYCYYRCNKAFIDHKCTYKHMVSQNLIEQYLIDHLEYEYNKFKIKCEKIEKEQEKKKKVQTPEKLQKELERLNLLFQKGRIEWDYYSKEYDRIENELNELLNAAPELEPDYAYLEELLNTDFRTMYYNLTQENRRAFWHSIIREIHLNTDHTVDSVDFL

SEQ ID NO: 7868 - protein, 463 aa, Unknown
  Description of Unknown: Integrase B7869 sequence
  PTHR30461:SF3,cd00338,SM00857,IPR036162,PF13408, PS51737,IPR025827,G3DSA:3.40.50.1390,IPR006119,IPR011109, SSF53041,PTHR30461,PS51736,Coil,PF00239
MSFFTPNPQLFGLRVVKYIRCSHDDQVLHGDTLEAQDLILEDFIKVNRMILVDTFIDEALTARKKFNKRKEFVRLLDGVKAHAFDLIIFTKLDRWFRNIGDYHKIQEILEANGVQWKAVTENYDTTTTNGRLHINIRLSVAQDECDRDSDRIKDVFAYKLKNKTYVSGSLPRGLKLDAEKHVIIDPEWNCFALDMFDRFEATCSKRDTQLFLQDKYNIRVCYDTVSRYLKNPLFKGQYRDDPDFCPATISPERFERIQKLAIRNVRIRHTQQFYIFSGLLICSSCNHYMCGTVTYRRMADGSEKVYKNYRCNFKAQSKLCDRGKTYREADLEEYMLAHIRPALSDYIAKYEVTAASTVQKNPVAEIAKIERKMKKLYDLFMDDLIDKEAYRSEYDKFKAQIEELQKCSTAAPMRSLDSVKKLLSEDWESVYRTFSDQEKNTFWKSFVESVLVYEDGSMDIRFL

SEQ ID NO: 7869 - protein, 463 aa, Unknown
  Description of Unknown: Integrase B7870 sequence
  PTHR30461:SF3,IPR036162,PS51737,IPR011109,PTHR30461, PS00397,PF00239,G3DSA:1.10.10.2600,IPR006119,SSF53041, cd00338,SM00857,IPR025827,IPR038109, PS51736,IPR006118,PF13408,G3DSA:3.40.50.1390,PF07508,Coil
MKRQTAKLNDKLLLRVAIYIRVSTDQQAQDGDSVRDQLATGQKYIENHENMILADTYVDDGISGQKVKRDDFQRLMNDVRAGSIDLIIFTRLDRWFRNLRHYLNTQDVLDKNGVSWTATEQPYFDTSTPHGRAFVNNSMIWAELEAQNDSDRILSVFDDKVDNSEVLSGSTPLGYRIENKHLVPDDDAPTAAAIFEYYRSNGNLAMTLRYMETEFGLIRSSASLKNMLTNTKYIGEFRTNKNYCPAIIDRDLFDDVQRLLKINIKSGKKHDYIFSGLVVCDECEHTMSGCQQRNSARILADGTRVVYKYNSYRCRQGITLHRCPNHKVMLESTLEKILLARIRPELENYITEYEVANRPAMRTDSKRRNLEHKMQKLKELYLNDLITMDEFKVDREKLMQQLDKIKSDDSQPMKDLSYLKNFLKTDFENIYVSLSIPEKRELWRSIIREIRVDHERNVRIIFL

SEQ ID NO: 7870 - protein, 463 aa, Unknown
  Description of Unknown: Integrase B7871 sequence
  PTHR30461:SF3,SM00857,IPR006118,IPR036162,PF13408, PS51737,G3DSA:3.40.50.1390,IPR025827,Coil,IPR006119, IPR011109,SSF53041,PTHR30461,PS00397,PS51736, cd00338,PF00239
MPSKIERCAIYIRVSTAEQMMHGKSLEAQKQYLTNYAKEHNMTVAGVYADEGKTARKELKKRKAIHSLLEDVKAGKIDVIIFWRIDRWFRNLSDFYKVQEVLDDNNVRWISTSEPGINMETRDGRLQLNVVLSIGQNEVDTTSERIKFVNEASIRQGKLIFGDVNMGYGYKSGIIDGVKRMVKDPDREDTVNAFYRFFFKHHAKGLSMRYIQENYDPDFTWANMRTLLSSEFYKGTYRGIPYCPAYLTESEWNNLQEIQNANVKRAPSGRIYLFSGMINCPICGRRLSARGGSSIINRKTGAKKVYCYYRCNKAFIDHKCSYRHMVSQNLIEQYLIDHLEYEYNKFKIKCEKIEKEQEKKKKVQTPENLQKELERLNLLFQKGRIEWDYYSKEYDRIENELNELLNTAPELEPDYAYLEELLNTDFRTMYYNLTQENRRAFWHSIIREIHLNTDHTVDSVDFL

SEQ ID NO: 7871 - protein, 463 aa, Unknown
  Description of Unknown: Integrase B7872 sequence
  PTHR30461:SF3,cd00338,SM00857,IPR006118,IPR036162, PS51737,G3DSA:3.40.50.1390,IPR006119,IPR011109,SSF53041, PTHR30461,PS00397,PS51736,Coil,PF00239
MTTKVERCAIYIRVSTTEQMMHGKSLEAQKEYLENYANEHNMAVVGIYADEGKTARKELKKRKAIHSLLQDVEAGKIDVIIFWRIDRWFRNLSDFYKVQDILDSHNVRWISTSEPGINMETRDGRLQLNVVLSIGQNEVDTTSERIKFVNESSIRSGKLIFGDANMGYGYKSGIVDGQKRMVKDPDREHVVDAFYKYFFKHQNKCATLRYIQETYDPDFSFGIMRTLLSSEFYKGTYRGFPYCPAYLTEDEWNKLQKIQKRNVKATPSGRIYLFAGMIRCPVCGQLLCGTGCSSIINRKTGAKRTYCYYRCNRAMIDHICSYRHRLSQNLVENYLLDNLEDEYKNYKVKCEKIEKEKEKQKKKQSPEKLRKELDRLNFLFQKGRIEWDYYNEEYSRVESELNNLQKVLPEPAPNYSYLEELLNTDFRTMYDQLSQENRRAFWRSIIQEIHINEDSTITSVDFL

SEQ ID NO: 7872 - protein, 463 aa, Unknown
  Description of Unknown: Integrase B7873 sequence
  PTHR30461:SF3,SM00857,IPR006118,IPR036162,PF13408, IPR025827,G3DSA:3.40.50.1390,Coil,PS51737,IPR006119, SSF53041,IPR011109,PTHR30461,PS00397, PS51736,cd00338,PF00239
MPSKIERCAIYIRVSTAEQMMHGKSLEAQKQYLTNYAKEHNMTVAGVYADEGKTARKELKKRKAIHALLEDVKAGKIDVIIFWRIDRWFRNLSDFYKVQEVLDDNNVRWISTSEPGINMETRDGRLQLNVVLSIGQNEVDTTSERIKFVNEASIRQGKLIFGDVNMGYGYKSGIIDGVKRMVKDPDREDTVNAFYRFFFKHHAKGLSMRYIQENYDPDFTWANMRTLLSSEFYKGTYRGIPYCPAYLTESEWNNLQEIQNANVKRAPSGRIYLFSSMINCPICGRRLSARGGSSIINRKTGAKKVYCYYRCNKAFIDHKCTYKHMVSQNLIEQYLIDHLEYEYNKFKIKCEKIEKEQEKKKKVQTPEKLQKELERLNLLFQKGRIEWDYYSKEYDRIENELNELLNAAPELEPDYAYLEELLNTDFRTMYYNLTQENRRAFWHSIIREIHLNTDHTIDSVDFL

SEQ ID NO: 7873 - protein, 463 aa, Unknown
  Description of Unknown: Integrase B7874 sequence
  PTHR30461:SF3,cd00338,SM00857,G3DSA:1.10.10.2600,IPR036162, PF13408,IPR025827,G3DSA:3.40.50.1390,PS51737,IPR006119, IPR038109,SSF53041,IPR011109,PTHR30461,PS51736, Coil,PF00239
MSYFNFNPDLVGVRVVKYIRCSHEGQVLHGDTLEAQNLILDEFIATNKMVLVDTFIDEAMTARKKYTKRKEFVRLLDGVRSHNFDLIIFTKLDRWFRNIGDYHKIQEILDANHVQWKAVTENYDTTTTNGRLHINIRLSVAQDECDRDSDRIKDVFAYKLKNKTFISGALPRGLMLDAEKHVIPDPEYSEYVTDLFEHFESCGSIRNTLLFLQDKYGFSISYKSISNALRNPLFKGQYRDDPDFCTQIIEPERFDHIQLLLSRNVRIRRNRQTYVFSGLLTCAECNHALVGYSAYYTTKEGEERATKTYRCNHYISTRTCTHKNQMSQKKLEKYLTENIQLAFSDYIASFNVVSSAAKKKDTAAEIARIERKQKKLYNLYMDDLIDAATYKEEYNSFKKQLEELRSIPFSPAVDTRKKTEELLSGDWISVYSSFTDLEKNAFWKSFIDKIVIDVNGNIDIIFL

SEQ ID NO: 7874 - protein, 463 aa, Unknown
  Description of Unknown: Integrase B7875 sequence
  PTHR30461:SF3,SM00857,IPR006118,IPR036162,PF13408, PS51737,G3DSA:3.40.50.1390,IPR025827,Coil,IPR006119, IPR011109,SSF53041,PTHR30461,PS00397,PS51736, cd00338,PF00239
MPSKIERCAIYIRVSTAEQMMHGKSLEAQKQYLTNYAKEHNMTVAGVYADEGKTARKELKKRKAIHSLLEDVKAGKIDVIIFWRIDRWFRNLSDFYKVQEVLDDNNVHWISTSEPGINMETRDGRLQLNVVLSIGQNEVDTTSERIKFVNEASIRQGKLIFGDVNMGYGYKSGIIGGVKRMVKDPDREDAVNAFYRFFFKHHAKGLSMRYIQENYDPDFTWANMRTLLSSEFYKGTYRGIPYCPAYLTESEWNNLQEIQNANVKRAPSGRIYLFSGMINCPICGRRLSARGGSSIINRKTGAKKVYCYYRCNKAFIDHKCSYRHMVSQNLIERYLIDHLEYEYNKFKIKCEKIEKEQEKKKKIQTPEKLQKELERLNLLFQKGRIEWDYYSKEYDRIENELNELLNTAPELEPDYAYLEELLNTDFRTMYYNLTQENRRAFWHSIIREIHLNTDHTVDSVDFL

SEQ ID NO: 7875 - protein, 463 aa, Unknown
  Description of Unknown: Integrase B7876 sequence
  PTHR30461:SF3,SM00857,IPR036162,PF13408,PS51737, G3DSA:3.40.50.1390,IPR025827,IPR006119,SSF53041,IPR011109, PTHR30461,Coil,PS51736,cd00338,PF00239
MNTYFHPQPELYGLRVVKYIRCSHEGQVLHGDTLEAQDTLLNEFIETNHMVLVDTFVDEALTARKKFTKRKEFVRLLDGVRAHAFDMILFTKLDRWFRNIGDYHKIQEILDANGVQWKAITESYDTTTTNGRLHINIRLSVAQDECDRDSDRIKDVFAYKLKNKTYISGSLPRGLKLDAEKHVVIDPEWHQFALDMFDHFESTCSKRGTQLFLQEKYGIRVCYDTVVRYLRNPLFMGQYRDDPDFCEKTISRERFERIQNLAIRNVRIRHTQQFYIFSGLLICSSCNHYMTGTVTYRTLADGREKTYKSYRCNFKAQSKLCDRSKHYREEYVEEYMLQHIRPALSSYVADFEVTAAAAAKKDPAVEIAKVERKMKKLYDLFMDDLIDKASYRNEYEKFQSQIDKLRSCPAAPVRNLDSIKKMLSDDWETVYHTFNDQEKNVFWKSFVQSITVHENGEMDIVFL

SEQ ID NO: 7876 - protein, 463 aa, Unknown
  Description of Unknown: Integrase B7877 sequence
  PTHR30461:SF3,SM00857,IPR006118,IPR036162,PF13408, IPR025827,G3DSA:3.40.50.1390,Coil,PS51737,IPR006119, SSF53041,IPR011109,PTHR30461,PS00397, PS51736,cd00338,PF00239
MSEKIKRCAIYIRVSTSEQMMHGKSLEAQREYLERYAKEHHMIVVGIYADEGKTARKELKKRKAIHALLEDVKAGKIDMILFWRLDRWFRNLSDFYKVQDILDEYDVHWMSASEPGINMETRDGRLQLNVVLSIGQNEVDTTSERIKFVNEASIRQGKLIFGDANMGFGYKSGIVDGVKRMIKDPETEEATEAFFKYLLTHQNKSETVRYMQKHYYPDFSYSMLRTMVSSEFYKGTYRGIPYCPAYITEQEWLQLQELSRKNIKQTPSGRIYLFSGLIRCPVCGQKLAGTGCSSIINRKTKEKRTYCYYRCNRAILDRLCTSRHRVSQNLIEKYLLENLSEEYKKYQIRYTKICEQKKKMKDTRTPEKLNKELDRLNLLFQKDRITWEYYSAEYDRIEKELKELSAIHPEPEKDFTYLEELLHSDFKKIYKQLTPENRRTFWRSTIEEIHLNEDYTVESVDFL

SEQ ID NO: 7877 - protein, 463 aa, Unknown
  Description of Unknown: Integrase B7878 sequence
  PTHR30461:SF3,SM00857,IPR006118,G3DSA:1.10.10.2600,IPR036162, PF13408,IPR025827,G3DSA:3.40.50.1390,Coil,IPR006119, IPR038109,SSF53041,PTHR30461,PS00397,cd00338, PF00239
MAKTQTALQRVALYIRVSSDEQAERGDSIRDQKERGTKYIDDHQNMILQDTYIDDGVSGQKLDRDDFTRLIGNVKAGLVDLIIFTKLDRWFRSLRHYLNTQVILDKYNVAWTAIDQPYFDTSTPYGRAFVAQSMTWAELEAQNGGLRVTDVFRSKVEHGEVITGKVPRGYMIQNKHLVFSDEAPAMLDSIQYFHREQGLAKTINYMRETHGIIMSIQNLKNSILRNEKYTGRYRGNNAYCPRLISDEMYQDIQRVLDTNSTIRSSQKYPYIFSGILVCDQCGHKMCGCHIKVTSHRTSGKVYRYKYPAYECLQYRTYKKCSNGGEIREVRIEEYLLEHVREELSGYLVDFETGETKRIDNRAKKNKLRRKLDRLKDLYLNEVISLDEYKKDRIEYEEQLAALPDIEQPIKNLEPLKQVLDCNFEVIYNKLSNEEKRAFWRSIIKEIRISRSVERNRKYQIIFL

SEQ ID NO: 7878 - protein, 463 aa, Unknown
  Description of Unknown: Integrase B7879 sequence
  cd03768,PTHR30461:SF3,SM00857,G3DSA:1.10.10.2600,IPR036162, PS51737,G3DSA:3.40.50.1390,IPR006119,IPR038109,PF07508, IPR011109,SSF53041,PTHR30461,PS51736,Coil, PF00239
MKVAIYTRVSTAEQNLNGFSIHEQRKKLISFCEINEWKEYEVFTDGGFSGGSTKRPALQDLFSRLTQFDLVLVYKLDRLTRNVRDLLEMLERFEKYNVSFKSATEVFDTTTAIGKLFITIVGAMAEWERETIRERSLFGSRAAVESGKYIREQPFVYDNIEGKLVPNENTKYIEYIVKKFKEGNSANEIARLLNSKKKPSKIKNWNRQTIIRLIKNPVLRGHTKFGDIFIENTHEPILSDDDYYKVINAIENKTHKSKSKHNAIFRGVLKCPQCNGNLHLYAGTIHPKNGRSYNVRRYTCDKCHRDKYSRNISFNESEIENKFIEELEKMDLTRFEIHKPKKVEINIESDKKRIKEQRTKLLRAYTMGYVEEEEFKIIMDETQRQLEDIKREENKETVQEIDEKQIKSIGNFIIEGWKTLTIKEKEKLILSSVDKIDIEFIPREKNNNSNTNTVNIKKVHFIF

SEQ ID NO: 7879 - protein, 463 aa, Unknown
  Description of Unknown: Integrase B7880 sequence
  PTHR30461:SF3,IPR036162,PS51737,IPR011109,PTHR30461, PS00397,PF00239,G3DSA:1.10.10.2600,IPR006119,SSF53041, cd00338,SM00857,IPR025827,IPR038109,PS51736, IPR006118,PF13408,G3DSA:3.40.50.1390,Coil
MRRKTTAPVEKILLRVAIYIRVSTDKQVKDGDSMRDQLATGQKYIDSHENMILVDTYIDDGISGQKLKRDDFQRLIDDVRAGRIDLIIFTRLDRWFRNLRHYLNTQDILDKHGVSWTAIEQPYFDTSTPHGRAFVNNSMIWAELEAQNDSDRILGVFDDKVDNGEVLSGSTPLGYAIVNKHLVPDDDAPTAVAIFQYYRKTGNLSMTLRYMESEFGLVRSAASLKNMLTNTKYIGEFRDNKNYCPAIIDRDLFFDVQRLLKINIKSGKKHDYIFSGLVVCDDCDHIMSGCQQRAGGRVRADGTRIVYKYSVYRCRQGVNLHRCPNRKLVFETTLEKMLLERIRPELENYIAEYEVANLPALRTDAKRRSVEGKMQKLKDLYLNDLITMDEFKLDREKLLMQLEKINAEDSRPVKDLSYLKNFLKMDFESVYDSLSIPEKRELWRSIVKEIRVDHDKNIHIIFL

SEQ ID NO: 7880 - protein, 463 aa, Unknown
  Description of Unknown: Integrase B7881 sequence
  PTHR30461:SF3,SM00857,IPR006118,IPR036162,PF13408, PS51737,G3DSA:3.40.50.1390,IPR025827,PS00397,IPR006119, IPR011109,SSF53041,PTHR30461,Coil,PS51736, cd00338,PF00239
MPSKIERCAIYIRVSTAEQMMHGKSLEAQKQYLTNYAKEHNMTVAGVYADEGKTARKELKKRKAIHSLLEDVKAGKIDVIIFWRIDRWFRNLSDFYKVQEVLDDNNVHWISTSEPGINMETRDGRLQLNVVLSIGQNEVDTTSERIKFVNEASIRQGKLIFGDVNMGYGYKSGIIDGVKRMVKDPDREDAVNAFYRFFFKHHAKGLSMRYIQENYDPDFTWANMRTLLSSEFYKGTYRGIPYCPAYLTESEWNNLQEIQNANVKRAPSGRIYLFSGMINCPICGRRLSARGGSSIINRKTGAKKVYCYYRCNKAFIDHKCTYKHMVSQNLIEQYLIDHLEYEYNKFKIKCEKIEKEQEKKKKIQTPEKLQKELERLNLLFQKGRIEWDYYSKEYDRIENELNELLNAAPELEPDYAYLEELLNTDFRTMYYNLTQENRRAFWHSIIREIHLNTDHTVDSVDFL

SEQ ID NO: 7881 - protein, 463 aa, Unknown
  Description of Unknown: Integrase B7882 sequence
  PTHR30461:SF3,IPR036162,PS51737,IPR011109,PTHR30461, PS00397,PF00239,G3DSA:1.10.10.2600,IPR006119,SSF53041, cd00338,SM00857,IPR025827,IPR038109,PS51736, IPR006118,PF13408,G3DSA:3.40.50.1390,Coil
MRRKTTAPVEKILLRVAIYIRVSTDKQVKDGDSMRDQLATGQKYIDSHENMILVDTYIDDGISGQKLKRDDFQRLIDDVRAGRIDLIIFTRLDRWFRNLRHYLNTQDILDKHGVSWTAIEQPYFDTSTPHGRAFVNNSMIWAELEAQNDSDRILGVFDDKVDNGEVLSGSTPLGYTIVNKHLVPDDDAPTAVAIFQYYRKTGNLSMTLRYMESEFGLVRSAASLKNMLTNTKYIGEFRDNKNYCPAIIDRDLFFDVQRLLKINIKSGKKHDYIFSGLVVCDDCDHIMSGCQQRARGRVRADGTRIIYKYSVYRCRQGVNLHRCPNRKLVFETTLEKMLLERIRPELENYIAEYEVANLPALRTDAKRRSVEGKMQKLKDLYLNDLITMDEFKLDREKLLMQLEKINAEDSRPVKDLSYLKNFLKMDFESVYDSLSIPERRELWRSIVKEIRVDHDKNIHIIFL

SEQ ID NO: 7882 - protein, 463 aa, Unknown
  Description of Unknown: Integrase B7883 sequence
  PTHR30461:SF3,SM00857,IPR006118,IPR036162,PF13408, PS51737,IPR025827,G3DSA:3.40.50.1390,PS00397,IPR006119, IPR011109,SSF53041,PTHR30461,Coil,PS51736, cd00338,PF00239
MPSKIERCAIYIRVSTAEQMMRGKSLEAQKQYLTNYAKEHNMTVAGVYADEGKTARKELKKRKAIHSLLEDVKAGKIDVIIFWRIDRWFRNLSDFYKVQEVLDDNNVRWISTSEPGINMETRDGRLQLNVVLSIGQNEVDTTSERIKFVNEASIRQGKLIFGDVNMGYGYKSGIIDGVKRMVKDPDREDAVNAFYRFFFKHHAKGLSMRYIQENYDPDFTWANMRTLLSSEFYKGTYRGIPYCPAYLTESEWNNLQEIQNANVKRAPSGRIYLFSGMINCPICGRRLSARGGSSIINRKTGAKKVYCYYRCNKAFIDHKCTYKHMVSQNLIEQYLIEHLEYEYNKFKIKCEKIEKEQEKKKKFQTPEKLQKELERLNLLFQKGRIEWDYYSKEYDRIENELNELLNAAPELEPDYAYLEELLNTDFRTMYYNLTQENRRAFWHSIIREIHLNTDHTVDSVDFL

SEQ ID NO: 7883 - protein, 463 aa, Unknown
  Description of Unknown: Integrase B7884 sequence
  PTHR30461:SF3,cd00338,SM00857,IPR036162,PF13408, IPR025827,G3DSA:3.40.50.1390,PS51737,IPR006119,SSF53041, IPR011109,PTHR30461,PS51736,Coil,PF00239
MSFFTPNPQLFGLRVVKYIRCSHDDQVLHGDTLEAQDLILEDFIKVNRMILVDTFIDEALTARKKFNKRKEFVRLLDGVKAHSFDLIIFTKLDRWFRNIGDYHKIQEILEANGVQWKAVTENYDTTTTNGRLHINIRLSVAQDECDRDSDRIKDVFAYKLKNKTYVSGSLPRGLKLDAEKHVVIDPEWNCFALDMFDRFEATCSKRDTQLFLQDKYNIRVCYDTVARYLKNPLFKGQYRDDPDFCPATISPERFERIQKLAIRNVRIRHTQQFYIFSGLLICSSCNHYMCGTVTYRRMADGSEKMYKNYRCNFKAQSKLCDRSKTYREADLEEYMLAHIRPALSDYIAKYEVTAASTVQKNPVTEIAKIERKMKKLYDLFMDDLIGKEAYRSEYDKFKAQIEELQKCSTATPMRSLDSVKKLLSEDWEVVYRTFSDQEKNTFWKSFVESVLVYEDGSMDIRFL

SEQ ID NO: 7884 - protein, 463 aa, Unknown
  Description of Unknown: Integrase B7885 sequence
  PTHR30461:SF3,SM00857,IPR036162,PF13408,IPR025827, PS51737,G3DSA:3.40.50.1390,IPR006119,IPR011109,SSF53041, PTHR30461,PS51736,cd00338,PF00239
MSFFTPNPQLFGLRVVKYIRCSHDDQVLHGDTLEAQDLILEDFIKVNQMILVDTFIDEALTARKKFNKRKEFVRLLDGVKAHAFDLIIFTKLDRWFRNIGDYHKIQEILEANGVQWKAVTENYDTTTTNGRLHINIRLSVAQDECDRDSDRIKDVFAYKLKNKTYVSGSLPRGLKLDAEKHVIIDPEWNCFALDMFDRFEATCSKRDTQLFLQEKYNIRVCYDTVARYLKNPLFKGQYRDDPDFCPATISPERFERIQKLAIRNVRIRHTQQFYIFSGLLICSSCNHYMCGTVTYRRMADGSEKMYKNYRCNFKAHSKLCDRGKTYREADLEEYMLAHIRPALSDYIAKYEVTAASAVQKNPVTEIAKIERKMKKLYDLFMDDLIGKEAYRSEYGKFKAQIEELQKCSTAAPMRSLDSVKKLLSEDWEAVYHTFSDQEKNTFWKSFVESVLVYEDGSMDIRFL

SEQ ID NO: 7885 - protein, 463 aa, Unknown
  Description of Unknown: Integrase B7886 sequence
  PTHR30461:SF3,SM00857,IPR006118,IPR036162,PF13408, PS51737,G3DSA:3.40.50.1390,IPR025827,PS00397,IPR006119, IPR011109,SSF53041,PTHR30461,Coil,PS51736, cd00338,PF00239
MPSKIERCAIYIRVSTAEQMMHGKSLEAQKQYLTNYAKEHNMTVAGVYADEGKTARKELKKRKAIHSLLEDVKAGKIDVIIFWRIDRWFRNLSDFYKVQEVLDDNNVHWISTSEPGINMETRDGRLQLNVVLSIGQNEVDTTSERIKFVNEASIRQGKLIFGDVNMGYGYKSGIIGGVKRMVKDPDREDAVNAFYRFFFKHHAKGLSMRYIQENYDPDFTWANMRTLLSSEFYKGTYRGIPYCPAYLTESEWNNLQEIQNANVKRAPSGRIYLFSGMINCPICGRRLSARGGSSIINRKTGAKKVYCYYRCNKAFIDHKCTYKHMVSQNLIEQYLIDHLEYEYNKFKIKCEKIEKEQEKKKKIQTPEKLQKELERLNLLFQKGRIEWDYYSKEYDRIENELNELLNAAPELEPDYAYLEELLNTDFRTMYYNLTQENRRAFWHSIIREIHLNTDHTVDSVDFL

SEQ ID NO: 7886 - protein, 463 aa, Unknown
  Description of Unknown: Integrase B7887 sequence
  PTHR30461:SF3,SM00857,IPR006118,IPR036162,PS51737, G3DSA:3.40.50.1390,PS00397,IPR006119,IPR011109,SSF53041, PTHR30461,Coil,PS51736,cd00338,PF00239
MTTKVERCAIYIRVSTTEQMMHGKSLEAQKEYLTNYAKEHNMAVVGVYADEGKTARKELKKRKAIHSLLQDVEAGKIDVIIFWRIDRWFRNLSDFYKVQDILDNHNVRWISTSEPGINMETRDGRLQLNVVLSIGQNEVDTTSERIKFVNEASIRSGKLIFGDVNMGYGYKSGIVDGQKRMVKDPDREHVVDAFYKYFFKHQNKCATLRYIQETYDPDFSFGIMRTLLSSEFYKGTYRGFPYCPAYLTEDEWNKLQKIQKRNVKATPSGRIYLFAGMIRCPVCGQLLCGTGCSSIINRKTGAKRTYCYYRCNRAMIDHICSYRHRLSQNLVENYLLDNLEDEYKNYKVKCEKIEKEKEKQKKKQSPEKLRKELDRLNFLFQKGRIEWDYYNEEYSRVESELNNLQKVLPEPAPNYSYLEELLNTDFRTMYDQLSQENRRAFWRSIIQEIHINEDSTITSVDFL

SEQ ID NO: 7887 - protein, 463 aa, Unknown
  Description of Unknown: Integrase B7888 sequence
  PTHR30461:SF3,SM00857,IPR006118,IPR036162,PF13408, PS51737,G3DSA:3.40.50.1390,Coil,IPR025827,IPR006119, IPR011109,SSF53041,PTHR30461,PS00397, PS51736,cd00338,PF00239
MPSKIERCAIYIRVSTAEQMMHGKSLEAQKQYLTNYAKEHNMTVAGVYADEGKTARKELKKRKAIHSLLEDVKAGKIDVIIFWRIDRWFRNLSDFYKVQEVLDDNNVHWISTSEPGINMETRDGRLQLNVVLSIGQNEVDTTSERIKFVNEASIRQGKLIFGDVNMGYGYKSGIIDGVKRMVKDPDREDTVNAFYRFFFKHHAKGLSMRYIQENYDPDFTWANMRTLLSSEFYKGTYRGIPYCPAYLTESEWNNLQEIQNANVKRAPSGRIYLFSGMINCPICGRRLSARGSSSIINRKTGAKKVYCYYRCNKAFIDHKCSYRHMVSQNLIERYLIDHLEYEYNKFKIKCEKIEKEQEKKKKVQTPEKLQKELERLNLLFQKGRIEWDYYSKEYDRIENELNELLNVAPELEPDYAYLEELLNTDFRTMYYNLTQENRRAFWHSIIREIHLNTDHTVDSVDFL

SEQ ID NO: 7888 - protein, 463 aa, Unknown
  Description of Unknown: Integrase B7889 sequence
  PTHR30461:SF3,IPR036162,PS51737,IPR011109,PTHR30461, PS00397,PF00239,G3DSA:1.10.10.2600,IPR006119,SSF53041, cd00338,SM00857,IPR025827,IPR038109,PS51736, IPR006118,PF13408,G3DSA:3.40.50.1390,Coil
MRRKTTAPVEKILLRVAIYIRVSTDKQVKDGDSMRDQLATGQKYIDSHENMILVDTYIDDGISGQKLKRDDFQRLIDDVRAGRIDLIIFTRLDRWFRNLRHYLNTQDILDKHGVSWTAIEQPYFDTSTPHGRAFVNNSMIWAELEAQNDSDRILGVFDDKVDNGEVLSGSTPLGYTIVNKHLVPDDDAPTAVAIFQYYRKTGNLSMTLRYMESEFGLVRSAASLKNMLTNTKYIGEFRDNKNYCPAIIDRDLFFDVQRLLKINIKSGKKHDYIFSGLVVCDDCDHIMSGCQQRAKGRVRADGTQIVYKYSVYRCRQGVNLHRCPNRKLVFETTLEKMLLERIRPELENYIAEYEVANLPALRTDAKRRSVEGKMQKLKDLYLNDLITMDEFKLDREKLLMQLEKINAEDSRPVKDLSYLKNFLKMDFESVYDSLSIPERRELWRSIVKEIRVDHDKNIHIIFL

SEQ ID NO: 7889 - protein, 463 aa, Unknown
  Description of Unknown: Integrase B7890 sequence
  cd00338,SM00857,G3DSA:1.10.10.2600,IPR036162,PS51737, G3DSA:3.40.50.1390,IPR006119,IPR038109,PF07508,IPR011109, SSF53041,PTHR30461,PS51736,Coil,PF00239
MNNVAIYCRESTEKQNIDTLVSLCEKEAKKLGYSNYKIYKDIKSGYSKDREEYTKLKEDIKEEKINILILYESSRITRDEIEHHMFYALLKLYNVRVYTLNHGWIDLTNEDDCFLAGLLNLLDAREGRKTAKRVKDRMEEMAKNGFWTGGPAPFGYKLVDKKLIINPEEAEKVKEIFRLFLEGKTRFYLSALFGFECKRVMRMLVNPVYNGKLKFRQIEFKNKKRIEHKQFDVLPGIHEPIIDDYTFKLVQDKVKSIKRETNKGSYIFKDLLICTCGEKMYLHKKKYFYKRDTPIITNVYICNSKDRKIRNCSLSIIHENELFINVIESLEELILSFNVDDIDTNKNDFEKQLKYYKKELSSLSAKEEVLARQLMNGKLSENLYEKFIVELSENKEFIENKINSLTKVINSQEAKKNNKTILKKYFNKIKKEKDPEKLNAFFKLIIDSIEFINDYRFYIHLKF

SEQ ID NO: 7890 - protein, 463 aa, Unknown
  Description of Unknown: Integrase B7891 sequence
  PTHR30461:SF3,IPR036162,PS51737,IPR011109,PTHR30461, PS00397,PF00239,G3DSA:1.10.10.2600,IPR006119,SSF53041, cd00338,SM00857,IPR025827,IPR038109, PS51736,IPR006118,PF13408,G3DSA:3.40.50.1390,Coil
MRRKTTAPVEKILLRVAIYIRVSTDKQVKDGDSMRDQLATGQKYIDSHENMILVDTYIDDGISGQKLKRDDFQRLIDDVRAGRIDLIIFTRLDRWFRNLRHYLNTQDILDKHGVSWTAIEQPYFDTSTPHGRAFVNNSMIWAELEAQNDSDRILGVFDDKVDNGEVLSGSTPLGYKIVNKHLVPDDDAPTAVAIFQYYRKTGNLSMTLRYMESEFGLVRSAASLKNMLTNTKYIGEFRDNKNYCPAIIDRDLFFDVQRLLKINIKSGKKHDYIFSGLVVCDDCDHIMSGCQQRAGGRVRADGTRIVYKYSVYRCRQGVNLHRCPNRKLVFETTLEKMLLERIRPELENYIAEYEVANLPALRTDAKRRSVEGKMQKLKDLYLNDLITMDEFKLDREKLLMQLEKINAEDSRPVKDLSYLKNFLKMDFESVYDSLSIPERRELWRSIVKEIRVDHDKNIHIIFL

SEQ ID NO: 7891 - protein, 463 aa, Unknown
  Description of Unknown: Integrase B7892 sequence
  PTHR30461:SF3,SM00857,IPR006118,IPR036162,PF13408, IPR025827,G3DSA:3.40.50.1390,PS51737,PS00397,IPR006119, SSF53041,IPR011109,PTHR30461,Coil,PS51736, cd00338,PF00239
MANKILRCAIYIRVSTFEQSVHGKSLQAQKEFLERYAAEHGMIVVGVYADEGKTARKELKKRKAIHALINDVKQDKIDVILFWRLDRWFRNLSDFYKVQDILDEHSVRWISASEPGINMETRDGRLQLNVVLSIGQNEVDTTSERIKFVNEASIRQKKLIFGDANMPLGYKSGIADGKKCMIKDPDTEHMVEDFFLYFKKHQSKQGAIRYMQSTYGINFSYSMLRTMLSSEFYKGTYRGFPYCPAYLTESEWNDIQAISNRNIKRTPSGRVYLFSSLMHCPVCGQKLVGTGCSSIINRKTGEKRTYCYYRCNRSIVDHICTNRHRVSQNLIEKYLLENLSDEYHRYKIRNNKINEENKKKKVDRSPEQIRKELERLNLLFQKGRISFDYYDEEYTRLEQELSTINATPIEPDRDLSYLDELLQTDFKEMYNSLTLENRRAFWRSTILQIHLNDDCTVKEVDFL

SEQ ID NO: 7892 - protein, 463 aa, Unknown
  Description of Unknown: Integrase B7893 sequence
  PTHR30461:SF3,IPR036162,PS51737,IPR011109,PTHR30461, PS00397,PF00239,G3DSA:1.10.10.2600,IPR006119,SSF53041, cd00338,SM00857,IPR025827,IPR038109,PS51736, IPR006118,PF13408,G3DSA:3.40.50.1390,Coil
MRRKTTAPVEKILLRVAIYIRVSTDKQVKDGDSMRDQLATGQKYIDSHENMILVDTYIDDGISGQKLKRDDFQRLIDDVRAGRIDLIIFTRLDRWFRNLRHYLNTQDILDKHGVSWTAIEQPYFDTSTPHGRAFVNNSMIWAELEAQNDSDRILGVFDDKVDNGEVLSGSTPLGYTIVNKHLVPDDDAPTAVAIFQYYRKTGNLSMTLRYMESEFGLVRSAASLKNMLTNTKYIGEFRDNKNYCPAIIDRDLFFDVQRLLKINIKSGKKHDYIFSGLVVCDDCDHIMSGCQQRARGRVRADGTRIVYKYSVYRCRQGVNLHRCPNRKLVFETTLEKMLLERIRPELENYIAEYEVANLPALRTDAKRRSVEGKMQKLKDLYLNDLITMDEFKLDREKLLMQLEKINAEDSRPVKDLSYLKNFLKMDFESVYDSLSMPERRELWRSIVKEIRVDHDKNIHIIFL

SEQ ID NO: 7893 - protein, 463 aa, Unknown
  Description of Unknown: Integrase B7894 sequence
  PTHR30461:SF3,SM00857,IPR006118,IPR036162,PF13408, IPR025827,G3DSA:3.40.50.1390,Coil,PS51737,IPR006119, SSF53041,IPR011109,PTHR30461,PS00397,PS51736, cd00338,PF00239
MTNKLLRCAIYIRVSTFEQSVHGKSLQAQKEFLERYAAEHGMIVVGVYADEGKTARKELKKRKAIHALVNDVKQDKIDVILFWRLDRWFRNLSDFYKVQDILDEHSVRWISASEPGINMETRDGRLQLNVVLSIGQNEVDTTSERIKFVNEASIRQRKLIFGDANMPFGYKSGIVDGRKCMIKDPDTDHMVEDFFQYFKKHQSKQGAVRYMQSTYGINFSYSMLRTMLSSEFYKGTYRGFPYCPAYLTESEWNEIQTISVRNVKRTPSGRVYLFSSLMHCPVCGQKLVGTGCSSIINRKTGEKRTYCYYRCNRAITDCICTNRHRVSQNLIEKYLLENLTDEYHRYKIRNNKINEENRKKKVDRSPEQIRKELERLNLLFQKGRISFDYYDEEYTRLEQELSTINATPIEPDRDLSYLDELLQTDFREMYNSLTLENRRAFWRSTIKEIHLNDDYTVKEVDFL

SEQ ID NO: 7894 - protein, 463 aa, Unknown
  Description of Unknown: Integrase B7895 sequence
  PTHR30461:SF3,SM00857,IPR006118,IPR036162,PS51737, G3DSA:3.40.50.1390,IPR006119,IPR011109,SSF53041,PF00239, PTHR30461,PS00397,PS51736,Coil,cd00338
MTTKVERCAIYIRVSTTEQMMHGKSLEAQKEYLTNYAREHNMAIVGVYADEGKTARKELKKRKAIHSLLQDVEDGKIDVIIFWRIDRWFRNLSDFYKVQDILDNHNVRWISTSEPGINMETRDGRLQLNVVLSIGQNEVDTTSERIKFVNEASIRQGKLIFGDANMGYGYKSGIVDGQKRMVKDPDREHVVDAFYKYFFKHQNKCATLRYIQETYDPDFSFGIMRTLLSSEFYKGTYRGFPYCPAYLTEDEWNKLQKIQKRNVKATPSGRIYLFAGMIRCPVCGQLLCGTGCSSIINRKTGAKRTYCYYRCNRAMIDHICSYRHRLSQNLVENYLLDNLEDEYKNYKVKCEKIEKEKEKQKKKQSPEKLRKELDRLNFLFQKGRIDWDYYNEEYGRIESELNDLQSALPEPVTNYSYLEELLNTDFRTMYDQLSQENRRAFWRSIIQEIHVNEDHAITSVDFL

SEQ ID NO: 7895 - protein, 463 aa, Unknown
  Description of Unknown: Integrase B7896 sequence
  PTHR30461:SF3,IPR036162,PS51737,IPR011109,PTHR30461, PS00397,PF00239,G3DSA:1.10.10.2600,IPR006119,SSF53041, cd00338,SM00857,IPR025827,IPR038109, PS51736,IPR006118,PF13408,G3DSA:3.40.50.1390,Coil
MKRQTAKLNDKLLLRVAIYIRVSTDQQAQDGDSVRDQLATGQKYIENHENMILADTYVDDGISGQKVKRDDFQRLMNDVRAGSIDLIIFTRLDRWFRNLRHYLNTQDVLDKNGVSWTATEQPYFDTSTPHGRAFVNNSMIWAELEAQNDSDRILSVFDDKVDNSEVLSGSTPLGYRIENKHLVPDNDAPTAAAIFEYYRKTGNLSMTLRYMESEFGLVRSAASLKNMLTNTKYIGEFRDNKNYCPAIIDRDLFFDVQRLLKINIKSGKKHDYIFSGLVVCDDCDHIMSGCQQRAKGRVCADGTRIVYKYSVYRCRQGVNLHRCPNRKLVFETTLEKMLLERIRPELENYIAEYEVTNLPVLHTDAKRRNLEHKMQKLKELYLNDLITMDEFKVDREKLMQQLDKIKSDDSQPMKDLSYLKNFLKTDFENIYVSLSIPEKRELWRSIIREIRVDHERNVRIIFL

SEQ ID NO: 7896 - protein, 463 aa, Unknown
  Description of Unknown: Integrase B7897 sequence
  PTHR30461:SF3,SM00857,IPR006118,IPR036162,PF13408, PS51737,G3DSA:3.40.50.1390,IPR025827,Coil,IPR006119, IPR011109,SSF53041,PTHR30461,PS00397,PS51736, cd00338,PF00239
MPSKIERCAIYIRVSTAEQMMHGKSLEAQKQYLTNYAKEHNMTVAGVYADEGKTARKELKKRKAIHSLLEDVKAGKIDVIIFWRIDRWFRNLSDFYKVQEVLDDNNVHWISTSEPGINMETRDGRLQLNVVLSIGQNEVDTTSERIKFVNEASIRQGKLIFGDVNMGYGYKSGIIDGVKRMVKDPDREDTVNAFYRFFFKHHAKGLSMRYIQENYDPDFTWANMRTLLSSEFYKGTYRGIPYCPAYLTESEWNNLQKIQNANVKRAPSGRIYLFSGMINCPICGRRLSARGGSSIINRKTGAKKVYCYYRCNKAFIDHKCSYRHMVSQNLIERYLIDHLEYEYNKFKIKCEKIEKEQEKKKKVQTPEKLQKELERLNLLFQKGRIEWDYYSKEYDRIENELNELLNTAPELEPDYAYLEELLNTDFRTMYYNLTQENRRAFWHSIIREIHLNTDHTVDSVDFL

SEQ ID NO: 7897 - protein, 463 aa, Unknown
  Description of Unknown: Integrase B7898 sequence
  PTHR30461:SF3,SM00857,IPR006118,IPR036162,PF13408, IPR025827,G3DSA:3.40.50.1390,Coil,PS51737,IPR006119, SSF53041,IPR011109,PTHR30461,PS00397,PS51736, cd00338,PF00239
MPSKIERCAIYIRVSTAEQMMHGKSLEAQKQYLTNYAKEHNMTVAGVYADEGKTARKELKKRKAIHSLLEDVKAGKIDVIIFWRIDRWFRNLSDFYKVQEVLDDNNVRWISTSEPGINMETRDGRLQLNVVLSIGQNEVDTTSERIKFVNEASIRQGKLIFGDVNMGYGYKSGIIDGVKRMVKDPDREDTVNAFYRFFFKHHAKGPSMRYIQENYDPDFTWANMRTLLSSEFYKGTYRGIPYCPAYLTESEWNNLQEIQNANVKRAPSGRIYLFSGMINCPICGRRLSARGGSSIINRKTGAKKVYCYYRCNKAFIDHKCSYRHMVSQNLIERYLIDHLEYEYNKFKIKCEKIEKEQEKKKKVQTPEKLQKELERLNLLFQKGRIEWDYYSKEYDRIENELNELLNVAPELEPDYAYLEDLLNTDFRTMYYNLTQENRRAFWHSIIREIHLNTDHTVDSVDFL

SEQ ID NO: 7898 - protein, 463 aa, Unknown
  Description of Unknown: Integrase B7899 sequence
  PTHR30461:SF3,IPR036162,PS51737,IPR011109,PTHR30461, PS00397,PF00239,G3DSA:1.10.10.2600,IPR006119,SSF53041, cd00338,SM00857,IPR025827,IPR038109,PS51736, IPR006118,PF13408,G3DSA:3.40.50.1390,Coil
MRRKTTAPVEKILLRVAIYIRVSTDKQVKDGDSMRDQLATGQKYIDSHENMILVDTYIDDGISGQKLKRDDFQRLIDDVRAGRIDLIIFTRLDRWFRNLRHYLNTQDILYKHGVSWTAIEQPYFDTSTPHGRAFVNNSMIWAELEAQNDSDRILGVFDDKVDNGEVLSGSTPLGYKIVNKHLVPDDDAPTAVAIFQYYRKTGNLSMTLRYMESEFGLVRSAASLKNMLTNTKYIGEFRDNKNYCPAIIDRDLFFDVQRLLKINIKSGKKHDYIFSGLVVCDDCDHIMSGCQQRAGGRVRADGTRIVYKYSVYRCRQGVNLHRCTNRKLVFETTLEKMLLERIRPELENYIAEYEVANLPALRTDAKRRSVEGKMQKLKDLYLNDLITMDEFKLDREKLLMQLEKINAEDSRPVKDLSYLKNFLKMDFESVYDSLSIPERRELWRSIVKEIRVDHDKNIHIIFL

SEQ ID NO: 7899 - protein, 463 aa, Unknown
  Description of Unknown: Integrase B7900 sequence
  PTHR30461:SF3,cd00338,SM00857,IPR036162,PF13408, IPR025827,G3DSA:3.40.50.1390,PS51737,IPR006119,IPR011109, SSF53041,PTHR30461,PS51736,Coil,PF00239
MSFFTPNPQLFGLRVVKYIRCSHDDQVLHGDTLEAQDLILEDFIKVNRMILVDTFIDEALTARKKFNKRKEFVRLLNGVKAHDFDLIIFTKLDRWFRNIGDYHKIQEILEANGVQWKAVTENYDTTTTNGRLHINIRLSVAQDECDRDSDRIKDVFAYKLKNKTYVSGSLPRGLKLDAEKHVIIDPEWNCFALDMFDRFEATCSKRDTQLFLQEKYNIRVCYDTVARYLKNPLFKGQYRDDPDFCPATISPERFERIQKLAIRNVRIRHTQQFYIFSGLLICSSCNHYMCGTVTYRRMADGSEKMYKNYRCNFKAQSKLCDRGKTYREADLEEYMLAHIRPALSDYIVKYEVTAASTVQKNPVTEIAKIERKMKKLYDLFMDDLIDKEAYRSEYDKFKTQIEELQKCSTAAPMRSLDSVKKLLSEDWEAVYHTFSDQEKNTFWKSFVESVLVYEDGSMDIRFL

SEQ ID NO: 7900 - protein, 463 aa, Unknown
  Description of Unknown: Integrase B7901 sequence
  PTHR30461:SF3,IPR036162,PS51737,IPR011109,PTHR30461, PS00397,PF00239,G3DSA:1.10.10.2600,IPR006119,SSF53041, cd00338,SM00857,IPR025827,IPR038109, PS51736,IPR006118,PF13408,G3DSA:3.40.50.1390,Coil
MRRKTTSPVEKILLRVAIYIRVSTDKQVKDGDSMRDQLATGQKYIDSHENMILVDTYIDDGISGQKLKRDDFQRLIDDVRAGRIDLIIFTRLDRWFRNLRHYLNTQDILDKHGVSWTAIEQPYFDTSTPHGRAFVNNSMIWAELEAQNDSDRILGVFDDKVDNGEVLSGSTPLGYTIVNKHLVPDDDAPTAVAIFQYYRKTGNLSMTLRYMESEFGLVRSAASLKNMLTNTKYIGEFRDNKNYCPAIIDRDLFFDVQRLLKINIKSGKKHDYIFSGLVVCDDCDHIMSGCQQRARGRVRADGTRIIYKYSVYRCRQGVNLHRCPNRKLVFETTLEKMLLERIRPELENYIAEYEVANLPALRTDAKRRSIEGKMQKLKDLYLNDLITMDEFKLDREKLLMQLEKINAEDSRPVKDLSYLKNFLKMDFESVYDSLSIPERRELWRSIVKEIRVDHDKNIHIIFL

SEQ ID NO: 7901 - protein, 463 aa, Unknown
  Description of Unknown: Integrase B7902 sequence
  PTHR30461:SF3,SM00857,IPR006118,IPR036162,PF13408, PS51737,IPR025827,PS00397,G3DSA:3.40.50.1390,IPR006119, IPR011109,SSF53041,PTHR30461,Coil,PS51736, cd00338,PF00239
MPSKIERCAIYIRVSTAEQMMHGKSLEAQKQYLTNYAKEHNMTVAGVYADEGKTARKELKKRKAIHSLLEDVKAGKIDVIIFWRIDRWFRNLSDFYKVQEVLDDNNVHWISTSEPGINMETRDGRLQLNVVLSIGQNEVDTTSERIKFVNEASIRQGKLIFGDVNMGYGYKSGIIDGVKRMVKDPDREDTVNAFYRFFFKHHAKGLSMRYIQENYDPDFTWANMRTLLSSEFYKGTYRGIPYCPAYLTESEWNNLQEIQNANVKRAPSGRIYLFSGMINCPICGRRLSARGGSSIINRKTGAKKVYCYYRCNKAFIDHKCTYKHMVSQNLIEQYLIEHLEYEYNKFKIKCKKIEKEQEKKKKIQTPEKLQKELERLNLLFQKGRIEWDYYSKEYDRIENELNELLNAAPELEPDYAYLEELLNTDFRTMYYNLTQENRRAFWHSIIREIHLNTDHTVDSVDFL

SEQ ID NO: 7902 - protein, 463 aa, Unknown
  Description of Unknown: Integrase B7903 sequence
  PTHR30461:SF3,cd00338,SM00857,IPR036162,PF13408, IPR025827,PS51737,G3DSA:3.40.50.1390,IPR006119,IPR011109, SSF53041,PTHR30461,PS51736,Coil,PF00239
MSFFTPNPQLFGLRVVKYIRCSHDDQVLHGDTLEAQDLILEDFIKVNRMILVDTFIDEALTARKKFNKRKEFVRLLDGVKAHAFDLIIFTKLDRWFRNIGDYHKIQEILEANGVQWKAVTENYDTTTTNGRLHINIRLSVAQDECDRDSDRIKDVFAYKLKNKTYVSGSLPRGLKLDAEKHVIIDPEWNCFALDMFDRFEATCSKRDTQLFLQEKYNIRVCYDTVARYLKNPLFKGQYRDDPDFCPATISPERFERIQKLAIRNVRIRHTQQFYIFSGLLICSSCNHYMCGTVTYRKMADGSEKMYKNYRCNFKAQSKLCDRGKTYREADLEEYMLAHIRPALSDYIAKYEVTAASTVQKNPVTEIAKIERKMKKLYDLFMDDLIDKEAYRSEYDKFKAQIEELQKCSTAAPMRSLDSVKKLLSEDWEAVYHTFSDQEKNTFWKSFVESVLVYEDGSMDIRFL

SEQ ID NO: 7903 - protein, 463 aa, Unknown
  Description of Unknown: Integrase B7904 sequence
  PTHR30461:SF3,cd00338,SM00857,IPR036162,PF13408, PS51737,G3DSA:3.40.50.1390,IPR025827,IPR006119,SSF53041, IPR011109,PTHR30461,PS51736,Coil, PF00239
MNTYFHSQPELYGLRVVKYIRCSHEGQVLHGDTLEAQDTLLNEFIETNHMVLVDTFVDEALTARKRYTKRKEFVRLLDGVRAHSFDMILFTKLDRWFRNIGDYHKIQEILDANGVQWKAITESYDTTTTNGRLHINIRLSVAQDECDRDSDRIKDVFAYKLKNKSYISGRLPRGLKLDADKHIIHDPEWKQWALDMFDHFESSGSIYSTFLFLTNKYGPLLRYDGVSRALKNPLYKGMYRDDPEFCDPLIDPERFDHLLELAKKNVRQRKTRRYYIFTGLLVCSSCQHNLVPYTIPHTLADGTHKDYVSYRCGYHSSSRLCDRSRTYREEYIEQYLLDHVRPALSRYIAEYDVVSSSASKTDPAAEAAKIRHKLEKLYDLFLDDLIEKDLYRQKYDDLQAQLKECLEVPSAPVRDFSAVQELLSKNWEDMYCTFSKAEKNVFWKSFVESIIVYEDGSMDINFL

SEQ ID NO: 7904 - protein, 463 aa, Unknown
  Description of Unknown: Integrase B7905 sequence
  PTHR30461:SF3,SM00857,IPR036162,PF13408,IPR025827, G3DSA:3.40.50.1390,PS51737,IPR006119,IPR011109,SSF53041, PTHR30461,PS51736,cd00338,PF00239
MSFFTPNPQLFGLRVVKYIRCSHDDQVLHGDTLEAQDLILEDFIKVNRMILVDTFIDEALTARKKFNKRKEFVRLLDGVKAHAFDLIIFTKLDRWFRNIGDYHKIQEILEANGVQWKAVTENYDTTTTNGRLHINIRLSVAQDECDRDSDRIKDVFAYKLKNKTYVSGSLPRGLKLDAEKHVIIDPEWNCFALDMFDRFEATCSKRDTQLFLQDKYNIRVCYDTVARYLKNPLFKGQYRDDPDFCPATISPERFERIQKLAIRNVRIRHTQQFYIFSGLLICSSCNHYMCGAVTYRRMADGSEKMYKNYRCNFKAHSKLCDRGKTYREADLEEYMLAHIRPALSDYIAKYEVTAASTVQKNPVTEIAKIERKMKKLYDLFMDDLIDKEAYRSEYGKFKAQIEELQKCSTVAPVRSLDSVKKLLSEDWEAVYHTFSDREKNTFWKSFVESVLVYEDGSMYIRFL

SEQ ID NO: 7905 - protein, 463 aa, Unknown
  Description of Unknown: Integrase B7906 sequence
  PTHR30461:SF3,IPR036162,PS51737,IPR011109, PTHR30461,PS00397,PF00239,G3DSA:1.10.10.2600, IPR006119,SSF53041,cd00338,SM00857,IPR025827,IPR038109 ,PS51736,IPR006118,PF13408,G3DSA:3.40.50.1390,Coil
MRRKTAATVEKILLRVAIYIRVSTDRQVKEGDSMRDQLATGQRYIDSHENMILVDTYIDDGISGQKLKRDDFQRLLDDVRDGRIDLIIFTRLDRWFRNLRHYLNTQDILDRNNVSWTAIEQPYFDTSTPHGRAFVNNSMIWAELEAQNDSDRILGVFDDKVDNGEVLSGSTPLGYSIVDKHLHPDDDAPTAVSIFQFYRRTGNLSETLRYMEREFGLVRSAASLKNMLTNTKYVGVFRDNENYCPAIIDRDLFDDVQRLLSINIKDGKKHDYIFGGLVVCSDCDHVMSGCQQRSGGRPRADGTRIIYKYSCYRCRQGVNLHRCPNRKIVMESTLEAMLLDRIRPELEKYIADYEVANLPALRTDAKRRSVEGKLQKLKDLYLNDLITMDEFKVDREKLLIQLEKIKAEETRPVKDLSYLREFLKMDFESVYDTFSIPEKRELWRSIIREIRVDHEKNIQIIFL

SEQ ID NO: 7906 - protein, 463 aa, Unknown
  Description of Unknown: Integrase B7907 sequence
  PTHR30461:SF3,SM00857,IPR006118,IPR036162,PF13408, PS51737,G3DSA:3.40.50.1390,Coil,IPR025827,IPR006119, IPR011109,SSF53041,PTHR30461,PS00397,PS51736, cd00338,PF00239
MPSKIERCAIYIRVSTAEQMMHGKSLEAQKQYLTNYAKEHNMTVAGVYADEGKTARKELKKRKAIHSLLEDVKAGKIDVIIFWRIDRWFRNLSDFYKVQEVLDDNNVHWISTSEPGINMETRDGRLQLNVVLSIGQNEVDTTSERIKFVNEASIRQGKLIFGDVNMGYGYKSGIIGGVKRMVKDPDREDTVNAFYRFFFKHHAKGLSMRYIQENYDPDFTWANMRTLLSSEFYKGTYRGIPYCPAYLTESEWNNLQEIQNANVKRAPSGRIYLFSGMINCPICGRRLSARGGSSIINRKTGAKKVYCYYRCNKAFIDHKCTYKHMVSQNLIEQYLIDHLEYEYNKFKIKCEKIEKEQEKKKKIQTPEKLQKELERLNLLFQKGRIKWDYYSKEYDRIENELNELLNAAPELEPDYAYLEELLNTDFRTMYYNLTQENRRAFWHSIIREIHLNTDHTVDSVDFL

SEQ ID NO: 7907 - protein, 463 aa, Unknown
  Description of Unknown: Integrase B7908 sequence
  PTHR30461:SF3,IPR036162,PS51737,IPR011109,PTHR30461, PS00397,PF00239,G3DSA:1.10.10.2600,IPR006119,SSF53041, cd00338,SM00857,IPR025827,IPR038109,cd09875, PS51736,IPR006118,PF13408,G3DSA:3.40.50.1390,PF07508,Coil
MKKVALYVRVSTARQDQEGYSIPLQKERLIAYCKAKGWVVAGIFIDPGHSGSSLDRPGMVSLMEAVEAGKFDAVLVYKLDRLSRSQKDTLYLIEDVFMANKTDFVSLQESFDTTTIYGRAMVGILSVFAQMERETITERTLMGRAGRAEDGLWHGGGTDPIGYDYIDGGLVINEEEAKQVRRVYRFYAAVYSVTEISRRMDGYRTKHGDWSHTSTIGNVLDNPLYAGRVHFDGVLAFGKHDPIVPLDMDAKVKARRERLRHAEAAGDSRYLLTGMIYCNNCGARYFPNRRPNGKVVYSCHSRAKKNKKMIKDPTCKAPHIPVEELDAMVESEVLHLAENPVMVDELIKKGPQKSGPGAVSKSEEIRKLDEEISRLMDLLQHNAMVSVEDIAARIAAVHAERMRLLPDEGIKRKYDVEAAKMVLQDIQFGWEHSDNRSRRVHLLQLIDRILVDTGGVCIDWAFM

SEQ ID NO: 7908 - protein, 463 aa, Unknown
  Description of Unknown: Integrase B7909 sequence
  PTHR30461:SF3,cd00338,SM00857,IPR006118,IPR036162, PS51737,G3DSA:3.40.50.1390,IPR006119,IPR011109,SSF53041, PTHR30461,PS00397,PS51736,Coil,PF00239
MTTKVERCAIYIRVSTTEQMMHGKSLEAQKEYLTNYAREHNMAIVGIYADEGKTARKELKKRKAIHSLLQDVEAGKIDVIIFWRIDRWFRNLSDFYKVQDILDNHNVRWISTSEPGINMETRDGRLQLNVVLSIGQNEVDTTSERIKFVNEASIRNGKLIFGDANMGYGYKSGIVDGQKRMVKDPDREHVVNAFYEYFFKHQNKCATLRYIQETYDPDFSFGIMRTLLSSEFYKGTYRGFPYCPAYLTEDEWNKLQKIQKRNVKATPSGRIYLFAGMIRCPVCGQLLCGTGCSSIINRKTGAKKTYCYYRCNRAMIDHICSYRHRLSQNLVENYLLDNLENEYKNYKVKCEKIEKEKEKQKKKQSPEKLRKELDRLNFLFQKGRIDWDYYNEEYGRVESELNDLQSALPEPVTNYGYLEELLDTDFRTMYDQLSQENRRAFWRSIIQEIHVNEDHAITSVDFL

SEQ ID NO: 7909 - protein, 463 aa, Unknown
  Description of Unknown: Integrase B7910 sequence
  PTHR30461:SF3,SM00857,IPR006118,IPR036162,PF13408, IPR025827,PS51737,G3DSA:3.40.50.1390,PS00397,IPR006119, IPR011109,SSF53041,PTHR30461,Coil, PS51736,cd00338,PF00239
MPSKIERCAIYIRVSTAEQMMHGKSLEAQKQYLTNYAKEHNMTVAGVYADEGKTARKELKKRKAIHSLLEDVKAGKIDVIIFWRIDRWFRNLSDFYKVQEVLDDNNVHWISTSEPGINMETRDGRLQLNVVLSIGQNEVDTTSERIKFVNEASIRQGKLIFGDVNMGYGYKSGIIDGVKRMVKDPDREDAVNAFYRFFFKHHAKGLSMRYIQENYDPDFTWANMRTLLSSEFYKGTYRGIPYCPAYLTESEWNNLQEIQNANVKRAPSGRIYLFSGMINCPICGRRLSARGGSSIINRKTGAKKVYCYYRCNKAFIDHKCTYKHMVSQNLIEQYLIDHLEYEYNKFKIKCEKIEKEQEKKKKIQTPEKLQKELERLNLLFQKGRIEWDYYSKEYDRIETELNELLNAAPELEPDYAYLEELLNTDFRTMYYNLTQENRRAFWHSIIREIQLNTDHTVDSVDFL

SEQ ID NO: 7910 - protein, 463 aa, Unknown
  Description of Unknown: Integrase B7911 sequence
  PTHR30461:SF3,SM00857,IPR006118,IPR036162,PF13408, PS51737,G3DSA:3.40.50.1390,IPR025827,IPR006119,IPR011109, SSF53041,PF00239,PTHR30461,PS00397,PS51736, Coil,cd00338
MPSKIERCAIYIRVSTAEQMMHGKSLEAQKQYLTNYAKEHNMTVAGVYADEGKTARKELKKRKAIHSLLEDVKAGKIDVIIFWRIDRWFRNLSDFYKVQEVLDDNNVRWISTSEPGINMETRDGRLQLNVVLSIGQNEVDTTSERIKFVNEASIRQGKLIFGDVNMGYGYKSGIIDGVKRMVKDPDREDTVNAFYRFFFKHHAKGLSMRYIQENYDPDFTWANMRTLLSSEFYKGTYRGIPYCPAYLTESEWNNLQEIQNANVKRAPSGRIYLFSSMINCPICGRRLSARGGSSIINRKTGAKKVYCYYRCNKAFIDHKCTYKHMVSQNLIEQYLIDHLEYEYNKFKIKCEKIEKEQEKKKKVQTPEKLQKELERLNLLFQKGRIEWDYYSKEYDRIENELNELLNTAPELESDYAYLEELLNTDFRTMYYNLTQENRRAFWHSIIREIHLNTDHTVDSVDFL

SEQ ID NO: 7911 - protein, 463 aa, Unknown
  Description of Unknown: Integrase B7912 sequence
  PTHR30461:SF3,cd00338,SM00857,IPR036162,PF13408, IPR025827,PS51737,G3DSA:3.40.50.1390,IPR006119,IPR011109, SSF53041,PTHR30461,PS51736,Coil,PF00239
MSFFTPNPQLFGLRVVKYIRCSHDDQVLHGDTLEAQDLILEDFIKVNRMILVDTFIDEALTARKKFNKRKEFVRLLDGVKAHSFDLIIFTKLDRWFRNIGDYHKIQEILEANGVQWKAVTENYDTTTTNGRLHINIRLSVAQDECDRDSDRIKDVFAYKLKNKTYVSGSLPRGLKLDAEKHVIIDPEWNCFALDMFDRFEATCSKRDTQLFLQDKYNIRVCYDTVARYLKNPLFKGQYRDDPDFCPATISPERFERIQKLAIRNVRIRHTQQFYIFSGLLICSSCNHYMCGTVTYRRMADGSEKMYKNYRCNFKAQSKLCDRSKTYREADLEEYMLAHIRPALSDYVAKYEVTAASTVQKNPVTEIAKIERKMKKLYDLFMDDLIDKEAYRSEYDKFKAQIEELQKCSTATPMRSLDSVKKLLSEDWEVVYRTFSDQEKNTFWKSFVESVLVYEDGSMDIRFL

SEQ ID NO: 7912 - protein, 463 aa, Unknown
  Description of Unknown: Integrase B7913 sequence
  PTHR30461:SF3,SM00857,IPR006118,IPR036162,PF13408, PS51737,IPR025827,G3DSA:3.40.50.1390,PS00397,IPR006119, IPR011109,SSF53041,PTHR30461,Coil, PS51736,cd00338,PF00239
MPSKIERCAIYIRVSTAEQMMHGKSLEAQKQYLTNYAKEHNMTVAGVYADEGKTARKELKKRKAIHSLLEDVKAGKIDVIIFWRIDRWFRNLSDFYKVQEVLDDNNVRWISTSEPGINMETRDGRLQLNVVLSIGQNEVDTTSERIKFVNEASIRQGKLIFGDVNMGYGYKSGIIDGVKRMVKDPDREDTVNAFYRFFFKHHAKGLSMRYIQENYDPDFTWANMRTLLSSEFYKGTYRGIPYCPAYLTESEWNNLQEIQNANVKRAPSGRIYLFSGMINCPICGRRLSARGGSSIINRKTGAKKVYCYYRCNKAFIDHKCSYRHMVSQNLIERYLIDHLEYEYNKFKIKCEKIEKEQEKKKKVQTPEKLQKELERLNLLFQKGRIEWDYYSKEYDRIETELNELLIAAPELEPDYAYLEDLLNTDFRTMYYNLTTENRRAFWHSIIREIHLNPDHTVDSVDFL

SEQ ID NO: 7913 - protein, 463 aa, Unknown
  Description of Unknown: Integrase B7914 sequence
  PTHR30461:SF3,SM00857,IPR006118,IPR036162,PF13408, PS51737,G3DSA:3.40.50.1390,Coil,IPR025827,IPR006119, IPR011109,SSF53041,PTHR30461,PS00397,PS51736, cd00338,PF00239
MPSKIERCAIYIRVSTAEQMMHGKSLEAQKQYLTNYAKEHNMTVAGVYADEGKTARKELKKRKAIHSLLEDVKAGKIDVIIFWRIDRWFRNLSDFYKVQEVLDDNNVRWISTSEPGINMETRDGRLQLNVVLSIGQNEVDTTSERIKFVNEASIRQGKLIFGDVNMGYGYKSGIIDGVKRMVKDPDREDTVNAFYRFFFKHHAKGLSMRYIQENYDPDFTWANMRTLLSSEFYKGTYRGIPYCPAYLTESEWNNLQEIQNANVKRAPSGRIYLFSGMINCPICGRRLSARGGSSIINRKTGAKKVYCYYRCNKTFIDHKCTYKHMVSQNLIEQYLIEHLEYEYNKFKIKCEKIEKEQEKKKKIQTPEKLQKELERLNLLFQKGRIEWDYYSKEYDRIENELNELLNAAPELEPDYAYLEELLNTDFRTMYYNLTQENRRAFWHSIIREIQLNTDHTIDSVDFL

SEQ ID NO: 7914 - protein, 463 aa, Unknown
  Description of Unknown: Integrase B7915 sequence
  PTHR30461:SF3,SM00857,IPR036162,PF13408,IPR025827, G3DSA:3.40.50.1390,PS51737,IPR006119,SSF53041,IPR011109, PF00239,PTHR30461,PS51736,Coil,cd00338
MAFYTQSCPELYGMRVAKYIRCSHDDQVAHGDTLEAQNEILDDFVVKNHLILVDTFVDEALTARKKYTKRKEFVRLLDGVKRHDFDLIIFTKLDRWFRNIGDYHRIQEILEANGVQWKAVTESYDTTTTNGRLHINIRLSVAQDECDRDSDRIKDVFEYKLKNKTYLSGSLPRGLKLDPEKHVIIDPEWKQFALDLFDHFEATNSKRGTLMYLKEKYQLPRLCHDTIVRSLRNTLYKGEYRGIKDFCPALIDPERFDRIQILAKRDVRNSRTRTYIFNGLLICSDCGHNMTCQTTVRKRADGKKCEYRAYRCNQHYSMHCCDRNKSYREELIEENMLANIRPALADYIAEYEVDGECPQTKDPAAEANRIRAKLKKLYELFLDDLIDKDMYKKEYEQLQAQLQEANAAAAVPHKDVNALKEFLSQEWEDVYKTFSYEEKAAFWKSFVQSITLHEDGKMDIVFL

SEQ ID NO: 7915 - protein, 463 aa, Unknown
  Description of Unknown: Integrase B7916 sequence
  PTHR30461:SF3,IPR036162,PS51737,IPR011109,PTHR30461, PS00397,PF00239,G3DSA:1.10.10.2600,IPR006119,SSF53041, cd00338,SM00857,IPR025827,IPR038109, PS51736,IPR006118,PF13408,G3DSA:3.40.50.1390,Coil
MRRKAAAIVEKILLRVAIYIRVSTDRQVKEGDSMRDQLATGQRYIDSHENMILVDTYIDDGISGQKLKRDDFQRLLDDVRDGRIDLIIFTRLDRWFRNLRHYLNTQDILDRNNVSWTAIEQPYFDTSTPHGRAFVNNSMIWAELEAQNDSDRILGVFDDKVDNGEVLSGSTPLGYSIVDKHLHPDDDAPTAVSVFQFYRRTGNLSETLRYMEREFGLVRSAASLKNMLTNTKYVGVFRDNESYCPAIIDRDLFDDVQRLLSINIKDGKKHDYIFGGLVVCSDCDHVMSGCQQRCGGRPRADGTRTIYKYSCYRCRQGVNLHRCPNRKIVMESTLEAMLLDRIRPELEKYIADYEVANLPALRTDAKRRSVEGKLQKLKDLYLNDLITMDEFKVDREKLLIQLEKIKAEETRPVKDLSYLREFLKMDFESVYDTFSIPEKRELWRSIIREIRVDHEKNIQIIFL

SEQ ID NO: 7916 - protein, 463 aa, Unknown
  Description of Unknown: Integrase B7917 sequence
  PTHR30461:SF3,cd00338,SM00857,IPR036162,PF13408, IPR025827,G3DSA:3.40.50.1390,PS51737,IPR006119,SSF53041, IPR011109,PTHR30461,PS51736,Coil,PF00239
MSFFTPNPQLFGLRVVKYIRCSHDDQVLHGDTLEAQDLILEDFIKVNRMILVDAFVDEALTARKKFTKRKEFVRLLDGVKAHDFDLIIFTKLDRWFRNIGDYHKIQEILEANGVQWKAVTENYDTTTTNGRLHINIRLSVAQDECDRDSDRIKDVFAYKLKNKTYVSGSLPRGLKLDAEKHVIIDPEWNCFALDMFDRFEATCSKRDTQLFLQDKYNIRVCYDTVARYLKNPLFKGQYRDDPDFCPATISPERFERIQKLAIRNVRIRHTQQFYIFSGLLICSSCNHYMCGTVTYRRMADGSEKMYKNYRCNFKAQSKLCDRGKTYREVDLEEYMLAHIRPALSDYIAKYEVTAASAVQKNPVTEIAKIERKMKKLYDLFMDDLIDKEAYRSEYDKFKTQIEELQKCSTAAPVRSLDSVKKLLSEDWEAVYHTFSDQEKNTFWKSFVESVLVYEDGSMDIHFL

SEQ ID NO: 7917 - protein, 463 aa, Unknown
  Description of Unknown: Integrase B7918 sequence
  PTHR30461:SF3,SM00857,IPR006118,G3DSA:1.10.10.2600,IPR036162, PF13408,IPR025827,PS00397,G3DSA:3.40.50.1390,PS51737, IPR006119,IPR038109,IPR011109,SSF53041, PTHR30461,Coil,cd00338,PF00239
MAKTQTALQRVALYIRVSSDEQAERGDSIRDQKERGTKYIDDHQNMILQDTYIDDGVSGQKLDRDDFTRLIGNVKAGLVDLIIFTKLDRWFRSLRHYLNTQVILDKYNVAWTAIDQPYFDTSTPYGRAFVAQSMTWAELEAQNGGLRVTDVFRSKVEHGEVITGKVPRGYMIQNKHLVFSDEAPAMLDSIQYFHREQGLAKTVNYMRETHGINMSIQNLKNSILRNEKYTGRYRGNENYCPRLISDEMYQDIQRVLDNNSTIRSSQKYPYIFSGILICDECSHKMSGCHINVVSRRTSGKVYRYKYPAYECLQYRAYKKCSNGGEIREIRIEEYLLEHVREELSGYLVDFETGEAKRIDNRAKKNKIRRKLDRLKDLYLNEVINLEEYKKDRAEYEEQLAALPDMEQPIKNLKPLKQVLDCNFEVIYNNLNNEEKRAFWRSIIKEIRVSKSIGRNRKYQIIFL

SEQ ID NO: 7918 - protein, 463 aa, Unknown
  Description of Unknown: Integrase B7919 sequence
  PTHR30461:SF3,cd00338,SM00857,IPR036162,PF13408, IPR025827,PS51737,G3DSA:3.40.50.1390,IPR006119,IPR011109, SSF53041,PTHR30461,PS51736,Coil,PF00239
MSFFTPNPQLFGLRVVKYIRCSHDDQVLHGDTLEAQDLILEDFIKVNRMILVDTFIDEALTARKKFNKRKEFVRLLDGVKAHTFDLIIFTKLDRWFRNIGDYHKIQEILEANGVQWKAVTENYDTTTTNGRLHINIRLSVAQDECDRDSDRIKDVFAYKLKNKTYVSGSLPRGLKLDAEKHVIIDPEWNCFALDMFDRFEATCSKRDTQLFLQEKYNIRVCYDTVARYLKNPLFKGQYRDDPDFCPATISPERFERIQKLAIRNVRIRHTQQFYIFSGLLICSSCNHYMCGTVTYRRMADGSEKMYKNYRCNFKAQSKLCDRGKTYREADLEEYMLAHIRPALSDYIAKYEVTAASTVQKNPVTEIAKIERKMKKLYDLFMDDLIDKEAYRSEYDKFKAQIEELQKCSTAAPMRSLDSVKKLLSEDWEAVYHTFSDQEKNTFWKSFVESVLVYEDGSMDIRFL

SEQ ID NO: 7919 - protein, 463 aa, Unknown
  Description of Unknown: Integrase B7920 sequence
  PTHR30461:SF3,SM00857,IPR006118,IPR036162,PF13408, IPR025827,PS51737,Coil,G3DSA:3.40.50.1390,IPR006119, SSF53041,IPR011109,PTHR30461,PS00397, PS51736,cd00338,PF00239
MPSKIERCAIYIRVSTAEQMMHGKSLEAQKQYLTNYAKEHNMTVAGVYADEGKTARKELKKRKAIHSLLEDVKAGKIDVIIFWRIDRWFRNLSDFYKVQEVLDDNNVHWISTSEPGINMETRDGRLQLNVVLSIGQNEVDTTSERIKFVNEASIRQGKLIFGDVNMGYGYKSGIIGGVKRMVKDPDREDAVNAFYRFFFKHHAKGLSMRYIQENYDPDFTWANMRTLLSSEFYKGTYRGIPYCPAYLTESEWNNLQEIQNANVKRAPSGRIYLFSGMINCPICGRRLSARGGSSIINRKTGAKKVYCYYRCSKAFIDHKCTYKHMVSQNLIEQYLIDHLEYEYNKFKIKCEKIEKEQEKKKKIQTPEKLQKELERLNLLFQKGRIEWDYYSKEYDRIENELNELLNAAPELEPDYAYLEELLNTDFRTMYYNLTQENRRAFWHSIIREIHLNTDHTVDSVDFL

SEQ ID NO: 7920 - protein, 463 aa, Unknown
  Description of Unknown: Integrase B7921 sequence
  PTHR30461:SF3,cd00338,SM00857,IPR036162,PF13408, IPR025827,PS51737,G3DSA:3.40.50.1390,IPR006119,IPR011109, SSF53041,PTHR30461,PS51736,Coil,PF00239
MSFFTPNPQLFGLRVVKYIRCSHDDQVLHGDTLEAQDLILEDFIKVNRMILVDTFIDEALTARKKFNKRKEFVRLLDGVKAHSFDLIIFTKLDRWFRNIGDYHKIQEILEANGVQWKAVTENYDTTTTNGRLHINIRLSVAQDECDRDSDRIKDVFAYKLKNKTYVSGSLPRGLKLDAEKHVIIDPEWNCFALDMFDRFEATCSKRDTQLFLQDKYNIRVCYDTVARYLKNPLFKGQYRDDPDFCPATISPERFERIQKLAIRNVRIRHTQQFYIFSGLLICSSCNHYMCGTVTYRRMADGSEKMYKNYRCNFKAQSKLCDRGKTYREVDLEEYMLAHIRPALSDYIAKYEVTAASAVQKNPVTEIAKIERKMKKLYDLFMDDLIDKEAYRSEYDKFKTQIEELQKCSTAAPVRSLDSVKKLLSEDWEAVYHTFSDQEKNTFWKSFVESVLVYEDGSMDIHFL

SEQ ID NO: 7921 - protein, 463 aa, Unknown
  Description of Unknown: Integrase B7922 sequence
  PTHR30461:SF3,IPR036162,PS51737,IPR011109,PTHR30461, PS00397,PF00239,G3DSA:1.10.10.2600,IPR006119,SSF53041, cd00338,SM00857,IPR025827,IPR038109, PS51736,IPR006118,PF13408,G3DSA:3.40.50.1390,Coil
MRRKTTAPVEKILLRVAIYIRVSTDKQVKDGDSMRDQLATGQKYIDSHENMILVDTYIDDGISGQKLKRDDFQRLIDDVRAGRIDLIIFTRLDRWFRNLRHYLNTQDILDKHGVSWTAIEQPYFDTSTPHGRAFVNNSMIWAELEAQNDSDRILGVFDDKVDNGEVLSGSTPLGYKIVNKHLVPDDDAPTAVAIFQYYRKTGNLSMTLRYMESEFGLVRSAASLKNMLTNTKYIGEFRDNKNYCPAIIDRDLFFDVQRLLKINIKSGKKHDYIFSGLVVCDDCDHIMSGCQQRAGGRVRADGTRIVYKYSVYRCRQGVNLHRCPNRKLVFETTLEKMLLERIRPELENYIAEYEVSNLPALRTDAKRRSVEGKMQKLKDLYLNDLITMDEFKLDREKLLMQLEKINAEDSRPVKDLSYLKNFLKMDFESVYDSLSIPERRELWRSIVKEIRVDHDKNIHIIFL

SEQ ID NO: 7922 - protein, 463 aa, Unknown
  Description of Unknown: Integrase B7923 sequence
  PTHR30461:SF3,IPR036162,PS51737,IPR011109,PTHR30461, PS00397,PF00239,G3DSA:1.10.10.2600,IPR006119,SSF53041, cd00338,SM00857,IPR025827,IPR038109,PS51736, IPR006118,PF13408,G3DSA:3.40.50.1390,Coil
MRRKTTAPVEKILLRVAIYIRVSTDKQVKDGDSMRDQLATGQKYIDSHENMILVDTYIDDGISGQKLKRDDFQRLIDDVRAGRIDLIIFTRLDRWFRNLRHYLNTQDILDKHGVSWTAIEQPYFDTSTPHGRAFVNNSMIWAELEAQNDSDRILGVFDDKVDNGEVLSGSTPLGYKIVNKHLVPDDDAPTAVAIFQYYRKTGNLSMTLRYMESEFGLVRSAASLKNMLTNTKYIGEFRDNKNYCPAIIDRDLFFDVQRLLKINIKSGKKHDYIFSGLVVCDDCDHIMSGCQQRARGRVRADGTRIIYKYSVYRCRQGVNLHRCPNRKLVFETTFEKMLLERIRPELENYIAEYEVANLPALRTDAKRRSVEGKMQKLKDLYLNDLITMDEFKLDREKLLMQLEKINAEDSRPVKDLSYLKNFLKMDFESVYDSLSIPERRELWRSIVKEIRVDHDKNIHIIFL

SEQ ID NO: 7923 - protein, 463 aa, Unknown
  Description of Unknown: Integrase B7924 sequence
  PTHR30461:SF3,cd00338,SM00857,IPR036162,PF13408, IPR025827,G3DSA:3.40.50.1390,PS51737,IPR006119,IPR011109, SSF53041,PTHR30461,PS51736,Coil,PF00239
MNTYFHPQPELYGLRVVKYIRCSHEGQVLHGDTLEAQDTLLNEFIEVNHMVLVDTFVDEALTARKKFTKRKEFVRLLNGVRAHAFDMILFTKLDRWFRNIGDYHKIQEILDANSVQWKAITESYDTTTTNGRLHINIRLSVAQDECDRDSDRIKDVFAYKLKNKSYISGRLPRGLKLDADKHIIHDPEWKQWALDMFDHFESSGSIYSTFLFLTNKYGPLLRYDGVSRALKNPLYKGMYRDDPEFCDPLIDPERFDHLLELAKKNVRQRKTRRYYIFTGLLVCSSCQHSLVPYTIPHTLADGTHKDYVSYRCGYHSSSRLCDRSRTYREEYIEQYLLDHVRPALSHYIAEYDVVSSSASKKDPAAEAAKIRRKLEKLYDLFLDDLIEKDLYRQKYDELQAQLKECLAAPSAPVRDFSAVQELLSKNWEDMYCTFSKTEKNVFWKSFVESITVYEDGSMDINFL

SEQ ID NO: 7924 - protein, 463 aa, Unknown
  Description of Unknown: Integrase B7925 sequence
  PTHR30461:SF3,SM00857,IPR006118,IPR036162,PF13408, PS51737,G3DSA:3.40.50.1390,IPR025827,Coil,IPR006119, IPR011109,SSF53041,PTHR30461,PS00397, PS51736,cd00338,PF00239
MPSKIERCAIYIRVSTAEQMMHGKSLEAQKQYLTNYAKEHNMTVAGVYADEGKTARKELKKRKAIHSLLEDVKAGKIDVIIFWRIDRWFRNLSDFYKVQEVLDDNNVHWISTSEPGINMETRDGRLQLNVVLSIGQNEVDTTSERIKFVNEASIRQGKLIFGDVNMGYGYKSGIIDGVKRMVKDPDREDTVNAFYRFFFKHHAKGLSMRYIQENYDPDFTWANMRTLLSSEFYKGTYRGIPYCPAYLTESEWNNLQEIQNANVKRAPSGRIYLFSGMINCPICGRRLSARGGSSIINRKTGAKKVYCYYRCNKAFIDHKCSYRHMVSQNLIERYLIDHLEYEYNKFKIKCEKIEKDQEKKKKVQTPEKLQKELERLNLLFQKGRIEWDYYSKEYDRIENELNELLNAAPELEPDYAYLEELLNTDFRTMYYNLTQENRRAFWHSIIREIHLNADHTVDSVDFL

SEQ ID NO: 7925 - protein, 463 aa, Unknown
  Description of Unknown: Integrase B7926 sequence
  PTHR30461:SF3,SM00857,IPR006118,IPR036162,PF13408, IPR025827,PS51737,G3DSA:3.40.50.1390,Coil,IPR006119, IPR011109,SSF53041,PTHR30461,PS00397,PS51736, cd00338,PF00239
MPSKIERCAIYIRVSTAEQMMHGKSLEAQKQYLTNYAKEHNMTIVGVYADEGKTARKELKKRKAIHSLLEDVKAGKIDVIIFWRIDRWFRNLSDFYKVQEVLDDNNVHWISTSEPGINMETRDGRLQLNVVLSIGQNEVDTTSERIKFVNEASIRQGKLIFGDVNMGYGYKSGIIGGVKRMVKDPDREDAVNAFYRFFFKHHAKGLSMRYIQENYDPDFTWANMRTLLSSEFYKGTYRGIPYCPAYLTESEWNNLQEIQNANVKRAPSGRIYLFSGMINCPICGRRLSARGGSSIINRKTGAKKVYCYYRCNKAFIDHKCTYKHMVSQNLIEQYLIDHLEYEYNKFKIKCEKIEKEQEKKKKIQTPEKLQKELERLNLLFQKGRIEWDYYSKEYDRIENELNELLNAAPELEPDYAYLEELLNTDFRTMYYNLTQENRRAFWHSIIREIHLNTDHTVDSVDFL

SEQ ID NO: 7926 - protein, 463 aa, Unknown
  Description of Unknown: Integrase B7927 sequence
  PTHR30461:SF3,SM00857,IPR006118,IPR036162,PS51737, G3DSA:3.40.50.1390,IPR006119,IPR011109,SSF53041,PF00239, PTHR30461,PS00397,PS51736,Coil,cd00338
MTNKFTRCALYIRVSTAEQCMHGKSLEAQESYLQQYASDHNMIVVGVYADEGKTARKELKKRKAIHSLLEDVKAGKIDVILFWRLDRWFRNMSDFYKVQDILDEYGVRWMSASEPGINMETRDGRLQLNVVLSIGQNEVDTTSERIKFVNEASIRQGKLIFGDANMGYGYKSGIADGRKCMIKDPEREETVNAFYKYFFKHQNKCATLRYIQDNYDPNFSWAIMRTLLSSEFYKGTYRGFPYCPPYLTEEQWNELQKVAHKNIKRAKSGRIYLFTSLIRCPVCGQLLCGNGCKSIINRKTREKRDYCYYRCSRAHNDRICTYRHRLSQNLIEQYLLDNLDMEYRKYQIRVKKIEEEKKKIAQTKTPEKLNAELERLNLLFQKGRVEWDYYSSEYDRIEQELKDLSKIKPEVKRDLSFLEDLLQSDFKALYASLSPENRRAFWRSTIKQIHLNEDSTIKFVDFL

SEQ ID NO: 7927 - protein, 463 aa, Unknown
  Description of Unknown: Integrase B7928 sequence
  PTHR30461:SF3,cd00338,SM00857,IPR036162,PF13408, IPR025827,G3DSA:3.40.50.1390,PS51737,IPR006119,IPR011109, SSF53041,PTHR30461,PS51736,Coil, PF00239
MSFFTPNPQLFGLRVVKYIRCSHDDQVLHGDTLEAQDLILEDFIKVNRMILVDTFIDEALTARKKFNKRKEFVRLLDGVKAHAFDLIIFTKLDRWFRNIGDYHKIQEILEANGVQWKAVTENYDTTTTNGRLHINIRLSVAQDECDRDSDRIKDVFAYKLKNKTYVSGSLPRGLKLDAEKHVIIDPEWNCFALDMFNRFEATCSKRDTQLFLQDKYNIRVCYDTVARYLKNPLFKGQYRDDPDFCPATISPERFERIQKLAIRNVRIRHTQQFYIFSGLLICSSCNHYMCGTVTYRRMADGSEKMYKNYRCNFKAQSKLCDRGKTYREVDLEEYMLAHVRPALSDYIAKYEVTAVSTVQKNPVTEIAKIERKMKKLYDLFMDDLIDKEAYRSEYDKFKAQIEELQKCSTAAPVRSLDSVKKLLSEDWEAVYHTFSDQEKNTFWKSFVESVLVYEDGSMDIRFL

SEQ ID NO: 7928 - protein, 463 aa, Unknown
  Description of Unknown: Integrase B7929 sequence
  PTHR30461:SF3,SM00857,IPR006118,IPR036162,PF13408, PS51737,G3DSA:3.40.50.1390,Coil,IPR025827,IPR006119, IPR011109,SSF53041,PTHR30461,PS00397,PS51736, cd00338,PF00239
MPSKIERCAIYIRVSTAEQMMHGKSLEAQKQYLTNYAKEHNMTVAGVYADEGKTARKELKKRKAIHSLLEDVKAGKIDVIIFWRIDRWFRNLSDFYKVQEVLDDNNVHWISTSEPGINMETRDGRLQLNVVLSIGQNEVDTTSERIKFVNEASIRQGKLIFGDVNMGYGYKSGIIDGVKRMVKDPDREDTVNAFYRFFFKHHAKGLSMRYIQENYDPDFTWANMRTLLSSEFYKGTYRGIPYCPAYLTESEWNNLQEIQNANVKRAPSGRIYLFSGMINCPICGRRLSARGGSSIINRKTGAKKVYCYYRCNKAFIDHKCTYKHMVSQNLIEQYLIDHLEYEYNKFKIKCEKIEKEQEKKKKIQTPEKLQKELERLNLLFQKGRIEWDYYSKEYDRIENELNELLNAAPELEPDYAYLEELLNTDFRTMYYNLTQENRRAFWHSIIREIHLNTDHTVDSVDFL

SEQ ID NO: 7929 - protein, 463 aa, Unknown
  Description of Unknown: Integrase B7930 sequence
  PTHR30461:SF3,IPR036162,PS51737,IPR011109,PTHR30461, PS00397,PF00239,G3DSA:1.10.10.2600,IPR006119,SSF53041, cd00338,SM00857,IPR025827,IPR038109,PS51736, IPR006118,PF13408,G3DSA:3.40.50.1390,Coil
MRRKTTAPVEKILLRVAIYIRVSTDKQVKDGDSMRDQLATGQKYIDSHENMILVDTYIDDGISGQKLKRDDFQRLIDDVRAGRIDLIIFTRLDRWFRNLRHYLNTQDILDKHGVSWTAIEQPYFDTSTPHGRAFVNNSMIWAELEAQNDSDRILGVFDDKVDNGEVLSGSTPLGYKIVNKHLVPDDDAPTAVAIFQYYRKTGNLSMTLRYMESEFGLVRSAASLKNMLTNTKYIGEFRDNKEYCPAIIDHDLFYDVQRLLKINIKSGKKHDYIFSGLVVCDDCDHIMSGCQQRARGRVRADGTRIVYKYSVYRCRQGVNLHRCPNRKLVFETTLEKMLLERIRPELENYIAEYEVANLPALRTDAKRRSIEGKMQKLKDLYLNDLITMDEFKLDREKLLMQLEKINAEDSRPVKDLSYLKNFLKMDFESVYDSLSIPERRELWRSIVKEIRVDHDKNIHIIFL

SEQ ID NO: 7930 - protein, 463 aa, Unknown
  Description of Unknown: Integrase B7931 sequence
  PTHR30461:SF3,SM00857,IPR006118,IPR036162,PF13408, IPR025827,PS51737,G3DSA:3.40.50.1390,Coil,IPR006119, IPR011109,SSF53041,PTHR30461,PS00397,PS51736, cd00338,PF00239
MPSKIERCAIYIRVSTAEQMMHGKSLEAQKQYLTNYAKEHNMTIVGVYADEGKTARKELKKRKAIHSLLEDVKAGKIDVIIFWRIDRWFRNLSDFYKVQEVLDNNNVRWISTSEPGINMETRDGRLQLNVVLSIGQNEVDTTSERIKFVNEASIRQGKLIFGDVNMGYGYKSGIIDGVKRMVKDPDREDTVNAFYRFFFKHHAKGLSMRYIQENYDPDFTWANMRTLLSSEFYKGTYRGIPYCPAYLTESEWNNLQEIQNANVKRAPSGRIYLFSGMINCPICGRRLSARGGSSIINRKTGAKKVYCYYRCNKAFIDHKCTYKHMVSQNLIEQYLIDHLEYEYNKFKIKCEKIEKEQEKKKKIQTPEKLQKELERLNLLFQKGRIEWDYYSKEYDRIENELNELLNTAPELEPDYAYLEELLNTDFRTMYYNLTQENRRAFWHSIIREIHLNTDHTVDSVDFL

SEQ ID NO: 7931 - protein, 463 aa, Unknown
  Description of Unknown: Integrase B7932 sequence
  PTHR30461:SF3,cd00338,SM00857,IPR036162,PF13408, IPR025827,PS51737,G3DSA:3.40.50.1390,IPR006119,IPR011109, SSF53041,PTHR30461,PS51736,Coil,PF00239
MSFFTPNPQLFGLRVVKYIRCSHDDQVLHGDTLEAQDLILEDFIKVNRMILVDTFIDEALTARKKFNKRKEFVRLLDGVKAHSFDLIIFTKLDRWFRNIGDYHKIQEILEANGVQWKAVTENYDTTTTNGRLHINIRLSVAQDECDRDSDRIKDVFAYKLKNKTYVSGSLPRGLKLDAEKHVIIDPEWNCFALDMFDRFEATCSKRDTQLFLQDKYNIRVCYDTVARYLKNPLFKGQYRDDPDFCPATISPERFERIQKLAIRNVRIRHTQQFYIFSGLLICSSCNHYMCGTVTYRRMADGSEKMYKNYRCNFKAQSKLCDRGKTYREVDLEEYMLAHIRPALSDYIAKYEVTAASTVQKNPATEIAKIERKMKKLYDLFMDDLIDKEAYRSEYDKFKVQIEELQKCSTAAPVRSLDSVKKLLSEDWEAVYHTFSDQEKNTFWKSFVESVLVYEDGSMDIHFL

SEQ ID NO: 7932 - protein, 463 aa, Unknown
  Description of Unknown: Integrase B7933 sequence
  PTHR30461:SF3,IPR036162,PS51737,IPR011109,PTHR30461, PS00397,PF00239,G3DSA:1.10.10.2600,IPR006119,SSF53041, cd00338,SM00857,IPR025827,IPR038109, PS51736,IPR006118,PF13408,G3DSA:3.40.50.1390,Coil
MRRKTTAPVEKILLRVAIYIRVSTDKQVKDGDSMRDQLATGQKYIDSHENMILVDTYIDDGISGQKLKRDDFQRLIDDVRAGRIDLIIFTRLDRWFRNLRHYLNTQDILDKHGVSWTAIEQPYFDTSTPHGRAFVNNSMIWAELEAQNDSDRILGVFDDKVDNGEVLSGSTPLGYKIVNKHLVPDDDAPTAVAIFQYYRKTGNLSMTLRYMESEFGLVRSAASLKNMLTNTKYIGEFRDNKNYCPAIIDRDLFFDVQRLLKINIKSGKKHDYIFSGLVVCDDCDHIMSGCQQRAGGRVRADGTRIVYKYSVYRCRQGVNLHRCPNRKLVFETTLEKMLLERIRPELENYIAEYEVANLPALRTDAKRRSIEGKMQKLKDLYLNDLITMDEFKLDREKLLMQLEKINAEDSRPVKDLSYLKNFLKMDFESVYDSLSIPERRELWRSIVKEIRVDHDKNIHIIFL

SEQ ID NO: 7933 - protein, 463 aa, Unknown
  Description of Unknown: Integrase B7934 sequence
  PTHR30461:SF3,SM00857,IPR006118,IPR036162,PF13408, PS51737,G3DSA:3.40.50.1390,IPR025827,PS00397,IPR006119, SSF53041,IPR011109,PTHR30461,Coil,PS51736, cd00338,PF00239
MPSKIERCAIYIRVSTAEQMMHGKSLEAQKQYLTNYAKEHNMTVAGVYADEGKTARKELKKRKAIHSLLEDVKAGKIDVIIFWRIDRWFRNLSDFYKVQEVLDDNNVRWISTSEPGINMETRDGRLQLNVVLSIGQNEVDTTSERIKFVNEASIRQGKLIFGDVNMGYGYKSGIIDGVKRMVKDPDREDTVNAFYRFFFKHHAKGLSMRYIQENYDPNFTWANMRTLLSSEFYKGTYRGIPYCPAYLTESEWNNLQEIQNANVKRAPSGRIYLFSGMINCPICGRRLSARGGSSIINRKTGAKKVYCYYRCNKAFIDHKCTYKHMVSQNLIEQYLIDHLEYEYNKFKIKCEKIEKEQEKKKKVQTPEKLQKELERLNLLFQKGRIEWDYYSKEYDRIENKLNELLNVAPELEPDYAYLEELLNTDFRTMYYNLTQENRRAFWHSIIREIHLNTDHTVDSVDFL

SEQ ID NO: 7934 - protein, 463 aa, Unknown
  Description of Unknown: Integrase B7935 sequence
  PTHR30461:SF3,cd00338,SM00857,IPR036162,PF13408, IPR025827,PS51737,G3DSA:3.40.50.1390,IPR006119,IPR011109, SSF53041,PTHR30461,PS51736,Coil,PF00239
MSFFTPNPQLFGLRVVKYIRCSHDDQVLHGDTLEAQDLILEDFIKVNRMILVDTFIDEALTARKKFNKRKEFVRLLDGVKAHAFDLIIFTKLDRWFRNIGDYHKIQEILEANGVQWKAVTENYDTTTTNGRLHINIRLSVAQDECDRDSDRIKDVFAYKLKNKTYVSGSLPRGLKLDAEKHVIIDPEWNCFALDMFDRFEATCSKRDTQLFLQEKYNIRVCYDTVARYLKNPLFKGQYRDDPDFCPATISPERFERIQKLAIRNVRIRHTQQFYIFSGLLICSSCNHYMCGTVTYRRMADGSEKMYKNYRCNFKAQSKLCDRGKTYREADLEEYMLAHIRPALSDYIAKYEVTAASTVQKNPVTEIAKIERKMKKLYDLFMDDLIDKEAYRSEYDKFKAQIEELQKCSTAAPMRSLDSVKKLLSEDWEAVYHTFSDQEKNTFWKSFVESVLVYEDGSMDIRFL

SEQ ID NO: 7935 - protein, 463 aa, Unknown
  Description of Unknown: Integrase B7936 sequence
  PTHR30461:SF3,SM00857,IPR006118,IPR036162,PS51737, G3DSA:3.40.50.1390,PS00397,IPR006119,IPR011109,SSF53041, PTHR30461,Coil,PS51736,cd00338, PF00239
MTTKVERCAIYIRVSTTEQMMHGKSLEAQKEYLTNYAREHNMAVVGVYADEGKTARKELKKRKAIHSLLQDVEAGKIDVIIFWRIDRWFRNLSDFYKVQDILDSHNVRWISTSEPGINMETRDGRLQLNVVLSIGQNEVDTTSERIKFVNEASIRNGKLIFGDANMGYGYKSGIVDGQKRMVKDPDREHVVDAFYKYFFKHQNKCATLRYIQETYDPDFSFGIMRTLLSSEFYKGTYRGFPYCPAYLTEDEWNKLQKIQKRNVKATPSGRIYLFAGMIRCPVCGQLLCGTGCSSIINRKTGAKRTYCYYRCNRAMIDHICSYRHRLSQNLVENYLLDNLEDEYKNYKVKCEKIEKEKEKQKKKQSPEKLRKELDRLNFLFQKGRIEWDYYNEEYGRVESELNDLQSVLPEPAPNYSYLEELLNTDFRTMYDQLSQENRRAFWRSIIQEIHINEDSTITSVDFL

SEQ ID NO: 7936 - protein, 463 aa, Unknown
  Description of Unknown: Integrase B7937 sequence
  PTHR30461:SF3,IPR036162,PS51737,IPR011109,PTHR30461, PS00397,PF00239,G3DSA:1.10.10.2600,IPR006119,SSF53041, cd00338,SM00857,IPR025827,IPR038109,PS51736, IPR006118,PF13408,G3DSA:3.40.50.1390,Coil
MRRKTTAPVEKILLRVAIYIRVSTDKQVKDGDSMRDQLATGQKYIDSHENMILVDTYIDDGISGQKLKRDDFQRLIDDVRAGRIDLIIFTRLDRWFRNLRHYLNTQDILDKHGVSWTAIEQPYFDTSTPHGRAFVNNSMIWAELEAQNDSDRILGVFDDKVDNGEVLSGSTPLGYTIVNKHLVPDGDAPTAVAIFQYYRKTGNLSMTLRYMESEFGLVRSAASLKNMLTNTKYIGEFRDNKNYCPAIIDRDLFFDVQRLLKINIKSGKKHDYIFSGLVVCDDCDHIMSGCQQRARGRVRADGTRIIYKYSVYRCRQGVNLHRCPNRKLVFETTLEKMLLERIRPELENYIAEYEVANLPALRTDAKRRSVEGKMQKLKDLYLNDLITMDEFKLDREKLLMQLEKINAEDSRPVKDLSYLKNFLKMDFESVYDSLSIPERRELWRSIVKEIRVDHDKNIHIIFL

SEQ ID NO: 7937 - protein, 463 aa, Unknown
  Description of Unknown: Integrase B7938 sequence
  PTHR30461:SF3,IPR036162,PS51737,IPR011109,PTHR30461, PS00397,PF00239,G3DSA:1.10.10.2600,IPR006119,SSF53041, cd00338,SM00857,IPR025827,IPR038109,PS51736, IPR006118,PF13408,G3DSA:3.40.50.1390,Coil
MRRKTTAPVEKILLRVAIYIRVSTDKQVKDGDSMRDQLATGQKYIDSHENMILVDTYIDDGISGQKLKRDDFQRLIDDVRAGRIDLIIFTRLDRWFRNLRHYLNTQDILDKHGVSWTAIEQPYFDTSTPHGRAFVNNSMIWAELEAQNDSDRILGVFDDKVDNGEVLSGSTPLGYKIVNKHLVPDDDAPTAVAIFQYYRKTGNLSMTLRYMESEFGLVRSAASLKNMLTNTKYIGEFRDNKNYCPAIIERDLFFDVQRLLKINIKSGKKHDYIFSGLVVCDDCDHIMSGCQQRARGRVRADGTRIIYKYSVYRCRQGVNLHRCPNRKLVFETTLEKMLLERIRPELENYIAEYEVANLPALRTDAKRRSVEGKMQKLKDLYLNDLITMDEFKLDREKLLMQLEKINAEDSRPVKDLSYLKNFLKMDFESVYDSLSIPERRELWRSIVKEIRVDHDKNIHIIFL

SEQ ID NO: 7938 - protein, 463 aa, Unknown
  Description of Unknown: Integrase B7939 sequence
  cd03768,PTHR30461:SF3,SM00857,G3DSA:1.10.10.2600,IPR036162, PF13408,PS51737,G3DSA:3.40.50.1390,IPR025827,IPR006119, IPR038109,PF07508,IPR011109,SSF53041,PTHR30461, PS51736,Coil,PF00239
MKVAIYTRVSSAEQANEGYSIHEQKRKLISFCEVNDWNRYEVFSDPGVSGGSMKRPSLQKLFDRLEEFDLVLVYKLDRLTRNVRDLLEMLEVFEKNNIAFKSATEVFDTNSAIGKLFITMVGAMAEWERETIRERSLMGSHAAIRSGKYIRARPFCYDLIDDKLKPNQHAKYIRFMVDKLMIGKSASEVVRQLESKKKPPGITKWNRKMILNWIKNPVMRGHTKFGDLLIENTHEPIISEDEYLKLIDIIEKRTYKTKSKHKAIFRGVLECPRCQSKLHLSRSIKKYDNGKTREVRRYSCDKCHRDNTVKNISFNESEIERQFINTLLKKGTDNFKISVPKKKSYDIEDNKVKINEQRANYTRSWSLGYIKDEEYFMLMDETENLLKDIEEKAKSHTDEKLNEEQIRTVKNLLIKGFKIATLEDKEDLITSSVDVIKFEFIPKEFNKNKTLNTVKINEIQFKF

SEQ ID NO: 7939 - protein, 463 aa, Unknown
  Description of Unknown: Integrase B7940 sequence
  PTHR30461:SF3,SM00857,IPR006118,IPR036162,PF13408, PS51737,IPR025827,G3DSA:3.40.50.1390,Coil,IPR006119, IPR011109,SSF53041,PTHR30461,PS00397,PS51736, cd00338,PF00239
MPSKIERCAIYIRVSTAEQMMHGKSLEAQKQYLTNYAKEHNMTVAGVYADEGKTARKELKKRKAIHSLLEDVKAGKIDVIIFWRIDRWFRNLSDFYKVQEVLDNNNVRWISTSEPGINMETRDGRLQLNVVLSIGQNEVDTTSERIKFVNEASIRQGKLIFGDVNMGYGYKSGIIDGVKRMVKDPDREDTVNAFYRFFFKHHAKGLSMRYIQENYDPDFTWANMRTLLSSEFYKGTYRGIPYCPAYLTESEWNNLQEIQNANVKRAPSGRIYLFSGMINCPICGRRLSARGGSSIINRKTGAKKVYCYYRCNKAFIDHKCSYRHMVSQNLIERYLIDHLEYEYNKFKIKCEKIEKEQEKKKKIQTPEKLQKELERLNLLFQKGRIEWDYYSKEYDRIENELNELLNAAPELEPDYAYLEELLNTDFRTMYYNLTQENRRAFWHSIIREIHLNTDHTVDSVDFL

SEQ ID NO: 7940 - protein, 463 aa, Unknown
  Description of Unknown: Integrase B7941 sequence
  PTHR30461:SF3,IPR036162,PS51737,IPR011109,PTHR30461, PS00397,PF00239,G3DSA:1.10.10.2600,IPR006119,SSF53041, cd00338,SM00857,IPR025827,IPR038109,PS51736, IPR006118,PF13408,G3DSA:3.40.50.1390,Coil
MRRKTTAPVEKILLRVAIYIRVSTDKQVKDGDSMRDQLATGQKYIDSHENMILVDTYIDDGISGQKLKRDDFQRLIDDVRAGRIDLIIFTRLDRWFRNLRHYLNTQDILDKHGVSWTAIEQPYFDTSTPHGRAFVNNSMIWAELEAQNDSDRILGVFDDKVDNGEVLSGSTPLGYTIVNKHLVPDDDAPTAVAIFQYYRKTGNLSMTLRYMESEFGLVRSAASLKNMLTNTKYIGEFRDNKNYCPAIIDRDLFFDVQRLLKINIKSGKKHDYIFSGLVVCDDCDHIMSGCQQRAGGRVRADGTRIVYKYSVYRCRQGVNLHRCPNRKLVFETTLEKMLLERIRPELENYIAEYEVANLPALRTDAKRRSVEGKMQKLKDLYLNDLITMDEFKLDREKLLMQLEKINAEDSRPVKDLSYLKNFLKMDFESVYDSLSIPERRELWRSIVKEIRVDHGKNIHIIFL

SEQ ID NO: 7941 - protein, 463 aa, Unknown
  Description of Unknown: Integrase B7942 sequence
  PTHR30461:SF3,SM00857,IPR006118,IPR036162,PS51737, G3DSA:3.40.50.1390,PS00397,IPR006119,IPR011109,SSF53041, PTHR30461,Coil,PS51736,cd00338,PF00239
MTDKIERCAIYIRVSTTEQMMHGKSLEAQKEYLTNYAREHNMAVVGVYADEGKTARKEFKKRKAIHSLLRDVEAGKIDVIIFWRIDRWFRNLSDFYKVQDILDNHNVRWISTSEPGINMETRDGRLQLNVVLSIGQNEVDTTSERIKFVNEASIRNGKLIFGDVNMGYGYKSGIVDGQKRMVKDPDREHVVDAFYKYFFKHQNKCATLRYIQETYDPDFSFGIMRTLLSSEFYKGTYRGFPYCPAYLTEDEWNKLQKIQKRNVKATPSGRIYLFAGMIRCPVCGQLLCGTGCSSIINRKTGARRTYCYYRCNRAMIDHICSYRHRLSQNLVENYLLDNLENEYKNYKVKCEKIEKEKEKQKKKQSPEKLRKELDRLNFLFQKGRIDWDYYNEEYSRVESELNNLQKVLPEPAPNYSYLEELLNTDFRTMYDQLSQENRRAFWRSIIQEIHINEDSTITSVDFL

SEQ ID NO: 7942 - protein, 463 aa, Unknown
  Description of Unknown: Integrase B7943 sequence
  PTHR30461:SF3,cd00338,SM00857,IPR036162,PF13408, IPR025827,PS51737,G3DSA:3.40.50.1390,IPR006119,SSF53041, IPR011109,PTHR30461,PS51736,Coil, PF00239
MNTYFHPQPELYGLRVVKYIRCSHEGQVLHGDTLEAQDTLLNEFIETNHMVLVDTFVDEALTARKRYTKRKEFVRLLDGVRAHAFDVILFTKLDRWFRNIGDYHKIQEILDANSVQWKAITESYDTTTTNGRLHINIRLSVAQDECDRDSDRIKDVFAYKLKNKTYISGSLPRGLMLDKEKHVIIDPEWHQFALDMFDHFEATGSKRGTLLYLQEKYDMRLCYDTVVRNLRNPLYKGMYRDDPGFCECTITPERFDRIQLLGRKNVRHRKTNRTYIFTGLLICSSCKHYLVGAATTATLAHGVKKEYRSYRCNQRYQSHSCDRARTYREQDVEDYLLGHVRPALSQYIAQYEVSSSSMQKKDPAADAAKIRRKLEKLYDLFMDDLIDKESYREKYDDLQDQLKKCQAVVPVPRRDLSEVKSLLAQNWEEIYQAFTAAEKNTFWKSFIESILVHEDGSMDISFL

SEQ ID NO: 7943 - protein, 463 aa, Unknown
  Description of Unknown: Integrase B7944 sequence
  PTHR30461:SF3,SM00857,IPR006118,IPR036162,PF13408, PS51737,G3DSA:3.40.50.1390,IPR025827,IPR006119,SSF53041, IPR011109,PF00239,PTHR30461,PS00397,PS51736, Coil,cd00338
MPSKIERCAIYIRVSTAEQMMHGKSLEAQKQYLTNYAKEHNMTVAGVYADEGKTARKELKKRKAIHSLLEDVKAGKIDVIIFWRIDRWFRNLSDFYKVQEVLDDNNVHWISTSEPGINMETRDGRLQLNVVLSIGQNEVDTTSERIKFVNEASIRQGKLIFGDVNMGYGYKSGIIDGVKRMVKDPDREDTVNAFYRFFFKHHAKGLSMRYIQENYDPDFTWANMRTLLSSEFYKGTYRGIPYCPAYLTESEWNNLQEIQNANVKRAPSGRIYLFSSMINCPICGRRLSARGGSSIINRKTGAKKVYCYYRCNKAFIDHKCTYKHMVSQNLIEQYLIDHLEYEYNKFKIKCEKIEKEQEKKKKVQTPEKLQKELERLNLLFQKGRIEWDYYSKEYDRIENELNELLNTAPELESDYAYLEELLNTDFRTMYYNLTQENRRAFWHSIIREIHLNTDHTVDSVDFL

SEQ ID NO: 7944 - protein, 463 aa, Unknown
  Description of Unknown: Integrase B7945 sequence
  PTHR30461:SF3,SM00857,IPR006118,IPR036162,PS51737, G3DSA:3.40.50.1390,IPR006119,IPR011109,SSF53041,PF00239, PTHR30461,PS00397,PS51736,Coil,cd00338
MPNKIERCAIYIRVSTTEQMMHGKSLEAQKEYLTNYAKEHNMAVVGVYADEGKTARKELKKRKAIHSLLQDVQAGKIDVIIFWRIDRWFRNLSDFYKVQDILDSHNVRWISTSEPGINMETRDGRLQLNVVLSIGQNEVDTTSERIKFVNEASIRSGKLIFGDVNMGYGYKSGIVDGQKRMIKDPDREHVVDAFYKYFFKHQNKCATLRYIQETYDPDFSFGIMRTLLSSEFYKGTYRGFPYCPAYLTEDEWNKLQKIQKRNVKATPSGRIYLFAGMIRCPVCGQLLCGTGCSSIINRKTGAKRTYCYYRCNRAMIDHICSYRHRLSQNLVENYLLDNLENEYKNYKVKCEKIEKEKEKQKKKQTPEKLRKELDRLNFLFQKGRIDWDYYNEEYGRVESELNDLQSALPEPVRNYGYLEELLDTDFRTMYDQLSQENRRAFWRSIIQEIHVNEDHAITSVDFL

SEQ ID NO: 7945 - protein, 463 aa, Unknown
  Description of Unknown: Integrase B7946 sequence
  PTHR30461:SF3,SM00857,IPR036162,PF13408,IPR025827, PS51737,G3DSA:3.40.50.1390,IPR006119,IPR011109,SSF53041, PTHR30461,cd00338,PF00239
MNTYFHPQPELYGLRVVKYIRCSHEGQVLHGDTLEAQDALLNEFIEANHMVLVDTFVDEALTARKKFTKRKEFVRLLNGVRAHAFGMILFTKLDRWFRNIGDYHKIQEILDANSVQWKAITESYDTTTTNGRLHINIRLSVAQDECDRDSDRIKDVFAYKLKNKTYISGRLPRGLKLDADKHIIHDPEWKQWALDMFDHFESSGSIYSTFLFLTNKYGPLLRYDGVSRALKNPLYKGMYRDDPEFCDPLIDPERFDHLLELAKKNVRQRKTRRYYIFTGLLVCSSCQHNLVPYTVPHTLTDGTHKDYISYRCGYHSSSRLCDRSRTYREEYIEQYLLDHVRPALSRYIAEYDIVSSSASKKDPAAEAAKIRRKLEKLYDLFLDDLIEKDLYRQKYDELQAQLKDCLTVPSAPVRDFSAVQELLSKNWEDMYCTFSKTEKNVFWKSFVKSVTVYEDGSMDINFL

SEQ ID NO: 7946 - protein, 463 aa, Unknown
  Description of Unknown: Integrase B7947 sequence
  PTHR30461:SF3,SM00857,IPR006118,IPR036162,PF13408, IPR025827,PS51737,Coil,G3DSA:3.40.50.1390,IPR006119, IPR011109,SSF53041,PTHR30461,PS00397,PS51736, cd00338,PF00239
MPSKIERCAIYIRVSTAEQMMHGKSLEAQKQYLTNYAKEHNMTVAGVYADEGKTARKELKKRKAIHSLLEDVKAGKIDVIIFWRIDRWFRNLSDFYKVQEVLDDNNVHWISTSEPGINMETRDGRLQLNVVLSIGQNEVDTTSERIKFVNEASIRQGKLIFGDVNMGYGYKSGIIDGVKRMVKDPDREDTVNAFYRFFFKHHAKGLSMRYIQENYDPDFTWANMRTLLSSEFYKGTYRGIPYCPAYLTESEWNNLQEIQNANVKRAPSGRIYLFSGMINCPICGRRLSARGGSSIINRKTGAKKVYCYYRCNKAFIDHKCTYKHMVSQNLIEQYLIDHLEYEYNKFKIKCEKIEKEQEKKKKFQTPEKLQKELERLNLLFQKGRIEWDYYSKEYDRIENELNELLNAAPELEPDYAYLEELLNTDFRTMYYNLTQENRRAFWHSIIREIHLNTDHTVDSVDFL

SEQ ID NO: 7947 - protein, 463 aa, Unknown
  Description of Unknown: Integrase B7948 sequence
  PTHR30461:SF3,SM00857,IPR036162,PF13408,IPR025827, G3DSA:3.40.50.1390,PS51737,IPR006119,IPR011109,SSF53041, PTHR30461,PS51736,cd00338,PF00239
MSFFTPNPQLFGLRVVKYIRCSHDDQVLHGDTLEAQDLILEDFIKVNRMILVDTFIDEALTARKKFNKRKEFVRLLDGVKAHAFDLIIFTKLDRWFRNIGDYHKIQEILEANGVQWKAVTENYDTTTTNGRLHINIRLSVAQDECDRDSDRIKDVFAYKLKNKTYVSGSLPRGLKLDAEKHVIIDPEWNCFALDMFDRFEATCSKRDTQLFLQEKYNIRVCYDTVARYLKNPLFKGQYRDDPDFCPATISPERFERIQKLAIRNVRIRHTQQFYIFSGLLICSSCNHYMCGTVTYRRMADGSEKMYKNYRCNFKAHSKLCDRGKTYREADLEEYMLAHIRPALSDYIAKYEVTAASAVQKNPVTEIAKIERKMKKLYDLFMDDLIGKEAYRSEYGKFKAQIEELQKCSTAAPMRSLDSVKKLLSEDWEAVYHTFSDQEKNTFWKSFVESVLVYEDGSMDIRFL

SEQ ID NO: 7948 - protein, 463 aa, Unknown
  Description of Unknown: Integrase B7949 sequence
  PTHR30461:SF3,cd00338,SM00857,IPR036162, PF13408,IPR025827,G3DSA:3.40.50.1390,PS51737, IPR006119,IPR011109,SSF53041,PTHR30461, PS51736,Coil,PF00239
MNTYFHPQPELFGLRVVKYIRCSHEGQVLHGDTLEAQDTLLNEFIEVNHMVLVDTFVDEALTARKKFTKRREFVRLLDGVRAHAFDMILFTKLDRWFRNIGDYHKIQEILDANSVQWKAITESYDTTTTNGRLHINIRLSVAQDECDRDSDRIKDVFAYKLKNKTYISGSLPRGLKLDAEKHVVIDPEWHQFAIDMFDHFESTCSKRGTQLFLQEKYGIRVCYDTVVRYLRNPLFMGQYRDDPDFCEKTISRERFERIQNLAIRNVRIRHTQQFYIFSGLLICSSCNHYMTGTVTYRTLADGREKTYKSYRCNFKAQSKLCDRSKHYREEYVEEYMLQHIRPALSSYVADFEVTAAAAAKKDPAVEIAKVERKMKKLYDLFMDDLIDKASYRNEYEKFQSQIDKLRSCPAAPVRNLDSIKKILSDDWETVYHTFSDQEKNVFWKSFVQSITVHEDGEMDIVFL

SEQ ID NO: 7949 - protein, 463 aa, Unknown
  Description of Unknown: Integrase B7950 sequence
  PTHR30461:SF3,SM00857,G3DSA:1.10.10.2600,IPR036162,PF13408, PS51737,G3DSA:3.40.50.1390,IPR025827,IPR006119,IPR038109, IPR011109,SSF53041,PTHR30461,PS51736,cd00338, PF00239
MSTYFHPQPELFGLRVVKYIRCSHDGQVLHGDTLEAQDALLDEFIKVNRMVLVDTFIDEALTARKKFTRRKEFVRLLDGVRAHNFDMILFTKLDRWFRNIGDYHKIQEILEANGVQWKAITESYDTTTTNGRLHINIRLSVAQDECDRDSDRIKDVFAYKLKNKTYLSGSLPRGLKLDDEKHVIIDSEWKQFVLDMFDHFEQTNSKRGTLLYLKEKYGIYLCYDTISRNLRNSLYKGMYRDDPDFCEPLIEPERFDRIQVLGKRNVRQRYSNRTYVFTGLLICSSCNHYLVGQTTHRTLSDGTEKHYPSYRCNQRYQSHSCDRNRSYREDYVEEYLLQHIRPALSEYVAEYEVTGTNPARKNPAAEAAKIRTKMQKLYELYMDDLIDRDTYKRDYSAFQEKLKELDSIVVAPSRDLADLKKLLEQDYEEIYRTFSPQEKNAFWKSFVQSITVHEDGEMDIVFL

SEQ ID NO: 7950 - protein, 463 aa, Unknown
  Description of Unknown: Integrase B7951 sequence
  PTHR30461:SF3,cd00338,SM00857,IPR036162,PF13408, PS51737,IPR025827,G3DSA:3.40.50.1390,IPR006119,IPR011109, SSF53041,PTHR30461,PS51736,Coil,PF00239
MSFFTPNPQLFGLRVVKYIRCSHDDQVLHGDTLEAQDLILEDFIKVNRMILVDTFIDEALTARKKFNKRKEFVRLLDGVKAHAFDLIIFTKLDRWFRNIGDYHKIQEILEANGVQWKAVTENYDTTTTNGRLHINIRLSVAQDECDRDSDRIKDVFAYKLKNKTYVSGSLPRGLKLDAEKHVIIDPEWNCFALDMFDRFEATCSKRDTQLFLQDKYNIRVCYDTVARYLKNPLFKGQYRDDPDFCPATISPERFERIQKLAIRNVRIRHTQQFYIFSGLLICSSCNHYMCGTVTYRRMADGSEKVYKNYRCNFKAQSKLCDRGKTYREADLEEYMLAHIRPALSDYIAKYEVTAASTVQKNPVAEIAKIERKMKKLYDLFMDDLIDKEAYRSEYDKFKAQIEELQKCSTAAPMRSLDSVKKLLSEDWESVYRTFSDQEKNTFWKSFVESVLVYEDGSMDIRFL

SEQ ID NO: 7951 - protein, 463 aa, Unknown
  Description of Unknown: Integrase B7952 sequence
  PTHR30461:SF3,SM00857,IPR006118,G3DSA:1.10.10.2600,IPR036162, PF13408,PS51737,G3DSA:3.40.50.1390,Coil,IPR025827, IPR006119,IPR038109,IPR011109,SSF53041, PTHR30461,PS00397,cd00338,PF00239
MAQPQTALQRVALYIRVSSDEQAERGDSIRDQKERGTKYIDDHQNMILQDTYIDDGVSGQKLDRDDFTRLIGNVKAGLVDLIIFTKLDRWFRSLRHYLNTQVILDKYNVAWTAIDQPYFDTSTPYGRAFVAQSMTWAELEAQNGGLRVADVFRSKVEHGEVITGKVPRGYMIQNKHLVFSDEAPAMLDSIQYFHREQGLAKTVNYMRETHGINMSIQNLKNSILRNEKYTGRYRGNENYCPRLISDEMYQDIQRVLDNNSTIRSSQKYPYIFSGILICDECGHKMSGCHINVVSRRTSGKVYRYKYPAYECLQYRAYKKCSNGGEIREIRIEEYLLEHVREELSGYLVDFETGEAKRIDNRAKKNKIRRKLDRLKDLYLNEVINLEEYKKDRAEYEEQLAALPDMEQPIKNLKPLKQVLDCNFEIIYNNLNNEEKRAFWRSIIKEIRVSKSIGRNRKYQIIFL

SEQ ID NO: 7952 - protein, 463 aa, Unknown
  Description of Unknown: Integrase B7953 sequence
  PTHR30461:SF3,cd00338,SM00857,IPR036162,PF13408, IPR025827,G3DSA:3.40.50.1390,PS51737,IPR006119,IPR011109, SSF53041,PTHR30461,PS51736,Coil,PF00239
MSFFTPNPQLFGLRVVKYIRCSHDDQVLHGDTLEAQDLILEDFIKVNRMILVDTFIDEALTARKRFNKRKEFVRLLNGVKAHDFDLIIFTKLDRWFRNIGDYHKIQEILEANGVQWKAVTENYDTTTTNGRLHINIRLSVAQDECDRDSDRIKDVFAYKLKNKTYVSGSLPRGLKLDAEKHVIIDPEWNCFALDMFDRFEVTCSKRDTQLFLQEKYNIRVCYDTVARYLKNPLFKGQYRDDPDFCPATISPERFERIQKLAIRNVRIRHTQQFYIFSGLLICSSCNHYMCGTVTYRRMADGSEKMYKNYRCNFKAQSKLCDRGKTYREADLEEYMLAHIRPALSDYIAKYEVTAASTVQKNPVTEIAKIERKMKKLYDLFMDDLIDKEAYRSEYDKFKAQIEELQKCSTAAPMRSLDSVKKLLSEDWEAVYHTFSDREKNTFWKSFVESVLVYEDGSMDIRFL

SEQ ID NO: 7953 - protein, 463 aa, Unknown
  Description of Unknown: Integrase B7954 sequence
  PTHR30461:SF3,SM00857,IPR006118,IPR036162,PF13408, PS51737,G3DSA:3.40.50.1390,IPR025827,PS00397,IPR006119, SSF53041,IPR011109,PTHR30461,Coil, PS51736,cd00338,PF00239
MTNKLLRCAIYIRVSTFEQSVHGKSLQAQKEFLERYAAEHGMIVVGVYADEGKTARKELKKRKAIHALVNDVKQDKIDVILFWRLDRWFRNLSDFYKVQDILDEHSVRWISASEPGINMETRDGRLQLNVVLSIGQNEVDTTSERIKFVNEASIRQRKLIFGDANMPLGYKSGIVDGRKCMIKDPGTEHMVEDFFQYFKKHQSKQGAIRYMQSTYGINFSYSMLRTMLSSEFYKGTYRGFPYCPAYLTESEWNEIQTISVRNVKRTPSGRVYLFSSLMHCPVCGQKLVGTGCSSIINRKTGEKRTYCYYRCNRAITDCICTNRHRVSQNLIEKYLLENLTDEYHRYKIRNNKINEENRKKKVDRSPEQIRKELERLNLLFQKGRISFDYYDEEYTRLEQDLSTINATPIEPDRDLSYLDELLQTDFREMYNSLTLENRRAFWRSTIKEIHLNDDYTVKEVDFL

SEQ ID NO: 7954 - protein, 463 aa, Unknown
  Description of Unknown: Integrase B7955 sequence
  PTHR30461:SF3,cd00338,SM00857,IPR036162,PF13408, IPR025827,PS51737,G3DSA:3.40.50.1390,IPR006119,IPR011109, SSF53041,PTHR30461,PS51736,Coil,PF00239
MSFFTPNPQLFGLRVVKYIRCSHDDQVLHGDTLEAQDLILEDFIKVNRMILVDTFIDEALTARKKFNKRKEFVRLLDGVKAHAFDLIIFTKLDRWFRNIGDYHKIQEILEANDVQWKAVTENYDTTTTNGRLHINIRLSVAQDECDRDSDRIKDVFAYKLKNKTYVSGSLPRGLKLDAEKHVIIDPEWNCFALDMFDRFEATCSKRDTQLFLQEKYNIRVCYDTVARYLKNPLFKGQYRDDPDFCPATISPERFERIQKLAIRNVRIRHTQQFYIFSGLLICSSCNHYMCGTVTYRRMADGSEKMYKNYRCNFKAQSKLCDRGKTYREADLEEYMLAHIRPALSDYIVKYEVTAASTVQKNPVTEIAKIERKMKKLYDLFMDDLIDKEAYRSEYDKFKAQIEELQKCSTAAPMRSLDSVKKLLSEDWEAVYHTFSDQEKNTFWKSFVESVLVYEDGSMDIRFL

SEQ ID NO: 7955 - protein, 463 aa, Unknown
  Description of Unknown: Integrase B7956 sequence
  cd03768,PTHR30461:SF3,SM00857,G3DSA:1.10.10.2600, IPR036162,PS51737,G3DSA:3.40.50.1390,IPR006119, IPR038109,PF07508,SSF53041,IPR011109, PTHR30461,PS51736,Coil,PF00239
MKVAIYTRVSTAEQNLNGFSIHEQRKKLISFCEINEWKEYEVFTDGGFSGGSTKRPALQGLFNRLTQFDLVLVYKLDRLTRNVRDLLEMLERFEKYNVSFKSATEVFDTTTAIGKLFITIVGAMAEWERETIRERSLFGSRAAVESGKYIREQPFVYDNIEGKLVPNENTKYIEYIVKKFKEGNSANEIARLLNSKKKPSKIKNWNRQTIIRLIKNPVLRGHTKFGDIFMENTHEPVLSDDDYHKVINAIENKTHKSKSKHNAIFRGVLKCPQCNGNLHLYAGTIRPKNGRSYNVRRYICDKCHRDKYSRNISFNESEIENKFIEELEKMDLTRFEIHKPKKVEINIESDKKRIKEQRTKLLRAYTMGYVEEEEFKIIMDETQRQLENIKREENKETVQEIDEKQIKSIGNFIIEGWKTLTIKEKEKLILSSVNKIDIEFIPREKNNNSNTNTVNIKKVHFIF

SEQ ID NO: 7956 - protein, 463 aa, Unknown
  Description of Unknown: Integrase B7957 sequence
  PTHR30461:SF3,SM00857,IPR006118,IPR036162,PF13408, PS51737,G3DSA:3.40.50.1390,Coil,IPR025827,IPR006119, IPR011109,SSF53041,PTHR30461,PS00397,PS51736, cd00338,PF00239
MTTKIERCAIYIRVSTTEQMMHGKSLEAQKEYLTNYAKEHNMAVVGVYADEGKTARKELKKRKAIHSLLQDVEAGKIDVIIFWRIDRWFRNLSDFYKVQDILDSHNVRWISTSEPGINMETRDGRLQLNVVLSIGQNEVDTTSERIKFVNESSIRSGKLIFGDANMGYGYKSGIVDGQKRMVKDPDREHVVDAFYKYFFKHQNKCATLRYIQETYDPDFSFGIMRTLLSSEFYKGTYRGFPYCPAYLTEDEWNKLQKIQKRNVKATPSGRIYLFAGMIRCPVCGQKLCGTGCSSIINRKTGVKRTYCYYRCNRAMIDHICSYRHRLSQNLVENYLLDNLEDEYKNYKVKCEKIEKEKEKQKKKQSPEKLRKELDRLNFLFQKGRIEWDYYNEEYSRVESELNDLQNSLPEPAPNYSYLEELLDTDFRTMYDQLSQENRRAFWRSIIQEIHINEDSTITSVDFL

SEQ ID NO: 7957 - protein, 463 aa, Unknown
  Description of Unknown: Integrase B7958 sequence
  PTHR30461:SF3,SM00857,IPR006118,IPR036162,PF13408, IPR025827,PS51737,PS00397,G3DSA:3.40.50.1390,IPR006119, SSF53041,IPR011109,PTHR30461,Coil,PS51736, cd00338,PF00239
MTTKVERCAIYIRVSTTEQMMHGKSLEAQKEYLTNYAREHNMAIVGVYADEGKTARKELKKRKAIHSLLQDVEAGKIDVIIFWRIDRWFRNLSDFYKVQDILDSHNVRWISTSEPGINMETRGGRLQLNVVLSIGQNEVDTTSERIKFVNEASIRSGKLIFGDVNMGYGYKSGIVDGQKRMIKDPDREHVVDAFYKYFFKHQNKCATLRYIQETYDPDFSFGIMRTLLSSEFYKGTYRGFPYCPAYLTEDEWNKLQKIQKRNVKATPSGRIYLFAGMIRCPMCGQKLCGTGCSSIINRKTGAKRTYCYYRCNRAMIDHICSYRHRLSQNLVENYLLDNLENEYKNYKVKCEKIEKEKEKQKKKQSPDKLRKELDRLNFLFQKGRIEWDYYNEEYSRVESELNDLQNSLPEPVTNYSYLEELLDTDFRTMYDQLSQENRRAFWRSIIQEIHVNEDNAITSVDFL

SEQ ID NO: 7958 - protein, 463 aa, Unknown
  Description of Unknown: Integrase B7959 sequence
  PTHR30461:SF3,SM00857,IPR006118,IPR036162,PF13408, PS51737,G3DSA:3.40.50.1390,IPR025827,PS00397,IPR006119, IPR011109,SSF53041,PTHR30461,Coil,PS51736, cd00338,PF00239
MPSKIERCAIYIRVSTAEQMMHGKSLEAQKQYLTNYAKEHNMTVAGVYADEGKTARKELKKRKAIHSLLEDVKAGKIDVIIFWRIDRWFRNLSDFYKVQEVLDDNNVHWISTSEPGINMETRDGRLQLNVVLSIGQNEVDTTSERIKFVNEASIRQGKLIFGDVNMGYGYKSGIIDGVKRMVKDPDREDTVNAFYRFFFKHHAKGLSMRYIQENYDPDFTWANMRTLLSSEFYKGTYRGIPYCPAYLTESEWNNLQEIQNANVKRAPSGRIYLFSGMINCPICGRRLSARGGSSIINRKTGAKKVYCYYRCNKAFIDHKCTYKHMVSQNLIEQYLIDHLEYEYNKFKIKCEKIEKEQEKKKKIQTPEKLQKELERLNLLFQKGRIEWDYYSKEYDRIENELNELLNAAPELEPDYAYLEELLNTDFRTMYYNLTQENRRAFWHSIIREIHLNADHTVDSVDFL

SEQ ID NO: 7959 - protein, 463 aa, Unknown
  Description of Unknown: Integrase B7960 sequence
  PTHR30461:SF3,SM00857,IPR036162,PF13408,IPR025827, G3DSA:3.40.50.1390,PS51737,IPR006119,IPR011109,SSF53041, PF00239,PTHR30461,PS51736,Coil,cd00338
MSFFTPNPQLFGLRVVKYIRCSHDDQVLHGDTLEAQDLILEDFIKVNRMILVDTFIDEALTARKKFNKRKEFVRLLDGVKAHSFDLIIFTKLDRWFRNIGDYHKIQEILEANGVQWKAVTENYDTTTTNGRLHINIRLSVAQDECDRDSDRIKDVFAYKLKNKTYVSGSLPRGLKLDAEKHVIIDPEWNCFALDMFDRFEATCSKRDTQLFLQDKYNIRVCYDTVARYLKNPLFKGQYRDDPDFCPATISPERFERIQKLAIRNVRIRHTQQFYIFSGLLICSSCNHYMCGTVTYRRMADGSEKMYKNYRCNFKAQSKLCDRGRSYREEYVEEYMLNHIRPALSDYVAKYEVTAASTVHKNPATEIAKIERKMKKLYDLFMDDLIDKEAYRSEYDKFKAQIEELQKCSTAAPVRSLDSVKKLLSEDWEAVYHTFSDQEKNTFWKSFVESVLVYEDGSMDIHFL

SEQ ID NO: 7960 - protein, 463 aa, Unknown
  Description of Unknown: Integrase B7961 sequence
  PTHR30461:SF3,SM00857,IPR006118,IPR036162,PS51737, G3DSA:3.40.50.1390,IPR006119,IPR011109,SSF53041,PF00239, PTHR30461,PS00397,PS51736,Coil, cd00338
MTTKIERCAIYIRVSTTEQMMHGKSLEAQKEYLTNYAREHNMAVVGIYADEGKTARKELKKRKAIHSLIKDVEAGKIDVIIFWRIDRWFRNLSDFYKVQDILDSHNVRWISTSEPGINMETRDGRLQLNVVLSIGQNEVDTTSERIKFVNESSIRSGKLIFGDANMGYGYKSGIVDGQKRMIKDPDREHVVDAFYKYFFKHQNKCATLRYIQETYDPDFSFGIMRTLLSSEFYKGTYRGFPYCPAYLTEDEWSTLQKIQKRNVKATPSGRIYLFAGMIRCPVCGQLLCGTGCSSIINRKTGAKRTYCYYRCNRAMIDHICSYRHRLSQNLVENYLLDNLENEYKNYKVKCEKIEKEKEKQKKKQSPEKLRKELDRLNFLFQKGRIDWDYYNEEYGRIESELNDLQSTLPEPVTNYSYLEELLDTDFRTMYDQLSQENRRAFWRSIIQEIHINEDSTITSVDFL

SEQ ID NO: 7961 - protein, 463 aa, Unknown
  Description of Unknown: Integrase B7962 sequence
  PTHR30461:SF3,SM00857,IPR006118,IPR036162,PF13408, PS51737,IPR025827,Coil,G3DSA:3.40.50.1390,IPR006119, IPR011109,SSF53041,PTHR30461,PS00397,PS51736, cd00338,PF00239
MPSKIERCAIYIRVSTAEQMMHGKSLEAQKQYLTNYAKEHNMTVAGVYADEGKTARKELKKRKAIHSLLEDVKAGKIDVIIFWRIDRWFRNLSDFYKVQEVLDDNNVHWISTSEPGINMETRDGRLQLNVVLSIGQNEVDTTSERIKFVNEASIRQRKLIFGDVNMGYGYKSGIIGGVKRMVKDPDREDAVNAFYRFFFKHHAKGLSMRYIQENYDPDFTWANMRTLLSSEFYKGTYRGIPYCPAYLTESEWNNLQEIQNANVKRAPSGRIYLFSGMINCPICGRRLSARGGSSIINRKTGAKKVYCYYRCNKAFIDHKCSYRHMVSQNLIERYLIDHLEYEYNKFKIKCEKIEKEQEKKKKIQTPEKLQKELERLNLLFQKGRIEWDYYSKEYDRIENELNELLNTAPELEPDYAYLEELLNTDFRTMYYNLTQENRRAFWHSIIREIHLNTDHTVDSVDFL

SEQ ID NO: 7962 - protein, 463 aa, Unknown
  Description of Unknown: Integrase B7963 sequence
  PTHR30461:SF3,cd00338,SM00857,G3DSA:1.10.10.2600,IPR036162, PF13408,IPR025827,G3DSA:3.40.50.1390,PS51737,IPR006119, IPR038109,SSF53041,IPR011109,PTHR30461,PS51736, Coil,PF00239
MSYFNFNPDLVGVRVVKYIRCSHEGQVLHGDTLEAQNLILDEFIAANKMTLVDTFIDEAMTARKKYTKRKEFVRLLDGVRSHNFDLIIFTKLDRWFRNIGDYHKIQEILDANGVQWKAVTENYDTTTTNGRLHINIRLSVAQDECDRDSDRIKDVFAYKLKNKTFISGALPRGLMLDAEKHVIPDPEYSEYVTDLFEHFESCGSIRNTLLFLQDKYGFSISYKSISNALRNPLFKGQYRDDPDFCTQIIEPERFDHIQLLLSRNVRIRRNRQTYVFSGLLTCAECNHALVGYSAYYTTKEGEERATKTYRCNHYISTRTCTHSNQMSQKKLEKYLTENIQLAFSDYIASFNVVSSAAKKKDTAAEIARIERKQKKLYNLYMDDLIDAATYKEEYNSFKKQLEELRSIPFSPAVDTRKKTEELLSGDWISVYSSFTDLEKNAFWKSFIDKIVIDVNGNIDIIFL

SEQ ID NO: 7963 - protein, 463 aa, Unknown
  Description of Unknown: Integrase B7964 sequence
  PTHR30461:SF3,cd00338,SM00857,IPR036162,PF13408, IPR025827,G3DSA:3.40.50.1390,PS51737,IPR006119,SSF53041, IPR011109,PTHR30461,PS51736,Coil,PF00239
MNTYFHPQPELYGLRVVKYIRCSHEGQVLHGDTLEAQDALLNEFIEANHMVLVDTFVDEALTARKKFTKRKEFVRLLNGVRAHAFDMILFTKLDRWFRNIGDYHKIQEILDANGVQWKAITESYDTTTTNGRLHINIRLSVAQDECDRDSDRIKDVFAYKLKNKSYISGRLPRGLKLDADKHIIHDPEWKQWALDMFDHFESSGSIYSTFLFLTNKYGPLLRYDGVSRALKNPLYKGMYRDDPEFCDPLIDPERFDHLLELAKKNVRQRKTRRYYIFTGLLVCSSCQHSLVPYTIPHTLADGTHKDYVSYRCGYHSSSRLCDRSRTYREEYIEQYLLDHVRPALSHYIAEYDVISSSASKKDPAAEAAKIRRKLEKLYDLFLDDLIEKDLYRQKYDELQAQLKECLAAPSAPVRDFSAVQELLSKNWEDMYCTFSKTEKNVFWKSFVESITVYEDGSMDINFL

SEQ ID NO: 7964 - protein, 463 aa, Unknown
  Description of Unknown: Integrase B7965 sequence
  PTHR30461:SF3,SM00857,IPR006118,IPR036162,PF13408, PS51737,G3DSA:3.40.50.1390,IPR025827,Coil,IPR006119, IPR011109,SSF53041,PTHR30461,PS00397, PS51736,cd00338,PF00239
MPSKIERCAIYIRVSTAEQMMHGKSLEAQKQYLTNYAKEHNMTIVGVYADEGKTARKELKKRKAIHSLLEDVKAGKIDVIIFWRIDRWFRNLSDFYKVQEVLDDNNVHWISTSEPGINMETRDGRLQLNVVLSIGQNEVDTTSERIKFVNEASIRQGKLIFGDVNMGYGYKSGIIDGVKRMVKDPDREDTVNAFYRFFFKHHAKGLSMRYIQENYDPDFTWANMRTLLSSEFYKGTYRGIPYCPAYLTESEWNNLQEIQNANVKRAPSGRIYLFSGMINCPICGRRLSARGGSSIINRKTGAKKVYCYYRCNKAFIDHKCSYRHMVSQNLIERYLIDHLEYEYNKFKIKCEKIEKDQEKKKKVQTPEKLQKELERLNLLFQKGRIEWDYYSKEYDRIENELNELLNAAPELEPDYAYLEELLNTDFRTMYYNLTQENRRAFWHSIIREIHLNTDHTVDSVDFL

SEQ ID NO: 7965 - protein, 463 aa, Unknown
  Description of Unknown: Integrase B7966 sequence
  PTHR30461:SF3,cd00338,SM00857,IPR036162,PF13408, IPR025827,G3DSA:3.40.50.1390,PS51737,IPR006119,IPR011109, SSF53041,PTHR30461,PS51736,Coil,PF00239
MSFFTPNPQLFGLRVVKYIRCSHDDQVLHGDTLEAQDLILEDFIKVNRMILVDTFIDEALTARKKFNKRKEFVRLLDGVKAHAFDLIIFTKLDRWFRNIGDYHKIQEILEANGVQWKAVTENYDTTTTNGRLHINIRLSVAQDECDRDSDRIKDVFAYKLKNKTYVSGSLPRGLKLDAEKHVIIDPEWNCFALDMFDRFEATCSKRDTQLFLQEKYNIRVCYDTVARYLKNPLFKGQYRDDPDFCPATISPERFERIQKLAIRNVRIRHTQQFYIFSGLLICSSCNHYMCGTVTYRRMADGSEKMYKNYRCNFKAQSKLCDRGKTYREADLEEYMLAHIRPALSDYIAKYEVTAASTIQKNPVTEIAKIERKMKKLYDLFMDDLIDKEAYRSEYDKFKAQIEELQKCSTAVPMRSLDSVKKLLSEDWEAVYHTFSDQEKNTFWKSFVESVLVYEDGSMDIRFL

SEQ ID NO: 7966 - protein, 463 aa, Unknown
  Description of Unknown: Integrase B7967 sequence
  cd03768,PTHR30461:SF3,SM00857,G3DSA:1.10.10.2600, IPR036162,PF13408,IPR025827,PS51737, G3DSA:3.40.50.1390,IPR006119,IPR038109,PF07508, IPR011109,SSF53041,PTHR30461,PS51736,Coil,PF00239
MEQATDGYSIGEQKDKLLHYASAQGYAVVDTYSDEGFSGKDLLRPNMERMLNDIQHGKINTVLVYKLDRLSRHVKDVLELVETFDKCNVTLYSLSENFDLASPFGRAALKMMATFAELERETIVERMEMGKIARAKEGKYTCPGTRCPFGYRHDKKNDRLLIEESEAEIIRKIFDLYVNHGYTFRKLYDYCREAYPDVKYFNNQMCCKPIIERPLYAGYFRYRGGELTKGTNFEAIISYELFLQAQAQVDRNRTKRLSDSSPYLLTGLLICGRCGNRYVGKMYERYTKKPDGTHTKHYRYRDYGCAARLKRDKKYHPAKCDNDIYRAEELEKIVEDYVLNLNIDDYNKADFSPGLIDKMMSEIGAIKRSQSKLLDLYLSGDIDKDTFLIRKIEYDSKIAELQNLIEKETESVQSAPTNAEAIKKSIAEYSMLNRRQKRTLLEYLIKNIIVDGSRITVNLRLKK

SEQ ID NO: 7967 - protein, 463 aa, Unknown
  Description of Unknown: Integrase B7968 sequence
  PTHR30461:SF3,IPR036162,PS51737,IPR011109,PTHR30461, PS00397,PF00239,G3DSA:1.10.10.2600,IPR006119,SSF53041, cd00338,SM00857,IPR025827,IPR038109,PS51736, IPR006118,PF13408,G3DSA:3.40.50.1390,Coil
MKRQTAKQNDKLLLRVAIYIRVSTDQQAQDGDSVRDQLATGQKYIEKHENMILADTYVDDGISGQKVKRDDFQRLMNDVRAGSIDLIIFTRLDRWFRNLRHYLNTQDVLDKNGVSWTATEQPYFDTSTPHGRAFVNNSMIWAELEAQNDSDRILSVFDDKVENSEVLSGSTPLGYRIENKHLVPDDDAPTAAAIFEYYRKTGNLSMTLRYMESEFGLVRSAASLKNMLTNTKYIGEFRDNKNYCPAIIDRDLFFDVQRLLKINIKSGKKHDYIFSGLVVCDDCDHIMSGCQQRAKGRVCADGTRIVYKYSVYRCRQGVNLHRCPNRKLVFETTLEKMLLERIRPELENYIAEYEVTNLPVLHTDAKRRNLEHKMQKLKELYLNDLITMDEFKVDREKLMQQLDKIKSDDSQPMKDLSYLKNFLKTDFENIYVSLSIPEKRELWRSIIREIRVDHERNVRIIFL

SEQ ID NO: 7968 - protein, 463 aa, Unknown
  Description of Unknown: Integrase B7969 sequence
  PTHR30461:SF3,SM00857,IPR006118,IPR036162,PF13408, PS51737,G3DSA:3.40.50.1390,IPR025827,PS00397,IPR006119, IPR011109,SSF53041,PTHR30461,Coil,PS51736, cd00338,PF00239
MPSKIERCAIYIRVSTAEQMMHGKSLEAQKQYLTNYAKEHNMTVAGVYADEGKTARKELKKRKAIHSLLEDVKAGKIDVIIFWRIDRWFRNLSDFYKVQEVLDDNNVHWISTSEPGINMETRDGRLQLNVVLSIGQNEVDTTSERIKFVNEASIRQGKLIFGDVNMGYGYKSGIIDGVKRMVKDPDREYTVNAFYRFFFKHHAKGLSMRYIQENYDPDFTWANMRTLLSSEFYKGTYRGIPYCPAYLTESEWNNLQEIQNANVKRAPSGRIYLFSGMINCPICGRRLSARGGSSIINRKTGAKKVYCYYRCNKAFIDHKCTYKHMVSQNLIEQYLIDHLEYEYNKFKIKCEKIEKEQEKKKKVQTPEKLQKELERLNLLFQKGRIEWDYYSKEYDRIENELNELLNAAPELEPDYAYLEELLNTDFRTMYYNLTQENRRAFWHSIIREIHLNTDHTVDSVDFL

SEQ ID NO: 7969 - protein, 463 aa, Unknown
  Description of Unknown: Integrase B7970 sequence
  PTHR30461:SF3,cd00338,SM00857,IPR006118,G3DSA:1.10.10.2600, IPR036162,PF13408,IPR025827,G3DSA:3.40.50.1390,PS51737, IPR006119,IPR038109,SSF53041,IPR011109,PTHR30461, PS00397,Coil,PF00239
MAKPQTALQRVALYIRVSSDEQAERGDSIRDQKERGTKYIDDHQNMILQDVYIDDGVSGQKLDRDDFTRLIGNVKAGLVDLIIFTKLDRWFRSLRHYLNTQVILDKYNVAWTAIDQPYFDTSTPYGRAFVAQSMTWAELEAQNGGLRVTDVFRSKVEHGEVITGKVPRGYMIQNKHLVFSDEAPAMLDSIQYFHREQGLAKTVNYMRETHGISMSIQNLKNSILRNEKYTGRYRGNENYCPRLISDEMYHDIQRVLDNNSTIRSNQKYPYIFSGILVCDQCGHKMCGCHITVTSHRTSEKVYRYKYPAYECLQYRTYKKCSNGGEIREVRIEEYLLGHVREELSGYLVDFETGETKRIDNRAKKNKLRRKLDRLKDLYLNEVISLDEYKKDRIEYEEQLAALPDMEQPIKNLEPLKQVLDCNFEVIYNKLSNEEKRAFWRSIIKEIRISKSVGRNRKYQIIFL

SEQ ID NO: 7970 - protein, 463 aa, Unknown
  Description of Unknown: Integrase B7971 sequence
  cd03768,PTHR30461:SF3,SM00857,G3DSA:1.10.10.2600,IPR036162, PS51737,G3DSA:3.40.50.1390,IPR006119,IPR038109,PF07508, IPR011109,SSF53041,PTHR30461,PS51736,Coil, PF00239
MKVAIYTRVSTAEQNLNGFSIHEQRKKLISFCEINEWKEYEVFTDGGFSGGSIKRPALQDLLNRLTQFDLILVYKLDRLTRNVRDLLEMLERFEKCNVSFKSATEVFDTTTAIGKLFITIVGAMAEWERETIRERSLFGSRAAVESGKYIREQPFVYDNIEGKLVPNENTKYIEYIVKKFKEGNSANEIARLLNSKKKPSKIKNWNRQTIIRLIKNPVLRGHTKFGDIFMENTHEPVLSDDDYHKVINAIENKTHKSKSKHNAIFRGVLKCPQCNGNLHLYAGTIHPKNGKSYNVRRYTCDKCHRDKYSRNISFNESEIENKFIEELEKMDLTRFEIHKPKKVEINIEGDKKRIKEQRTKLLRAYTMGYVEEEEFKIIMEETQRQLEDIKREENKETVQEIDEKQIKSIGNFIIEGWKTLTIEEKERLILSSIDKIDIEFIPREKNNNSNTNTVNIRKVHFIF

SEQ ID NO: 7971 - protein, 463 aa, Unknown
  Description of Unknown: Integrase B7972 sequence
  PTHR30461:SF3,cd00338,SM00857,IPR036162,PF13408, PS51737,IPR025827,G3DSA:3.40.50.1390,IPR006119,IPR011109, SSF53041,PTHR30461,PS51736,Coil,PF00239
MSFFTPNPQLFGLRVVKYIRCSHDDQVLHGDTLEAQDLILEDFIKVNRMILVDTFIDEALTARKKFNKRKEFVRLLDGVKAHAFDLIIFTKLDRWFRNIGDYHKIQEILEANGVQWKAVTENYDTTTTNGRLHINIRLSVAQDECDRDSDRIKDVFAYKLKNKTYVSGSLPRGLKLDAEKHVIIDPEWNCFALDMFDRFEATCSKRDTQLFLQEKYNIRVCYDTVARYLKNPLFKGQYRDDPDFCPATISPERFERIQKLAIRNVRIRHTQQFYIFSGLLICSSCNHYMCGTVTYRRMADGSEKMYKNYRCNFKAQSKLCDRGKTYREADLEEYMLAHIRPALSDYIAKYEVTAASTVQKNPVTEIAKIERKMKKLYDLFMDDLIDKEAYRSEYDKFKAQIEELQKCSTAAPMRSLDSVKKLLSEDWEAVYHTFSDQEKNTFWKSFVESVLVYEDGSMDIHFL

SEQ ID NO: 7972 - protein, 463 aa, Unknown
  Description of Unknown: Integrase B7973 sequence
  SM00857,G3DSA:1.10.10.2600,IPR036162,PS51737, G3DSA:3.40.50.1390,IPR006119,IPR038109,PF07508, IPR011109,SSF53041,PF00239,PTHR30461, PS51736,Coil,cd00338
MNNVAIYCRESTEKQNIDTLVSLCEKEAKKLGYSDYKIYKDIKSGYSKDREEYTKLKEDIKDEKINVVILYESSRITRDEIEHHMFYALLKLYNVKVYTLNHGWIDLTNEDDCFLAGLLNLLDAREGRKTAKRVKDRMEEMAKNGFWTGGPAPFGYKLVDKKLIIEPEEAEKVREIFKLFLEGKTRFSLSALFGFECKRVMRMLVNPVYNGKLKFRQIEFKNKKRIEHKQFDILPGIHEPIIDDYTFKLVQDKVKNIKRETNKDTYIFKDLLICACGEKMYLYKKKYFYKREIPEITNTYLCKSSNKKIRNCSLSYVREEKLFLNVMESLENLILSFAINDIDTNKDGFEKQLRYYQKELSSLSTKEEILVRQLMNGKLSEKLYEKFMSELSENKEFIENKINSLTKVINSREAKKNNKIILKKYFNKIKKEKDPEKLNAFFKLIIDSIEFINDYRFYIHLKF

SEQ ID NO: 7973 - protein, 463 aa, Unknown
  Description of Unknown: Integrase B7974 sequence
  PTHR30461:SF3,IPR036162,PS51737,IPR011109,PTHR30461, PS00397,PF00239,G3DSA:1.10.10.2600,IPR006119,SSF53041, cd00338,SM00857,IPR025827,IPR038109,PS51736, IPR006118,PF13408,G3DSA:3.40.50.1390,Coil
MRRKTTAPVEKILLRVAIYIRVSTDKQVKDGDSMRDQLATGQKYIDSHENMILVDTYIDDGISGQKLKRDDFQRLIDDVRAGRIDLIIFTRLDRWFRNLRHYLNTQDILDKHGVSWTAIEQPYFDTSTPHGRAFVNNSMIWAELEAQNDSDRILGVFDDKVDNGEVLSGSTPLGYRIVNKHLVPDDDAPTAVAIFQYYRKTGNLSMTLRYMESEFGLVRSAASLKNMLTNTKYIGEFRDNKNYCPAIIDRDLFFDVQRLLKINIKSGKKHDYIFSGLVVCDDCDHIMSGCQQRARGRVRADGTRIIYKYSVYRCRQGVNLHRCPNRKLVFETTLEKMLLERIRPELENYIAEYEVANLPALRTDAKRRSVEGKMQKLKDLYLNDLITMDEFKLDREKLLMQLEKINAEDSRPVKDLSYLKNFLKMDFESVYDSLSIPERRELWRSIVKEIRVDHDKNIHIIFL

SEQ ID NO: 7974 - protein, 463 aa, Unknown
  Description of Unknown: Integrase B7975 sequence
  PTHR30461:SF3,IPR036162,PS51737,IPR011109,PTHR30461, PS00397,PF00239,G3DSA:1.10.10.2600,IPR006119,SSF53041, SM00857,IPR025827,IPR038109,PS51736,cd03768, IPR006118,PF13408,G3DSA:3.40.50.1390,PF07508,Coil
MKHVGLYIRVSTEEQTENYSIPEQRERLENFCKAKDWLVVDEYIDGGYSGAKLDRPAVQKMITDAGTGTIDTVLVWKLDRLSRSQKDMLYLIEDVFIPNSVDFVSLNESLDTGTAFGRAMIGILSAFAQLEREQIKERTMMGRIARAKSGLVMGPTAPYGYRYVDGQLIVDEYEASIVREIYDLYLQGYGMEKVSNMLYEKMQLTSASGYAAVRRILSRPTYAGLVHYSGEVYPGQHEKIIDVDMWKRVQEKREHSRNYQRGKRQKHLLTGMIYCKRCGAKYAYHVHSGNNYYDRYMCYSVCRSRKELIKDPHCDNTKYLAAELEQLIIAQIKELALDESKFNKVIQKRIEAPDPTQAMQKQIKEIDKQINNFMDLYQYGKVPVETINERIEKLTQEKSAIEKSIRELNIKPIPKREDYEPTLSRVDSIFETGSADEQRAAVRNLIDHIDIDGENVVIHWVFE

SEQ ID NO: 7975 - protein, 463 aa, Unknown
  Description of Unknown: Integrase B7976 sequence
  PTHR30461:SF3,SM00857,IPR006118,IPR036162,PS51737, G3DSA:3.40.50.1390,IPR006119,SSF53041,IPR011109,PF00239, PTHR30461,PS00397,PS51736,Coil,cd00338
MTNKIERCAIYIRVSTTEQMMHGKSLEAQKEYLTNYAREHNMAVVGVYADEGKTARKEFKKRKAIHSLLRDVEAGKIDVIIFWRIDRWFRNLSDFYKVQDILDNHNVRWISTSEPGINMETRDGRLQLNVVLSIGQNEVDTTSERIKFVNEASIRSGKLIFGDVNMGYGYKSGIVDGQKRMIKDPDREHVVDAFYKYFFKHQNKCATLRYIQETYDPDFSFGIMRTLLSSEFYKGTYRGFPYCPAYLSEDEWSRLQKIQKRNVKATPSGRIYLFAGLIRCPVCGQLLCGTGCSSIINRKTGAKRTYCYYRCNRAMIDHICSYRHRLSQNLVENYLLDNLEDEYKNYKVKCEKIEKEKEKQKKKQSPEKLRKELDRLNFLFQKGRIEWDYYNEEYSRVESELNDLQNSLPEPAPNYSYLEELLNTDFRTMYDQLSQENRRAFWRSIIQEIHVNEDHAITSVDFL

SEQ ID NO: 7976 - protein, 463 aa, Unknown
  Description of Unknown: Integrase B7977 sequence
  PTHR30461:SF3,SM00857,IPR006118,IPR036162,PF13408, PS51737,IPR025827,G3DSA:3.40.50.1390,PS00397,IPR006119, IPR011109,SSF53041,PTHR30461,Coil, PS51736,cd00338,PF00239
MPSKIERCAIYIRVSTAEQMMHGKSLEAQKQYLTNYAKEHNMTVAGVYADEGKTARKELKKRKAIHSLLEDVKAGKIDVIIFWRIDRWFRNLSDFYKVQEVLDDNNVRWISTSEPGINMETRDGRLQLNVVLSIGQNEVDTTSERIKFVNEASIRQGKLIFGDVNMGYGYKSGIIDGVKRMVKDPDREDTVNAFYRFFFKHHAKGLSMRYIQENYDPDFTWANMRTLLSSEFYKGTYRGIPYCPAYLTESEWNNLQEIQNANVKRAPSGRIYLFSGMINCPICGRRLSARGGSSIINRKTGAKKVYCYYRCNKAFIDHKCSYRHMVSQNLIERYLIDHLEYEYNKFKIKCEKIEKEQEKKKKVQTPEKLQKELERLNLLFQKGRIEWDYYSKEYDRIETELNELLNAAPELEPDYAYLEDLLNTDFRTMYYNLTTENRRAFWHSIIREIHLNPDHTVDSVDFL

SEQ ID NO: 7977 - protein, 463 aa, Unknown
  Description of Unknown: Integrase B7978 sequence
  PTHR30461:SF3,IPR036162,PS51737,IPR011109,PTHR30461, PS00397,PF00239,G3DSA:1.10.10.2600,IPR006119,SSF53041, cd00338,SM00857,IPR025827,IPR038109,PS51736, IPR006118,PF13408,G3DSA:3.40.50.1390,Coil
MRRKNAPRLEKILLRVAIYIRVSTDRQAKEGDSMRDQLATGQRYIENHENMILVDTYIDDGISGQKLKRDDFQRLIDDVRAGRIDLIIFTRLDRWFRNLRHYLNTQDILDRNNVSWTAIEQPYFDTSTPHGRAFVNNSMIWAELEAQNDSDRILGVFDDKVDNGEVLSGSTPLGYSIVDKHLSPDDDAPTAVSIFSHYRKTGNLSDTLRYMESEFGLVRSAASLKNMLTNTKYIGVFRDNNNYCPAIIDRELFEDVQRLLKINIKDGKKHDYIFGGLVVCSDCDHVMSGCQQRSGGRVRADGTRTIYKYSCYRCRQGVNLHRCPNCKIVMESTLEAMLLDRIRPELEKYIADYEVANLPALRTDAKRRSIESKMQKLKDLYLNDLITMDEFKVDREKLLIQLEKISAEETRPVKDLSYLRNFLKMDFESVYDSFSIPEKRELWRSIIREIRVDHEKNIQIIFL

SEQ ID NO: 7978 - protein, 463 aa, Unknown
  Description of Unknown: Integrase B7979 sequence
  PTHR30461:SF3,SM00857,IPR006118,IPR036162,PF13408, IPR025827,PS51737,G3DSA:3.40.50.1390,Coil,IPR006119, IPR011109,SSF53041,PTHR30461,PS00397,PS51736, cd00338,PF00239
MPSKIERCAIYIRVSTAEQMMHGKSLEAQKQYLTNYAKEHNMTIVGVYADEGKTARKELKKRKAIHSLLEDVKAGKIDVIIFWRIDRWFRNLSDFYKVQEALDDNNVRWISTSEPGINMETRDGRLQLNVVLSIGQNEVDTTSERIKFVNEASIRQGKLIFGDVNMGYGYKSGIIDGVKRMVKDPDREDTVNAFYRFFFKHHAKGLSMRYIQENYDPDFTWANMRTLLSSEFYKGTYRGIPYCPAYLTESEWNNLQEIQNANVKRAPSGRIYLFSGMINCPICGRRLSARGGSSIINRKTGAKKVYCYYRCNKAFIDHKCTYKHMVSQNLIEQYLIDHLEYEYNKFKIKCEKIEKEQEKKKKIQTPEKLQKELERLNLLFQKGRIEWDYYSKEYDRIENELNELLNAAPELEPDYSYLEELLNTDFRTMYYNLTQENRRAFWHSIIREIHLNTDHTVDSVDFL

SEQ ID NO: 7979 - protein, 463 aa, Unknown
  Description of Unknown: Integrase B7980 sequence
  PTHR30461:SF3,IPR036162,PS51737,IPR011109,PTHR30461, PS00397,PF00239,G3DSA:1.10.10.2600,IPR006119,SSF53041, SM00857,IPR025827,IPR038109,PS51736,cd03768, IPR006118,PF13408,G3DSA:3.40.50.1390,PF07508,Coil
MNVFCYVRVSTENQLENYSIEEQTKRLQAYCLAKGWNILKVYTDGGFSGGNLNRPALNMMLHDLHHGAAQAVVVYKLDRLSRSQKDTLTLIEDEFEKNQIAFVSISENFDTSTPFGRAMIGMLSVFAQLEKDQIVERFTMGRIGRSKAGYFHGGGNAPHGYRYENGRLVVEEPTAALVQEVYRSFLDGKSIHAIHQNMVRRGVPWSARAVMNMLKNSVYIGKVKFQGKEYPGLHAPIVSGEQYQAVQAILQSSGREQKKNTAQKTPFRAGYLLSSLIFCDRCGARYSANHGYYKCYSRSKSSKKFIKDPACKNDNWEISELDQHVIQAVQNLIHHDDILKQVLQTSPVKEPTMDEEMAERQIAEIDRQLARVIELYQLDTIPMEEVAKRTRELSAKKELLQNQGNRKGAATNRSRAAFLESIRQFDAHFFDAPTERKRLLISSLIESIRINGDQIAIHWRIGS

SEQ ID NO: 7980 - protein, 463 aa, Unknown
  Description of Unknown: Integrase B7981 sequence
  PTHR30461:SF3,SM00857,IPR006118,IPR036162,PF13408, PS51737,G3DSA:3.40.50.1390,IPR025827,PS00397,IPR006119, IPR011109,SSF53041,PTHR30461,Coil,PS51736, cd00338,PF00239
MPSKIERCAIYIRVSTAEQMMHGKSLEAQKQYLTNYAKEHNMTVAGVYADEGKTARKELKKRKAIHSLLEDVKAGKIDVIIFWRIDRWFRNLSDFYKVQEVLDDNNVRWISTSEPGINMETRDGRLQLNVVLSIGQNEVDTTSERIKFVNEASIRQGKLIFGDVNMGYGYKSGIIDGVKRMVKDPDREDTVNAFYRFFFKHHAKGLSMRYIQENYDPDFTWANMRTLLSSEFYKGTYRGIPYCPAYLTESEWNNLQEIQNANVKRAPSGRIYLFSGMINCPICGRRLSARGGSSIINRKTGAKKVYCYYRCNKAFIDHKCTYKHMVSQNLIEQYLIDHLEYEYNKFKIKCEKIEKEQEKKKKVQTPEKLQKELERLNLLFQKGRIEWDYYSKEYDRIENELNELLNTAPELEPDYAYLEELLNTDFRTMYYNLTQENRRAFWHSIIREIHLNTDHTVDSVDFL

SEQ ID NO: 7981 - protein, 463 aa, Unknown
  Description of Unknown: Integrase B7982 sequence
  PTHR30461:SF3,SM00857,IPR006118,IPR036162,PF13408, PS51737,G3DSA:3.40.50.1390,PS00397,IPR025827,IPR006119, IPR011109,SSF53041,PTHR30461,Coil,PS51736, cd00338,PF00239
MPSKIERCAIYIRVSTAEQMMHGKSLEAQKQYLTNYAKEHNMTVAGVYADEGKTARKELKKRKAIHSLLEDVKAGKIDVIIFWRIDRWFRNLSDFYKVQEVLDDNNVHWISTSEPGINMETRDGRLQLNVVLSIGQNEVDTTSERIKFVNEASIRQGKLIFGDVNMGYGYKSGIIDGVKRMVKDPDREDAVNAFYRFFFKHHAKGLSMRYIQENYDPDFTWANMRTLLSSEFYKGTYRGIPYCPAYLTESEWNNLQEIQNANVKRAPSGRIYLFSGMINCPICGRRLSARGGSSIINRKTGAKKVYCYYRCNKAFIDHKCTYKHMASQNLIEQYLIDHLEYEYNKFKIKCEKIEKEQEKKKKVQTPEKLQKELERLNLLFQKGRIEWDYYSKEYDRIENELNELLNTAPELEPDYAYLEELLNTDFRTMYYNLTQENRRAFWHSIIREIHLNTDHTVDSVDFL

SEQ ID NO: 7982 - protein, 463 aa, Unknown
  Description of Unknown: Integrase B7983 sequence
  PTHR30461:SF3,SM00857,IPR006118,IPR036162,PF13408, PS51737,G3DSA:3.40.50.1390,IPR025827,PS00397,IPR006119, IPR011109,SSF53041,PTHR30461,Coil,PS51736, cd00338,PF00239
MPSKIKRCAIYIRVSTAEQMMHGKSLEAQKQYLTNYAKEHNMTVAGVYADEGKTARKELKKRKAIHSLLEDVKAGKIDVIIFWRIDRWFRNLSDFYKVQEVLDDNNVHWISTSEPGINMETRDGRLQLNVVLSIGQNEVDTTSERIKFVNEASIRQGKLIFGDVNMGYGYKSGIIDGVKRMVKDPDREDTVNAFYRFFFKHHAKGLSMRYIQENYDPDFTWANMRTLLSSEFYKGTYRGIPYCPAYLTESEWNNLQEIQNANVKRAPSGRIYLFSGMINCPICGRRLSARGGSSIINRKTGAKKVYCYYRCNKAFIDHKCTYKHMVSQNLIEQYLIDHLEYEYNKFKIKCEKIEKEQEKKKKVQTPEKLQKELERLNLLFQKGRIEWDYYSKEYDRIENKLNELLNVAPELEPDYAYLEELLNTDFRTMYYNLTQENRRAFWHSIIRKIHLNTDHTVDSVDFL

SEQ ID NO: 7983 - protein, 463 aa, Unknown
  Description of Unknown: Integrase B7984 sequence
  PTHR30461:SF3,SM00857,IPR006118,IPR036162,PS51737, PS00397,G3DSA:3.40.50.1390,IPR006119,IPR011109,SSF53041, PTHR30461,Coil,PS51736,cd00338,PF00239
MTTKVERCAIYIRVSTTEQMMHGKSLEAQKEYLTNYAREHNMAIVGVYADEGKTARKELKKRKAIHSLLQDVEAGKIDVIIFWRIDRWFRNLSDFYKVQDILDSHNVRWISTSEPGINMETRDGRLQLNVVLSIGQNEVDTTSERIKFVNESSIRSGKLIFGDANMGYGYKSGIVDGQKRMVKDPDREHVVDAFYKYFFKHQNKCATLRYIQETYDPDFSFGIMRTLLSSEFYKGTYRGFPYCPAYLTEDEWNKLQKIQKRNVKATPSGRIYLFAGMIRCPVCGQLLCGTGCSSIINRKTGAKRTYCYYRCNRAMIDHICSYRHRLSQNIVENYLLDNLENEYKNYKVKCEKIEKEKEKQKKKQSPDKLRKELDRLNFLFQKGRIEWDYYNEEYSRVESELNNLQKVLPEPAPNYSYLEELLNTDFRTMYDQLSQENRRAFWRSIIQEIHINEDSTITSVDFL

SEQ ID NO: 7984 - protein, 463 aa, Unknown
  Description of Unknown: Integrase B7985 sequence
  cd00338,SM00857,G3DSA:1.10.10.2600,IPR036162, PS51737,G3DSA:3.40.50.1390,IPR006119,IPR038109, PF07508,IPR011109,SSF53041,PTHR30461, PS51736,Coil,PF00239
MNNVAIYCRESTEKQNIDTLVSLCEKEAKKLGYSNYKIYKDIKSGYSKDREEYAKLKEDIKDEKINVVILYESSRITRDEIEHHMFYALLKLYDVKVYTLNHGWIDLTNEDDCFLAGLLNLLDAREGRKTAKRVKDRMEEMAKNGFWTGGPAPFGYKLVDKKLIIEPEEAEKVKEIFKLFLEGKTRFSLSALFGFECKRVMRMLVNPVYNGKLKFRQIEFKNKKRIEHKQFDILPGIHKPIIDDYTFKLVQEKVKNIKRETNKESYIFKDLLICTCGEKMYLHKKKYFYKKEIPEITNAYLCKSSDKKIRNCSLSCIHEEELFKNVIESLEELILSFNVNNINTSKNDFEKQLKYYKKELSSLSTKEEVLVRQLMNGKLSEKLYEKFITELSENKEFIENKINSLTKVINSQEAKKNNKIILKKYFNKIKKEKDPEKLNAFFKLIIDSIEFVNDYRFYIHLKF

SEQ ID NO: 7985 - protein, 463 aa, Unknown
  Description of Unknown: Integrase B7986 sequence
  PTHR30461:SF3,IPR036162,PS51737,IPR011109,PTHR30461, PS00397,PF00239,G3DSA:1.10.10.2600,IPR006119,SSF53041, cd00338,SM00857,IPR025827,IPR038109,PS51736, IPR006118,PF13408,G3DSA:3.40.50.1390,Coil
MRRKTTAPVEKILLRVAIYIRVSTDKQVKDGDSMRDQLATGQKYIDSHENMILVDTYIDDGISGQKLKRDDFQRLIDDVRAGRIDLIIFTRLDRWFRNLRHYLNTQDILDKHGVSWTAIEQPYFDTSTPHGRAFVNNSMIWAELEAQNDSDRILGVFDDKVDNGEVLSGSTPLGYAIVNKHLVPDDDAPTAVAIFQYYRKTGNLSMTLRYMESEFGLVRSAASLKNMLTNTKYIGEFRDNKNYCPAIIDRDLFFDVQRLLKINIKSGKKHDYIFSGLVVCDDCDHIMSGCQQRAGGRVRADGTRIVYKYSVYRCRQGVNLHRCPNRKLVFETTLEKMLLERIRPELENYIAEYEVANLPALRTDAKRRSVEGKMQKLKDLYLNDLITMDEFKLDREKLLMQLEKINAEDSRPVKDLSYLKNFLKMDFESVYDSLSIPERRELWRSIVKEIRVDHDKNIHIIFL

SEQ ID NO: 7986 - protein, 463 aa, Unknown
  Description of Unknown: Integrase B7987 sequence
  PTHR30461:SF3,IPR036162,PS51737,IPR011109,PTHR30461, PS00397,PF00239,G3DSA:1.10.10.2600,IPR006119,SSF53041, cd00338,SM00857,IPR025827,IPR038109,PS51736, IPR006118,PF13408,G3DSA:3.40.50.1390,Coil
MRRKTTAANQKILLRAAIYIRVSTDQQAKDGDSLRDQMSTAQKYINDHENMILVDTYIDDGISGQKLKRDDFQRLMDDIRADRIDLVVFTRLDRWFRNLRHYLNTQDILDRHNVSWTAIDQPYFDTSSPHGRAFVNNSMIWAELEAQNDSDRIRSVFADKVKNGEVLSGNTPLGYHIVNKHLEPDENAPIAVDLFHYYQKSGNLVQTLRYMENEHGLLRSLASLKNMLTNTKYIGIFRDNENYCPAIIDPELFYDVQRLLKINIKSGNHHEYIFSGLVICSDCNHIMSGCQKHQTGRPRKDGTKIKYQYSSYRCRQGYSLHRCENRKIMLETTLERYLLKHIRPDLEKHLATYEVSNLPAVRTDTKRKNLENKLQKLKELYLNDLLTLNEYKTDREKIQLQLDQINSEESQPVKDLSFLYKFLNMDFESVYDSFTIPEKRELWRSVIREIRIDHDKNIEIVFL

SEQ ID NO: 7987 - protein, 463 aa, Unknown
  Description of Unknown: Integrase B7988 sequence
  PTHR30461:SF3,cd00338,SM00857,IPR036162,PF13408, IPR025827,PS51737,G3DSA:3.40.50.1390,IPR006119,IPR011109, SSF53041,PTHR30461,PS51736,Coil,PF00239
MSFFTPNPQLFGLRVVKYIRCSHDDQVLHGDTLEAQDLILEDFIKVNRMILVDTFIDEALTARKRFNKRKEFVRLLNGVKAHDFDLIIFTKLDRWFRNIGDYHKIQEILEANGVQWKAVTENYDTTTTNGRLHINIRLSVAQDECDRDSDRIKDVFAYKLKNKTYVSGSLPRGLKLDAEKHVIIDPEWNCFALDMFDRFEATCSKRDTQLFLQEKYNIRVCYDTVARYLKNPLFKGQYRDDPDFCPATISPERFERIQKLAIRNVRIRHTQQFYIFSGLLICSSCNHYMCGTVTYRRMADGSEKMYKNYRCNFKAQSKLCDRGKTYREADLEEYMLAHIRPALSDYIAKYEVTAASTVQKNPVTEIAKIERKMKKLYDLFMDDLIDKEAYRSEYDKFKAQIEELQKCSTAAPMRSLDSVKKLLSEDWEAVYHTFSDLEKNTFWKSFVESVLVYEDGSMDIRFL

SEQ ID NO: 7988 - protein, 463 aa, Unknown
  Description of Unknown: Integrase B7989 sequence
  PTHR30461:SF3,SM00857,IPR006118,IPR036162,PF13408, IPR025827,G3DSA:3.40.50.1390,Coil,PS51737,IPR006119, SSF53041,IPR011109,PTHR30461,PS00397, PS51736,cd00338,PF00239
MSEKIKRCAIYIRVSTSEQMMHGKSIEAQREYLACYAKDHGMIVTGIYADEGKTARKELKKRKAIHALLEDVKAGKIDVILFWRLDRWFRNMSDFYKVQDILDEYGVYWISASEPGINMETRDGRLQLNVVLSIGQNEVDTTSERIKFVNEASIRQGKVIFGENNMPRGYKVGIVDGKKCMVKDPEQEEMVNAFYDYFEKHQAKQQTLRFIQRNYDPAFSYGMLRTMLSSEFYKGTYRGIPYCPAYLSEERWAHIQNISKKSIRHTRSGRVYYFTGLIRCPQCGQILCGTGCKSIVNKKTGEKRDYCYYRCNRAMIDRICTNQHRVSQNLIESYLLDNLENEFKTYKIRVENVKQQKKKAPPVRTEKQIDKELDRLNLLFQKGRIEWDYYSREYDSLEKEKEDLNSVTVDPEPDYSFIETLLQQDFRDIYRSLTPENKRAFWKNTIRQIYLKSDYTIDYVDFI

SEQ ID NO: 7989 - protein, 463 aa, Unknown
  Description of Unknown: Integrase B7990 sequence
  PTHR30461:SF3,cd00338,SM00857,IPR036162,PF13408, IPR025827,PS51737,G3DSA:3.40.50.1390,IPR006119,IPR011109, SSF53041,PTHR30461,PS51736,Coil,PF00239
MSFFTPNPQLFGLRVVKYIRCSHDDQVLHGDTLEAQDLILEDFIKVNRMILVDTFIDEALTARKKFNKRKEFVRLLDGVKAHTFDLIIFTKLDRWFRNIGDYHKIQEILEANGVQWKAVTENYDTTTTNGRLHINIRLSVAQDECDRDSDRIKDVFAYKLKNKTYVSGSLPRGLKLDAEKHVIIDPEWNCFALDMFDRFEATCSKRDTQLFLQEKYNIRVCYDTVARYLKNPLFKGQYRDDPDFCPATISPERFERIQKLAIRNVRIRHTQQFYIFSGLLICSSCNHYMCGTATYRRMADGSEKMYKNYRCNFKAQSKLCDRGKTYREADLEEYMLAHIRPALSDYIAKYEVTAASTVQKNPVTEIAKIERKMKKLYDLFMDDLIDKEAYRSEYDKFKAQIEELQKCSTAAPMRSLDSVKKLLSEDWEAVYHTFSDQEKNTFWKSFVESVLVYEDGSMDIRFL

SEQ ID NO: 7990 - protein, 463 aa, Unknown
  Description of Unknown: Integrase B7991 sequence
  cd00338,SM00857,G3DSA:1.10.10.2600,IPR036162, PS51737,G3DSA:3.40.50.1390,IPR006119,IPR038109, PF07508,IPR011109,SSF53041,PTHR30461, PS51736,Coil,PF00239
MNNVAIYCRESTEKQNIDTLVSLCEKEAKKLGYSDYKVYKDIKSGYSKDREEYTKLKEDIKDEKINVVILYESSRITRDEIEHHMFYALLKLYNVKVYTLNHGWIDLTNEDDCFLAGLLNLLDAREGRKTAKRVKDRMEEMAKNGFWTGGPAPFGYKLVDKKLIIEPEEAEKVREIFKLFLEGKTRFSLSALFGFECKRVMRMLVNPVYNGKLKFRQIEFKNKKRIEHKQFDILPGIHEPIIDDYTFKLVQDKVKNIKRETKKDTYIFKDLLICACGEKMYLYKKKYFYKREIPEITNTYLCKSSNKKIRNCSLSYVREEKLFLNVMESLENLILSFAINDIDTNKDGFEKQLRYYQKELSSLSTKEEILVRQLMNGKLSEKLYEKFMSELSENKEFIENKINSLTKVINSREAKKNNKIILKKYFNKIKKEKDPEKLNAFFKLIIDSIEFINDYRFYIHLKF

SEQ ID NO: 7991 - protein, 463 aa, Unknown
  Description of Unknown: Integrase B7992 sequence
  PTHR30461:SF3,SM00857,IPR006118,IPR036162,PF13408, PS51737,IPR025827,PS00397,G3DSA:3.40.50.1390,IPR006119, IPR011109,SSF53041,PTHR30461,Coil,PS51736, cd00338,PF00239
MPSKIERCAIYIRVSTAEQMMHGKSLEAQKQYLTNYAKEHNMTVVGVYADEGKTARKELKKRKAIHALLEDVKAGKIDVIIFWRIDRWFRNLSDFYKVQEVLDDNNVRWISTSEPGINMETRDGRLQLNVVLSIGQNEVDTTSERIKFVNEASIRQRKLIFGDVNMGYGYKSGIIDGVKRMVKDPDREDAVNAFYRFFFKHHAKGLSMRYIQENYDPDFTWANMRTLLSSEFYKGTYRGIPYCPAYLTESEWNNLQEIQNANVKRAPSGRIYLFSGMINCPICGRRLSARGGSSIINRKTGAKKVYCYYRCNKAFIDHKCSYRHMVSQNLIERYLIDHLEYEYNKFKIKCEKIEKEQEKKKKVQTPEKLQKELERLNLLFQKGRIEWDYYSKEYDRIENELNELLNAAPELEPDYAYLEELLNTDFRTMYYNLTQENRRAFWHSIIREIHLNTDHTVDSVDFL

SEQ ID NO: 7992 - protein, 463 aa, Unknown
  Description of Unknown: Integrase B7993 sequence
  cd03768,PTHR30461:SF3,SM00857,G3DSA:1.10.10.2600,IPR036162, PS51737,G3DSA:3.40.50.1390,IPR006119,IPR038109,PF07508, IPR011109,SSF53041,PTHR30461,PS51736,Coil, PF00239
MKRVALYMRVSTQEQAENGNSLEFQKEKLEAYCKLHEYKIVGEYVDAGVSGAKFNRPALDRLKDDVEKIDVVLIYKLDRLSRSIKDTMLLIEDFFKPNKIDLISLSENFDTTQAIGMATVGMLSTFAQLERDTIKQRMMAGRVQAVKSGKYVCKVPYGYIKVEDKLIKDETTRECVEFIFKKALEGQSLYEIMYSLEKNGYGQYRKWSTSLIHKLLKRPVYRGHTTINNVLMKNTHEPYISEEEFVFMNKLFSDRKCHSSKSRRNKLPAIFRGLIHCPTCYRKLYPFTRTFKSGKCTTFYRCNFCGREKNIHFSFSEQTFEKKLLNYLKFDFSIDIKKAKTTKVDYSKKLSVLEHKKNKLQRAWLNDLLSDNELKNLQKEIDNQIQLINLKQKEYHDSLVNAKKQKNISGIVANFENIYSSLDIDKKTEFLNTIIQDIKTTITIEKRGKVHRSNISITNIIFK

SEQ ID NO: 7993 - protein, 463 aa, Unknown
  Description of Unknown: Integrase B7994 sequence
  PTHR30461:SF3,SM00857,IPR036162,PF13408,PS51737, G3DSA:3.40.50.1390,IPR025827,IPR006119,IPR011109,SSF53041, PF00239,PTHR30461,PS51736,Coil,cd00338
MNTYFHPQPELYGLRVVKYIRCSHEGQVLHGDTLEAQDTLLNEFIETNHMVLVDTFVDEALTARKRYTKRKEFVRLLDGVRTHAFDMILFTKLDRWFRNIGDYHKIQEILDANSVQWKAITESYDTTTTNGRLHINIRLSVAQDECDRDSDRIKDVFSYKLKNKTYISGSLPRGLMLDEEKHVIIDPAWHQFALDMFDHFEATGSKRGTLLYLQEKYDMRLCYDTVVRNLRNPLYKGMYRDDPGFCECTITPERFDRIQLLGRKNVRHRKTNRTYIFTGLLICSSCKHYLVGAATTATLAHGVKKEYRSYRCNQRYQSHSCDRARTYREQDVEDYLLGHVRPALSQYIAQYEVSSSSMQKKDPAADAAKIRRKLEKLYDLFMDDLIDKESYREKYDDLQDQLKKCQAVVPVPRRDLSEVKSLLAQNWEEIYQAFTAAEKNTFWKSFIESILVHEDGSMDISFL

SEQ ID NO: 7994 - protein, 463 aa, Unknown
  Description of Unknown: Integrase B7995 sequence
  PTHR30461:SF3,SM00857,IPR006118,IPR036162,PS51737, G3DSA:3.40.50.1390,IPR006119,IPR011109,SSF53041,PF00239, PTHR30461,PS00397,PS51736,Coil, cd00338
MTTKVERCAIYIRVSTTEQMMHGKSLEAQKEYLTNYAREHNMAVVGIYADEGKTARKELKKRKAIHSLLQDVEAGKIDVIIFWRIDRWFRNLSDFYKVQDILDSHNVRWISTSEPGINMETRDGRLQLNVVLSIGQNEVDTTSERIKFVNEASIRSGKLIFGDVNMGYGYKSGIVDGQKRMIKDPDREHVVDAFYKYFFKHQNKCATLRYIQETYDPDFSFGIMRTLLSSEFYKGTYRGFPYCPAYLTEDEWNKLQKIQKRNVKATPSGRIYLFAGMIRCPVCGQLLCGTGCSSIINRKTGAKRTYCYYRCNRAMIDHICSYRHRLSQNLVENYLLDNLENEYKNYKVKCEKIEKEKEKQKKKQSPEKLRKELDRLNFLFQKGRIDWDYYNEEYGRIESELNDLQSTLPEPVTNYSYLEELLDTDFRTMYDQLSQENRRAFWRSIIQEIHINEDSTITSVDFL

SEQ ID NO: 7995 - protein, 463 aa, Unknown
  Description of Unknown: Integrase B7996 sequence
  PTHR30461:SF3,IPR036162,PS51737,IPR011109,PTHR30461, PS00397,PF00239,G3DSA:1.10.10.2600,IPR006119,SSF53041, cd00338,SM00857,IPR025827,IPR038109,PS51736, IPR006118,PF13408,G3DSA:3.40.50.1390,Coil
MRRKTTAPVEKILLRVAIYIRVSTDKQVKDGDSMRDQLATGQKYIDSHENMILVDTYIDDGISGQKLKRDDFQRLIDDVRAGRIDLIIFTRLDRWFRNLRHYLNTQDILDKHGVSWTAIEQPYFDTSTPHGRAFVNNSMIWAELEAQNDSDRILGVFDDKVDNGEVLSGSTPLGYTIVNKHLVPDDDAPTSVAIFQYYRKTGNLSMTLRYMESEFGLVRSAASLKNMLTNTKYIGEFRDNKNYCPAIIDRDLFFDVQRLLKINIKSGKKHDYIFSGLVVCDDCDHIMSGCQQRAKGRVRADGTRIIYKYSVYRCRQGVNLHRCPNRKLVFEATLEKMLLERIRPELENYIAEYEVANLPALRTDAKRRSVEGKMQKLKDLYLNDLITMDEFKLDREKLLMQLEKINAEDSRPVKDLSYLKNFLKMDFESVYDSLSIPERRELWRSIVKEIRVDHDKNIHIIFL

SEQ ID NO: 7996 - protein, 463 aa, Unknown
  Description of Unknown: Integrase B7997 sequence
  PTHR30461:SF3,cd00338,SM00857,IPR036162,PF13408, IPR025827,PS51737,G3DSA:3.40.50.1390,IPR006119,SSF53041, IPR011109,PTHR30461,PS51736,Coil,PF00239
MNTYFHPQPELYGLRVVKYIRCSHEGQVLHGDTLEAQDALLNEFIEANHMVLVDTFVDEALTARKKFTKRKEFVRLLNGVRAHAFDMILFTKLDRWFRNIGDYHKIQEILDANGVQWKAITESYDTTTTNGRLHINIRLSVAQDECDRDSDRIKDVFSYKLKNKSYISGRLPRGLKLDADKHIIHDPEWKQWALDMFDHFESSGSIYSTFLFLTNKYGPLLRYDGVSRALKNPLYKGMYRDDPEFCEPLISPERFDHLLGLAKKNVRQRKTRRYYIFTGLLVCSSCQHNLVPYTVPHTLADGTHEDYISYRCGYHSSSRLCDRSRTYREEYIEQYLLDHVRPALSRYIAEYDVVSSSASKKDPAAEAAKIRRKLEKLYDLFLDDLIEKDLYRQKYDELQAQLKECLAAPSAPVRDFSAVQELLSKNWEDMYCTFSKTEKNVFWKSFVESITVYEDGSMDINFL

SEQ ID NO: 7997 - protein, 463 aa, Unknown
  Description of Unknown: Integrase B7998 sequence
  PTHR30461:SF3,SM00857,IPR006118,IPR036162,PS51737, G3DSA:3.40.50.1390,IPR006119,IPR011109,SSF53041,PF00239, PTHR30461,PS00397,PS51736,Coil, cd00338
MTTKVERCAIYIRVSTTEQMMHGKSLEAQKEYLTNYAKEHNMAVVGVYADEGKTARKELKKRKAIHSLLQDVEAGKIDVIIFWRIDRWFRNLSDFYKVQDILDSHNVRWISTSEPGINMETRDGRLQLNVVLSIGQNEVDTTSERIKFVNEASIRSGKLIFGDVNMGYGYKSGIVDGQKRMIKDPDQEHVVDAFYKYFFKHQNKCATLRYIQETYDPDFSFGIMRTLLSSEFYKGTYRGFPYCPAYLTEDEWSTLQKIQKRNVKATPSGRIYLFAGLIRCPVCGQLLCGTGCSSIINRKTGAKRTYCYYRCNRAMIDHICSYRHRLSQNLVENYLLDNLEDEYKNYKVKCEKIEKEKEKQKKKQSPEKLRKELDRLNFLFQKGRIEWDYYNEEYSRVESELNNLQKVLPEPAPNYSYLEELLNTDFRTMYDQLSQENRRAFWRSIIQEIHINEDSTITSVDFL

SEQ ID NO: 7998 - protein, 463 aa, Unknown
  Description of Unknown: Integrase B7999 sequence
  PTHR30461:SF3,IPR036162,PS51737,IPR011109,PTHR30461, PS00397,PF00239,G3DSA:1.10.10.2600,IPR006119,SSF53041, cd00338,SM00857,IPR025827,IPR038109,PS51736, IPR006118,PF13408,G3DSA:3.40.50.1390,Coil
MRRKTTAPVEKILLRVAIYIRVSTDKQVKDGDSMRDQLATGQKYIDSHENMILVDTYIDDGISGQKLKRDDFQRLIDDVRAGRIDLIIFTRLDRWFRNLRHYLNTQDILDKHGVSWTAIEQPYFDTSTPHGRAFVNNSMIWAELEAQNDSDRILGVFDDKVDNGEVLSGSTPLGYTIVNKHLVPDDDAPTAVAIFQYYRKTGNLSMTLRYMESEFGLVRSAASLKNMLTNTKYIGEFRDNKNYCPAIIDRDLFFDVQRLLKINIKSGKKHDYIFSGLIVCDDCDHIMSGCQQRAGGRVRADGTRIVYKYSVYRCRQGVNLHRCPNRKLVFETTLEKMLLERIRPELENYIAEYEVANLPALRTDAKRRSVEGKMQKLKDLYLNDLITMDEFKLDREKLLMQLEKINAEDSRPVKDLSYLKNFLKMDFESVYDSLSIPERRELWRSIVKEIRVDHDKNIHIIFL

SEQ ID NO: 7999 - protein, 463 aa, Unknown
  Description of Unknown: Integrase B8000 sequence
  PTHR30461:SF3,IPR036162,PS51737,IPR011109,PTHR30461, PS00397,PF00239,G3DSA:1.10.10.2600,IPR006119,SSF53041, cd00338,SM00857,IPR025827,IPR038109,PS51736, IPR006118,PF13408,G3DSA:3.40.50.1390,Coil
MRRKTTAPVEKILLRVAIYIRVSTDKQVKDGDSMRDQLATGQKYIDSHENMILVDTYIDDGISGQKLKRDDFQRLIDDVRAGRIDLIIFTRLDRWFRNLRHYLNTQDILDKHGVSWTAIEQPYFDTSTPHGRAFVNNSMIWAELEAQNDSDRILGVFDDKVDNGEVLSGSTPLGYAIVNKHLVPDDDAPTAVAIFQYYRKTGNLSMTLRYMESEFGLVRSAASLKNMLTNTKYIGEFRDNKNYCPAIIDRNLFFDVQRLLKINIKSGKKHDYIFSGLVVCDDCDHIMSGCQQRAGGRVRADGTRIVYKYSVYRCRQGVNLHRCPNRKLVFETTLEKMLLERIRPELENYIAEYEVANLPALRTDAKRRSVEGKMQKLKDLYLNDLITMDEFKLDREKLLMQLEKINAEDSRPVKDLSYLKNFLKMDFESVYDSLSIPERRELWRSIVKEIRVDHDKNIHIIFL

SEQ ID NO: 8000 - protein, 463 aa, Unknown
  Description of Unknown: Integrase B8001 sequence
  PTHR30461:SF3,SM00857,IPR006118,IPR036162,PF13408, IPR025827,G3DSA:3.40.50.1390,PS00397,PS51737,IPR006119, SSF53041,IPR011109,PTHR30461,Coil,PS51736, cd00338,PF00239
MPSKIERCAIYIRVSTAEQMMHGKSLEAQKQYLTNYAKEHNMTVVGVYADEGKTARKELKKRKAIHSLLEDVKAGKIDVIIFWRIDRWFRNLSDFYKVQEVLDDNNVRWISTSEPGINMETRDGRLQLNVVLSIGQNEVDTTSERIKFVNEASIRQGKLIFGDVNMGYGYKSGIIDGVKRMVKDPDREDTVNAFYRFFFKHHAKGLSMRYIQENYDPDFTWANMRTLLSSEFYKGTYRGIPYCPAYLTESEWNTLQEIQNANVKRAPSGRIYLFSGMINCPICERRLSARGGSSIINRKTGAKKVYCYYRCNKAFIDHKCTYKHMVSQNLIEQYLIDHLEYEYNKFKIKCEKIEKEQEKKKKVQTPEKLQKELERLNLLFQKGRIEWDYYSKEYDRIENELNELLNVAPELEPDYAYLEELLNTDFRTMYYNLTQENRRAFWHSIIREIHLNTDHTVDSVDFL

SEQ ID NO: 8001 - protein, 463 aa, Unknown
  Description of Unknown: Integrase B8002 sequence
  PTHR30461:SF3,cd00338,SM00857,IPR036162,PF13408, IPR025827,G3DSA:3.40.50.1390,PS51737,IPR006119,SSF53041, IPR011109,PTHR30461,PS51736,Coil,PF00239
MNTYFHPQPELYGLRVVKYIRCSHEGQVLHGDTLEAQDTLLNEFIEANHMVLVDTFVDEALTARKRYTKRKEFVRLLDGVRAHAFDMILFTKLDRWFRNIGDYHKIQEILDANSVQWKAITESYDTTTTNGRLHINIRLSVAQDECDRDSDRIKDVFAYKLKNKSYISGRLPRGLKLDADKHIIHDPEWKQWALDMFDHFESSGSIYSTFLFLTNKYGPLLRYDGVSRALKNPLYKGMYRDDPEFCDPLIDPERFDHLLELAKKNVRQRKTRRYYIFTGLLVCSSCQHNLVPYTIPHTLADGTHKDYVSYRCGYHSSSRLCDRSRTYREEYIEQYLLDHVRPALSRYIAEYDVVSSSTSKKDPAAEAAKIRHKLEKLYDLFLDDLIEKDLYRQKYDDLQAQLNECLEVPSAPVRDFSAVQELLSKNWEDMYCTFSKAEKNVFWKSFVESIIVYEDGSMDINFL

SEQ ID NO: 8002 - protein, 463 aa, Unknown
  Description of Unknown: Integrase B8003 sequence
  PTHR30461:SF3,SM00857,IPR006118,IPR036162,PF13408, PS51737,IPR025827,Coil,G3DSA:3.40.50.1390,IPR006119, IPR011109,SSF53041,PTHR30461,PS00397, PS51736,cd00338,PF00239
MPSKIERCAIYIRVSTAEQMMHGKSLEAQKQYLTNYAKEHNMTVAGVYADEGKTARKELKKRKAIHSLLEDVKAGKIDVIIFWRIDRWFRNLSDFYKVQEVLDDNNVHWISTSEPGINMETRDGRLQLNVVLSIGQNEVDTTSERIKFVNEASIRQGKLIFGDVNMGYGYKSGIIDGVKRMVKDPDREDTVNAFYRFFFKHHAKGLSMRYIQENYDPDFTWANMRTLLSSEFYKGTYRGIPYCPAYLTESEWNNLQEIQNANVKRAPSGRIYLFSGMINCPICGRRLSARGGSSIINRKTGAKKVYCYYRCNKAFIDHKCTYKHMVSQNLIERYLIDHLEYEYNKFKIKCEKIEKEQEKKKKVQTPEKLQKELERLNLLFQKGRIEWDYYSKEYDRIENELNELLNTAPELEPDYAYLEELLNTDFRTMYYNLTQENRRAFWHSIIREIHLNTDHTVDSVDFL

SEQ ID NO: 8003 - protein, 463 aa, Unknown
  Description of Unknown: Integrase B8004 sequence
  PTHR30461:SF3,SM00857,IPR006118,IPR036162,PS51737, G3DSA:3.40.50.1390,Coil,IPR006119,IPR011109,SSF53041, PTHR30461,PS00397,PS51736,cd00338,PF00239
MTTKVERCAIYIRVSTTEQMMHGKSLEAQKEYLTNYAREHNMAVVGVYADEGKTARKELKKRKAIHSLLQDVEAGKIDVIIFWRIDRWFRNLSDFYKVQDILDSHNVRWISTSEPGINMETRDGRLQLNVVLSIGQNEVDTTSERIKFVNESSIRSGKLIFGDVNMGYGYKSGIVDGQKRMIKDPDREHVVDAFYKYFFKHQNKCATLRYIQETYDPDFSFGIMRTLLSSEFYKGTYRGFPYCPAYLTEDEWSTLQKIQKRNVKATPSGRIYLFAGLIRCPVCGQLLCGTGCSSIINRKTGAKRTYCYYRCNRAMIDHICSYRHRLSQNLVENYLLDNLENEYKNYKVKCEKIEKEKEKQKKKQSPDKLRKELDRLNFLFQKGRIDWDYYNEEYGRVESELNDLQSALPEPVTNYSYLEELLDTDFRTMYDQLSQENRRAFWRSIIQEIHINEDSTITSVDFL

SEQ ID NO: 8004 - protein, 463 aa, Unknown
  Description of Unknown: Integrase B8005 sequence
  PTHR30461:SF3,SM00857,IPR006118,IPR036162,PS51737, G3DSA:3.40.50.1390,IPR006119,IPR011109,SSF53041,PF00239, PTHR30461,PS00397,PS51736,Coil, cd00338
MTDKIERCAIYIRVSTTEQMMHGKSLEAQKEYLTNYAREHNMAVVGVYADEGKTARKEFKKRKAIHSLLRDVEAGKIDVIIFWRIDRWFRNLSDFYKVQDILDSHNVRWISTSEPGINMETRDGRLQLNVVLSIGQNEVDTTSERIKFVNESSIRSGKLIFGDANMGYGYKSGIVDGQKRMVKDPDREHVVDAFYKYFFKHQNKCATLRYIQETFDPDFSFGIMRTLLSSEFYKGTYRGFPYCPAYLTEDEWNKLQKIQKRNVKATPSGRIYLFAGMIRCPVCGQLLCGTGCSSIINRKTGAKRTYCYYRCNRAMIDHICSYRHRLSQNLVENYLLDNLENEYKNYKVKCDKIEKEKEKQKKKQSPEKLRKELDRLNFLFQKGRIDWDYYNEEYGRVESELNDLQSALPEPVTNYGYLEELLDTDFRTMYDQLSQENRRAFWRSIIQEIHINEDSTITSVDFL

SEQ ID NO: 8005 - protein, 463 aa, Unknown
  Description of Unknown: Integrase B8006 sequence
  PTHR30461:SF3,SM00857,IPR006118,IPR036162,PF13408, PS51737,G3DSA:3.40.50.1390,IPR025827,PS00397,IPR006119, IPR011109,SSF53041,PTHR30461,Coil,PS51736, cd00338,PF00239
MPSKIERCAIYIRVSTAEQMMRGKSLEAQKQYLTNYAKEHNMTVAGVYADEGKTARKELKKRKAIHSLLEDVKAGKIDVIIFWRIDRWFRNLSDFYKVQEVLDDNNVRWISTSEPGINMETRDGRLQLNVVLSIGQNEVDTTSERIKFVNEASIRQGKLIFGDVNMGYGYKSGIIDGVKRMVKDPDREDTVNAFYRFFFKHHAKGLSMRYIQENYDPDFTWANMRTLLSSEFYKGTYRGIPYCPAYLTESEWNNLQEIQNANVKRAPSGRIYLFSGMINCPICGRRLSARGGSSIINRKTGAKKVYCYYRCNKAFIDHKCSYRHMVSQNLIERYLIDHLEYEYNKFKIKCEKIEKEQEKKKKVQTPEKLQKELERLNLLFQKGRIEWDYYSKEYDRIENELNELLNVAPELEPDYAYLEDLLNTDFRTMYYNLTQENRRAFWHSIIREIHLNTDHTVDSVDFL

SEQ ID NO: 8006 - protein, 463 aa, Unknown
  Description of Unknown: Integrase B8007 sequence
  PTHR30461:SF3,IPR036162,PS51737,IPR011109,PTHR30461, PS00397,PF00239,G3DSA:1.10.10.2600,IPR006119,SSF53041, cd00338,SM00857,IPR025827,IPR038109,PS51736, IPR006118,PF13408,G3DSA:3.40.50.1390,PF07508,Coil
MKRQTAKLNDKLLLRVAIYIRVSTDQQAQDGDSVRDQLATGQKYIENHENMILADTYVDDGISGQKVKRDDFQRLMNDVRAGSIDLIIFTRLDRWFRNLRHYLNTQDVLDKNGVSWTATEQPYFDTSTPHGRAFVNNSMIWAELEAQNDSDRILSVFDDKVDNSEVLSGSTPLGYRIENKHLVPDDDAPTAAAIFEYYRSNGNLAMTLRYMETEFGLIRSSASLKNMLTNTKYIGEFRTNKNYCPAIIDRDLFDDVQRLLKINIKSGKKHDYIFSGLVVCDECEHTMSGCQQRNSARILADGTRVVYKYNSYRCRQGITLHRCPNHKVMLESTLEKILLARIRPELENYIAEYEVANRPAMRTDSKRRNLEHKMQKLKELYLNDLITMDEFKVDREKILQQLDKIKSDDSQPVKDLSYLKNFLKTDFENIYGSLSIPEKRELWRSIIREIRVDHNRNVRIIFL

SEQ ID NO: 8007 - protein, 463 aa, Unknown
  Description of Unknown: Integrase B8008 sequence
  PTHR30461:SF3,SM00857,IPR006118,IPR036162,PS51737, G3DSA:3.40.50.1390,PS00397,IPR006119,IPR011109,SSF53041, PTHR30461,Coil,PS51736,cd00338,PF00239
MTTKVERCAIYIRVSTTEQMMHGKSLEAQKEYLTNYAREHNMAVVGIYADEGKTARKELKKRKAIHSLLQDVEAGKIDVIIFWRIDRWFRNLSDFYKVQDILDSHNVRWISTSEPGINMETRDGRLQLNVVLSIGQNEVDTTSERIKFVNEASIRNGKLIFGDVNMGYGYKSGIVDGQKRMVKDPDREHVVDAFYKYFFKHQNKCATLRYIQETYDPDFSFGIMRTLLSSEFYKGTYRGFPYCPAYLTEDEWNKLQKIQKRNVKATPSGRIYLFAGMIRCPVCGQLLCGTGCSSIINRKTGAKRTYCYYRCNRAMIDHICSYRHRLSQNLVENYLLDNLEDEYKNYKVKCEKIEKEKEKQKKKQSPEKLRKELDRLNFLFQKGRIDWDYYNEEYGRIESELNDLQSALPEPVTNYSYLEELLNTDFRTMYDQLSQENRRAFWRSIIQEIHVNEDHAIISVDFL

SEQ ID NO: 8008 - protein, 463 aa, Unknown
  Description of Unknown: Integrase B8009 sequence
  PTHR30461:SF3,SM00857,IPR006118,IPR036162,PF13408, IPR025827,PS51737,G3DSA:3.40.50.1390,PS00397,IPR006119, IPR011109,SSF53041,PTHR30461,Coil, PS51736,cd00338,PF00239
MPSKIERCAIYIRVSTAEQMMHGKSLEAQKQYLTNYAKEHNMTVAGVYADEGKTARKELKKRKAIHSLLEDVKAGKIDVIIFWRIDRWFRNLSDFYKVQEVLDDNNVHWISTSEPGINMETRDGRLQLNVVLSIGQNEVDTTSERIKFVNEASIRQGKLIFGDVNMGYGYKSGIIGGVKRMVKDPDREDAVNAFYRFFFKHHAKGLSMRYIQENYDPDFTWANMRTLLSSEFYKGTYRGIPYCPAYLTESEWNNLQEIQNANVKRAPSGRIYLFSGMINCPICGRRLSARGGSSIINRKTGAKKVYCYYRCNKTFIDHKCTYKHMVSQNLIEQYLIDHLEYEYNKFKIKCEKIEKEQEKKKKIQTPEKLQKELERLNLLFQKGRIEWDYYSKEYDRIENELNELLNAAPELEPDYAYLEELLNTDFRTMYYNLTQENRRAFWHSIIREIHLNTDHTVDSVDFL

SEQ ID NO: 8009 - protein, 463 aa, Unknown
  Description of Unknown: Integrase B8010 sequence
  PTHR30461:SF3,IPR036162,PS51737,IPR011109,PTHR30461, PS00397,PF00239,G3DSA:1.10.10.2600,IPR006119,SSF53041, cd00338,SM00857,IPR025827,IPR038109,PS51736, IPR006118,PF13408,G3DSA:3.40.50.1390,Coil
MRRKTTAPVEKILLRVAIYIRVSTDKQVKDGDSMRDQLATGQKYIDSHENMILVDTYIDDGISGQKLKRDDFQRLLDDVRAGRIDLIIFTRLDRWFRNLRHYLNTQDILDKHGVSWTAIEQPYFDTSTPHGRAFVNNSMIWAELEAQNDSDRILDVFDDKVDNGEVLSGSTPIGYKIESKHLVPDDDAPTAVSIFQYYRKSGNLSMTLRYMESEFGLVRSAASLKNMLTNTKYIGEFRDNKNYCPAIIDRDLFFDVQRLLDINIKDGKKHDYIFGGLVVCDDCDHIMSGCQQRSAGRIRADGTRTVYKYSVYRCRQGVNLHRCPNRKLVFEKTLESMLLDRVRPELENYIAEYEVANLPALRTDAKRRSVESKMQKLKDLYLNDLITMDEFKLDREKLLMQLEKINAEDSRPIKDLSYLKSFLKMDFESVYDSLSIPERRELWRSIVKEIRVDHDKNIHIIFL

SEQ ID NO: 8010 - protein, 463 aa, Unknown
  Description of Unknown: Integrase B8011 sequence
  PTHR30461:SF3,SM00857,IPR006118,IPR036162,PF13408, PS51737,G3DSA:3.40.50.1390,Coil,IPR025827,IPR006119, IPR011109,SSF53041,PTHR30461,PS00397,PS51736, cd00338,PF00239
MPSKIERCAIYIRVSTAEQMMHGKSLEAQKQYLTNYAKEHNMTVAGVYADEGKTARKELKKRKAIHSLLEDVKAGKIDVIIFWRIDRWFRNLSDFYKVQEVLDDNNVRWISTSEPGINMETRDGRLQLNVVLSIGQNEVDTTSERIKFVNEASIRQGKLIFGDVNMGYGYKSGIIDGIKRMVKDPDREDTVNAFYRFFFKHHAKGLSMRYIQENYDPDFTWANMRTLLSSEFYKGTYRGIPYCPAYLTESEWNNLQEIQNANVKRAPSGRIYLFSGMINCPICGRRLSARGGSSIINRKTGAKKVYCYYRCNKAFIDHKCTYKHMVSQNLIEQYLIDHLEYEYNKFKIKCEKIEKEQEKKKKVQTPEKLQKELERLNLLFQKGRIEWDYYSKEYDRIENELNELLNAAPELEPDYAYLEELLNTDFRTMYYNLTQENRRAFWHSIIREIHLNTDHTVDSVDFL

SEQ ID NO: 8011 - protein, 463 aa, Unknown
  Description of Unknown: Integrase B8012 sequence
  PTHR30461:SF3,SM00857,IPR006118,IPR036162,PF13408, PS51737,IPR025827,Coil,G3DSA:3.40.50.1390,IPR006119, IPR011109,SSF53041,PTHR30461,PS00397,PS51736, cd00338,PF00239
MPSKIERCAIYIRVSTAEQMMHGKSLEAQKQYLTNYAKEHNMTVAGVYADEGKTARKELKKRKAIHSLLEDVKAGKIDVIIFWRIDRWFRNLSDFYKVQEVLDDNNVRWISTSEPGINMETRDGRLQLNVVLSIGQNEVDTTSERIKFVNEASIRQGKLIFGDVNMGYGYKSGIIDGVKRMVKDPDREDTVNAFYRFFFKHHAKGLSMRYIQENYDPDFTWANMRTLLSSEFYKGTYRGIPYCPAYLTESEWNNLQEIQNANVKRAPSGRIYLFSGMINCPICGRRLSARGGSSIINRKTGAKKVYCYYRCNKAFIDHKCSYRHMVSQNLIERYLIDHLEYEYNKFKIKCEKIEKEQEKKKKIQTPEKLQKELERLNLLFQKGRIEWDYYSKEYDRIENELNELLNAAPELEPDYAYLEELLNTDFRTMYYNLTQENRRAFWHSIIREIHLNTDHTIDSVDFL

SEQ ID NO: 8012 - protein, 463 aa, Unknown
  Description of Unknown: Integrase B8013 sequence
  cd00338,SM00857,G3DSA:1.10.10.2600,IPR036162,PS51737, G3DSA:3.40.50.1390,IPR006119,IPR038109,PF07508,SSF53041, IPR011109,PTHR30461,PS51736,Coil,PF00239
MNNVAIYCRESTEKQNIDTLVSLCEKEAKKLGYSNYKIYKDIKSGYSKDREEYTKLKEDIKEEKINILILYESSRITRDEIEHHMFYALLKLYNVRVYTLNHGWIDLTNEDDCFLAGLLNLLDAREGRKTAKRVKDRMEEMAKNGFWTGGPAPFGYKLVDKKLIINPEEAEKVKEIFRLFLEGKTRFYLSALFGFECKRVMRMLVNPVYNGKLKFRQIEFKNKKRIEHKQFDVLPGIHEPIIDDYTFKLVQDKVKSIKRETNKGSYIFKDLLICTCGEKMYLHKKKYFYKRDTPTITNVYICNSKDRKIRNCSLSIIHENELFINVIESLEELILSFNVDDIDTNKNDFEKQLKYYKKELSSLSAKEEVLARQLMNGKLSENLYEKFIVELSENKEFIENKINSLTKVINSQEAKKNNKTILKKYFNKIKKEKDPEKLNAFFKLIIDSIEFINDYRFYIHLKF

SEQ ID NO: 8013 - protein, 463 aa, Unknown
  Description of Unknown: Integrase B8014 sequence
  PTHR30461:SF3,SM00857,IPR006118,IPR036162,PF13408, IPR025827,G3DSA:3.40.50.1390,PS51737,PS00397,IPR006119, IPR011109,SSF53041,PTHR30461,Coil, PS51736,cd00338,PF00239
MPSKIERCAIYIRVSTAEQMMHGKSLEAQKQYLTNYAKEHNMTVAGVYADEGKTARKELKKRKAIHSLLEDVKAGKIDVIIFWRIDRWFRNLSDFYKVQEVLDDNNVHWISTSEPGINMETRDGRLQLNVVLSIGQNEVDTTSERIKFVNEASIRQGKLIFGDVNMGYGYKSGIIDGVKRMVKDPDREDTVNAFYRFFFKHHAKGLSMRYIQENYDPDFTWANMRTLLSSEFYKGTYRGIPYCPAYLTESEWNNLQEIQNVNVKRAPSGRIYLFSGMINCPICGRRLSARGGSSIINRKTGAKKVYCYYRCNKAFIDHKCSYRHMVSQNLIERYLIDHLEYEYNKFKIKCEKIEKEQEKKKKVQTPEKLQKELERLNLLFQKGRIEWDYYSKEYDRIENELNELLNVAPELEPDYAYLEELLNTDFRTMYYNLTQENRRAFWHSIIREIHLNTDHTVDSVDFL

SEQ ID NO: 8014 - protein, 463 aa, Unknown
  Description of Unknown: Integrase B8015 sequence
  PTHR30461:SF3,cd00338,SM00857,IPR036162,PF13408, PS51737,G3DSA:3.40.50.1390,IPR025827,IPR006119,SSF53041, IPR011109,PTHR30461,PS51736,Coil,PF00239
MSFFTPNPQLFGLRVVKYIRCSHDDQVLHGDTLEAQDLILEDFIKVNRMILVDTFIDEALTARKKFNKRKEFVRLLSGVKAHAFDLIIFTKLDRWFRNIGDYHKIQEILEANGVQWKAVTENYDTTTTNGRLHINIRLSVAQDECDRDSDRIKDVFAYKLKNKTYVSGSLPRGLKLDAEKHVIIDPEWNCFALDMFDRFEATCSKRDTQLFLQDKYNIRVCYDTVARYLKNPLFKGQYRDDPDFCPATISPERFERIQKLAIRNVRIRHTQQFYIFSGLLICSSCNHYMCGTVTYRRMADGSEKMYKNYRCNFKAQSKLCDRSKTYREADLEEYMLAHIRPALSDYIAKYEVTAASTVQKNPVTEIAKIERKMKKLYDLFMDDLIDKEAYRSEYDKFKAQIEELQKCSTAVPVRSLDSVKKLLSEDWEAVYHTFSDQEKNTFWKSFVESVLVYEGGSMDIRFL

SEQ ID NO: 8015 - protein, 463 aa, Unknown
  Description of Unknown: Integrase B8016 sequence
  cd03768,PTHR30461:SF3,SM00857,G3DSA:1.10.10.2600, IPR036162,PS51737,G3DSA:3.40.50.1390,IPR006119, IPR038109,PF07508,IPR011109,SSF53041, PTHR30461,PS51736,Coil,PF00239
MKVAIYTRVSTAEQNLNGFSIHEQRKKLISFCEINEWKEYEVFTDGGFSGGSTKRPALQDLFNRLTQFDLVLVYKLDRLTRNVRDLLEMLERFEKYNVSFKSATEVFDTTTAIGKLFITIVGAMAEWERETIRERSLFGSRAAVESGKYIREQPFVYDNIEGKLVPNENTKYIEYIVKKFKEGNSANEIARLLNSKKKPSKIKNWNRQTIIRLIKNPVLRGHTKFGDIFMENTHEPVLSDDDYHKVINAIENKTHKSKSKHNAIFRGVLKCPQCNGNLHLYAGTIRPKNGRSYNVRRYTCDKCHRDKYSRNISFNESEIENKFIEELEKMDLTRFEIHKPKKVEINIESDKKRIKEQRTKLLRAYTMGYVEEEEFKIIMNETQRQLEDIKREENKETVQEIDEKQIKSIGNFIIEGWKTLTIEEKEKLILSSVDKIDIEFIPREKNNNSNTNTVNIKKVHFIF

SEQ ID NO: 8016 - protein, 463 aa, Unknown
  Description of Unknown: Integrase B8017 sequence
  PTHR30461:SF3,SM00857,IPR006118,IPR036162,PF13408, PS51737,G3DSA:3.40.50.1390,Coil,IPR025827,IPR006119, IPR011109,SSF53041,PTHR30461,PS00397,PS51736, cd00338,PF00239
MPSKIERCAIYIRVSTAEQMMHGKSLEAQKQYLTNYAKEHNMTVAGVYADEGKTARKELKKRKAIHSLLEDVKAGKIDVIIFWRIDRWFRNLSDFYKVQEVLDNNNVRWISTSEPGINMETRDGRLQLNVVLSIGQNEVDTTSERIKFVNEASIRQGKLIFGDVNMGYGYKSGIIDGVKRMVKDPDREDTVNAFYRFFFKHHAKGLSMRYIQENYDPDFTWANMRTLLSSEFYKGTYRGIPYCPAYLTESEWNNLQEIQNANVKRAPSGRIYLFSGMINCPICGRRLSARGGSSIINRKTGAKKVYCYYRCNKTFIDHKCTYKHMVSQNLIEQYLIEHLEYEYNKFKIKCEKIEKEQEKKKKIQTPEKLQKELERLNLLFQKGRIEWDYYSKEYDRIENELNELLNAAPELEPDYAYLEELLNTDFRTMYYNLTQENRRAFWHSIIREIHLNTDHTVDSVDFL

SEQ ID NO: 8017 - protein, 463 aa, Unknown
  Description of Unknown: Integrase B8018 sequence
  PTHR30461:SF3,cd00338,SM00857,IPR036162,PF13408, IPR025827,PS51737,G3DSA:3.40.50.1390,IPR006119,IPR011109, SSF53041,PTHR30461,PS51736,Coil,PF00239
MSFFTPNPQLFGLRVVKYIRCSHDDQVLHGDTLEAQDLILEDFIKVNRMILVDTFIDEALTARKKFNKRKEFVRLLDGVKAHSFDLIIFTKLDRWFRNIGDYHKIQEILEANGVQWKAVTENYDTTTTNGRLHINIRLSVAQDECDRDSDRIKDVFAYKLKNKTYVSGSLPRGLKLDAEKHVIIDPEWNCFALDMFDRFEATCSKRDTQLFLQEKYNIRVCYDTVARYLKNPLFKGQYRDDPDFCPATISPERFERIQKLAIRNVRIRHTQQFYIFSGLLICSSCNHYMCGTVTYRRMADGSEKMYKNYRCNFKAQSKLCDRGKTYREADLEEYMLAHIRPALSDYIVKYEVTAASTVQKNPVTEIAKIERKMKKLYDLFMDDLIDKEAYRSEYDKFKAQIEELQKCSTAAPMRSLDSVKKLLSEDWEAVYHTFSDQEKNTFWKSFVESVLVYEDGSMDIRFL

SEQ ID NO: 8018 - protein, 463 aa, Unknown
  Description of Unknown: Integrase B8019 sequence
  PTHR30461:SF3,cd00338,SM00857,G3DSA:1.10.10.2600,IPR036162, PF13408,PS51737,G3DSA:3.40.50.1390,IPR025827,IPR006119, IPR038109,PF07508,IPR011109,SSF53041, PTHR30461,PS51736,Coil,PF00239
MFAGVYTDEGISGLNTRHREGFNRMIADALAGNIDLIVTKSVSRFARNTVDSLTTIRDLKSHGVEVYFEKENIWTFDGKGELLILIMSSLAQEESRSISDNVTWGQRKHFADGKVNMPYGQFLGYRKGPDGLPEIDPEEAETVRFIYRLFMGGKTVNAIAKILTEAGVPTPRKKARWQDKTVESILTNEKYSGDAVLQKSFTVDFLSKKMKKNEGEVPQYIVTDSHPGIIDKAEWELVQAEMAKRKAKGRSQNSLSPFSMKICCGECGSWYGSKIWHSTNKYRRVVWRCNGKYERQTGCKTPHLSEAQIKALFMQVLSKLHEQRETLIADCEALKGMLSDTSEIDGERARIAAEQSETETLAAALIQQNAMTAMNQSEFNRRYEEYVKKHDALSERLDKLDGKLEKRKQEIVVLNGFISDLTAMKELPVEFSGELWNAFVEKLTIHPDGGAEFLFRNGAVITE

SEQ ID NO: 8019 - protein, 463 aa, Unknown
  Description of Unknown: Integrase B8020 sequence
  PTHR30461:SF3,SM00857,IPR006118,IPR036162,PF13408, PS51737,G3DSA:3.40.50.1390,Coil,IPR025827,IPR006119, IPR011109,SSF53041,PTHR30461,PS00397,PS51736, cd00338,PF00239
MPSKIERCAIYIRVSTAEQMMHGKSLEAQKQYLTNYAKEHNMTVAGVYADEGKTARKELKKRKAIHSLLEDVKAGKIDVIIFWRIDRWFRNLSDFYKVQEVLDDNNVHWISTSEPGINMETRDGRLQLNVVLSIGQNEVDTTSERIKFVNEASIRQGKLIFGDVNMGYGYKSGIIDGVKRMVKDPDREDTVNAFYRFFFKHHAKGLSMRYIQENYDPDFTWANMRTLLSSEFYKGTYRGIPYCPAYLTESEWNNLQEIQNANVKRAPSGRIYLFSGMINCPICRRRLSARGGSSIINRKTGAKKVYCYYRCNKAFIDHKCTYKHMVSQNLIEQYLIDHLEYEYNKFKIKCEKIEKEQEKKKKIQTPEKLQKELERLNLLFQKGRIEWDYYSKEYDRIENELNELLNAAPELEPDYAYLEELLNTDFRTMYYNLTQENRRAFWHSIIREIHLNTDHTVDSVDFL

SEQ ID NO: 8020 - protein, 463 aa, Unknown
  Description of Unknown: Integrase B8021 sequence
  PTHR30461:SF3,SM00857,IPR036162,PF13408,PS51737, G3DSA:3.40.50.1390,IPR025827,IPR006119,IPR011109,SSF53041, PF00239,PTHR30461,PS51736,Coil,cd00338
MNTYFHPQPELYGLRVVKYIRCSHEGQVLHGDTLEAQDTLLNEFIETNHMVLVDTFVDEALTARKKFTKRKEFVRLLDGVRAHAFDMILFTKLDRWFRNIGDYHKIQEILDANSVQWKAITESYDTTTTNGRLHINIRLSVAQDECDRDSDRIKDVFAYKLKNKTYISGSLPRGLKLDAEKHVVIDPEWHQFAIDMFDHFESTCSKRGTQLFLQEKYGIRVCYDTVVRYLRNPLFMGQYRDDPDFCEKTISRERFERIQNLAIRNVRIRHTQQFYIFSGLLICSSCNHYMTGTVTYRTLADGREKTYKSYRCNFKAQSKLCDRSKHYREEYVEEYMLQHIRPALSSYVADFEVTAAAAAKKDPAVEIAKVERKMKKLYDLFMDDLIDKASYRNEYEKFQSQIDKLRSCPAAPVRNLDSIKKMLSDDWETVYHTFSDQEKNVFWKSFVQSITVHENGEMDIVFL

SEQ ID NO: 8021 - protein, 463 aa, Unknown
  Description of Unknown: Integrase B8022 sequence
  SM00857,G3DSA:1.10.10.2600,IPR036162,PF13408, PS51737,G3DSA:3.40.50.1390,IPR025827,IPR006119, IPR038109,SSF53041,IPR011109,PF00239, PTHR30461,Coil,cd00338
MSYIENESLCGLRVVKYIRCSHEGQVLHGDTLEAQHAILDDYIARNHLVLVDTFVDEALTARKKFTKRKEFVRLLDGVKRHDFDLILFTKLDRWFRNIADYHRIQEILDANNVQWKAVTESYDTTTTNGRLHINIRLSVAQDECDRDSDRIKDVFAFKLKNKTYLSGSLPRGLKLDAEKHVIIDDDWKEYALDMFQHYESTCSIRATLLYLRKKYNVTYGYCTVKNALKNPIYKGEYRDIQDFCPALIEPERFDHIQQLLYHNAHLHDGPYRSYIFSGLLICPFCHNHLYGANTSKVLASGVKKDYHYYKCYNTYKIPPCECRQHFLEPRIEEQMLSQVRAALSDYVTSYEVDSNQSSIEKSHAAEVAKIQKRLKKLYELYIDDLIDKEAYRTEYLELQDALSKIEAAPKPPQKDFSKLKELLSQDYESVYQTFSPSEKNVFWKSFIQSVVVYDSYRLDITFL

SEQ ID NO: 8022 - protein, 463 aa, Unknown
  Description of Unknown: Integrase B8023 sequence
  PTHR30461:SF3,cd00338,SM00857,IPR036162,PF13408, IPR025827,G3DSA:3.40.50.1390,PS51737,IPR006119,IPR011109, SSF53041,PTHR30461,PS51736,Coil,PF00239
MSFFTPNPQLFGLRVVKYIRCSHDDQVLHGDTLEAQDLILEDFIKVNRMILVDTFIDEALTARKRFNKRKEFVRLLNGVKAHDFDLIIFTKLDRWFRNIGDYHKIQEILEANGVQWKAVTENYDTTTTNGRLHINIRLSVAQDECDRDSDRIKDVFAYKLKNKTYVSGSLPRGLKLDAEKHVIIDPEWNCFALDMFDRFEATCSKRDTQLFLQEKYNIRVCYDTVARYLKNPLFKGQYRDDPDFCPATISPERFERIQKLAIRNVRIRHTQQFYIFSGLLICSSCNHYMCGTVTYRRMADGSEKMYKNYRCNFKAQSKLCDRGKTYREADLEEYMLAHIRPALSDYISKYEVTAASTVQKNPVTEIAKIERKMKKLYDLFMDDLIDKEAYRSEYDKFKAQIEELQKCSTAAPMRSLDSVKKLLSEDWEAVYHTFSDREKNTFWKSFVESVLVYEDGSMDIRFL

SEQ ID NO: 8023 - protein, 463 aa, Unknown
  Description of Unknown: Integrase B8024 sequence
  PTHR30461:SF3,SM00857,IPR006118,IPR036162,PS51737, PS00397,G3DSA:3.40.50.1390,IPR006119,IPR011109,SSF53041, PTHR30461,Coil,PS51736,cd00338, PF00239
MTTKIERCAIYIRVSTTEQMMHGKSLEAQKEYLTNYAREHNMAVVGIYADEGKTARKELKKRKAIHSLLQDVEAGKIDVIIFWRIDRWFRNLSDFYKVQDILDSHNVRWISTSEPGINMETRDGRLQLNVVLSIGQNEVDTTSERIKFVNESSIRSGKLIFGDANMGYGYKSGIVDGQKRMVKDPDREHVVDAFYKYFFKHQNKCATLRYIQETYDPDFSFGIMRTLLSSEFYKGTYRGFPYCPAYLTEDEWNKLQKIQKRNVKATPSGRIYLFAGLIRCPVCGQLLCGTGCSSIINRKTGAKRTYCYYRCNRAMIDHICSYRHRLSQNLVENYLLDNLEDEYKNYKVKCEKIEKEKEKQKKKQSPEKLRKELDRLNFLFQKGRIEWDYYNEEYSRVESELNDLQNSLPEPAPNYSYLEELLNTDFRTMYDQLSQENRRAFWRSIIQEIHVNEDHAITSVDFL

SEQ ID NO: 8024 - protein, 463 aa, Unknown
  Description of Unknown: Integrase B8025 sequence
  PTHR30461:SF3,IPR036162,PS51737,IPR011109,PTHR30461, PS00397,PF00239,G3DSA:1.10.10.2600,IPR006119,SSF53041, cd00338,SM00857,IPR025827,IPR038109,PS51736, IPR006118,PF13408,G3DSA:3.40.50.1390,Coil
MRRKTTAPVEKILLRVAIYIRVSTDKQVKDGDSMRDQLATGQKYIDSHENMILVDTYIDDGISGQKLKRDDFQRLIDDVRAGRIDLIIFTRLDRWFRNLRHYLNTQDILDKHGVSWTAIEQPYFDTSTPHGRAFVNNSMIWAELEAQNDSDRILGVFDDKVDNGEVLSGSTPLGYKIVNKHLVPDDDAPTAVAIFQYYRKTGNLSMTLRYMESEFGLVRSAASLKNMLTNTKYIGEFRDNKNYCPAIIDRDLFFDVQRLLKINIKSGKKHDYIFSGLVVCDDCDHIMSGCQQRAGGRVRADGTRIVYKYSVYRCRQGVNLHRCPNRKLVFETTLEKMLLERIRPELENYIAEYEVANLPALRTDAKRRSVEGKMQKLKDLYLNDLITMDEFKLDREKLLMQLEKINAEDSRPVKDLSYLKNFLKMDFESVYDSLSIPERRELWRSIVKEIRVDHGKNIHIIFL

SEQ ID NO: 8025 - protein, 463 aa, Unknown
  Description of Unknown: Integrase B8026 sequence
  PTHR30461:SF3,SM00857,IPR006118,IPR036162,PF13408, PS51737,PS00397,G3DSA:3.40.50.1390,IPR025827,IPR006119, IPR011109,SSF53041,PTHR30461,Coil,PS51736, cd00338,PF00239
MPSKIERCAIYIRVSTAEQMMHGKSLEAQKQYLTNYAKEHNMTVAGVYADEGKTARKELKKRKAIHSLLEDVKAGKIDVIIFWRIDRWFRNLSDFYKVQEVLDDNNVHWISTSEPGINMETRDGRLQLNVVLSIGQNEVDTTSERIKFVNEASIRQGKLIFGDVNMGYGYKSGIIDGVKRMVKDPDREDTVNAFYRFFFKHHAKGLSMRYIQENYDPDFTWANMRTLLSSEFYKGTYRGIPYCPAYLTESEWNNLQEIQNANVKRAPSGRIYLFSGMINCPICGRRLSARGGSSIINRKTGAKKVYCYYRCNKAFIDHKCSYRHMVSQNLIEQYLIDHLEYEYNKFKIKCEKIEKEQEKKKKVQTPEKLQKELERLNLLFQKGRIEWDYYSKEYDRIENELNELLNTAPELEPDYAYLEELLNTDFRTMYYNLTQENRRAFWHSIIREIHLNTDHTVDSVDFL

SEQ ID NO: 8026 - protein, 463 aa, Unknown
  Description of Unknown: Integrase B8027 sequence
  PTHR30461:SF3,cd00338,SM00857,IPR036162,PF13408, IPR025827,PS51737,G3DSA:3.40.50.1390,IPR006119,IPR011109, SSF53041,PTHR30461,PS51736,Coil,PF00239
MSFFTPNPQLFGLRVVKYIRCSHDDQVLHGDTLEAQDLILEDFIKVNRMILVDTFIDEALTARKKFNKRKEFVRLLDGVKAHAFDLIIFTKLDRWFRNIGDYHKIQEILEANGVQWKAVTENYDTTTTNGRLHINIRLSVAQDECDRDSDRIKDVFAYKLKNKTYVSGSLPRGLKLDAEKHVIIDPEWNCFALDMFDRFEATCSKRDTQLFLQEKYNIRVCYDTVARYLKNPLFKGQYRDDPDFCPATISPERFERIQKLAIRNVRIRHTQQFYIFSGLLICSSCNHYMCGTVTYRRMADGSEKMYKNYRCNFKAQSKLCDRGKTYREADLEEYMLAHIRPALSDYIAKYEVTAASTVQKNPVTEIAKIERKMKKLYDLFMDDLIDKEAYRSEYDKFKAQIEELQKCSTAAPMRSLDSVKKLLSEDWEAVYHTFSDQEKNTFWKSFVESVLVYEDGSMDVRFL

SEQ ID NO: 8027 - protein, 463 aa, Unknown
  Description of Unknown: Integrase B8028 sequence
  PTHR30461:SF3,IPR036162,PS51737,IPR011109,PTHR30461, PS00397,PF00239,G3DSA:1.10.10.2600,IPR006119,SSF53041, cd00338,SM00857,IPR025827,IPR038109, PS51736,IPR006118,PF13408,G3DSA:3.40.50.1390,Coil
MRRKTTAPVEKILLRVAIYIRVSTDKQVKDGDSMRDQLATGQKYIDSHENMILVDTYIDDGISGQKLKRDDFQRLIDDVRAGRIDLIIFTRLDRWFRNLRHYLNTQDILDKHGVSWTAIEQPYFDTSTPHGRAFVNNSMIWAELEAQNDSDRILGVFDDKVDNGEVLSGSTPLGYTIVNKHLVPDDDAPTAVAIFQYYRKTGNLSMTLRYMESEFGLVRSAASLKNMLTNTKYIGEFRDNKNYCPAIIDRDLFFDVQRLLKINIKSGKKHDYIFSGLVVCDDCDHIMSGCQQRAGGRVRSDGTRIVYKYSVYRCRQGVNLHRCPNRKLVFETTLEKMLLERIRPELENYIAEYEVANLPALRTDAKRRSVEGKMQKLKDLYLNDLITMDEFKLDREKLLMQLEKINAEDSRPVKDLSYLKNFLKMDFESVYDSLSIPERRELWRSIVKEIRVDHDKNIHIIFL

SEQ ID NO: 8028 - protein, 462 aa, Unknown
  Description of Unknown: Integrase B8029 sequence
  PTHR30461:SF3,SM00857,IPR006118,IPR036162,PF13408, IPR025827,G3DSA:3.40.50.1390,PS51737,Coil,IPR006119, SSF53041,IPR011109,PTHR30461,PS00397,PS51736, cd00338,PF00239
MMKLQRCAIYIRVSTTEQMMHGKSLESQKEYLINYAKEHNMAVVGVYADEGKTARKELKKRKAIHSLLEDVKAGKIDVIIFWRLDRWFRNLSDFYKVQDVLDSHNVRWISTSEPGINMGTRDGRLQLNVVLSIGQNEVDTTSERIKFVNESSIRSGKLIFGDANMGYGYKSGIVDGQKRMVKDPDREHVVDAFYKYFFKHQNKCATLRYIQETYDPDFSFGIMRTLLSSEFYKGTYRGFPYCPAYLTEDEWNKLQKIQKRNVKATPSGRIYLFAGMIRCPVCGQLLCGTGCSSIINRKTGAKRTYCYYRCNRATIDHICSYRHRLSQNLIENYLLDNLEDEYKNYKVNCEKIEKEKEKQKKKQSPEKLRKELDRLNFLFQKGRIDWDYYNEEYGRVESELNDLQSALPEPVTNYGYLEELLDTDFRTMYDQLSQENRRAFWRSIIKEIHVNEDHAITSVDFL

SEQ ID NO: 8029 - protein, 462 aa, Unknown
  Description of Unknown: Integrase B8030 sequence
  PTHR30461:SF3,cd00338,SM00857,IPR036162,PF13408, PS51737,IPR025827,G3DSA:3.40.50.1390,IPR006119,SSF53041, IPR011109,PTHR30461,PS51736,Coil,PF00239
MSYFNFNPDLVGVRVVKYIRCSHEGQVLHGDTLEAQNLILDEFIAANKMVLVDTFIDEAMTARKKYTKRKEFVRLLDGVRSHNFDLIIFTKLDRWFRNIGDYHKIQEILDANGVQWKAVTENYDTTTTNGRLHINIRLSVAQDECDRDSDRIKDVFAYKLKNKTFISGALPRGLMLDAEKHVVHDPEWKQWALDMFDHFESCCSKRDTLLFLMDKYNMYLCYDTIVRSLKNPLYKGFYRGDPDFCEPLIDPARFDRIQNLAIRNVRVRRSRQTYVFCGLLVCASCEHYMTGVATYHTLSGGKEKMYKRYRCNMHTSSHSCPHSKMYSEEMLEQYMISNVCSAFSCYIAEYAVAAASAKKKNTAAEIAKIERKLKKLYDLFMDDLIDKEAYKSEYDSFNKQLNELKSIPFAPANDYKKVQELLSGDWSAVYTSFNNNEKNAFWKSFIDKIVIHEDGKIDIIFL

SEQ ID NO: 8030 - protein, 462 aa, Unknown
  Description of Unknown: Integrase B8031 sequence
  PTHR30461:SF3,cd00338,SM00857,IPR036162,PF13408, PS51737,IPR025827,G3DSA:3.40.50.1390,IPR006119,IPR011109, SSF53041,PTHR30461,PS51736,Coil, PF00239
MSFFTPNPQLFGLRVVKYIRCSHDDQVLHGDTLEAQDLILEDFIKVNRMILVDTFIDEALTARKRFNKRKEFVRLLNGVKAHDFDLIIFTKLDRWFRNIGDYHKIQEILEANGVQWKAVTENYDTTTTNGRLHINIRLSVAQDECDRDSDRIKDVFAYKLKNKTYLSGSLPRGLKLDAEKHVIIDPEWNCFALDMFDHFEATCSKRDTQLFLQDKYSIRVCYDTIARYLKNPIFKGQYRDDPDFCPATISPERFDRIQKLAIRNVRIRHTQQFYIFSGLLICSSCNHIMTGTVTYRKMADGTEKAYKSYRCNFKAQSKLCDRGKTYREEYVEEYMLNHIRPALSDYVAKYEVTAASAVQKNPVEEMSKIERKIKKLYDLFMDDLIDKDAYRSEYDKFKKQIKELQKCPAAPVRNLDSVRKLLNDDWEAVYNTFSNQEKNVFWKSFVESVLVHEDGSMDIHFL

SEQ ID NO: 8031 - protein, 462 aa, Unknown
  Description of Unknown: Integrase B8032 sequence
  PTHR30461:SF3,cd00338,SM00857,IPR036162,PF13408, IPR025827,G3DSA:3.40.50.1390,IPR006119,SSF53041,PTHR30461, PS51736,Coil,PF00239
MSFFTPNPQLFGLRVVKYIRCSHDDQVLHGDTLEAQDLILEDFIKVNRMILVDTFIDEALTARKKFNKRKEFVRLLSGVKAHAFDLIIFTKLDRWFRNIGDYHKIQEILEANGVQWKAVTENYDTTTTNGRLHINIRLSVAQDECDRDSDRIKDVFAYKLKNKTYLSGSLPRGLKLDAEKHVIIDPEWNCFALDMFDHFEATCSKRDTQLFLQDKYNIRVCYDTVARYLKNPIFKGQYRNDPDFCPATISPERFDRIQNLAIRNVRIRHTQQFYIFSGLLICSSCNHIMTGTVTYRKMADGTEKAYKSYRCNFRAQSKLCDRGRSYREEYVEEYMLNHIRSALSDYVAKYEVTAASAVRKNPVEEISKIERKIKKLYDLFMDDLIDKNAYRSEYDKFKKQIEELQRCPAAPVRNLDSVRKLLNENWEAVYGTFSNQEKNVFWKSFVESVLVYEDGSMDIHFL

SEQ ID NO: 8032 - protein, 462 aa, Unknown
  Description of Unknown: Integrase B8033 sequence
  PTHR30461:SF3,cd00338,SM00857,IPR036162,PF13408,PS51737, G3DSA:3.40.50.1390,IPR025827,IPR006119,IPR011109,SSF53041 ,PTHR30461,PS51736,Coil,PF00239
MLYSQSIPELYGMRVCKYIRCSHEGQVADGETLEAQNAILDDFILKNHLVLVDTFVDEALTARKKYTKRKEFVRLLDGVQRHDFDLIIFTKLDRWFRNIADYHRIQEILEANGVQWKAVTESYDTTTTNGRLHINIRLSVAQDECDRDSDRIKDVFAYKLQKKTYLSGSLPRGLKLDPEKHVIIDEEWKQFALDMFDHFEATNSKRGTLMYLKEKYGLPRLCHDTIVRNLRNPLYKGEYRGIKDFCPALIDPERFDRIQLLAKRDVRNSRTRTYIFNGLLVCSECGHNLTCQTTVRKLADGSRSEYRAYRCNQHYSMACCSRNKSYREEYVEEYMLANVRSALEGYVAEYEISNTAPAAKNPQAEVQRIKSKLKKLYDLFMDDLVDKEMYKTEYAVLQAQLQEATAAAAAPHRSMDDLKEILASGWEELYQTFNYQEKAAFWKSFVDKIIVYEDGSMDILFL

SEQ ID NO: 8033 - protein, 462 aa, Unknown
  Description of Unknown: Integrase B8034 sequence
  PTHR30461:SF3,SM00857,IPR006118,IPR036162,PS51737, G3DSA:3.40.50.1390,Coil,IPR006119,SSF53041,IPR011109, PTHR30461,PS00397,PS51736,cd00338,PF00239
MMKLQRCAIYIRVSTTEQMMHGKSLESQKEYLINYAKEHNMAVVGVYADEGKTARKELKKRKAIHSLLEDVKAGKIDVIIFWRIDRWFRNLSDFYKVQDVLDSHNVRWISTSEPGINMETRDGRLQLNVVLSIGQNEVDTTSERIKFVNESSIRSGKLIFGDANMGYGYKSGIVDGQKRMVKDPDREHVVDAFYKYFFKHQNKCATLRYIQETYDPDFSFGIMRTLLSSEFYKGTYRGFPYCPAYLTEDEWSKLQKIQKRNVKATPSGRIYLFAGMIRCPVCGQLLCGTGCSSIINRKTGAKRTYCYYRCNRAMIDHICSYRHRLSQNLVENYLLDNLENEYKNYKVKCEKIEKEKEKQKKKQSPEKLRKELDRLNFLFQKGRIDWDYYNEEYGRVESELNDLQSTLPEPVTNYGYLEELLDTDFRTMYDQLSQENRRTFWRSIIQEIHVDEDHAIASVDFL

SEQ ID NO: 8034 - protein, 462 aa, Unknown
  Description of Unknown: Integrase B8035 sequence
  PTHR30461:SF3,cd00338,SM00857,IPR036162,PF13408, IPR025827,G3DSA:3.40.50.1390,PS51737,IPR006119,SSF53041, IPR011109,PTHR30461,PS51736,Coil, PF00239
MSFFTPNPQLFGLRVVKYIRCSHDDQVLHGDTLEAQDLILEDFIKVNRMILVDTFIDEALTARKKFNKRKEFVRLLSGVKAHAFDLIIFTKLDRWFRNIGDYHKIQEILEANGVQWKAVTENYDTTTTNGRLHINIRLSVAQDECDRDSDRIKDVFAYKLKNKTYVSGSLPRGLKLDAEKHVIIDPEWNCFALDMFDRFEATCSKRDTQLFLQDKYNIRVCYDTVARYLKNPLFKGQYRDDPDFCPATISPERFERIQKLAIRNVRIRHTQQFYIFSGLLICSSCNHIMTGTVTYRRMADGAEKAYKSYRCNFKAQSKLCDRGKTYREEYVEEYMLNHIRPALSDYVAKYEVTAASAVQKNPVEEMSKIERKIKKLYDLFMDDLIDKDTYRSEYDKFKKQIEELQKCPAAPVRNLDSVRKLLNDDWEAVYNTFSNQEKNVFWKSFVESVLVHEDGSMDIHFL

SEQ ID NO: 8035 - protein, 462 aa, Unknown
  Description of Unknown: Integrase B8036 sequence
  PTHR30461:SF3,SM00857,IPR006118,IPR036162,PF13408, IPR025827,G3DSA:3.40.50.1390,PS51737,Coil,IPR006119, SSF53041,IPR011109,PTHR30461,PS00397,PS51736, cd00338,PF00239
MMKFQRCAIYIRVSTTEQMMHGKSLESQKEYLINYAKEHNMAVVGVYADEGKTARKELKKRKAIHSLLEDVKAGKIDVIIFWRIDRWFRNLSDFYKVQDILDSHNVRWISTSEPGINMETRDGRLQLNVVLSIGQNEVDTTSERIKFVNEASIRNGKLIFGDVNMGYGYKSGVVDGQKRMIKDPDREHVVDAFYKYFFKHQNKCATLRYIQETYDPDFSFGIMRTLLSSEFYKGTYRGFPYCPAYLTEDEWSTLQKIQKRNVKATPSGRIYLFAGLIRCPVCGQKLCGTGCSSIINRKTGAKRTYCYYRCNRAMIDHICSYRHKLSQNLVENYLLDNLENEYKNYKVKCEKIEKEKEKQKKKQSPEKLRKELDRLNFLFQKGRIDWDYYNEEYGRVESELNDLQSTLPEPVTNYGYLEELLDTDFRTMYDQLSQENRRAFWRSIIQEIHVNEDHAIASVDFL

SEQ ID NO: 8036 - protein, 462 aa, Unknown
  Description of Unknown: Integrase B8037 sequence
  PTHR30461:SF3,IPR036162,PS51737,IPR011109,PTHR30461, PS00397,PF00239,G3DSA:1.10.10.2600,IPR006119,SSF53041, cd00338,SM00857,IPR025827,IPR038109,PS51736, IPR006118,PF13408,G3DSA:3.40.50.1390,Coil
MKRQTAKLNDKLLLRVAIYIRVSTDQQAQDGDSVRDQLATGQKYIENHENMILADTYVDDGISGQKVKRDDFQRLLNDVRAGSIDLIIFTRLDRWFRNLRHYLNTQDVLDKNGVSWTATEQPYFDTSTPHGRAFVNNSMIWAELEAQNDSDRILSVFDDKVDNSEVLSGSTPLGYRIENKHLVPDDDAPTAAAIFEHYRANGNLSMTLRYMENEFGLVRSAASLKNMLTNSKYIGEFRTNKNYCPAIIDRDVFEDVQRLLKINIKSGKKHDYIFSGLVVCDECEHVMSGGQQRSSRVLSNGTHIVYKYNSYRCRQGVNLHRCPNRKVILESTLEKLLLSRIRPELEHYIAEYEVANRPAIRTDAKRRNIEQKMQKLKELYLNDLITMDEFKVDREKLMLQLDKVKTDESHPVKDLSYLKDFLKTDFENIYGSLSVPEKRELWRSIIREIRVDQDKNVRIIFL

SEQ ID NO: 8037 - protein, 462 aa, Unknown
  Description of Unknown: Integrase B8038 sequence
  PTHR30461:SF3,IPR036162,PS51737,IPR011109,PTHR30461, PS00397,PF00239,G3DSA:1.10.10.2600,IPR006119,SSF53041, cd00338,SM00857,IPR025827,IPR038109,PS51736, IPR006118,PF13408,G3DSA:3.40.50.1390,PF07508,Coil
MKRQTAKLNDKLLLRVAIYIRVSTDQQAQDGDSVRDQLATGQKYIENHENMILADTYVDDGISGQKVKRDDFQRLMNDVRAGSIDLIIFTRLDRWFRNLRHYLNTQDVLDKNGVSWTATEQPYFDTSTPHGRAFVNNSMIWAELEAQNDSDRILSVFDDKVDNSEVLSGSTPLGYRIENKHLVPDNDAPTAAAIFEYYRSNGNLAMTLRYMETEFGLIRSSASLKNMLTNTKYIGEFRTNKNYCPAIIDRDLFDDVQRLLKINIKSGKTHDYIFSGLVVCEECEHTMSGCQQRNSRILADGTRVVYKYNSYRCRQGITLHRCPNHKVMLESTLEKILLARIRPELENYIAEYEVANRPAMRTDSKRRNLEHKMQKLKELYLNDLITMDEFKVDREKLMQQLDKIKSDDSQPMKDLSYLKNFLKTDFENIYVSLSIPEKRELWRSIIREIRVDHERNVRIIFL

SEQ ID NO: 8038 - protein, 462 aa, Unknown
  Description of Unknown: Integrase B8039 sequence
  PTHR30461:SF3,cd00338,SM00857,IPR036162,PF13408, IPR025827,PS51737,G3DSA:3.40.50.1390,IPR006119,IPR011109, SSF53041,PTHR30461,PS51736,Coil,PF00239
MSFFTPNPQLFGLRVVKYIRCSHDDQVLHGDTLEAQDLILEDFIKVNRMILVDTFIDEALTARKKFNKRKEFVRLLDGVKAHSFDLIIFTKLDRWFRNIGDYHKIQEILEANGVQWKAVTENYDTTTTNGRLHINIRLSVAQDECDRDSDRIKDVFAYKLKNKTYVSGSLPRGLKLDAEKHVIIDPEWNCFALDMFDRFEATCSKRDTQLFLQDKYNIRVCYDTVARYLKNPLFKGQYRDDPDFCPATISPERFERIQKLAIRNVRIRHTQQFYIFSGLLICSSCNHIMTGTVTYRRMADGTEKAYKSYRCNFKAQSKLCDRGKTYREEYVEEYMLNHIRPALSDYVAKYEVTAASAVQKNPVEEMSKIERKIKKLYDLFMDDLIDKDAYRSEYDKFKKQIEELQKCPAAPVRNLDSVRKLLNDDWEAVYNTFSNQEKNVFWKSFVESVLVHEDGSMDIHFL

SEQ ID NO: 8039 - protein, 462 aa, Unknown
  Description of Unknown: Integrase B8040 sequence
  PTHR30461:SF3,SM00857,IPR006118,IPR036162,PF13408, IPR025827,G3DSA:3.40.50.1390,IPR006119,SSF53041,PTHR30461, PS00397,PS51736,cd00338,PF00239
MKAEIDRIIRVALYIRVSTEEQALHGYSLQAQEDELLHFAKEKKYKVVGTYRDEGFSARKPALKRKVMQELLDDVRAGKIDRILFIKLDRWFRNVWEYHQVQAVLDENNVTWQATMEDYNTATADGRLKVNIMLSVAENEADRTSERIKFVFNSKVNRGEYPYGRVPIGYKAEIVDGLRKLVKDPELEAAITAFWEYALKYNSVRRAGFLVNAEYGTTRAAKEWLRTGKLEIYCGTFEGIPDFCPAYVSRENWKKIQDRKNLIKKAQAWNVYLFSGLITCPSCGHTLKATYKSYPNDRSIKYNAYRCNHGRDNTGCTYRSSVSEKKTEKYLLEHIREMIEEYISETEVGASSKKKKRIIKFDVAKAKEQLRRLNVAYFAGNMPDDEYTAMAAKLKEDIAKALESEYEAEKAPDIGKLRAFLDTDFEAIYRTLEKDDQRRLWRSIIKEIRVEDNHVVGVTFNV

SEQ ID NO: 8040 - protein, 462 aa, Unknown
  Description of Unknown: Integrase B8041 sequence
  PTHR30461:SF3,cd00338,SM00857,IPR036162,PF13408, IPR025827,G3DSA:3.40.50.1390,PS51737,IPR006119,IPR011109, SSF53041,PTHR30461,PS51736,Coil,PF00239
MSFFTPNPQLFGLRVVKYIRCSHDDQVLHGDTLEAQDLILEDFIKVNRMILVDTFIDEALTARKKFNKRKEFVRLLDGVKAHTFDLIIFTKLDRWFRNIGDYHKIQEILEANGVQWKAVTENYDTTTTNGRLHINIRLSVAQDECDRDSDRIKDVFAYKLKNKTYVSGSLPRGLKLDAEKHVIIDPEWNCFALDMFDRFEATCSKRDTQLFLQDKYNIRVCYDTVARYLKNPLFKGQYRDDPDFCPATISPERFERIQKLAIRNVRIRHTQQFYIFSGLLICSSCNHIMTGTVTYRKMADGTEKAYKSYRCNFRAQSKLCDRGRSYREEYVEEYMLNHIRPALSDYVAKYEVTAASAVRKNPVEEISKIERKIKKLYDLFMDDLIDKNAYRSEYDKFKKQIEELQKCPAAPVRNLDSVRKLLNENWEAVYGTFSNQEKNVFWKSFVESVLVYEDGSMDIHFL

SEQ ID NO: 8041 - protein, 462 aa, Unknown
  Description of Unknown: Integrase B8042 sequence
  PTHR30461:SF3,SM00857,G3DSA:1.10.10.2600,IPR036162,PF13408, PS51737,IPR025827,G3DSA:3.40.50.1390,IPR006119,IPR038109, PF07508,IPR011109,SSF53041,PF00239, PTHR30461,PS51736,Coil,cd00338
MIKKELSSAGPLRVALYIRVSGEEQKIKGLSLEAQQERLEEYARNQGWIVVGTYIDAAKTARKDMRKRSEFQKMINSVKRDEIDLLLFCRLDRWFRSVADYYKIMEILQAHHCDWKTTDEEYDTSTANGRLYINVKLSIAQNEADICSERISVVFDSKVQHGTVVSGNCPFGYIVNGEKRLAIDPDAAAIVRDAFNYYESSVSQRGTIRHIRETYGVNWCDATFRRMLSERLYTGVYDSNKRFNENFCDPIIDAAQFDRVQKLLKKNARFSPAGNIYIFTSILKCAECLHNLSGCRTRSSNRYYYYYRCNQHLQRGRCPHNNSVREDYIESWLFEHLQEELERCKLEWEIRSAERKKKNRLNDKAVLKRKLTKLKELYMDDLINIEEYKKDYQIYTAALQQIPEEMPEETPPDFSAVERMLQADFRNIYDSLTREEKRTLWRSVISEIRVDRDNNVTGIIFG

SEQ ID NO: 8042 - protein, 462 aa, Unknown
  Description of Unknown: Integrase B8043 sequence
  PTHR30461:SF3,SM00857,IPR006118,IPR036162,PS51737, G3DSA:3.40.50.1390,Coil,IPR006119,IPR011109,SSF53041, PTHR30461,PS00397,PS51736,cd00338,PF00239
MMKLQRCAIYIRVSTTEQMMHGKSLESQKEYLINYAKEHNMAVVGVYADEGKTARKELKKRKAIHSLLEDVKAGKIDVIIFWRLDRWFRNLSDFYRVQDILDSHNVRWISTSEPGINMETRDGRLQLNVVLSIGQNEVDTTSERIKFVNEASIRSGKLIFGDVNMGYGYKSGIVDGQKRMVKDPDREHVVDAFYKYFFKHQNKCATLRYIQETYDPDFSFGIMRTLLSSEFYKGTYRGFPYCPAYLTEDEWNKLQKIQKRNVKATPSGRIYLFAGMIRCPVCGQLLCGTGCSSIINRKTGAKRTYCYYRCNRAMIDHICSYRHRLSQNLVETYLLDNLENEYKNYKVKCEKIEKEKEKQKKKQSPEKLRKELDRLNFLFQKGRIDWDYYNEEYGRVESELNDLQSALPEPVTNYGYLEELLDTDFRTMYDQLSQENRRAFWRSIIQEIHVNEDHAITSVDFL

SEQ ID NO: 8043 - protein, 462 aa, Unknown
  Description of Unknown: Integrase B8044 sequence
  cd00338,SM00857,G3DSA:1.10.10.2600,IPR036162, PF13408,PS51737,G3DSA:3.40.50.1390,IPR025827, IPR006119,IPR038109,IPR011109,SSF53041, PTHR30461,PS51736,Coil,PF00239
MSYSRFNSHLVGMRVAKYIRCSHPGQVKEGETLEAQNQILDDFIATNKMTLVDTFVDEAMTARKKYTKRKEFMRLLDGVKAHKFDMIIFTKLDRWFRNIGDYHKIQEILEENHVNWKAVTEEYDTTTTNGRLYINIRLSVAQDESDRVSDRIKDVFSYKLKNKTYLTGNLPRGLKLDEKKHVVVDEKWRQYVDDMFDFFEACGSKRATLLYLNEKYDLNICYDTIYHNLQNPIYKGLYHDDPEFCEAIIEPARFDRLQKLARHNIKVYPRRQYYIFAGLLMCPLCNHYLRGNSTYRKLASGEKKVYKAYRCRQYSASYRCEYKSGHREDRVETYLLNHLDDALKDYIASYDIASTAALEISSTEKIAKVEKKLKKLYELFLDDLIDKDSYRAEYNKFQDEIAELKKMPVAPVVDLTEFKKLLRGDWREVYDTFTEQEKNAFFKSFIDYIYIYEDGSMDIHFL

SEQ ID NO: 8044 - protein, 462 aa, Unknown
  Description of Unknown: Integrase B8045 sequence
  PTHR30461:SF3,IPR036162,PS51737,IPR011109,PTHR30461, PS00397,PF00239,G3DSA:1.10.10.2600,IPR006119,SSF53041, SM00857,IPR025827,IPR038109,PS51736,cd03768, IPR006118,PF13408,G3DSA:3.40.50.1390,PF07508,Coil
MKKVACYVRVSTENQIENYSIDEQTERLEAYCKAKDYAIYKIYTDGGYSGGNMNRPALNAILADIEHKLFDTIIVYKLDRLSRSQKDTLMLIEDYFLANNIDFVSVSENFDTSTPFGRAMIGILSVFAQLEKDQITERFTMGRIGRSKSGLFHGGGNAPKGYNYINGHLEINTVEAEQVKEIFSLFLSGKSVNAIGKIMTKKYNDNLWKNAAQITNCIRNSIYIGKVKFKGVEYDGEHQPIISEEDFRRANELLESNDRIKFPAQKTPFRAGFLLSSLIYCKNCGARYSACHGYYKCYSRSKSTAKFVKDPSCKNKNWKIDELDALVTSEIHKIAIDDAYKKLFKKEEKANDTKSIKTEISKINAQINRLLDLYQISDIPIDTIKSKITALTDKKDKLNELLSENSRTDNYEAFQAALNKFEALDDTSGIEERRLLISTLIERITIDEESVNITWRIESKIV

SEQ ID NO: 8045 - protein, 462 aa, Unknown
  Description of Unknown: Integrase B8046 sequence
  PTHR30461:SF3,SM00857,IPR006118,IPR036162,PF13408, IPR025827,G3DSA:3.40.50.1390,IPR006119,SSF53041,PF00239, PTHR30461,PS00397,PS51736,Coil,cd00338
MPDMKGKRILLYVRVSTEEQARYGESIADQRQALSEWAKKHGCVVVHEFVDEGFSARKPYKSRPALCALLNAVENREADAVVFTKLDRWFRNIRDYNKVQEVLERCGVFWMATLEDYETKTSAGRFKVNLMLSLAEHEADQTSERIKFTFRQKRSRGEIVSGNMPKGYRLVDGRPQKDEATERGVSAFWAEYLSSGKMYAAIEKAAENGVQLAVSTGSFMLRNAAHYAGQIQGCRCDPYITEEERDMVLSTRRAAPRKSGRTYLFSGMIYCAECGGRMGAHRHFYKRKGDKRGEQVYYNCTRHYATRPAVCPSRVNIYERDVEQYVLERLEDALEQCAIAAEVKARTANQEDAKKTLEKIKRLEQKKGRCLDAYLDGLMEKDELKKRIEAIELDLTELRKVRAVKPQKTPEAIRATLPKGWETVYGGLDLDRRRRFWCSILDRVEITASREIRFYLCMKYTT

SEQ ID NO: 8046 - protein, 462 aa, Unknown
  Description of Unknown: Integrase B8047 sequence
  PTHR30461:SF3,cd00338,SM00857,IPR036162,PF13408, IPR025827,G3DSA:3.40.50.1390,PS51737,IPR006119,SSF53041, IPR011109,PTHR30461,PS51736,Coil, PF00239
MSFFTPNPQLFGLRVVKYIRCSHDDQVLHGDTLEAQDLILEDFIKVNRMILVDTFIDEALTARKKFNKRKEFVRLLSGVKAHAFDLIIFTKLDRWFRNIGDYHKIQEILEANGVQWKAVTENYDTTTTNGRLHINIRLSVAQDECDRDSDRIKDVFAYKLKNKTYVSGSLPRGLKLDAEKHVIIDPEWNCFALDMFDRFEATCSKRDTQLFLQNKYNIRVCYDTVARYLKNPLFKGQYRDDPDFCPATISPERFERIQKLAIRNVRIRHTQQFYIFSGLLICSSCNHIMTGTVTYRKMADGTEKAYKSYRCNFRAQSKLCDRGRSYREEYVEEYMLNHIRPALSDYVAKYEVTAASAVRKNPVEEISKIERKIKKLYDLFMDDLIDKNAYRSEYDKFKKQIEELQKCPAAPVRNLDSVRKLLNENWEAVYGTFSNQEKNVFWKSFVESVLVYEDGSMDIHFL

SEQ ID NO: 8047 - protein, 462 aa, Unknown
  Description of Unknown: Integrase B8048 sequence
  PTHR30461:SF3,IPR036162,PS51737,IPR011109,PTHR30461, PS00397,PF00239,G3DSA:1.10.10.2600,IPR006119,SSF53041, cd00338,SM00857,IPR025827,IPR038109,PS51736, IPR006118,PF13408,G3DSA:3.40.50.1390,PF07508,Coil
MKRQTAKLNDKLLLRVAIYIRVSTDQQAQDGDSVRDQLATGQKYIENHENMILADTYVDDGISGQKVKRDDFQRLMNDVRAGSIDLIIFTRLDRWFRNLRHYLNTQDVLDKNGVSWTATEQPYFDTSTPHGRAFVNNSMIWAELEAQNDSDRILSVFDDKVENSEVLSGSTPLGYRIENKHLVPDNDAPTAAAIFEYYRSNGNLAMTLRYMETEFGLIRSSASLKNMLTNTKYIGEFRTNKNYCPAIIDRDLFDDVQRLLKINIKSGKNHDYIFSGLVVCEECEHTMSGCQQRNSRILADGTRVVYKYNSYRCRQGITLHRCPNHKVMLESTLEKILLARIRPELENYIAEYEVANRPAMRTDSKRRNLEHKMQKLKELYLNDLITMDEFKVDREKLMQQLDKIKSDDSQPMKDLSYLKNFLKTDFENIYVSLSIPEKRELWRSIIREIRVDHERNVRIIFL

SEQ ID NO: 8048 - protein, 462 aa, Unknown
  Description of Unknown: Integrase B8049 sequence
  PTHR30461:SF3,cd00338,SM00857,IPR036162,PF13408, PS51737,G3DSA:3.40.50.1390,IPR025827,IPR006119,SSF53041, IPR011109,PTHR30461,PS51736,Coil,PF00239
MSYFNFNPDLVGVRVVKYIRCSHEGQVLHGDTLEAQNLILDEFIAANKMVLVDTFVDEAMTARKKYTKRKEFVRLLDGVRSHNFDLIIFTKLDRWFRNIGDYHKIQEILDANHVQWKAVTENYDTTTTNGRLHINIRLSVAQDECDRDSDRIKDVFAYKLKNKTFISGALPRGLMLDAEKHVVHDPEWKQWALDMFDHFESCCSKRDTLLFLMDKYNMYLCYDTIVRSLKNPLYKGFYRDDPDFCEPLIDPARFDRIQNLAIRNVRVRRSRQTYVFCGLLVCASCEHYMTGVATYHTLSGGKEKMYKRYRCNMHASSHSCPHSKMYSEEMLEQYMISNVCSAFSCYIAEYAVAAASAKKKNTAAEIAKIERKLKKLYDLFMDDLIDKEAYKSEYDSFNKQLNELKSIPFAPANDYKKVQELLSGDWSAVYTSFNNNEKNAFWKSFIDKIVIHEDGKIDIIFL

SEQ ID NO: 8049 - protein, 462 aa, Unknown
  Description of Unknown: Integrase B8050 sequence
  PTHR30461:SF3,SM00857,G3DSA:1.10.10.2600,IPR036162,PF13408, IPR025827,G3DSA:3.40.50.1390,PS51737,IPR006119,IPR038109, PF07508,IPR011109,SSF53041,PF00239, PTHR30461,PS51736,Coil,cd00338
MIKKELSSAGPLRVALYIRVSGEEQKIKGLSLEAQQERLEEYARNQGWIVVGTYIDAAKTARKDMRKRSEFQKMINSVKRDEIDLLLFCRLDRWFRSVADYYKIMEILQVHHCDWKTTDEEYDTSTANGRLYINVKLSIAQNEADICSERISVVFDSKVQHGTVVSGNCPFGYIVNGEKRLAIDPDAAAIVRDAFNYYESSVSQRGTIRHIRETYGVNWCDATFRRMLSERLYTGVYDSNKRFNENFCEPIIDAAQFDRVQKLLKKNARFSPAGNIYIFTSILKCAECLHNLSGCRTRSGNRYYYYYRCNQHLQRGRCPHNNSVREDYIESWLFEHLQEELERCKLEWEIRSAERKKKNRLNDKAVLKRKLTKLKELYMNDLINIEEYKKDYQLYTAALQQIPDEAPEETPPDFSAVERMLQADFRNIYDSLTREEKRTLWRSVISEIRVDRDNNITGIIFG

SEQ ID NO: 8050 - protein, 462 aa, Unknown
  Description of Unknown: Integrase B8051 sequence
  PTHR30461:SF3,SM00857,IPR006118,IPR036162,PF13408, PS51737,G3DSA:3.40.50.1390,Coil,IPR025827,IPR006119, SSF53041,IPR011109,PTHR30461,PS00397,PS51736, cd00338,PF00239
MMKLQRCAIYIRVSTTEQMMHGKSLESQKEYLINYAKEHNMAVVGVYADEGKTARKELKKRKAIHSLLEDVKAGKIDVIIFWRIDRWFRNLSDFYKVQDILDSHNVRWISTSEPGINMETRDGRLQLNVVLSIGQNEVDTTSERIKFVNEASIRNGKLIFGDVNMGYGYKSGVVDGQKRMIKDPDREHVVDAFYKYFFKHQNKCATLRYIQETYDPDFSFGIMRTLLSSEFYKGTYRGFPYCPAYLTEDEWSTLQKIQKRNVKATPSGRIYLFAGLIRCPVCGQKLCGTGCSSIINRKTGAKRTYCYYRCNRAMIDHICSYRHRLSQNLVENYLLDNLENEYKNYKVKCEKIEKEKEKQKKKQSPEKLRKELDRLNFLFQKGRIEWDYYNEEYSRVESELNDLQNSLPEPAPNYSYLEELLDTDFRTMYDQLSQENRRAFWRSIIQEIHVNEDHAIASVDFL

SEQ ID NO: 8051 - protein, 462 aa, Unknown
  Description of Unknown: Integrase B8052 sequence
  PTHR30461:SF3,IPR036162,PS51737,IPR011109,PTHR30461, PS00397,PF00239,G3DSA:1.10.10.2600,IPR006119,SSF53041, cd00338,SM00857,IPR025827,IPR038109,PS51736, IPR006118,PF13408,G3DSA:3.40.50.1390,Coil
MKRQTAKLNDKLLLRVAIYIRVSTDQQAQDGDSVRDQLATGQKYIENHENMILADTYVDDGISGQKVKRDDFQRLMNDVRAGSIDLIIFTRLDRWFRNLRHYLNTQDVLDKNGVSWTATEQPYFDTSTPHGRAFVNNSMIWAELEAQNDSDRILSVFDDKVDNSEVLSGSTPLGYRIENKHLVPDNDAPTAAAIFEYYRSNGNLVMTLRYMETEFGLIRSSASLKNMLTNTKYIGEFRTNKNYCPAIIDRDLFDDVQRLLKINIKSGKNHDYIFSGLVVCEECEHTMSGCQQRNSRILADGTRVVYKYNSYRCRQGITLHRCPNHKVMLESTLEKILLARIRPELENYIAEYEVANRPAMRTDSKRRNLEHKMQKLKELYLNDLITMDEFKVDREKLMQQLDKIKSDDSQPMKDLSYLKNFLKTDFENIYVSLSIPEKRELWRSIIREIRVDHERNVRIIFL

SEQ ID NO: 8052 - protein, 462 aa, Unknown
  Description of Unknown: Integrase B8053 sequence
  PTHR30461:SF3,cd00338,SM00857,IPR036162,PF13408, IPR025827,G3DSA:3.40.50.1390,IPR006119,SSF53041,PTHR30461, PS51736,Coil,PF00239
MSFFTPNPQLFGLRVAKYIRCSHDDQVLHGDTLDAQNELLDDFVKVNKMVLVDTFIDEALTARKKFTKRKEFVRLLDGVKAHDFDLIIFTKLDRWFRNIGDYHKIQEILEANGVQWKAVTENYDTTTTNGRLHINIRLSVAQDECDRDSDRIKDVFAYKLKNKTYLSGSLPRGLKLDAEKHVIIDPEWNCFALDMFDHFEATCSKRDTQLFLQDKYNIRVCYDTVARYLKNPIFKGQYRNDPDFCPATISPERFDRIQNLAIRNVRIRHTQQFYIFSGLLICSSCNHIMTGTVTYRKMADGTEKAYKSYRCNFRAQSKLCDRGRSYREEYVEEYMLNHIRPALSDYVAKYEVTAASAVRKNPVEEISKIERKIKKLYDLFMDDLIDKNAYRSEYDKFKKQIEELQKCPAAPVRNLDSVRKLLNENWEAVYGTFSNQEKNVFWKSFVESVLVYEDGSMDIHFL

SEQ ID NO: 8053 - protein, 462 aa, Unknown
  Description of Unknown: Integrase B8054 sequence
  PTHR30461:SF3,cd00338,SM00857,IPR036162, PF13408,PS51737,IPR025827,G3DSA:3.40.50.1390, IPR006119,IPR011109,SSF53041,PTHR30461, PS51736,Coil,PF00239
MSFFTPNPQLFGLRVVKYIRCSHDDQVLHGDTLEAQDLILEDFIKVNRMILVDTFIDEALTARKKFNKRKEFVRLLDGVKAHSFDLIIFTKLDRWFRNIGDYHKIQEILEANGVQWKAVTENYDTTTTNGRLHINIRLSVAQDECDRDSDRIKDVFAYKLKNKTYVSGSLPRGLKLDAEKHVIIDPEWNCFALDMFDRFEATCSKRDTQLFLQDKYNIRVCYDTVARYLKNPLFKGQYRDDPDFCPATISPERFERIQKLAIRNVRIRHTQQFYIFSGLLICSSCNHIMTGTVTYRKMADGTEKAYKSYRCNFKAQSKLCDRGKTYREEYVEEYMLNHIRPALSDYVAKYEVTAASAVQKNPVEEMSKIERKIKKLYDLFMDDLIDKDAYRSEYDKFKKQIEELQKCPAAPVRNLDSVRKLLNDDWEAVYNTFSNQEKNVFWKSFVESVLVHEDGSMDIHFL

SEQ ID NO: 8054 - protein, 462 aa, Unknown
  Description of Unknown: Integrase B8055 sequence
  PTHR30461:SF3,SM00857,IPR036162,PF13408,PS51737, IPR025827,G3DSA:3.40.50.1390,IPR006119,SSF53041,IPR011109, PF00239,PTHR30461,PS51736,Coil,cd00338
MSFFTPNPQLFGLRVAKYIRCSHDDQVLHGDTLDAQNELLDDFVKVNKMVLVDTFIDEALTARKKFTKRKEFVRLLDGVKAHDFDLIIFTKLDRWFRNIGDYHKIQEILEANGVQWKAVTENYDTTTTNGRLHINIRLSVAQDECDRDSDRIKDVFAYKLKNKTYLSGSLPRGLKLDAEKHVIIDPEWNCFALDMFDRFEATCSKRDTQLFLQDKYNIRVCYDTVARYLKNPLFKGQYRDDPDFCPATISPERFERIQKLAIRNVRIRHTQQFYIFSGLLICSSCNHIMTGTVTYRRMADGTEKAYKSYRCNFKAQSKLCDRGKTYREEYVEEYMLNHIRPALSDYVAKYEVTAASAVQKNPVEEMSKIERKIKKLYDLFMDDLIDKDAYRSEYDKFKKQIEELQKCPAAPVRNLDSVRKLLNDDWEAVYNTFSNQEKNVFWKSFVESVLVHEDGSMDIHFL

SEQ ID NO: 8055 - protein, 462 aa, Unknown
  Description of Unknown: Integrase B8056 sequence
  PTHR30461:SF3,SM00857,IPR006118,IPR036162,PF13408, IPR025827,G3DSA:3.40.50.1390,PS51737,Coil,IPR006119, SSF53041,IPR011109,PTHR30461,PS00397, PS51736,cd00338,PF00239
MMKFQRCAIYIRVSTTEQMMHGKSLESQKEYLINYAKEHNMAVVGVYADEGKTARKELKKRKAIHSLLEDVKAGKIDVIIFWRIDRWFRNLSDFYKVQDILDSHNVRWISTSEPGINMETRDGRLQLNVVLSIGQNEVDTTSERIKFVNEASIRNGKLIFGDVNMGYGYKSGIVDGQKRMVKDPDREHVVDAFYKYFFKHQNKCATLRYIQETYDPDFSFGIMRTLLSSEFYKGTYRGFPYCPAYLTEDEWNKLQKIQKRNVKATPSGRIYLFAGLIRCPVCGQKLCGTGCSSIINRKTGAKRTYCYYRCNRAMIDHICSYRHRLSQNLVENYLLDNLENEYKNYKVKCEKIEKEKEKQKKKQSPEKLRKELDRLNFLFQKGRIEWDYYNEEYSRVESELNDLQNSLPEPAPNYSYLEELLDTDFRTMYDQLSQENRRAFWRSIIQEIHVNEDHAIASVDFL

SEQ ID NO: 8056 - protein, 462 aa, Unknown
  Description of Unknown: Integrase B8057 sequence
  PTHR30461:SF3,cd00338,SM00857,IPR036162,PF13408, PS51737,G3DSA:3.40.50.1390,IPR025827,IPR006119,IPR011109, SSF53041,PTHR30461,PS51736,Coil,PF00239
MSFFTPNPQLFGLRVVKYIRCSHDDQVLHGDTLEAQDLILEDFIKVNRMILVDTFIDEALTARKKFNKRKEFVRLLDGVKAHSFDLIIFTKLDRWFRNIGDYHKIQEILEANGVQWKAVTENYDTTTTNGRLHINIRLSVAQDECDRDSDRIKDVFAYKLKNKTYVSGSLPRGLKLDAEKHVIIDPEWNCFALDMFDRFEATCSKRDTQLFLQDKYNIRVCYDTVVRYLKNPLFKGQYRDDPDFCPATISPERFERIQKLAIRNVRIRHTQQFYIFSGLLICSSCNHIMTGTVTYRKMADGTEKAYKSYRCNFRAQSKLCDRGRSYREEYIEEYMLNHIRPALSDYVAKYEVTAANTVQKNPVEEISKIERKIKKLYDLFMDDLIDKETYRSEYDKFKKQIEELQKCPAAPVRNLDSVRKLLNEDWEAVYNTFSNQEKNVFWKSFVESVLVHEDGSMDIHFL

SEQ ID NO: 8057 - protein, 462 aa, Unknown
  Description of Unknown: Integrase B8058 sequence
  PTHR30461:SF3,cd00338,SM00857,IPR036162,PF13408, PS51737,IPR025827,G3DSA:3.40.50.1390,IPR006119,SSF53041, IPR011109,PTHR30461,PS51736,Coil, PF00239
MFYTQSCPELNGMRVAKYIRCSHDDQVAHGDTLEAQNEILDDFILKNHLILVDTFVDEALTARKKYTKRKEFVRLLDGVKRHDFDLIIFTKLDRWFRNIGDYHRIQEILEANGVQWKAVTESYDTTTTNGRLHINIRLSVAQDECDRDSDRIKDVFEYKLKNKTYLSGSLPHGLKLDPEKHVIIDPEWKQFALDLFDHFEATNSKRGTLMYLKEKYQLPRLCHDTIVRSLRNTLYKGEYRGIKDFCPALIDPERFDRIQVLAKRDVRNSRTRTYIFNGLLICSDCGHNMTCQTTVRKRADGKKYEYRAYRCNQHYSMHCCDRNKSYREELIEENMLSNIRPALADYIAEYEIDGECPQTKDPAAEANRIRAKLKKLYELFLDDLIDKDMYKKEYEQLHAQLQEANTAAAAPHKDVNALKVFLSQEWEDVYKTFSYEEKAAFWKSFVQSITLHEDGKMDIVFL

SEQ ID NO: 8058 - protein, 462 aa, Unknown
  Description of Unknown: Integrase B8059 sequence
  PTHR30461:SF3,cd00338,SM00857,IPR036162,PF13408, PS51737,G3DSA:3.40.50.1390,IPR025827,IPR006119,IPR011109, SSF53041,PTHR30461,PS51736,Coil,PF00239
MSYFNFNPDLVGVRVVKYIRCSHEGQVLHGDTLEAQNLILDEFIATNKMVLVDTFIDEAMTARKKYTKRKEFVRLLDGVRSHNFDLIIFTKLDRWFRNIGDYHKIQEILDANHVQWKAVTENYDTTTTNGRLHINIRLSVAQDECDRDSDRIKDVFAYKLKNKTFISGALPRGLMLDAEKHVVHDPEWKQWALDMFDHFESCCSKRDTLLFLMDKYNMYLCYDTIVRSLRNPLYKGFYRGDPDFCEPLIDPARFDRIQNLAIRNVRVRRSRQTYVFCGLLVCASCEHYMTGVATYHTLSGGKEKMYKRYRCNMHASSHSCPHSKMYSEEMLEQYMISNVCSAFSCYIAEYAVAAASAKKKNTAAEIAKIERKLKKLYDLFMDDLIDKEAYKSEYDSFNKQLNELKSIPFAPANDYKKVQELLSGDWSAVYTSFNNNEKNAFWKSFIDKIVIHEDGKIDIIFL

SEQ ID NO: 8059 - protein, 462 aa, Unknown
  Description of Unknown: Integrase B8060 sequence
  PTHR30461:SF3,IPR036162,PS51737,IPR011109,PTHR30461, PS00397,PF00239,G3DSA:1.10.10.2600,IPR006119,SSF53041, cd00338,SM00857,IPR025827,IPR038109, PS51736,IPR006118,PF13408,G3DSA:3.40.50.1390,PF07508,Coil
MKRQTAKLNDKLLLRVAIYIRVSTDQQAQDGDSVRDQLATGQKYIENHENMILADTYVDDGISGQKVKRDDFQRLMNDVRAGSIDLIIFTRLDRWFRNLRHYLNTQDVLDKNGVSWTATEQPYFDTSTPHGRAFVNNSMIWAELEAQNDSDRILSVFDDKVDNSEVLSGSTPLGYRIENKHLVPDNDAPTAAAIFEYYRSNGNLAMTLRYMETEFGLIRSSASLKNMLTNTKYIGEFRTNKNYCPAIIDRDLFDDVQRLLKINIKSGKKHDYIFSGLVVCEECEHTMSGCQQRNSRILADGTRMVYKYNSYRCRQGITLHRCPNHKVMLESTLEKILLARIRPELENYIAEYEVANRPAMRTDSKRRNLEHKMQKLKELYLNDLITMDEFKVDREKLMQQLDKIKSDDSQPMKDLSYLKNFLKTDFENIYVSLSIPEKRELWRSIIREIRVDHERNVRIIFL

SEQ ID NO: 8060 - protein, 462 aa, Unknown
  Description of Unknown: Integrase B8061 sequence
  PTHR30461:SF3,cd00338,SM00857,IPR036162,PF13408, PS51737,G3DSA:3.40.50.1390,IPR025827,IPR006119,IPR011109, SSF53041,PTHR30461,PS51736,Coil,PF00239
MSFFTPNPQLFGLRVAKYIRCSHDDQVLHGDTLDAQNELLDDFVKVNKMVLVDTFIDEALTARKKFTKRKEFVRLLDGVKAHDFDLIIFTKLDRWFRNIGDYHKIQEILEANGVQWNAVTENYDTTTTNGRLHINIRLSVAQDECDRDSDRIKDVFAYKLKNKTYLSGSLPRGLKLDAEKHVIIDPEWNCFALDMFDRFEATCSKRDTQLFLQDKYNIRVCYDTVARYLKNPLFKGQYRDDPDFCPATISPERFERIQKLAIRNVRIRHTQQFYIFSGLLICSSCNHIMTGTVTYRRMADGTEKAYKSYRCNFKAQSKLCDRGKTYREEYVEEYMLNHIRPALSDYVAKYEVTAASAVQKNPVEEMSKIERKIKKLYDLFMDDLIDKDAYRSEYDKFKKQIEELQKCPAAPVRNLDSVRKLLNDDWEAVYNTFSNQEKNVFWKSFVESVLVHEDGSMDIHFL

SEQ ID NO: 8061 - protein, 462 aa, Unknown
  Description of Unknown: Integrase B8062 sequence
  PTHR30461:SF3,cd00338,SM00857,IPR036162,PF13408, PS51737,G3DSA:3.40.50.1390,IPR025827,IPR006119,IPR011109, SSF53041,PTHR30461,PS51736,Coil, PF00239
MSFFTPNPQLFGLRVVKYIRCSHDDQVLHGDTLEAQDLILEDFIKVNRMILVDTFIDEALTARKKFNKRKEFVRLLDGVKAHSFDLIIFTKLDRWFRNIGDYHKIQEILEANGVQWKAVTENYDTTTTNGRLHINIRLSVAQDECDRDSDRIKDVFAYKLKNKTYVSGSLPRGLKLDAEKHVIIDPEWNCFALDMFDRFEATCSKRDTQLFLQDKYNIRVCYDTVARYLKNPLFKGQYRDDPDFCPATISPERFERIQKLAIRNVRIRHTQQFYIFSGLLICSSCNHIMTGTVTYRRMADGTEKAYKSYRCNFRAQSKLCDRGRSYREEYIEEYMLNHIRPALSDYVAKYEVTAASAVQKNPVEEMSKIERKIKKLYDLFMDDLIDKDAYRSEYDKFKKQIEELQKCPAAPVRNLDSVRKLLNEDWEAVYNTFSNQEKNVFWKSFVESVLVYEDGSMDICFL

SEQ ID NO: 8062 - protein, 462 aa, Unknown
  Description of Unknown: Integrase B8063 sequence
  PTHR30461:SF3,IPR036162,PS51737,IPR011109,PTHR30461, PS00397,PF00239,G3DSA:1.10.10.2600,IPR006119,SSF53041, cd00338,SM00857,IPR025827,IPR038109,PS51736, IPR006118,PF13408,G3DSA:3.40.50.1390,PF07508,Coil
MENKTNVEEVALYVRVSTDEQAINGDSLRTQRDELTKYALENGFHVFGIYEDDGFSATNLDRPALQRLLKDVEQNKINRILITKLDRLSRGVRNYYKVLDVLDEHGVFWQTIFEKYDSSTANGRLHINIMLSVAENESAQTSERIKSVFKTKLKNKEIIAGKIPIGLKKKDKKLIIDEEKKQVVLDVFDEYKKTTSAYQTFQNIDLKYPELNLNYMKVYRMLNNKLYTGIKVTERGNIEDFCPAIIDSETFFNTQKMLEKNARKPSSENSGGYIFQGMLKCAECGYTLGGKFYSKNPESSRYYYICKKHLLSHICNCSTNFNEQKIEQKLLQELKIQLKNYILSYEYKQNSIKKIDKSKEISSLENKLTKLKDLYIRDLIRIEDYEKDYKQCVSQLESLYQEQNKIETNPIDNNLEALKSFLKQDFSSIYNKISRLEKRKIWLSIIDYITLDKDYNMKIFFI

SEQ ID NO: 8063 - protein, 462 aa, Unknown
  Description of Unknown: Integrase B8064 sequence
  PTHR30461:SF3,cd00338,SM00857,IPR036162,PF13408, IPR025827,G3DSA:3.40.50.1390,PS51737,IPR006119,IPR011109, SSF53041,PTHR30461,PS51736,Coil,PF00239
MSFFTPNPQLFGLRVVKYIRCSHDDQVLHGDTLEAQDLILEDFIKVNRMILVDTFIDEALTARKKFNKRKEFVRLLDGVKAHSFDLIIFTKLDRWFRNIGDYHKIQEILEANGVQWKAVTENYDTTTTNGRLHINIRLSVAQDECDRDSDRIKDVFAYKLKNKTYVSGSLPRGLKLDAEKHVIIDPEWNCFALDMFDRFEATCSKRDTQLFLQDKYNIRVCYDTVARYLKNPLFKGQYRDDPDFCPATISPERFERIQKLAIRNVRIRHTQQFYVFSGLLICSSCNHIMTGTVTYRRMADGTEKAYKSYRCNFKAQSKLCDRGKTYREEYVEEYMLNHIRPALSDYVAKYEVTAASAVQKNPVEEISKIERKIKKLYDLFMDDLIDKEAYRSEYDKFKKQIEELQKCPAAPVRNLDSVRKLLNEDWEAVYNTFSNQEKNVFWKSFVESVLVYEDGSMDIHFL

SEQ ID NO: 8064 - protein, 462 aa, Unknown
  Description of Unknown: Integrase B8065 sequence
  PTHR30461:SF3,cd00338,SM00857,IPR036162,PF13408, IPR025827,PS51737,G3DSA:3.40.50.1390,IPR006119,IPR011109, SSF53041,PTHR30461,PS51736,Coil, PF00239
MSFFTPNPQLFGLRVVKYIRCSHDDQVLHGDTLEAQDLILEDFVKVNRMILVDTFIDEALTARKKFNKRKEFVRLLDGVKAHSFDLIIFTKLDRWFRNIGDYHKIQEILEANGVQWKAVTENYDTTTTNGRLHINIRLSVAQDECDRDSDRIKDVFAYKLKNKTYVSGSLPRGLKLDAEKHVIIDPEWSCFALDMFDRFEATCSKRDTQLFLQDKYNIRVCYDTVARYLKNPLFKGQYRDDPDFCPATISPERFERIQKLAIRNVRIRHTQQFYIFSGLLICSSCNHIMTGTVTYRRMADGTEKAYKSYRCNFKAQSKLCDRGKTYREEYVEEYMLNHIRPALSDYVAKYEVTAASAVQKNPVEEMSKIERKIKKLYDLFMDDLIDKDAYRSEYDKFKKQIEELQKCPAAPVRNLDSVRKLLNDDWEAVYNTFSNQEKNVFWKSFVESVLVHEDGSMDIHFL

SEQ ID NO: 8065 - protein, 462 aa, Unknown
  Description of Unknown: Integrase B8066 sequence
  PTHR30461:SF3,SM00857,IPR006118,G3DSA:1.10.10.2600,IPR036162, PF13408,IPR025827,G3DSA:3.40.50.1390,IPR006119,IPR038109, SSF53041,PTHR30461,PS00397,PS51736,cd00338, PF00239
MSNTPKTITRAALYIRVSTEEQALHGYSLEAQEAALKQYAIDHDYKVVHIYHDEGFSARKPVMRRKVMQELLADVQAGKIDLILFTKLDRWFRNVHDYHQVQAVLDKYGVAWKTILEDYQTTTADGRLKVNIMLSVAENEADRTSERIKFVFDNKVRNGEYCFGGPMAPYGYKAEVINGVRKLVKDPETESATAAFWDKMIKYHNTRRAARETNLEYGISRDHQSWRKVVRNKIYTGELRGIKDFCPAYISAADWQDIQYPERRIKSTQGDRHYLFVGLLRCPVCGCTLKATFKTYPSDRSKEYYGYRCSAKSLGRCTYSRQLSERNLEKYLVAHLRESLESYIAKLQLSAAAPKKKRKKADTTKLRDQLRRLNVIYLGGNISDDDYNAQATILRDAIIKAEQEEKQLAQVIDFTALRQLLDSNFELSYKSMDREEKQRFWHSIIAEIQLDDNQVKEIIFKS

SEQ ID NO: 8066 - protein, 462 aa, Unknown
  Description of Unknown: Integrase B8067 sequence
  PTHR30461:SF3,SM00857,IPR006118,G3DSA:1.10.10.2600,IPR036162, PF13408,IPR025827,G3DSA:3.40.50.1390,IPR006119,IPR038109, SSF53041,PTHR30461,PS00397,PS51736,cd00338, PF00239
MSNTPETITRAALYIRVSTEEQALHGYSLEAQEAALKQYAIDHDYKVVHIYHDEGFSARKPVMRRKVMQELLADVQAGKIDLILFTKLDRWFRNVHDYHQVQNILDKHGVAWKTILEDYQTTTADGRLKVNIMLSVAENEADRTSERIKFVFDNKVRNGEYCFGGPMAPYGYKAEVINGVRKLVKDPETESATAAFWDKMIKYHNTRRAARETNLEYGISRDHQSWRKVVRNKIYTGELRGIKDFCPAYISAADWQDIQCLEHRIKSTQGDRHYLFVGLLRCPVCGRTLKATFKTYPNDRSKEYYGYRCTAKPLGCCTYSRQLSERKLEKYLVAHLRESLESYIAKLQLSASAPKKKRKKADTTKLRDQLRRLNVIYLAGNISDDDYNAQANILRDAIIKAEQEEKQLAQVIDFTALRQLLDSNFELSYKAMSREEKQRFWHSIIAEIQLDDNQVKEIIFKS

SEQ ID NO: 8067 - protein, 462 aa, Unknown
  Description of Unknown: Integrase B8068 sequence
  PTHR30461:SF3,cd00338,SM00857,IPR036162,PF13408, IPR025827,G3DSA:3.40.50.1390,PS51737,IPR006119,SSF53041, IPR011109,PTHR30461,PS51736,Coil,PF00239
MSFFTPNPQLFGLRVVKYIRCSHDDQVLHGDTLEAQDLILEDFIKVNRMILVDAFVDEALTARKKFNKRKEFVRLLDGVKAHAFDLIIFTKLDRWFRNIGDYHKIQEILEANGVQWKAVTENYDTTTTNGRLHINIRLSVAQDECDRDSDRIKDVFAYKLKNKTYVSGSLPRGLKLDAEKHVIIDPEWNCFALDMFDHFEATCSKRDTQLFLQGKYNIRVCYDTVARYLKNPLFKGQYRNDPDFCPATISPERFDRIQKLAIRNVRIRHTQQFYVFSGLLICSSCNHIMTGTVTYRKMADGTEKAYKSYRCNFRAQSKLCDRGRSYREEYIEEYMLNHIRPALSDYVAKYEVTAASAVQKNPVEEISKIERKIKKLYDLFMDDLIDKEAYRSEYDKFKKQIEELQKCPAAPVYNLDSVRKLLNEDWEAVYNTFSNQEKNVFWKSFVESVLVYEDGSMDIRFL

SEQ ID NO: 8068 - protein, 462 aa, Unknown
  Description of Unknown: Integrase B8069 sequence
  IPR036162,PS51737,IPR011109,PTHR30461, PS00397,PF00239,G3DSA:1.10.10.2600,IPR006119, SSF53041,cd00338,SM00857,IPR025827,IPR038109,PS51736 ,IPR006118,PF13408,G3DSA:3.40.50.1390,PF07508,Coil
MAKKVTVIKAAKEQKHTQEERRLKVCGYARVSTGSQAQATSYTAQVEYYTEKIESNPLWEFAGVYADEGISGTNVKHRDEFQMMISDCEDGNIDLILTKSITRFARNTVECIQTIRKLKEIGVGIYFEKENINTLSEKSELFITILASVAQGESENISSNNRWAIQKRFQDGTYIISTPAYGYGKDEDGNLVIIESEAETVRWIYESYLNGMGVYVIAKALNQKGIPTIRGAEKWQDGVIQDILKNPIYEGDMLQQRTYTETRFPFVRRVNNGQRNQYLIKDSHPPIVTHEEAEAVRNLMAYRVDVLHMNKSDYTKRYLFSGRIICGECGKTFRRQKIYIGKPYEKIIWTCSGHVEDKENCCMKAIREDVLHRAFTDMWNKLYTNQGTILEPLLKELTELVAARQDSEEIRQLDKEIKDISEQSQILNQVMRKGYMDSALFMESSNKLGWCEFPYKSRVIPT

SEQ ID NO: 8069 - protein, 462 aa, Unknown
  Description of Unknown: Integrase B8070 sequence
  PTHR30461:SF3,IPR036162,PS51737,IPR011109,PTHR30461, PS00397,PF00239,G3DSA:1.10.10.2600,IPR006119,SSF53041, cd00338,SM00857,IPR025827,IPR038109,PS51736, IPR006118,PF13408,G3DSA:3.40.50.1390,PF07508,Coil
MKRQTAKLNDKLLLRVAIYIRVSTDQQAQDGDSVRDQLATGQKYIENHENMILADTYVDDGISGQKVKRDDFQRLMNDVRAGSIDLIIFTRLDRWFRNLRHYLNTQDVLDKNGVSWTATEQPYFDTSTPHGRAFVNNSMIWAELEAQNDSDRILSVFDDKVDNSEVLSGSTPLGYRIENKHLVPDDDAPTAAAIFEYYRSNGNLAMTLRYMETEFGLIRSSASLKNMLTNTKYIGEFRTNKNYCPAIIDRDLFDDVQRLLKINIKSGKNHDYIFSGLVVCEECEHTMSGCQQRNSRILADGTRMVYKYNSYRCRQGITLHRCPNHKVMLESTLEKILLARIRPELENYIAEYEVANRPAMRTDSKRRNLEHKMQKLKELYLNDLITMDEFKVDREKLMQQLDKIKLDDSQPMKDLSYLKNFLKTDFENIYVSLSIPEKRELWRSIIREIRVDHERNVRIIFL

SEQ ID NO: 8070 - protein, 462 aa, Unknown
  Description of Unknown: Integrase B8071 sequence
  PTHR30461:SF3,cd00338,SM00857,IPR036162,PF13408, IPR025827,G3DSA:3.40.50.1390,PS51737,IPR006119,SSF53041, IPR011109,PTHR30461,PS51736,Coil,PF00239
MSFFTPNPQLFGLRVVKYIRCSHDDQVLHGDTLEAQDLILEDFIKMNRMILVDTFIDEALTARKKFNKRKEFVRLLDGVKAHSFDLIIFTKLDRWFRNIGDYHKIQEILEANGVQWKAVTENYDTTTTNGRLHINIRLSVAQDECDRDSDRIKDVFAYKLKNKTYVSGSLPRGLKLDAEKHVIIDPEWNCFALDMFDHFEATCSKRDTQLFLQDKYNIRVCYDTVARYLKNPLFKGQYRDDPDFCPATISPERFERIQKLAIRNVRIRHTQQFYIFSGLLICSSCNHIMTGTVTYRRMADGTEKAYKSYRCNFKAQSKLCDRGRSYREEYIEEYMLNHIRPALSDYVAKYEVTAANAVQKNPVEEISKIERKIKKLYDLFMDDLIDKEAYRNEYDKFKKQIEELQKCPAAPVRNLDSVRKLLNEDWEAVYNTFSNQEKNVFWKSFVESVLVYEDGSMDIHFL

SEQ ID NO: 8071 - protein, 462 aa, Unknown
  Description of Unknown: Integrase B8072 sequence
  PTHR30461:SF3,IPR036162,PS51737,IPR011109,PTHR30461, PS00397,PF00239,G3DSA:1.10.10.2600,IPR006119,SSF53041, cd00338,SM00857,IPR025827,IPR038109, PS51736,IPR006118,PF13408,G3DSA:3.40.50.1390,PF07508,Coil
MKRQTAKLNDKLLLRVAIYIRVSTDQQAQDGDSVRDQLATGQKYIENHENMILADTYVDDGISGQKVKRDDFQRLMNDVRAGSIDLIIFTRLDRWFRNLRHYLNTQDVLDKNGVSWTATEQPYFDTSTPHGRAFVNNSMIWAELEAQNDSDRILSVFDDKVENSEVLSGSTPLGYRIENKHLVPDNDAPTAAAIFEYYRSNGNLAMTLRYMETEFGLIRSSASLKNMLTNTKYIGEFRTNKNYCPAIIDRDLFDDVQRLLKINIKSGKNHDYIFSGLVVCEECEHTMSGCQQRNSRILADGTRVVYKYNSYRCRQGITLHRCPNHKVMLESTLEKILLARIRPELENYIAEYEVANRPAMRTDSKRRNLEHKMQKLKELYLNDLITMDEFKVDREKLMQQLDKIISDDSQPMKDLSYLKNFLKTDFENIYVSLSIPEKRELWRSIIREIRVDHERNVRIIFL

SEQ ID NO: 8072 - protein, 462 aa, Unknown
  Description of Unknown: Integrase B8073 sequence
  SM00857,IPR036162,PF13408,IPR025827,G3DSA:3.40.50.1390, IPR006119,SSF53041,PTHR30461,PS51736,cd00338, PF00239
MGDDMKEKIPRCAIYDRVSTDLQVKEGLSLEAQRQALTDYAISHGYKIVGYYADEGITARKKMQNRKDLVRLLNDVKSDKIDLILVTKLDRWFRNVKDYHNTQAILEAHGCNWKTIFEEYDTSTSNGRFAINIMLSVNENECDRDSDRIKSVFEYKKSRKEHLNGRPGYGYIADENKKLIKDPATQHIVEDTFKHYFSTYSKNATIEYILDKYSGDPNAPTMYQVNRILTCETYAGRKYGIDNYCEPYITLKKHEQIISVCDAKIIPHQNEPFLFSSMIKCPICGRNMSGFTKKHTLKNGEISKYKRYRCEAKFTEFHNGACITESVIESYLLNNIMGELNKELLQIKTREKENKKKPASNPVKIQEEINRLNVMYQKGRIDDEYYDKQYSKLKQKLSDAQHPQKVTSLEAYKPIIQTLNDGWMEMYHTLDIKHKKAFWKGLIEAIYIDKESRKLCGFKFLL

SEQ ID NO: 8073 - protein, 462 aa, Unknown
  Description of Unknown: Integrase B8074 sequence
  PTHR30461:SF3,IPR036162,PS51737,IPR011109, PTHR30461,PS00397,PF00239,G3DSA:1.10.10.2600, IPR006119,SSF53041,SM00857,IPR025827,IPR038109,PS51736 ,cd03768,IPR006118,PF13408,G3DSA:3.40.50.1390,PF07508,Coil
MKKVACYVRVSTENQIENYSIDEQTERLEAYCKAKDYAIYKIYTDGGYSGGNMNRPALNAMLADIEHKLFDTIIVYKLDRLSRSQKDTLMLIEDYFLANNIDFVSVSENFDTSTPFGRAMIGILSVFAQLEKDQITERFTMGRIGRSKSGLFHGGGNAPKGYNYINGHLEINTVEAEQVKEIFSLFLSGKSVNAISKIMTKKYNDNLWKNALQITNCIRNSIYIGKVKFKGVEYDGEHQPIISEDDFRRANELLKSDDRIKFPAQKTPFRAGFLLSSLVYCKNCGARYSACHGYYKCYSRSKSTAKFVKDPSCKNKNWKIDELDALVISEIHKIAIDDEYKKLFKKEEKTDDTKSIKAEISKIDFQINRLLDLYQISDIPIDTIKSKITVLTNKKDELNELLNKNRRADNYKAFQAALNRFEALDDTSGIDERRLLISTLIERITIDEESVNITWRIESKIV

SEQ ID NO: 8074 - protein, 462 aa, Unknown
  Description of Unknown: Integrase B8075 sequence
  PTHR30461:SF3,IPR036162,PS51737,IPR011109,PTHR30461, PS00397,PF00239,G3DSA:1.10.10.2600,IPR006119,SSF53041, cd00338,SM00857,IPR025827,IPR038109,PS51736, IPR006118,PF13408,G3DSA:3.40.50.1390,PF07508,Coil
MKRQTAKLNDKLLLRVAIYIRVSTDQQAQDGDSVRDQLATGQKYIENHENMILADTYVDDGISGQKVKRDDFQRLMNDVRAGSIDLIIFTRLDRWFRNLRHYLNTQDVLDKNGVSWTATEQPYFDTSTPHGRAFVNNSMIWAELEAQNDSDRILSVFDDKVENSEVLSGSTPLGYRIENKHLVPDDDAPTAAAIFEYYRSNGNLAMTLRYMETEFGLIRSSASLKNMLTNTKYIGEFRTNKNYCPAIIDRDLFDDVQRLLKINIKSGKNHDYIFSGLVVCEECEHTMSGCQQRNSRILADGTRVVYKYNSYRCRQGITLHRCPNHKVMLESTMEKILLARIRPELENYIAEYEVANRPAMRTDSKRRNLEHKMQKLKELYLNDLITMDEFKVDREKLMQQLDKIKSDDSQPMKDLSYLKNFLKTDFENIYVSLSIPEKRELWRSIIREIRVDHERNVRIIFL

SEQ ID NO: 8075 - protein, 462 aa, Unknown
  Description of Unknown: Integrase B8076 sequence
  PTHR30461:SF3,cd00338,SM00857,IPR036162,PF13408, IPR025827,PS51737,G3DSA:3.40.50.1390,IPR006119,IPR011109, SSF53041,PTHR30461,PS51736,Coil,PF00239
MSFFTPNPALFGLRVVKYIRCSHDDQVLHGDTLEAQDLILDDFIKTNRLILVDTFVDEALTARKKFNKRKEFVRLLDGVKAHDFDLIIFTKLDRWFRNIGDYHKIQEILEANGVQWKAVTENYDTTTTNGRLHINIRLSVAQDECDRDSDRIKDVFAYKLQNKTYVSGSLPRGLRLDEEKHIIIDPEWNCFALDMFDHFEATCSKRDTQLFLQDKYGIRVCYDTVVRYLKNPLFKGQYRNDPDFCPKTISAERFDRIQKLADKNIRKKRSPRQFIFSGLLVCSSCDHYFVGASTYYKLANGTQVCRKSYRCGYHTESKLCDRSKTYREEYVEEYMLNHIRPALSDYITDFGVATAGTINKNPAGEIAKIERKMKKLYDLFMDDLIDKESYRIEYESFKNQLEELQRCPAPPVRDVSTVKKLLNEDWESVYRTFSDQEKNVFWKSFVDRVRIYEDGSMDIIFL

SEQ ID NO: 8076 - protein, 462 aa, Unknown
  Description of Unknown: Integrase B8077 sequence
  PTHR30461:SF3,SM00857,G3DSA:1.10.10.2600,IPR036162,PF13408, IPR025827,G3DSA:3.40.50.1390,PS51737,IPR006119,IPR038109, PF07508,SSF53041,IPR011109,PTHR30461, Coil,cd00338,PF00239
MFQRLGSDSSKHAFEYVLVWKLDRFSRDRYDSAIYKKKLRANGVRVLSVTEGIDESSESVLLEAILEAMAEEYSRQLAQNVKRGMRQNAEKALSLGGMPPLGYDVVSKRYTINESEAQIVRFIHERYAAGAAQKLIVDECLQRGYCAKRGNELTIGAINRILRNPKYAGTYVCDDLVLEDAIPAIVSKPLKQQVRDRLAASAKAPGHAKAKVEYLLHGKLFCGECGAPMIGECGRGKNGTTHYYYTCAARKKSRSCKKRNERKFELEKYIVEYISMYVLTDEWINAAADRVVAEYARSYAASGIKPLERQIREADKELDALVDTLIKTASATAIAKINDRIEAAEAKKRTLEADLATLRIASRVEIRKEDIVAWLDQFRVGSSSGPEYCKKIIELFVNAVYIYDDRIKMFFNVRDSAQITYPEMLALDGLECSDFDLSGVPNDSLSEQILFINGIIGMLVRR

SEQ ID NO: 8077 - protein, 462 aa, Unknown
  Description of Unknown: Integrase B8078 sequence
  PTHR30461:SF3,cd00338,SM00857,IPR036162,PF13408, IPR025827,G3DSA:3.40.50.1390,IPR006119,SSF53041,PTHR30461, PS51736,Coil,PF00239
MSFFTPNPALFGLRVVKYIRCSHDDQVLHGDTLEAQDLILDDFIKTNRLILVDTFVDEALTARKKFNKRKEFVRLLDGVKAHNFDLIIFTKLDRWFRNIGDYHKIQEILEANGVQWKAVTENYDTTTTNGRLHINIRLSVAQDECDRDSDRIKDVFAYKLQNKTYVSGSLPRGLKLDEGKHIIIDPEWNCFALDMFDHFEATCSKRDTQLFLQDKYGIRVCYDTVVRYLKNPLFKGQYRNDPDFCPKTISVERFDRIQNLADKNIRKKRSPRQFIFSGLLVCSSCDHYFVGASTYYKLANGTQVCRKSYRCGYHTESKLCDRSKTYREEYVEEYMLNHIRPALSDYITDFGVGTAGTINKNPAGEIAKIERKMKKLYDLFMDDLIDKESYRIEYESFKNQLEELQRRPTPPVRDVSAVKKLLNEDWESVYRTFSDHEKNVFWKSFVDRVRIYEDGSMDIIFL

SEQ ID NO: 8078 - protein, 462 aa, Unknown
  Description of Unknown: Integrase B8079 sequence
  PTHR30461:SF3,cd00338,SM00857,IPR036162, PF13408,IPR025827,G3DSA:3.40.50.1390,PS51737, IPR006119,SSF53041,IPR011109,PTHR30461, PS51736,Coil,PF00239
MSFFTPNPQLFGLRVVKYIRCSHDDQVLHGDTLEAQDLILEDFIKVNRMILVDTFIDEALTARKKFNKRKEFVRLLDGVKAHSFDLIIFTKLDRWFRNIGDYHKIQEILEANGVQWKAVTENYDTTTTNGRLHINIRLSVAQDECDRDSDRIKDVFAYKLKNKTYVSGSLPRGLKLDAEKHVIIDPEWNCFALDMFDHFEATCSKRDTQLFLQDKYNIRVCYDTVARYLKNPLFKGQYRDDPDFCPATISPERFERIQKLAIRNVRIRHTQQFYIFSGLLICSSCNHIMTGTVTYRRMADGTEKAYKSYRCNFKAQSKLCDRGRSYREEYIEEYMLNHIRPALSDYVAKYEVTAANAVQKNPVEEISKIERKIKKLYDLFMDDLIDKEAYRNEYDKFKKQIEELQKCPAAPVRNLDSVRKLLNEDWEAVYNTFSNQEKNVFWKSFVESVLVYEDGSMDIHFL

SEQ ID NO: 8079 - protein, 461 aa, Unknown
  Description of Unknown: Integrase B8080 sequence
  PTHR30461:SF3,IPR036162,PS51737,IPR011109,PTHR30461, PS00397,PF00239,G3DSA:1.10.10.2600,IPR006119,SSF53041, SM00857,IPR025827,IPR038109,PS51736,cd03768, IPR006118,PF13408,G3DSA:3.40.50.1390,PF07508,Coil
MRKDVKRVAIYIRVSTYEQAQEGYSIDEQKERLVQYCKAMGWVVSEIYIDPGFSGSNLERPGLQKLIAEIKAYDSVLVYKLDRISRSQKDTMYLIEDVFLKNDVDFVSMSESFDTSTPFGRAAVGLLATFAQLERENIKERMTMGMKGRARKGYWKGTSRPPIGYDYKDGNLEVNDYEAMQIRELFTIAANGIPNMPYNVKNMARYLSQKYSNKYGNWTDSTGITYTIQNKVYIGMVKYKDEYFPGNHMPLIDNELFEIANSRLNAYLSSFSEHSTYTKYMLSGLTVCGICGRPYYRRNSQTKIGGIKKEYGYYSCQGRKADIPVKCQSKIYRQEELEQEVINQIESLKYRDFSTGNGKNDTASLLQEMKQIDSRQERLIDLYSLGSVSREQIDDKIRELNQQREKVKVLLSAQNTLKSEEIIKMSTCIRNVDYATQCDIAGMLIEKVVVEGENIRVYWNF

SEQ ID NO: 8080 - protein, 461 aa, Unknown
  Description of Unknown: Integrase B8081 sequence
  PTHR30461:SF3,IPR036162,PS51737,IPR011109,PTHR30461, PS00397,PF00239,G3DSA:1.10.10.2600,IPR006119,SSF53041, cd00338,SM00857,IPR025827,IPR038109,PS51736, IPR006118,PF13408,G3DSA:3.40.50.1390,Coil
MNKILRAASYIRVSTSEQALHGYSLQAQKEYLESYALSHGMRIVACFADEGQTARKELKKRKAIRELLQIVEQEKIDVILFWKMDRWFRNVSDFYKVQDVLDAHNVRWIAVAEPNINLDTREGRLNLNIMLSIGQNEVDTTSERIRFTVDNMIKNGRLVWGDKNLPLGYHIEDKKIVKTEEEAPIVEEFFRYIKVHRAKRQTMLHIQEMFHIPFSYYQIRTMLNSDFYAGKYRDNYNYCPAYLSYDELLEIRAALKCNIKAAPSGRIYLFSGLLRCPLCGTKLAARGALMISNRKTGAKKHYNYYGCNKALLSNTCTYTHRVSQILLEKYLLDNLAAEYAAFQIRCSSVSENKKAAAKKQRSPKKIESEMERLNQIFQLGRIEFDEYDQKYTNLEKELKEATKIEPVKVKKQYPNIEKVLSQDFRGIYDSLTLENRRAFWHSIIKEVCLDENNQVSEVIFL

SEQ ID NO: 8081 - protein, 461 aa, Unknown
  Description of Unknown: Integrase B8082 sequence
  PTHR30461:SF3,SM00857,IPR006118,IPR036162,PF13408, IPR025827,G3DSA:3.40.50.1390,PS51737,IPR006119,SSF53041, IPR011109,PTHR30461,PS00397,PS51736,cd00338, PF00239
MKLERCAIYIRVSTAEQMMHGKSLEAQREYLEVYAREHNMVIAGVYADEGKTARKELKKRKAIHALLEDVKAGKIDVILFWRLDRWFRNLSDFYKVQDILDEYHVRWISTSEPGINMETRDGRLQLNVVLSIGQNEVDTTSERIKFVNEASIRQGKLIFGDANMGYGYKSGTVDGVKCMIKDPEREEAVNAFYQYFFKHQSKTGALKYIQENYDPDFSYSSMRTLLSSEFYKGTYRGAPYCPAYLSPEDWDRLQKISDKNIKVNRSNRVYLFSGLIYCPNCGNLLSGCGCSSIINRKTGAKRTYCYYRCNKAYMDNHCNYRHRLSQNLVESYLLEHLEDEYQKYHVRSGQIREKQKKEKKIKTPEKLRSELERLNLLFQKGRVEWEYYNKEYSRIEYELKEALAMQPEIERDVSYVNEIIQSDFRSMYAKLSLENRRAFWRSIVSDIHVAKDSTVKEVNFL

SEQ ID NO: 8082 - protein, 461 aa, Unknown
  Description of Unknown: Integrase B8083 sequence
  PTHR30461:SF3,SM00857,PS51736,IPR036162,PS51737, G3DSA:3.40.50.1390,PF13408,IPR025827,IPR006119,PF07508, IPR011109,SSF53041,PTHR30461,mobidb-lite,cd00338, PF00239
MERIVRKLDKKILAFAQRKRVAAYARVSSGKDAMLHSLSAQVSYYSKKIQNNPQWEYIGVYADEAVTGTKGSRPEFQRMLMDCKTGKIDLILTKSVSRFARNTVTMLEIVRELKSIGIDVYFEKENVHSMSGDGELMLTILSSFAQEESLSVSENCKWRIRDKFKQGIPTNNAILGYKIVDGTFEIIPDEAKVVKMIFEDYLSGMGRNAIMKKLIRLNIPTKMDKRFNLNGSYDLNAGADLGHNELLSREAQNQAPCWQECMIYTILRNEKYTGDLLLQKSYIMDHITKKKLINKGQLPQFYIGNNHEAIIDKETFKKVQIEIEKREKNKGNPKETYPFTGKIICGQCGKHYRRKISNAGTKYAKPVWICSTFNSYGKSACASKQIPEDVLQQLIPSNFEEIRVTERNKVVIVLQDGSKIEKTWQYKSRSESWTGEMRKKASERRQKREYSKNCDGDSCNA

SEQ ID NO: 8083 - protein, 461 aa, Unknown
  Description of Unknown: Integrase B8084 sequence
  SM00857,G3DSA:1.10.10.2600,IPR036162,PF13408,PS51737, G3DSA:3.40.50.1390,IPR025827,IPR006119,IPR038109,PF07508, IPR011109,SSF53041,PTHR30461,PS51736,cd00338, PF00239
MIKKELSTGPLRVALYIRVSGEEQKIKGLSLEAQQERLEEYARQQGWVVVGIYIDAAKTARKDMRKRSEFQKMISSVKRDEIDLLLFCRLDRWFRSVADYYKIMEILQTHHCDWKTTDEEYDTSTANGRLYINVKLSIAQNEADICSERISVVFDSKVQHGTVVSGNCPFGYVVNEEKRLSIDPDAAAIVRDAFNYYESSVSQRGTIRHIRETYGVNWCDATFRRMLAERLYTGVYDSNKRFNENFCDPIIDAAQFDRVQKLLKKNARFSPAGNIYIFTSILKCAECLHNLSGCRTRSGNHYYYYYRCNQHLQRGRCSHNKSVRESYVEEWLFEHLGEELERCKLEWDVQAAERKKKTRSTDKAVLKRKLTKLKELYMDDLITIEEYKKDYQIYTAALQQIPDEVPEETPPDFSAVERMLQADFKSIYDSLTREEKRTLWRSVISEIRVDRDNNITGIIFG

SEQ ID NO: 8084 - protein, 461 aa, Unknown
  Description of Unknown: Integrase B8085 sequence
  cd00338,SM00857,G3DSA:1.10.10.2600,IPR036162,PS51737, G3DSA:3.40.50.1390,IPR006119,IPR038109,PF07508,IPR011109, SSF53041,PTHR30461,PS51736,Coil,PF00239
MSKLKAIAYYRVSTEMQEEKESLSTQVQGGEIFCRDNDIELVKIFSDVMSGGNRRRPGFLEAKKYMEENKGEIDMFIAYDVSRIARDAFTFLELFNYLNMIGVKLKLINNPTLDSDSAMGKLILTILAAIFDFFRFDNSSRVRDNMVVKVKEGKRVSGAPYGYKIMDKKMVIVEEEAEIIRYVFDAYLEGKGLRTIAKEINRDHSTISNWLNNKVYAGYNIFGKTKINKTTFKLVRNKDKNSIVEALGDWKPIISLETFERVQLIRDKNKELRIKPNNKSKFLLSGILFHQECNDKFRGSTVLKNSYYRCFSCGKLFKSPEIESVVLDELINGSALDSLNKKIKNENKKYNEKVILEKTRSQLEAKKKRLKDFLIDGTLDKEDYNTRLLEVEQKLLEVKEKEKNIDVETVKKIDTDIIKVFKKIVKNINIEDRGDTKKILRKIIKKINIDDEKNIEIYLNI

SEQ ID NO: 8085 - protein, 461 aa, Unknown
  Description of Unknown: Integrase B8086 sequence
  PTHR30461:SF3,cd00338,SM00857,IPR006118,IPR036162, PS51737,G3DSA:3.40.50.1390,IPR006119,IPR011109,SSF53041, PTHR30461,PS00397,PS51736,Coil, PF00239
MKLERCAIYIRVSTAEQMMHGKSLEAQREYLETYAREHNMVVAGVYADEGKTARKELKKRKAIHALLEDVKAGKIDVIIFWRLDRWFRNLSDFYKVQDVLDSHNVRWISTSEPGINMETRDGRLQLNVVLSIGQNEVDTTSERIKFVNESSIRSGKLIFGDANMGYGYKSGIVDGQKRMVKDPDREHVVDAFYKYFFKHQNKCATLRYIQETYDPDFSFGIMRTLLSSEFYKGTYRGFPYCPAYLTEDEWSKLQKIQKRNVKATPSGRIYLFAGMIRCPVCGQLLCGTGCSSIINRKTGAKRTYCYYRCNRAMIDHICSYRHRLSQNLVENYLLDNLENEYKNYKVKCEKIEKEKEKQKKKQSPEKLRKELDRLNFLFQKGRIDWDYYNEEYGRVESELNDLQSTLPEPVTNYGYLEELLDTDFRTMYDQLSQENRRAFWRSIIQEIHVNEDHAIASVDFL

SEQ ID NO: 8086 - protein, 461 aa, Unknown
  Description of Unknown: Integrase B8087 sequence
  SM00857,G3DSA:1.10.10.2600,IPR036162,PS51737,G3DSA:3.40.50.1390, IPR006119,IPR038109,PF07508,IPR011109,SSF53041, PTHR30461,Coil,PS51736,cd00338,PF00239
MSKLKAIAYYRVSTEMQEEKESLSTQIQGGEIFCRDNDIELIKVFSDVMSGGNRRRPGFLAAKKFMEENKGNIDMFIAYDVSRIARDAFTFLELFNYLNMIGVKLKLINNPTLDSDSAMGKLILTILAAIFDFFRFDNSSRVRDNMVIRVKEGKRMNSAPYGYKIVDKKMVIVEEEAEIIRYVFNAYLEGKGFRTIAKEINRDHSTISNWLNNKVYAGYNIFGKTKMNKSTFKLVRNKDKSSIIEALGDWEPIISLEIFEKVKAIRDKNKELRIKPNHNSKFLLSGLLFHSECDDKFRGNTVLNNYYYRCFSCSKHFKSAEIENMVIDELINGDALKALNKKIKNENKKYNEKSILEKTKNNLEAKKKRLKDFLIDGTLEKEEYNTRLLEVEQKLLEVKEKEKNIEVEAIRKIDTDIIKVFKKIIENINIEDREDTKKILRKIIKRINIDNEKNIEIYLNI

SEQ ID NO: 8087 - protein, 461 aa, Unknown
  Description of Unknown: Integrase B8088 sequence
  PTHR30461:SF3,SM00857,IPR006118,IPR036162,PF13408, IPR025827,PS51737,G3DSA:3.40.50.1390,IPR006119,SSF53041, IPR011109,PTHR30461,PS00397,PS51736, cd00338,PF00239
MKLERCAIYIRVSTAEQMMHGKSLEAQREYLEAYAREHNMVVAGVYADEGKTARKELKKRKAIHALLEDVKAGKIDVIIFWRLDRWFRNLSDFYKVQDILDEYHVRWISTSEPGINMETRDGRLQLNVVLSIGQNEVDTTSERIKFVNEASIRQGKLIFGDANMGYGYKSGTVDGVKCMIKDPEREEAVNAFYQYFFKHQSKTGALKYIQENYDPDFSYSSMRTLLSSEFYKGTYRGAPYCPAYLSTEDWDRLQKISDKNIKVNRSNRVYLFSGLIYCPNCNNLLSGCGCSSIINRKTGAKRTYCYYRCNKAYMDNHCNYRHRLSQNLVESYLLEHLEDEYQKYHIRSGQIHEKQKKEKKRKTPEKLRSELERLNLLFQKGRVEWEYYNKEYSRIEYELKEALAIQPEIERDVSYVNEIIQSDFRSMYAKLSLENRRAFWRSIISDIHVTKDSTVKEVNFL

SEQ ID NO: 8088 - protein, 461 aa, Unknown
  Description of Unknown: Integrase B8089 sequence
  PTHR30461:SF3,SM00857,IPR006118,IPR036162,PF13408, IPR025827,G3DSA:3.40.50.1390,PS51737,IPR006119,SSF53041, IPR011109,PTHR30461,PS00397,PS51736,cd00338, PF00239
MKLERCAIYIRVSTAEQMMHGKSLEAQREYLEAYASEHNMVVAGVYADEGKTARKELKKRKAIHALLEDVKAGKIDVILFWRLDRWFRNLSDFYKVQDILDEYHVRWISTSEPGINMETRDGRLQLNVVLSIGQNEVDTTSERIKFVNEASIRQGKLIFGDANMGYGYKSGTVNGVKCMIKDPEREEAVNAFYQYFFKHQSKTGALKYIQENYDPDFSYSSMRTLLSSEFYKGTYRGAPYCPAYLSTEDWDRLQKISDKNIKVNRSNRVYLFSGLIYCPNCDNLLSGCGCSSIINRKTGAKRTYCYYRCNKAYMDNHCNYRHRLSQNLVESYLLEHLEDEYQRYHVRSGQIREKQKKEKKIKTPEKLRSELERLNLLFQKGRVEWEYYNKEYSRIEYELKETLAIQPEIERDVSYVNEIIQSDFRSMYAKLSLENRRAFWRSIVSDIHVAKDSTVKEVNFL

SEQ ID NO: 8089 - protein, 461 aa, Unknown
  Description of Unknown: Integrase B8090 sequence
  PTHR30461:SF3,IPR036162,PS51737,IPR011109,PTHR30461, PS00397,PF00239,G3DSA:1.10.10.2600,IPR006119,SSF53041, SM00857,IPR025827,IPR038109,PS51736,cd03768, IPR006118,PF13408,G3DSA:3.40.50.1390,PF07508,Coil
MRKDVKRVAIYIRVSTYEQAQEGYSIDEQKERLVQYCKAMGWVVSELYIDPGFSGSNLERPGLQKLISEIKAYDSVLVYKLDRISRSQKDTMYLIEDVFLKNDVDFVSMSESFDTSTPFGRAAVGLLATFAQLERENIKERMTMGMKGRARKGYWKGTSRPPIGYDYKEGNLEVNDYEAMQIRELFTIAANGIPNMPYNVKNMARYLSQKYSNKYGNWSDSTGITYTIQNKVYIGMVKYKDEYFPGNHMPLIDNELFEKANNRLNTYLSTFGEHTTYTKYMLSGLTVCGTCGLPYYRRNSQTKIGGIKKEYGYYSCQGRKIDMPNRCQSKIYRQEALEDKVITQIESLKYKDYSTGNGKNDTASLLQELKQIDSRQERLIDLYSLGSVSREQIDDKIRELNQQREKVKVLLSAQNTLKSEEIIKMSTCIRNVDYATQCDIAGMLIEKVVVEGENIRVYWNF

SEQ ID NO: 8090 - protein, 461 aa, Unknown
  Description of Unknown: Integrase B8091 sequence
  PTHR30461:SF3,IPR036162,PS51737,IPR011109,PTHR30461, PS00397,PF00239,G3DSA:1.10.10.2600,IPR006119,SSF53041, cd00338,SM00857,IPR025827,IPR038109,PS51736, IPR006118,PF13408,G3DSA:3.40.50.1390,Coil
MKKAALYIRVSTDEQAKHGFSLGEQQHDLERYAAKHNYAVVDIYADDGNTARKSLGKRKELQRLLDDVRAGHIDIILMKCLDRWFRNIADYYKVQEILDAYGVEWECTQEEYNTTTTNGRLMLNLKLSIAQNESDQTSDRIKYINEGKKRRREECTGKHPYGYEVINKKLIVVEKDRPIVEFIFQQILAGSSTHSIASKVWDRFNFGIDAKRVWRILRNPTYKGERYGIADYCPAIIPPHDFDAVQAILGRNKPPSKTGISYLFNGKIICPSCGNILVVNCGKSKKTGEYTRPVYICGKKFTTGKPVAAGGCQFGGGVSESVIEKWLIKNLFPLLEAYQADLQSKQGQRINYDTKIKNINGKLSRLKDLYLDALIDKDTYKSDYQRLQKELTDLAIASKRQIALPPVMNEILQDEDFAKTYWELPREQQRELWQMLIKRITILRRPEEKGKPYKYFRVEFN

SEQ ID NO: 8091 - protein, 461 aa, Unknown
  Description of Unknown: Integrase B8092 sequence
  PTHR30461:SF3,SM00857,G3DSA:1.10.10.2600,IPR036162,PF13408, PS51737,IPR025827,G3DSA:3.40.50.1390,IPR006119,IPR038109, PF07508,IPR011109,SSF53041,PTHR30461,PS51736, cd00338,PF00239
MKKIESSNSPLRVALYIRVSGEEQKMKGLSLEAQQERLEEYARERGWIIVGTYIDAAKTARKEMRKRTEFQKMIASVKRDEVDLLLFCRLDRWFRSVADYYKIMEILQAHHCDWKTTDEEYDTSTANGRLYINVKLSIAQNEADICGERIDVVFDSKIQHGTVVSGACPYGYRVNADKKLEIDPDAAAIVQDAFNNYETVVSQRGTIRYIREKYGVNWCDATFHRMLTEPLYIGLYDRGGRYNKNFCEPIISEEQFHRVQDLLSRNVRKTPAGRVYIFTSIVTCAECNHIMVGTFSTRGNYSAYYYRCNQHYQRDLCSHNKTIREDYIEDWLFTHLQEEIDKCMVGWEVKAAERKKQASRSADKAALKRKLTKLKELYVDDLISIEDYKKDYKIYTEALQNIPDVIQEMPPNLSAVRRVLDDDFKAIYDSLSREEKRTLWRSIISEIKVDRDNNITDIIFS

SEQ ID NO: 8092 - protein, 461 aa, Unknown
  Description of Unknown: Integrase B8093 sequence
  SM00857,G3DSA:1.10.10.2600,IPR036162,PF13408,IPR025827, G3DSA:3.40.50.1390,PS51737,IPR006119,IPR038109,PF07508, IPR011109,SSF53041,PTHR30461,PS51736,cd00338, PF00239
MIKKELSTGPLRVALYIRVSGEEQKIKGLSLEAQQERLEEYARQQGWVVVGIYIDAAKTARKDMRKRSEFQKMISSVKRDEIDLLLFCRLDRWFRSVADYYKIMEILQTHHCDWKTTDEEYDTSTANGRLYINVKLSIAQNEADICSERISVVFDSKVQHGTVVSGSCPFGYVVNEEKRLAIDPDAAAIVRDAFNYYESSISQRGTIRHIRETYGVNWCDATFRRMLAERLYTGVYDSNKRFNENFCDPIIDAAQFDRVQKLLKKNARFSPAGNIYIFTSILKCAECLHNLSGCRTRSGNHYYYYYRCNQHLQRGRCSHNKSVRESYVEEWLFEHLGEELERCKLEWDVQAAERKKKTRSTDKAVLKRKLTKLKELYMDDLITIEEYKKDYQIYTAALQQIPDEAPEETPPDFSAVERMLQADFKSIYDSLTREEKRTLWRSVISEIRVDRDNNITGIIFG

SEQ ID NO: 8093 - protein, 461 aa, Unknown
  Description of Unknown: Integrase B8094 sequence
  PTHR30461:SF3,SM00857,G3DSA:1.10.10.2600,IPR036162,PF13408, PS51737,G3DSA:3.40.50.1390,IPR025827,IPR006119,IPR038109, SSF53041,IPR011109,PF00239,PTHR30461,PS51736, Coil,cd00338
MKYVACYCRVSHEEQVKYGYSINAQKDALIKYCKENGYKYEFYIDEGISASSMKKRKALLDMLSKLNVFDMILFTKLDRLSRNVLDANTINKMLIENNCTMKAIDEDDVDTTTADGTFIFNLKVSLAQREIGKTSERINFVFKNKRENGQVTSGSKKYGYNIVDKRYVINKDESENIINLYKYFISVNGNIQKTYKYFIEHFPGKGQDALYNYLRETAYIGKYKLYRKEIFLENYIPRIMEDNLFYNVQNLLKKKEKIVGYNKSFSIFSGLIYCNICQKRMSKKQDNRTKNKLMRYVCDNAYRLSSGSLDHKCSNNRLIRESVIEQYLLYNLCDVVAREKTAYNLKVQVESASNTSVDNSQKIKNIENKINKLKDLYLDDLIDKETYRKDYTELNKELNALKNTIVSEIPQKDFSAIEKILNSDYKKIYNKLTTENKRKFWLSIIDKIYVENGEIKEITFL

SEQ ID NO: 8094 - protein, 461 aa, Unknown
  Description of Unknown: Integrase B8095 sequence
  PTHR30461:SF3,IPR036162,PS51737,IPR011109,PTHR30461, PS00397,PF00239,G3DSA:1.10.10.2600,IPR006119,SSF53041, SM00857,IPR025827,IPR038109,PS51736,cd03768, IPR006118,PF13408,G3DSA:3.40.50.1390,PF07508,Coil
MDKKKMRCAIYIRVSTTEQAMEGYSIGEQKERLEQYSSAMQWTIMGEYIDPGYSGSNMNRPELNRLISEVKNYDVILVYKLDRLSRSQKDTMFLIEDVFLKNDIAFVSMNESFDTGTPFGRAAIGLLATFAQLERENIKERMSMGMKGRARKGYWKGTSRPPIGYDYSDGNLIINDYEAMQIRELFSITANGIPGMTYNVRNIGRYLSGKYSNKYGGWTDSSGITYTIQNKVYIGMVKFNDEYFPGQHQPIIDDLLFEKANDRLNTYLSTFGAHATYNKYMLSGITYCKLCGRPYYRRNSQVKKHGSKKEYGYYSCQGRKADVEIKCPSKIFRQDELEQAVIEQIESLKSTNWTAQEKHEDTAALLQQLKQIDSRQERLIDLYSFGSIQKNQIDDKVRELNLEREKVKALLSSRNTLDTDEIINMASKIHDSDYVVKCDIVSILIKKVEVDGENIRVYWNF

SEQ ID NO: 8095 - protein, 461 aa, Unknown
  Description of Unknown: Integrase B8096 sequence
  PTHR30461:SF3,SM00857,G3DSA:1.10.10.2600,IPR036162,PF13408, PS51737,G3DSA:3.40.50.1390,IPR025827,IPR006119,IPR038109, PF07508,IPR011109,SSF53041,PTHR30461,PS51736, cd00338,PF00239
MKKIESSNSPLRVALYIRVSGEEQKMKGLSLEAQQERLEEYARERGWIIVGTYIDAAKTARKEMRKRTEFQKMIASVKRDEVDLLLFCRLDRWFRSVADYYKIMEILQAHHCDWKTTDEEYDTSTANGRLYINVKLSIAQNEADICGERIDVVFDSKIQHGTVVSGACPYGYRVNADKKLEIDPDAAAIVQDAFNNYETVVSQRGTIRYIREKYGVNWCDATFHRMLMEPLYIGLYDRGGRYNKNFCEPIISEEQFHRVQDLLSRNVRKTPAGRVYLFTSIVTCAECNHNMVGTFSTKGNYSAYYYRCNQHYQRDLCSHNKAIREAYIEDWLFAHLQEEIDKCMVGWEVKAAERKKQASRSADKAALKRKLTKLKELYVDDLISIEDYKKDYKIYTEALQNIPDVIQEMPPNLSAVRRVLDDDFKAIYDSLSREEKRTLWRSIISEIKVDRDNNITDIIFS

SEQ ID NO: 8096 - protein, 461 aa, Unknown
  Description of Unknown: Integrase B8097 sequence
  PTHR30461:SF3,IPR036162,PS51737,IPR011109,PTHR30461, PS00397,PF00239,G3DSA:1.10.10.2600,IPR006119,SSF53041, cd00338,SM00857,IPR025827,IPR038109,PS51736, IPR006118,PF13408,G3DSA:3.40.50.1390,Coil
MSKILRAASYIRVSTAEQALHGYSLQAQKEYLESYAFTHGMRIVASFADEGQTARKELKKRKAIRELLQSVEREEIDVILFWKMDRWFRNVSDFYKVQDVLDAHDVRWIAVAEPNMNLDTREGRLNLNIMLSIGQNEVDTTSERIRFTVDSMIKNGRLVWGDKNLPLGYHIEDKKIVKTEEEAPIVEEFFRYIKTHRAKRQTMLHIQEMFHIPFSYSQLRTMLSSDFYAGKYRDNYNYCPAYLSYDELLEIREALSHNIKTAPSGRVYLFSGLLRCPRCGTKMASRGNQMISNRKTGAKKTYNYYGCNKALLSNTCTYTHQISQILLEKYLLGNLAAEYAAFQVRCSSVSENKKTAAKKQRSPEKIKSEMERLNQIFQLGRIEFDDYNQKYVKLEKELEEVAEAEPVKINKQYPKVEKVLSENFRAMYDSLTLENRRAFWHSIIKEICIDENNQVSEVIFL

SEQ ID NO: 8097 - protein, 461 aa, Unknown
  Description of Unknown: Integrase B8098 sequence
  PTHR30461:SF3,IPR036162,PS51737,IPR011109,PTHR30461, PS00397,PF00239,G3DSA:1.10.10.2600,IPR006119,SSF53041, SM00857,IPR025827,IPR038109,PS51736,cd03768, IPR006118,PF13408,G3DSA:3.40.50.1390,PF07508,Coil
MNVAIYCRVSTLEQKEHGYSIEEQERKLKSFCEINDWNVADVFVDAGFSGAKRDRPELQRLMNDIKRFDLVLVYKLDRLTRNVRDLLDLLEIFEQNNVAFRSATEVYDTSTAMGRLFVTLVGAMAEWERETIRERTQMGKLAALKKGIMLTTPPFYYDRVDNKFVPNKYKDVVLFAYEEALKGKSAKSIARKLNNSDIPPPNNRKWEDRSITRALRSPFTRGHFEWGGVYLENNHEPIITEEMYEKVKDRLEERTNTKKIKHVSIFRSKLVCPTCHNKLTMNTHKVTLKDRVYYNKHYYCNNCKETPNAKPVYIRAEEVERVFYEYLQRKDLTQYEIVEDTEEKEVTIDINKVMQQRKRYHKLYANGLMNEDELAELIEETDAAIEEYKKQNENKEVKQYSNEDITQYRSLLLEMWDISSDEEKAEFIQMAIKNIFIEYVLGKNDNKKKRRSLKIKDIEFY

SEQ ID NO: 8098 - protein, 461 aa, Unknown
  Description of Unknown: Integrase B8099 sequence
  PTHR30461:SF3,cd00338,SM00857,G3DSA:1.10.10.2600,IPR036162, PF13408,PS51737,G3DSA:3.40.50.1390,IPR025827,IPR006119, IPR038109,SSF53041,IPR011109,PTHR30461,PS51736, Coil,PF00239
MINNENELKPKLIRVALYIRVSGEEQKIKGLSLESQRERLEAYAREQGWVIVGIYIDAAKTARKKLHKRSEFQRMLDAVRHDEVDMLLFTRLDRWFRSVPDYYKVMEVLEAHNCEWKTIDDGEGYDTTTASGRLYINIKLSIAQNEADLDGERIDVVFDSKVQHGTVLSGKCPFWLRVNEEKRLELVPEKTAILQDAFDYYEQSTSQRATIKYIRETYGVNWCDATFRRMLHDKLAIGVYDRNGRYNPTFCPAAISPEQFERVQELTKRNSRSNPTGKVYIFTGILVCDECRHNMVGYKSRGIYYYRCNQHFQRGRCEHNHSAREDRVEAWLFEHLSDEIEKYEVSWDVQAAGRKKTAAGVERATLKRKLTKLKELYVNDLIDIEEYKKDYETYSAALLKLDEAQIEEKKVDLSGVRQIVSKGFLEIYDTLTREEKRTLWKSVLKEIRIDNDQNITGISFF

SEQ ID NO: 8099 - protein, 461 aa, Unknown
  Description of Unknown: Integrase B8100 sequence
  PTHR30461:SF3,cd00338,SM00857,IPR006118,IPR036162, PS51737,G3DSA:3.40.50.1390,IPR006119,IPR011109,SSF53041, PTHR30461,PS00397,PS51736,Coil,PF00239
MKLERCAIYIRVSTAEQMMHGKSLEAQREYLETYAREHNMVVAGVYADEGKTARKELKKRKAIHALLEDVKAGKIDVIIFWRLDRWFRNLSDFYKVQDVLDSHNVRWISTSEPGINMETRDGRLQLNVVLSIGQNEVDTTSERIKFVNEASVRNGKLIFGDANMGYGYKSGIVDGQKRMVKDPDREHVVNAFYEYFFKHQNKCATLRYIQETYDPDFSFGIMRTLLSSEFYKGTYRGFPYCPAYLTEDEWNKLQKIQKRNVKATPSGRIYLFAGMIRCPVCGQLLCGTGCSSIINRKTGAKKTYCYYRCNRAMIDHVCSYRHRLSQNLVENYLLDNLENEYKNYKVKCKKIEKEKEKQKKKQSPEKLRKELDRLNFLFQKGRIDWDYYNEEYGRVESELNDLQSALPEPVTNYGYLEELLDTDFRTMYDQLSQENRRAFWRSIIQEIHVNEDHAITSVDFL

SEQ ID NO: 8100 - protein, 461 aa, Unknown
  Description of Unknown: Integrase B8101 sequence
  PTHR30461:SF3,SM00857,G3DSA:1.10.10.2600,IPR036162,PF13408, PS51737,IPR025827,G3DSA:3.40.50.1390,IPR006119,IPR038109, PF07508,IPR011109,SSF53041,PTHR30461, PS51736,cd00338,PF00239
MKKIESSNSPLRVALYIRVSGEEQKMKGLSLEAQQERLEEYARERGWIIVGTYIDAAKTARKEMRKRTEFQKMIASVKRDEVDLLLFCRLDRWFRSVADYYKIMEILQAHHCDWKTTDEEYDTSTANGRLYINVKLSIAQNEADICGERIDVVFDSKIQHGTVVSGACPYGYRVNADKKLEIDPDAAAIVQDAFNNYETVVSQRGTIRYIREKYGVNWCDATFHRMLTEPLYIGLYDRGGRYNKNFCEPIISEEQFHRVQDLLSRNVRKTPAGRVYIFTSIVTCAECNHIMVGTFSTRGNYSAYYYRCNQHYQRDLCSHNKTIREDYIEDWLFTHLQEEIDKCMVGWEIKAAERKKQASRSADKAALKRKLTKLKELYVDDLISIEDYKKDYKIYTEALQNIPDVIQEMPPNLSAVRRVLDDDFKAIYDSLSREEKRTLWRSIISEIKVDRDNNITDIIFS

SEQ ID NO: 8101 - protein, 461 aa, Unknown
  Description of Unknown: Integrase B8102 sequence
  PTHR30461:SF3,cd00338,SM00857,G3DSA:1.10.10.2600,IPR036162, PF13408,PS51737,G3DSA:3.40.50.1390,IPR025827,IPR006119, IPR038109,PF07508,SSF53041,IPR011109,PTHR30461, Coil,PF00239
MKNGFTIINEYCDRAISGKTDNRPSFQRLIKDSEKGQFEAVIMYTLDRFARNRYDSAIYKAKLKKNGVRVFYAKQPMPDTPEGIILESVLEGYAEYYSENLSRNIKRGMKENALQCIATGGAGLALGYTVGEDRKYQIDPVGAKIVQEIFQMYADGMSATQIINYCNEKGYKTSRGNAFNKNSLRTLLKNEKYIGTYKFMDVVVPNGMPAIVDKALFEKVQAMLSHNAKARARTKAHEDYLLTTKLFCGHCGSAMVGESGTSKSGKVHHYYKCIDRKRKHQCNKKVEKKDWIEELVVRFTVQHVLTDENIEKIATRAMEVFEKESADTTYLTGLQDQLKEVKKKIKNLMTAIEQGIITSTTKERLEELESEKNHIEGQIAKEEMKKPLLTKERIMFWLLSFKSGDVNDLEYQRRVVDTLVNSVYVYDDGDKGRRIVFTFNISGQNTATISCSDIACSAPPF

SEQ ID NO: 8102 - protein, 461 aa, Unknown
  Description of Unknown: Integrase B8103 sequence
  PTHR30461:SF3,SM00857,IPR006118,IPR036162,PF13408, IPR025827,G3DSA:3.40.50.1390,PS51737,IPR006119,IPR011109, SSF53041,PTHR30461,PS00397,PS51736,cd00338, PF00239
MKLERCAIYIRVSTAEQMMHGKSLEAQREYLEAYASEHNMVVAGVYADEGKTARKELKKRKAIHALLEDVKAGKIDVIIFWRLDRWFRNLSDFYKVQDILDEYHVRWISTSEPGINMETRDGRLQLNVVLSIGQNEVDTTSERIKFVNEASIRQGKLIFGDANMGYGYKSGTVDGVKCMIKDPEREEAVNAFYQYFFKHQSKTGALKYIQENYDPDFSYSSMRTLLSSEFYKGTYRGAPYCPAYLSTEDWDRLQKISDKNIKVNRSNRVYLFSGLIYCPNCNNLLSGCGCSSIINRKTGAKRTYCYYRCNKAYMDNHCNYRHRLSQNLVESYLLEHLEDEYQRYHVRSGQIREKQKKEKKIKTPEKLRSELERLNLLFQKGRVEWEYYNKEYSRIEYELKEALAIQPEIERDVSYVNEIIQSDFRSMYAKLSLENRRAFWRSIVSDIHVAKDSTVKEVNFL

SEQ ID NO: 8103 - protein, 460 aa, Unknown
  Description of Unknown: Integrase B8104 sequence
  cd03768,SM00857,G3DSA:1.10.10.2600,IPR036162,PF13408, PS51737,G3DSA:3.40.50.1390,IPR025827,IPR006119,IPR038109, PF07508,IPR011109,SSF53041,PTHR30461,PS51736, PF00239
MKNQIVQKKIRCAIYTRKSVAEGLEKEFNTLDAQREAGESYIQSQKHEGWIVVDKHYDDGGFSGGNMERPALRELFDDIENGKIDIVVVYKVDRLSRSLMDFAKIIELFEKHNVSFVSVTQLFNTKDSMGRLTLNILLSFAQFERELISERMRDKMSAARRKGKWVGGIPLLGYDIVPEGGAIEVNHSEAQTVRKIFSYYTENRSLLQTLSYLNENDIRTKQWKTRKGVIRGGNKFSLTTLNHLLKNMAYIGKINSGGKIYDAEFEAILSEDVFVEVQKIMAYNAVEKGPQVRNKYNALLAGKVYCANCKTAMVHTYTKKTGTKVYRYYICSNATKRGWKNCPHPSLSAPELESYIVSELERISGDAKLRDEVIDSFYEKANAELAETVKNENSVKRTLTEIRKKYRRGRIRWSCAKRNRIFRERCRKSASRGKSWKTAYAAGKTDLVKFLPISGFSGGI

SEQ ID NO: 8104 - protein, 460 aa, Unknown
  Description of Unknown: Integrase B8105 sequence
  PTHR30461:SF3,IPR036162,PS51737,IPR011109,PTHR30461, PS00397,PF00239,G3DSA:1.10.10.2600,IPR006119,SSF53041, cd00338,SM00857,IPR025827,IPR038109,PS51736, IPR006118,PF13408,G3DSA:3.40.50.1390,Coil
MIERCAIYIRVSTAEQSMKGHSLQAQREYLESYAASHDMRVVGIYADEGQTARKELKKRKAIHALLKDVEADKIDVILFWRMDRWFRNVADFYKVQDILDAHGVRWVSASESNINMETRDGRLCLNLILTIGQNEVDTTSERIKFTVNNMIQNGRMVWGATNLPFGYMIVEENGCKRMAKDPETACMVEEFYRFFRQTHKKRATVMHMRDTFGINFSYTMLRTMLSSEFYIGKYRSNNNYCPAYLTLDEWKEIQAISENNIKRPRTGRVYFFSGLVHCPVCGTKMAACAGRSIINRKTGEKREYYYYRCNKAILNKQCSYTSRISQNLIEEYLLNNLDTEYRKYQVRCNKVKEAQAHKKKKRSADSVRSEMERLNILFQKGRIEFDYYEEQYGKLEDELKSFDEVIIREKDHSNVVGMLDSDFKEMYSSLSLENRQAFWQQIIKAIYVTKDRNVDYVDFL

SEQ ID NO: 8105 - protein, 460 aa, Unknown
  Description of Unknown: Integrase B8106 sequence
  PTHR30461:SF3,IPR036162,PS51737,IPR011109,PTHR30461, PS00397,PF00239,G3DSA:1.10.10.2600,IPR006119,SSF53041, cd00338,SM00857,IPR025827,IPR038109,PS51736, IPR006118,PF13408,G3DSA:3.40.50.1390,PF07508,Coil
MKRKLNNDKTILRVAIYVRVSTEQQAEDGDSIRDQLNSCETYIKAHENMILAGEYIDGGISGQKTKREDFQKLLSDVRANLIDLIIFTRLDRWFRSLRHYLNTQEVLDKHNVSWTAIRQPFFDTSTAQGRTFVNTSMAFAELEAQNASERIKGVFKDKVSHSEAISGRTPIGYSIVDKHLVPNEDAPIVVSIFKHYQAHGSMGETLRYMQDAFGIVRSRSSLKRMLQNKKYIGIFRDNENYCEPIITKELFYDVQRLLKSNIKTCKNRHDYIFSGLIRCVDCGYVMSAASNHNHYVRKSGEEVDHFYPVYRCHANRLHRCVNNKVFFESSIEKELLKRVRPELEQYICDYKLETAPVVQNKARIHKLQTKLSKLKELYLNELITLEEFRTDKADFEHQIEELQKEEQKPVKDLSSLEEFLKLDFENIYSSFTAPERRRVWRSIIKEIQVDHHKNINIVFL

SEQ ID NO: 8106 - protein, 460 aa, Unknown
  Description of Unknown: Integrase B8107 sequence
  cd03768,PTHR30461:SF3,SM00857,G3DSA:1.10.10.2600,IPR036162, PS51737,G3DSA:3.40.50.1390,IPR006119,IPR038109,PF07508, IPR011109,SSF53041,PTHR30461,PS51736,Coil, PF00239
MKVAIYTRVSSAEQANEGYSIHEQKKKLISYCEIHDWNEYKVFTDAGISGGSMKRPALQNLMKQLSYFDLVLVYKLDRLTRNVRDLLDMLEEFEQYNVSFKSATEVFDTTSAIGKLFITMVGAMAEWERETIRERSLFGSRAAVREGNYIREAPFCYDNIEGKLHPNEHAKVIDLIVSMFKKGISANEIARRLNSSKVHVPNKKSWNRNSLIRLMRSPVLRGHTKYGDMLIENTHEPVLSEHDYNAINDAISSKTHKSKVKHHAIFRGALVCPQCNRRLHLYAGTVKDRKGYKYDVRRYKCETCSKNKDVKNVSFNESEVENKFINLLKSYELNKFHIRKVEPVKKIEYDIDKINKQKINYTRSWSLGYIEDDEYFELMEEINATKKMIEEQTTENKQSVSKEQIQSINNFILKGWEELTIKDKEELILSTVDKIEFNFIPKDKKHKTNTLDINSIHFKF

SEQ ID NO: 8107 - protein, 460 aa, Unknown
  Description of Unknown: Integrase B8108 sequence
  PTHR30461:SF3,G3DSA:1.10.10.2600,IPR036162,PF13408,PS51737, IPR025827,G3DSA:3.40.50.1390,IPR006119,IPR038109,PF07508, IPR011109,SSF53041,PTHR30461,PS51736,cd00338, PF00239
MMADAMENKFDVIIFHKIDRNSRNELNYFIFKDKLEKLGIRYEYTAQPIDAATAEGQMMETVMVGMAAYYSRNLAKETKKGMNENAYKAIFNGGYAPLGYKIVDKHYVIDEKEAEAVRLIFNLYLDGKGYGEICLALAARGYTTRSGKNFPKNSLHDILRNERYMGTYTFNRVPKTKRRNSHSYARPNDFISIPDAIPAIVSKETFLAAQEKMLLNKKRKGGAYTAKRDYLLSGKFFCGYCGSAMQGYSCCTRGNMYYYYSCARKDRVPADRCKQKMIRAEVIEHWIMSTLEREIFSDSGIQRVADSMSTAFGNANKEAKNATTVLLQRKAAAERKLNNLYQVIEDGDADEFDMQRLKKTKEELHNINNEICETTVKSAPDIDTSKIISLLKNMREEIFTKKNSHYAKQAIELLVKRVTIIDKTITLSLTTEGCLSLLVPRTRNYIDRNIVINRLYSLAS

SEQ ID NO: 8108 - protein, 460 aa, Unknown
  Description of Unknown: Integrase B8109 sequence
  PTHR30461:SF3,IPR036162,PS51737,IPR011109,PTHR30461, PS00397,PF00239,G3DSA:1.10.10.2600,IPR006119,SSF53041, cd00338,SM00857,IPR025827,IPR038109,PS51736, IPR006118,PF13408,G3DSA:3.40.50.1390,PF07508,Coil
MDNIKRAALYIRVSTDEQAREGYSLQAQKENLIKYAKENNYAIVDIYADEGISARKSYKNRKEFMRMLEDVKANKIDIILFIKLDRYFRNIGDYYKTQEILDQFKVGWKATLENYDTTTANGRFYVNIRLSMAQDEADRTSERIKFVFDNKVKKGEVISGSVPYGYKIKDKHLIIDEDKAEVVRYIFQRYSQIRSKRSTVVDARNKFQNGITYKVLDTMIRNEIYIGKYRDNFNYCEPIISTELFEEVQELLKQGHLRYGKKTNNNFEYNYIFSGLVHCPKCKKIMASNKTLGFTRKNGEEVYYFYYRCMNKMMQKSCDYCKMVNEQKLEKYLLDTLFQKLKKYKIDYQLKESKKIAPNLEQKKTIQNKIKRLQDLYVNELIEIEDYKKQYSKLQEELSKFKDLSSTKKKDFSQIDSILNSDYKEIYNKLNNVNKRIFWHSIIKEIYPIPDTENFKIIFK

SEQ ID NO: 8109 - protein, 460 aa, Unknown
  Description of Unknown: Integrase B8110 sequence
  SM00857,IPR006118,IPR036162,PF13408,PS51737, IPR025827,G3DSA:3.40.50.1390,IPR006119,IPR011109,SSF53041, PTHR30461,PS00397,PS51736,cd00338,PF00239
MKQSTFPSIPLRAGIYIRVSTEEQHLNGLSLPAQRLALEDYANKNGYIIAGVYADEGISARKSMSRRKGLMRLLEDVRQDKIDMILVTKLDRWFRNIKDYNITEEILREHHCYWKTIFENYDSSTANGQMVINIMLSVNQAECDRTSERIKAVFDYKRSKGMCVTGMCAPYGYIIENGYIKKDPATRSVVEDAIQHYFSCFSIRHTTRYIADKYGENAPSYYKVDKIFHNPKYAGIDKNGAPYCEPYMTMEQYHMLLKSRQAKSWSPSGYVYIFSSLITCPICGCKFSGRQRKAIRKNGAVYCDTRYNCMGKFQYHSGASLRESAIEAYLLEHIDSIIESAQVNLYMDAGNASPKPARSAQSVQEELNRLNTMYQKGRLSEEYYDREYERLTALLSASDDRQLEEKRKRLKCVERQFSGDWKVLYKRLDNSHKRAFWKQTIEEILVDPDTRKIKDVKLLI

SEQ ID NO: 8110 - protein, 460 aa, Unknown
  Description of Unknown: Integrase B8111 sequence
  SM00857,G3DSA:1.10.10.2600,IPR036162,PS51737, G3DSA:3.40.50.1390,IPR006119,IPR038109,PF07508, IPR011109,SSF53041,PTHR30461,PS51736, cd00338,PF00239
MDKVAIYCRESTERQDISTLISMCEKAAHDLGFNIYKIYKDIKSGYSKDREEYSKLKNDIQAGEINVLILYESSRLTRDEIEHHLFFALLRIKEVRLYTLNHGWIDLNNEDDTFMSSLLNLLDAREGRKGAKRTKDRMEEIARNGRWTGGPAPFGYRLVNKELVVDPAEAEIVKQIFQLFLEGKKRQTLSTLFGFEGKRVRRMLINPVYVGKLKFHQIEYKNKKRITHKEWEVLDGIHEAIIDEPTFNLVQNRLKLEKREVKRDTYIFKDLLKCVCGAKLYRYTSVYTYNGQHKESLVYKCNSKDTYHRFNSILESELLEQVLETLEEVILSLNVNDINAESDNSLIEQLNYYKKEAAALPGKEKLLARQLMNNLLTEETFKELMLEFKEQKEFFKNKIDSYSKLIKSKEAKKNNQEILKKYFTKIKKEKDPEKLNIFFKMIIDSIEFVNDYRFYIHLKF

SEQ ID NO: 8111 - protein, 460 aa, Unknown
  Description of Unknown: Integrase B8112 sequence
  cd03768,PTHR30461:SF3,SM00857,G3DSA:1.10.10.2600,IPR036162, PF13408,PS51737,G3DSA:3.40.50.1390,IPR025827,IPR006119, IPR038109,PF07508,IPR011109,SSF53041,PTHR30461, PS51736,Coil,PF00239
MKVAIYTRVSTLEQREKGHSIDEQERKLRSFCDINDWTVKDVYVDAGFSGAKRDRPELTRLLDDISEFDLVLVYKLDRLTRSVRDLLDLLEVFENNNVAFRSATEVYDTTTAIGRLFVTLVGAMAEWERETIRERSLMGKRAAIKKGMILTAPPFYYDRVNNTYIPNQYKDVVLDVYNKVKKGYSIAHIARLYNNSDVKPPNGNEEWTTRMLMHALRNPVTRGHYQWGEIYIEDSHEPIITDEMYNTIIDRLDKHTNTKVVAHTSVFRGKLICPNCGYALTLNSQKRKRKNDTIVYKTYYCNNCKITKGMKPHHITETETLRVFKDHLSKIDLKQYETQEKEKQSHVTIDLSKVMEQRKRYHKLYASGMMQENELFELIKETDEMIEEYEKQRKQVDVKEFDIGKIKEIKNVLLKSWDIFTLEDKADFIQMSIKAINIEYTKLKRGKASNSMKIKDIEFY

SEQ ID NO: 8112 - protein, 460 aa, Unknown
  Description of Unknown: Integrase B8113 sequence
  PTHR30461:SF3,IPR036162,PS51737,IPR011109,PTHR30461, PS00397,PF00239,G3DSA:1.10.10.2600,IPR006119,SSF53041, cd00338,SM00857,IPR025827,IPR038109,PS51736, IPR006118,PF13408,G3DSA:3.40.50.1390,PF07508,Coil
MKRKLNNDKTILRVAIYVRVSTEQQAEDGDSIRDQLNSCETYIKAHENMILAGEYIDGGISGQKTKREDFQKLLSDVRANLIDLIIFTRLDRWFRSLRHYLNTQEVLDKHNVSWTAIRQPFFDTSTAQGRTFVNTSMAFAELEAQNASERIKGVFKDKVSHSEAISGRTPIGYSIVDKHLVPDKDAPIVVAIFEHYQAHSSMGETLRYMQDAFGIVRSRSSLKRMLQNKKYIGIFRDNESYCEPIIEKDLFYDVQRLLKLNIKTCKNRHDYIFSGLIRCVDCGYVMSAASNHNHYVRKSGEEVDHFYSVYRCHANRLHRCVNNKVFFESSIEKELLKRVRPELEQYICDYKLETAPVVQNKARIHKLQTKLSKLKELYLNELITLEEFRTDKADFEHQIEELQKEEQKPVKDLSSLEEFLKLDFENIYSSFTAPEKRRVWRSIIKEIQVDHHKNINIVFL

SEQ ID NO: 8113 - protein, 460 aa, Unknown
  Description of Unknown: Integrase B8114 sequence
  PTHR30461:SF3,IPR036162,PS51737,IPR011109,PTHR30461, PS00397,PF00239,G3DSA:1.10.10.2600,IPR006119,SSF53041, cd00338,SM00857,IPR025827,IPR038109,PS51736, IPR006118,PF13408,G3DSA:3.40.50.1390,PF07508,Coil
MKRKLNNDKTILRVAIYVRVSTEQQAEDGDSIRDQLNSCETYIKAHENMILAGEYIDGGISGQKTKREDFQKLLSDVRANLIDLIIFTRLDRWFRSLRHYLNTQEVLDKHNVSWTAIRQPFFDTSTAQGRTFVNTSMAFAELEAQNASERIKGVFKDKVSHSEAISGRTPIGYSIVDKHLVPNEDAPIVVSIFKHYQAHGSMGETLRYMQDAFGIVRSRSSLKRMLQNKKYIGIFRDNENYCEPIITKELFYDVQRLLKLNIKTCKNRHDYIFSGLIRCVDCGYVMSAASNHNHYVRKSGEEVDHFYPVYRCHANRLHRCVNNKVFFESSIEKELLKRVRPELEQYICDYKLETAPVVQNKARIHKLQTKLSKLKELYLNELITLEEFRTDKADFEHQIEELQKEEQKPVKDLSSLEEFLKLDFENIYSSFTAPERRRVWRSIIKEIQVDHHKNINIVFL

SEQ ID NO: 8114 - protein, 460 aa, Unknown
  Description of Unknown: Integrase B8115 sequence
  SM00857,IPR006118,IPR036162,PF13408,PS51737, G3DSA:3.40.50.1390,IPR025827,IPR006119,IPR011109,SSF53041, PTHR30461,PS00397,PS51736,cd00338,PF00239
MKQSTFPSIPLRAGIYIRVSTEEQHLNGLSLPAQRLALEDYANKNGYVIAGVYADEGISARKSMSRRKGLMRLLEDVRQDKIDMILVTKLDRWFRNIKDYNITEEILREHHCYWKTIFENYDSSTANGQMVINIMLSVNQAECDRTSERIKAVFDYKRSKGMCVTGMCAPYGYIIENGYIKKDPATRSVVEDAIQHYFSCFSIRHTTRYIADKYGENAPSYYKVDKIFHNPKYAGIDKDGAPYCEPYMTMEQYHMLLKSRQAKSWSPSGYVYIFSSLITCPICGCKFSGRQRKAIRKNGAVYCDTRYNCMGKFQYHSGASLRESAIEAYLFEHIDSIIESAQVNLYMDAGNASPKPARSAQSVQEELNRLNTMYQKGRLSEEYYDREYEHLTALLSTSDDRQLEEKRKRLKCVERQFSGDWKVLYKRLDNSHKRAFWKQTIEEILVDPDTRKIKDVKLLI

SEQ ID NO: 8115 - protein, 460 aa, Unknown
  Description of Unknown: Integrase B8116 sequence
  PTHR30461:SF3,SM00857,IPR006118,IPR036162,PF13408, IPR025827,G3DSA:3.40.50.1390,IPR006119,SSF53041,PTHR30461, PS00397,PS51736,cd00338,PF00239
MTKISTDVQRVALYIRVSTEEQAQHGYSLEAQESALVEFANAHNYKIVNIYRDEGFSARKSVIKRKVMQQLLQDVQQNKIDLILFTKLDRWFRNVRDYHAVQAILDRYHVSWQAVLEDYSTTTADGRLKVNIMLSVAENEADRTSERIRFVFDNKIKSGDFCFARPPYGYKVEVIDGMRKLVKDPDTEQIVSTFWEKCLKYRSVLRSIRETNIEFHLARPQKAWTRLFKNPVYAGIFHGIKDYCPAYISFSDWQELQRPEKRIKATQNNRVYLFAGLLRCPICGCTLKSTYSHCSTNKSIEYRHYRCNEKAQGRCTYNRAINEKTLEKYLIDNIRDEMEKFAVEYQAELSEKKKRYPKTDISKLKEQLRRLNTIYMSGNISDNDYLSQAQVIKAAIQKSESEQQELASAADLDSLRHFLQHDFDKIYIDMTDDEKQRLWRSLISEIHFKDNRVSEIIFNV

SEQ ID NO: 8116 - protein, 460 aa, Unknown
  Description of Unknown: Integrase B8117 sequence
  PTHR30461:SF3,SM00857,G3DSA:1.10.10.2600,IPR036162,PF13408, IPR025827,G3DSA:3.40.50.1390,IPR006119,IPR038109,SSF53041, PTHR30461,Coil,PS51736,cd00338,PF00239
MAKQLIRVALYTRVSSDEQVEKGDSIRDQQERGKKYIDSHDNMILQDIYTDDGISGQKLKRDEFQRLIQNAKDNLVDLIIFTKLDRWFRNLRHYLNTQATLEKHNVSWTAIDQPYFDTSTPYGCAFVNQSMIWAELEAKNGGQRVRDVFKTKVTHGEVITGKVLRGYRIEDKHLVLSQEAPIIYDCISYFLKTQSLGRTIKYMRTTHGIIMTLQNFKNSYLRNEKLTGRYRGNEGYCPRLISDEMFADIQRILDHNSNVRVTQKYPYIFSGLLICAECGYKMSGCHINVISKKVSGKVYRYKYPAYECKQYRAYLKCSNGGEIRETTIEQYLLDNIAKEVDQYIAKYATVQKDVIDNRATKNKLRKKLERLKELYLNEIISIEEYKIDRIALENQIESIPDIVEPKQNIMELKRLLASNFETIYSTLSNEEKRKFWRSFIAEIRVHKSVRRSRKYDIDFL

SEQ ID NO: 8117 - protein, 460 aa, Unknown
  Description of Unknown: Integrase B8118 sequence
  PTHR30461:SF3,IPR036162,PS51737,IPR011109,PTHR30461, PS00397,PF00239,G3DSA:1.10.10.2600,IPR006119,SSF53041, cd00338,SM00857,IPR025827,IPR038109, PS51736,IPR006118,PF13408,G3DSA:3.40.50.1390,PF07508,Coil
MKRKLNNDKTILRVAIYVRVSTEQQAEDGDSIRDQLNSCETYIKAHENMILAGEYIDGGISGQKTKREDFQKLLSDVRANLIDLIIFTRLDRWFRSLRHYLNTQEVLDKHNVSWTAIRQPFFDTSTAQGRTFVNTSMAFAELEAQNASERIKGVFKDKVSHSEAISGRTPIGYSIVDKHLVPDKDAPIVVAIFEHYQAHSSMGETLRYMQDAFGIVRSRSSLKRMLQNKKYIGSFRDNENYCEPIITKELFYDVQRLLKLNIKTCKNRHDYIFSGLIRCVDCGYVMSAASNHNHYVRKSGEEVDHFYSVYRCHANRLHRCVNNKVFFESSIEKELLKRVRPELEQYICDYKLETAPVVQNKARIHKLQTKLSKLKELYLNELITLEEFRTDKADFEHQIEELQKEEQKPVKDLSSLEEFLKLDFENIYSSFTAPEKRRVWRSIIKEIQVDHHKNINIVFL

SEQ ID NO: 8118 - protein, 460 aa, Unknown
  Description of Unknown: Integrase B8119 sequence
  SM00857,IPR006118,IPR036162,PF13408,PS51737, G3DSA:3.40.50.1390,IPR025827,IPR006119,IPR011109,SSF53041, PTHR30461,PS00397,PS51736,cd00338,PF00239
MKQSTFPSIPLRAGIYIRVSTEEQHLNGLSLPAQRLALEDYANKNGYVIAGVYADEGISARKSMSRRKGLMRLLEDVRQDKIDMILVTKLDRWFRNIKDYNITEEILREHHCYWKTIFENYDSSTANGQMVINIMLSVNQAECDRTSERIKAVFDYKRSKGMCVTGMCAPYGYIIENGYIKKDPATRSVVEDAIQHYFSCFSIRHTTRYIADKYGENAPSYYKVDKIFHNPKYAGIDKDGAPYCEPYMTMEQYHMLLKSRQAKSWSPSGYVYIFSSLITCPICGCKFSGRQRKAIRKNGAVYCDTRYNCMGKFQYHSGASLRESAIEAYLLEHIDSVIESAQVNLYMDAGNASPKPARSAQSVQEELNRLNTMYQKGRLSEEYYDREYERLTALLSTSDDRQLEEKRKRLKCVERQFSGDWKVLYKRLDNSHKRAFWKQTIEEILVDPDTRKIKDVKLLI

SEQ ID NO: 8119 - protein, 460 aa, Unknown
  Description of Unknown: Integrase B8120 sequence
  PTHR30461:SF3,IPR036162,PS51737,IPR011109,PTHR30461, PS00397,PF00239,G3DSA:1.10.10.2600,IPR006119,SSF53041, cd00338,SM00857,IPR025827,IPR038109, PS51736,IPR006118,PF13408,G3DSA:3.40.50.1390,Coil
MIERCAIYIRVSTAEQSMKGHSLQAQREYLESYAASHDMRVVGIYADEGQTARKELKKRKAIHALLKDVEADKIDVILFWRMDRWFRNVADFYKVQDVLDAHGVRWVSTSESNINMETRDGRLCLNLILTIGQNEVDTTSERIKFTVNNMIQNGRMVWGATNLPFGYTIVEENGCKRMAKDPETACMVEEFYRFFRQTHKKRATVMHMQDTFGINFSYTMLRTMLSSEFYIGKYRSNDNYCPAYLTLDEWKEIQAISENNIKRPRTGRVYFFSGLVHCPVCGTKMAACAGRSIINRKTGEKREYYYYRCNKAILNKQCSYTSRISQNLIEDYLLNNLDVEYRKYQVRCNKVKEAQAHKKKKRSADSVRSEIERLNILFQKGRIEFDYYEEQYGKLEDELKSFDEVIIREKDHSNVVGMLDSDFKEMYSSLSLENRQAFWQQIIKAIYVTKDRNVDYVDFL

SEQ ID NO: 8120 - protein, 460 aa, Unknown
  Description of Unknown: Integrase B8121 sequence
  cd03768,PTHR30461:SF3,SM00857,G3DSA:1.10.10.2600,IPR036162, PS51737,G3DSA:3.40.50.1390,IPR006119,IPR038109,PF07508, IPR011109,SSF53041,PTHR30461,PS51736,Coil, PF00239
MKVAIYTRVSSAEQANEGYSIHEQKKKLISYCEIHDWNEYKVFTDAGISGGSMKRPALQNLMKQLSYFDLVLVYKLDRLTRNVRDLLDMLEEFEQYNVSFKSATEVFDTTSAIGKLFITMVGAMAEWERETIRERSLFGSRAAVREGNYIREAPFCYDNIEGKLHPNEHAKVIDLIVSMFKKGISANEIARRLNSSKVYVPKKKSWNRNSLIRLMRSPVLRGHTKYGDMLIENTHEPVLSKHDYNAINDAISSKTHKSKVKHHAIFRGALVCPQCNRRLHLYAGTVKDRKGYKYDVRRYKCETCSKNKDVKNVSFNESEVENKFINLLKSYELNKFHIRKVEPVKKIEYDIDKINKQKINYTRSWSLGYIEDDEYFELMEEINATKKMIEEQTTENKQSVSKEQIQSINNFILKGWEELTIKDKEELILSTVDKIEFNFIPKDKKHKTNTLDINSIHFKF

SEQ ID NO: 8121 - protein, 460 aa, Unknown
  Description of Unknown: Integrase B8122 sequence
  cd03768,PTHR30461:SF3,SM00857,G3DSA:1.10.10.2600,IPR036162, PS51737,G3DSA:3.40.50.1390,IPR006119,IPR038109,PF07508, IPR011109,SSF53041,PTHR30461,PS51736,Coil, PF00239
MKVAIYTRVSSAEQANEGYSIHEQKKKLISYCEIHDWNEYKVFTDAGISGGSMKRPALQNLMKQLSYFDLVLVYKLDRLTRNVRDLLDMLEEFEQYNVSFKSATEVFDTTSAIGKLFITMVGAMAEWERETIRERSLFGSRAAVREGNYIREAPFCYDNIEGKLHPNEHAKVIDLIVSMFKKGISANEIARRLNSSKVYVPKKKSWNRNSLIRLMRSPVLRGHTKYGDMLIENTHEPVLSKHDYNAINDAISSKTHKSKVKHHAIFRGALVCPQCNRRLHLYAGTVKDRKGYKYDVRRYKCETCSKNKDVKNVSFNESEVENKFINLLKSYELNKFHIQKVEPVKKIEYDIDKINKQKINYTRSWSLGYIEDDEYFELMEEINATKKMIEEQTTENKQSVSKEQIQSINNFILKGWEELTIKDKEELILSTVDKIEFNFIPKDKKHKTNTLDINNIHFKF

SEQ ID NO: 8122 - protein, 460 aa, Unknown
  Description of Unknown: Integrase B8123 sequence
  PTHR30461:SF3,IPR036162,PS51737,IPR011109,PTHR30461, PS00397,PF00239,G3DSA:1.10.10.2600,IPR006119,SSF53041, cd00338,SM00857,IPR025827,IPR038109,PS51736, IPR006118,PF13408,G3DSA:3.40.50.1390,PF07508,Coil
MKRKLNNDKTILRVAIYVRVSTEQQAEDGDSIRDQLNSCETYIKAHENMILAGEYIDGGISGQKTKREDFQKLLSDVRANLIDLIIFTRLDRWFRSLRHYLNTQEVLDKHNVSWTAIRQPFFDTSTAQGRTFVNTSMAFAELEAQNASERIKGVFKDKVSHSEAISGRTPIGYSIVDKHLVPNEDAPIVVSIFKHYQAHGSMGETLRYMQDAFGIVRSRSSLKRMLQNKKYIGIFRDNENYCEPIITKELFYDVQRLLKLNIKTCKNRHDYIFSGLIRCVDCGYVMSAASNHNHYVRKSGEEVDHFYSVYRCHANRLHRCVNNKVFFESSIEKELLKRVRPELEQYICDYKLETAPVVQNKARIHKLQTKLSKLKELYLNELITLEEFRTDKADFEHQIEELQKEEQKPVKDLSSLEEFLKLDFENIYSSFTAPEKRRVWRSIIKEIQVDHHKNINIVFL

SEQ ID NO: 8123 - protein, 460 aa, Unknown
  Description of Unknown: Integrase B8124 sequence
  PTHR30461:SF3,IPR036162,PS51737,IPR011109,PTHR30461, PS00397,PF00239,G3DSA:1.10.10.2600,IPR006119,SSF53041, SM00857,IPR025827,IPR038109,PS51736,cd03768, IPR006118,PF13408,G3DSA:3.40.50.1390,PF07508,Coil
MEKNKHINKIAAIYIRVSTDAQAEDGYSIDAQKEQLAAYCVSKGIKNYEFYIDGGWSGSNINRPEIQRLIKNAQDGKISHCIVYKLDRLSRSQKDTLYLIEDVFIPNEVSFVSLNETLDTSTPMGKLMIGILSAFAQLERENIRLRTRMGMKERVKDGYWMGGGRIPFGYDYDKNQGILVPNNDADKVRKIYSLYIDGKSPQAIADILDLKYDKLVMQILTRKSNYGVIEYNGEEYKGRHEAIISKEIYDKAIKCMNERSINKVAFSKHLLTGLVYCGHCGAKMRYQKWGKNGCKLVCYSQQTSKKYLIKDENCVQERVWAHEVEEAVLNYLFSLKEDENGDIIDTSNIEETDIIKELQENYDLCQKKIKRLYNLYAESENDLLLETIQEQREKLKEIEDKIKEEQIKRKNLDQKINTAELVTNLRETWKYMSIEEQQTTLRMLINRITINDNNINIDLK

SEQ ID NO: 8124 - protein, 460 aa, Unknown
  Description of Unknown: Integrase B8125 sequence
  PTHR30461:SF3,IPR036162,PS51737,IPR011109,PTHR30461, PS00397,PF00239,G3DSA:1.10.10.2600,IPR006119,SSF53041, cd00338,SM00857,IPR025827,IPR038109,PS51736, IPR006118,PF13408,G3DSA:3.40.50.1390,PF07508,Coil
MKRKLNNDKTILRVAIYVRVSTEQQAEDGDSIRDQLNSCETYIKAHENMILAGEYIDGGISGQKTKREDFQKLLSDVRANLIDLIIFTRLDRWFRSLRHYLNTQEVLDKHNVSWTAIRQPFFDTSTAQGRTFVNTSMAFAELEAQNASERIKGVFKDKVSHSEAISGRTPIGYSIVDKHLVPDKDAPIVVAIFEHYQAHSSMGETLRYMQDAFGIVRSRSSLKRMLQNKKYIGIFRDNESYCEPIITKELFYDVQRLLKLNIKTCKNRHDYIFSGLIRCVDCGYVMSAASNHNHYVRKSGEEVDHFYSVYRCHANRLHRCVNNKVFFESSIEKELLKRVRPELEQYICDYKLETAPVVQNKARIHKLQTKLSKLKELYLNELITLEEFRTDKADFEYQIEELQKEEQKPVKDLSSLEEFLKLDFENIYSSFTAPEKRRVWRSIIKEIQVNHHKNINIVFL

SEQ ID NO: 8125 - protein, 460 aa, Unknown
  Description of Unknown: Integrase B8126 sequence
  PTHR30461:SF3,IPR036162,PS51737,IPR011109,PTHR30461, PS00397,PF00239,G3DSA:1.10.10.2600,IPR006119,SSF53041, cd00338,SM00857,IPR025827,IPR038109,PS51736, IPR006118,PF13408,G3DSA:3.40.50.1390,PF07508,Coil
MKRKLNNDKTILRVAIYVRVSTEQQAEDGDSIRDQLNSCEAYIEAHENMILAGEYIDGGISGQKTKREDFQKLLSDVRANLIDLIIFTRLDRWFRSLRHYLNTQEVLDKHNVSWTAIRQPFFDTSTAQGRTFVNTSMAFAELEAQNASERIKGVFKDKVSHSEAISGRTPIGYSIVDKHLVPDKDAPIVVSIFKHYQAHGSMGETLRYMQDAFGIVRSRSSLKRMLQNKKYIGIFRDNESYCEPIITKELFYDVQSLLKLNIKTCKNRHDYIFSGLIRCVDCGYVMSAASNHNHYVRKSGEEVDHFYPVYRCHANRLHRCVNNKVFFESSIEKELLKRVRPELEQYICDYKLETAPVVQNKARIHKLQTKLSKLKELYLNELITLEEFRTDKADFEHQIEELQKEEQKPVKDLSSLEEFLKLDFENIYSSFTAPEKRRVWRSIIKEIQVDHHKNINIVFL

SEQ ID NO: 8126 - protein, 460 aa, Unknown
  Description of Unknown: Integrase B8127 sequence
  SM00857,G3DSA:1.10.10.2600,IPR036162,PS51737,G3DSA:3.40.50.1390, IPR006119,IPR038109,PF07508,IPR011109,SSF53041, PTHR30461,PS51736,cd00338,PF00239
MDKVAIYCRESTERQDISTLISMCEKAAHDLGFDTYKIYKDIKSGYSKDREEYSQLKNDIQAGEINVLILYESSRLTRDEIEHHLFFALLRIKEVRLYTLNHGWIDLNNEDDTFMSSLLNLLDAREGRKGAKRTKDRMEEIARNGRWTGGPAPFGYRLVNKELVVDPTEAEIVKQIFQLFLEGKKRQTLSTLSGFECKRVRRMLINPVYTGKLKFHQIEYKNKKRITHKEWEVLDGIHEAIIDETTFNLVQNRLKLEKREVKRDTYIFKDLLKCVCGAKLYRYTSVYTYNGQHKESLVYKCNSKDTYHRFNSILESELLEQVLETLEEVILSLNVNDINAESDNSLIEQLNYYKKEAAALPGKEKLLARQLMNNLLTEETFKELMLEFKEQKEFFKNKIDSYSKLIKSKEAKKNNQEILKKYFTKIKKEKDPEKLNIFFKMIIDSIEFVNDYRFYIHLKF

SEQ ID NO: 8127 - protein, 460 aa, Unknown
  Description of Unknown: Integrase B8128 sequence
  PTHR30461:SF3,IPR036162,PS51737,IPR011109, PTHR30461,PS00397,PF00239,G3DSA:1.10.10.2600, IPR006119,SSF53041,cd00338,SM00857,IPR025827,IPR038109 ,PS51736,IPR006118,PF13408,G3DSA:3.40.50.1390,PF07508,Coil
MKRKLNNDKTILRVAIYVRVSTEQQAEDGDSIRDQLNSCETYIKAHENMILAGEYIDGGISGQKTKREDFQKLLSDVRANLIDLIIFTRLDRWFRSLRHYLNTQEVLDKHNVSWTAIRQPFFDTSTAQGRTFVNTSMAFAELEAQNASERIKGVFKDKVSHSEAISGRTPIGYSIVDKHLVPDKDAPIVVAIFEHYQAHSSMGETLRYMQDAFGIVRSRSSLKRMLQNKKYIGIFRDNESYCEPIITKELFYDVQRLLKLNIKTCKNRHDYIFSGLIRCVDCGYVMSAASNHNHYVRKSGEEVDHFYSVYRCHANRLHRCVNNKVFFESSIEKELLKRVRPELEQYICDYKLETAPVVQNKARIHKLQTKLSKLKELYLNELITLEEFRTDKADFEHQIEELQKEEQKPVKDLSSLEEFLKLDFENIYSSFTAPEKRRVWRSIIKEIQVDHHKNINIVFL

SEQ ID NO: 8128 - protein, 460 aa, Unknown
  Description of Unknown: Integrase B8129 sequence
  SM00857,IPR006118,IPR036162,PF13408,IPR025827, G3DSA:3.40.50.1390,PS51737,IPR006119,SSF53041,IPR011109, PTHR30461,PS00397,PS51736,cd00338,PF00239
MNKSDLSSDASLRAAIYIRVSTEEQHLNGLSLPAQQQALEEYAQKNNYHIIGVYADEGISARKSMSHRKGLLRLLDDVKKNKVDMILVTKLDRWFRNIKDYNITEEILQAHHCYWKTIFENYDSSTANGQMVINIMLSVNQAECDRTSERIKAVFDYKRSQGMCVTGMCAPYGYLIENSYIKKDPAVQHIVEDAIEYYFTCFSIRHTVHYITDKYGDEAPSFYKIDKIFHNPKYAGIDVNGNPYCEPYMTMEQYKILLKSRQAKSWSSSGYTYIFSSLITCPICGCKFSGRQRKRTRQDGSVYCDIRYNCVGKFKYHPGASLRESSIEEYLLKHIDASVESALIEYDLAAAEKSKPVKTAQAYMDERDRLNTLFQKGRISEEYYEAEYQRLSDAILATDEKASIERRKKLINLSQKFNGDWKSIYLQLDNAHKRAFWKQIIENINVDPKTRRISGIKLLI

SEQ ID NO: 8129 - protein, 460 aa, Unknown
  Description of Unknown: Integrase B8130 sequence
  cd00338,SM00857,IPR006118,G3DSA:1.10.10.2600, IPR036162,PF13408,PS51737,G3DSA:3.40.50.1390, IPR025827,IPR006119,IPR038109,SSF53041, IPR011109,PTHR30461,PS00397,PS51736,Coil,PF00239
MIERCAIYIRVSTAEQSMKGHSLQAQREYLESYAASHDMRVVGIYADEGQTARKELKKRKAIHALLKDVEADKIDVILFWRMDRWFRNVADFYKVQDVLDAHGVRWVSTSESNINMETRDGRLCLNLILTIGQNEVDTTSERIKFTVNNMIQNGRMVWGATNLPFGYTIVEENGCKRMAKDPETACMVEEFYRFFRQTHKKRATVMHMQDTFGINFSYTMLRTMLSSEFYIGKYRSNDNYCPAYLTLDEWKEIQAISENNIKRPRTGRVYFFSGLVHCPVCGTKMAACAGRSIINRKTREKREYYYYRCNKAILNKQCSYTSRISQNLIEEYLLNNLDAEYRKYQVRCDKVKEAQTRKKKKRSADSVRSEIERLNILFQKGRIEFDYYEEQYGKLEEELKSFDEVIIREKDHSNVVGMLGSDFKEMYSSLSLENRQAFWQQIIKAIYVTKDRNVDYIDFL

SEQ ID NO: 8130 - protein, 460 aa, Unknown
  Description of Unknown: Integrase B8131 sequence
  PTHR30461:SF3,IPR036162,PS51737,IPR011109,PTHR30461, PS00397,PF00239,G3DSA:1.10.10.2600,IPR006119,SSF53041, cd00338,SM00857,IPR025827,IPR038109,PS51736, IPR006118,PF13408,G3DSA:3.40.50.1390,Coil
MIERCAIYIRVSTAEQSMKGHSLQAQREYLESYAASHDMRVVGIYADEGQTARKELKKRKAIHALLKDVEADKIDVILFWRMDRWFRNVADFYKVQDVLDAHGVRWVSTSESNINMETRDGRLCLNLILTIGQNEVDTTSERIKFTVNNMIQNGRMVWGATNLPFGYTIVEENGCKRMAKDPETACMVEEFYRFFRQTHKKRATVMHMRDTFGINFSYTMLRTMLSSEFYIGKYRSNDNYCPAYLTLDEWKEIQAISENNIKRPRTGRVYFFSGLVHCPVCGTKMAACAGRSIINRKTGEKREYYYYRCNKAILNKQCSYTSRISQNLIEEYLLNNLDTEYRKYQVRCNKVKEAQAHKKKKRSADSVRSEIERLNILFQKGRIEFDYYEEQYGKLEDELKSFDEVIIREKDHSNVVGMLDSDFKEMYSSLSLENRQAFWQQIIKAIYVTKDRNVDYVDFL

SEQ ID NO: 8131 - protein, 459 aa, Unknown
  Description of Unknown: Integrase B8132 sequence
  cd03768,SM00857,G3DSA:1.10.10.2600,IPR036162,PS51737, G3DSA:3.40.50.1390,IPR006119,IPR038109,PF07508,IPR011109, SSF53041,PTHR30461,PS51736,PF00239
MSEIASTKARKRCAVYCRVSSDERLDQEFNSIDAQKEAGHAYVASQRSEGWIPVADDYDDPGFSGGNTERPGLKRLMADIERGQIDIVVVYKIDRLTRSLADFSKMVEVFERHGVSFVSVTQQFNTTTSMGRLMLNVLLSFAQFEREVTGERIRDKIAAAKRKGMWMGGVPPLGYDVDNRLLIINEAEATVVRRIFEEMLTIGSPTQIAVNLTADGITTKAWTTQEGQTRSGTRIDKKYLHKLLRNRIYLGELSHKGNWYPGAHPPIIELELWDKVHAVLARDGHARSVETKIRSRTDALLRGLLYAPSGERMYPTYSRKNGRKYHYYVSKSESRFGAPGKSYERLPAPEIEAAVVAQIRTVLTSPESIASVVRHIQRNGGQVDEATTVMAMGRLNDVWDQLFPVERHRIANLMIERIDLVHIGEVQGIKVKWRELGWDALIGEFAPRGIGAELVEVEA

SEQ ID NO: 8132 - protein, 459 aa, Unknown
  Description of Unknown: Integrase B8133 sequence
  SM00857,G3DSA:1.10.10.2600,IPR036162,PF13408, IPR025827,PS51737,G3DSA:3.40.50.1390,IPR006119, IPR038109,SSF53041,IPR011109,PTHR30461, Coil,PS51736,cd00338,PF00239
MSTTHFYSHYPTIEYKTCALYVRCSKEEQAKFGDTIEAQIEDLKAFAKLHHLKIYAIYVDEGHTARKKYNKRKEFMRMLQDVELHKFEYIIFTKLDRWFRNIADFYKIQEILDNNGVTWLTALERYEMETTNGKLNVNIRLSVAQDEADRDSDRIKDVFRLKVKKGEAITGSLPIGLMVGENGKVDIDPDTVQIAYDMFDYFEAHNSKRGTLLYLIDKYNRYFCYETIARALRNPLYKGEYRGNPDYCPKIIDPARFDRIQVLGKRNVKVRKNNRYYVFSGLAQCKECGHALVANTTVQKRYNREYTQYRCNYYSNSHLCTHSHGTNEKVIEKYLLDNIKPELEKYVTTYEVKQNAPTKKADPSKIKTKMQRLKELYVNELIDLDDYRIEYEQYKQELDKLTSTATPEVKDLSAIRSFLALDLQSIYDSLTPQERRTLWSSIIDKIIISDGGDIEIVFL

SEQ ID NO: 8133 - protein, 459 aa, Unknown
  Description of Unknown: Integrase B8134 sequence
  SM00857,IPR036162,PF13408,PS51737,IPR025827, G3DSA:3.40.50.1390,IPR006119,IPR011109,SSF53041,PTHR30461, Coil,PS51736,cd00338,PF00239
MSTTHFYSHYPTIEYKTCALYVRCSKEEQAKFGDTIEAQIEDLKAFAKLHHLKIYAIYVDEGHTARKKYNKRKEFMRMLQDVELHKFEYIIFTKLDRWFRNIAVFYKIQEILDNNGVTWLTAMERYEMETTNGKLNVNIRLSVAQDEADRDSDRIKDVFRLKVKKGEAITGSLPIGLMVGENGKVDIDPDTVQIAYDMFDYFEVHNSKRGTLLYLIDKYNRYFCYETIARALRNPLYKGEYRGNPDYCPKIIDPARFDRIQVLGKRNVKVRKNNRYYVFSGLAQCKECGHALVANTTVQKRYNREYTQYRCNYYSNSHLCTHSHGMNEKVIEKYLLDNIKPELEKYVTAYDVKQNAPTKKADPSKIKTKMQRLKELYVNELIDLDDYRIEYEQYKQELDKLTSTAAPEVKDLSAIRSFLALDLQSIYDSLTPQEKRTLWSSIIDKIIISDGGDIEIVFL

SEQ ID NO: 8134 - protein, 459 aa, Unknown
  Description of Unknown: Integrase B8135 sequence
  PTHR30461:SF3,SM00857,IPR006118,G3DSA:1.10.10.2600, IPR036162,PF13408,PS51737,G3DSA:3.40.50.1390, IPR025827,IPR006119,IPR038109,IPR011109, SSF53041,PTHR30461,PS00397,PS51736,cd00338,PF00239
MNNLARNLETMPLRVALYIRVSTDEQAIKGLSLEAQQEDLMQHVKEQGWTVAGIYVDAAKTARKRIYKRAEFLRMLEDVKEGKIDRILCTRLDRWFRNVGDYYKVMEILEKNHCDWSCTQEQYDTSTAGGRLYINMKLSIAQNEADQTGERINVVFDSKIQNGTVVSGSVPFWLRINEEKRLEIIPEKAAILKDAFDHYEATVTKRGTITYIRNKYGLNWCEATFSRMLKDKLAIGVYDKNGRYNPSFCPAAISEEQFNHVQELMKRNGKTAPSGHVYIFTSLLVCAECKHNLVGYRNGQNYYYYRCNHHFRRKLCPHNRSLSERKIESWLLNNLASEIEKCKIAYSVNAAAKERSSRQAEKAALKNKLTKLKELYVNDLIDLEDYKKDYEIYSTALANIPDEQQEKAPDFSLVEHMMQNGFKEIYEGLSREEKRTFWRSIIKKIEINNDGEITGIFFG

SEQ ID NO: 8135 - protein, 459 aa, Unknown
  Description of Unknown: Integrase B8136 sequence
  PTHR30461:SF3,SM00857,IPR036162,PF13408,PS51737, IPR025827,G3DSA:3.40.50.1390,IPR006119,IPR011109,SSF53041, PTHR30461,Coil,PS51736,cd00338,PF00239
MSTTHFYSHYPTIEYKTCALYVRCSKEEQAKFGDTIEAQIEDLKAFAKLHHLKIYAIYVDEGHTARKKYNKRKEFMRMLQDVELHKFEYIIFTKLDRWFRNIADFYKIQEILDNNGVTWLTALERYEMETTNGKLNVNIRLSVAQDEADRDSDRIKDVFRLKVKKGEAITGSLPIGLMVGENGKVDIDPDTVQIAYDMFDYFEVHNSKRGTLLYLIDKYNRYFCYETIARALRNPLYKGEYRGNPDYCPKIIDPARFDRIQVLGKRNVKVRKNNRYYVFSGLAQCKECGHALVANTTVQKRYNREYTQYRCNYYSNSHLCTHSHGINEKVIEKYLLDNIKPELEKYVTAYDVKQNAPTKKADPSKIKTKMQRLKELYVNELIDLDDYRIEYEQYKQELDKLTSTAAPEVKDLSAIRSFLALDLQSIYDSLTPQEKRTLWSSIIDKIIISDGGDIEIVFL

SEQ ID NO: 8136 - protein, 459 aa, Unknown
  Description of Unknown: Integrase B8137 sequence
  PTHR30461:SF3,SM00857,IPR006118,IPR036162,PF13408, IPR025827,G3DSA:3.40.50.1390,IPR006119,SSF53041,PTHR30461, PS00397,PS51736,cd00338,PF00239
MKNNLLRVALYIRVSSEEQANSGDSIRDQKERCEKYIANHENMALQDTYIDDGISGQKLKRDDFQRLLQSVKDRKVDLIIFTKLDRWFRNLRHYLNTQAVLDKNDVSWTAIDQPYFDTSTPYGRAFVAQSMTWAELEAQNGGQRVKDVFKTKVQHGEVITGKVLRGYCIQDKHLVLSDEAPAMYDSIAYFLRTQSMGKTIKYMQQTHGITMTLQNFRNSYLRNEKLTGRYRGVENYCPRLISDEMFAQAQKLLDEKRNVRVSQKYPYIFTGLLVCSECGYKMSGCHINVVVKKKGEVYRYRYPAYECKQYGAYHRCNNGGEIRESRIEEYLLEHIGEEIDRYMADYDASGQAVIDNRAKKNKIRRKLDRLKELFLNELVTLDEYKLDREALEAQLEQIPDIEEPKKNLIELKHLLDNDFNILYKDFSNEEKRLFWRSIIKEIQVPKSVNRHRKYKIIPL

SEQ ID NO: 8137 - protein, 459 aa, Unknown
  Description of Unknown: Integrase B8138 sequence
  PTHR30461:SF3,SM00857,IPR036162,PF13408,IPR025827, G3DSA:3.40.50.1390,PS51737,IPR006119,SSF53041,IPR011109, PTHR30461,Coil,PS51736,cd00338,PF00239
MSTTHFYSHYPTIEYKTCALYVRCSKEEQAKFGDTIEAQIEDLKAFAKLHHLKIYAIYVDEGHTARKKYNKRKEFMRMLQDVELHKFEYIIFTKLDRWFRNIADFYKIQEILDNNGVTWLTALERYEMETTNGKLNVNIRLSVAQDEADRDSDRIKDVFRLKVKKGEAITGSLPIGLMVGENGKVDTDPDTVQIAYDMFDYFEAHNSKRGTLLYLIDKYNRYFCYETIARALRNPLYKGEYRGNPDYCPKIIDPARFDRIQVLGKRNVKVRKNNRYYVFSGLAQCKECGHALVANTTVQKRYNREYTQYRCNYYSNSHLCTHSHGTNEKVIEKYLLDNIKPELEKYVTAYEVKQNAPTKKADPSKIKTKMQRLKELYVNELIDLDDYRIEYEQYKQELDKLTSTAAPEAKDLSAIRSFLALDLQSIYDSLTPQEKRTLWSSIIDKIIISDGGDIEIVFL

SEQ ID NO: 8138 - protein, 459 aa, Unknown
  Description of Unknown: Integrase B8139 sequence
  PTHR30461:SF3,SM00857,G3DSA:1.10.10.2600,IPR036162,PF13408, IPR025827,PS51737,G3DSA:3.40.50.1390,IPR006119,IPR038109, SSF53041,IPR011109,PTHR30461,Coil, PS51736,cd00338,PF00239
MSTTHFYSHYPTIEYKTCALYVRCSKEEQAKFGDTIEAQIEDLKAFAKLHHLKIYAIYVDEGHTARKKYNKRKEFMRMLQDVKLHKFEYIIFTKLDRWFRNIADFYKIQEILDNNGVTWLTALERYEMETTNGKLNVNIRLSVAQDEADRDSDRIKDVFRLKVKKGEAITGSLPIGLMVGENGKVDIDPDTVQIAYDMFDYFEAHNSKRGTLLYLIDKYNRYFCYETIARALRNPLYKGEYRGNPDYCPKIIDPTRFDRIQVLGKRNVKVRKNNRYYVFSGLAQCKECGHALVANTTVQKRYNREYTQYRCNYYSNSHLCTHSHGTNEKVIEKYLLDNIKPELEKYVTAYEVKQNAPTKKADPSKIKTKMQRLKELYVNELIDLDDYRIEYEQYKQELDRLTSTAAPEVKDLSAIRSFLTLDLQSIYDSLTPQEKRTLWSSIIDKIIISDGGDIEIVFL

SEQ ID NO: 8139 - protein, 459 aa, Unknown
  Description of Unknown: Integrase B8140 sequence
  PTHR30461:SF3,SM00857,G3DSA:1.10.10.2600,IPR036162,PF13408, PS51737,IPR025827,G3DSA:3.40.50.1390,IPR006119,IPR038109, SSF53041,IPR011109,PTHR30461,Coil,PS51736, cd00338,PF00239
MSTTHFYSHYPTIEYKTCALYVRCSKEEQAKFGDTIEAQIEDLKAFAKLHHLKIYAIYVDEGHTARKKYNKRKEFMRMLQDVELHKFEYIIFTKLDRWFRNIADFYKIQEILDNNGVTWLTALERYEMETTNGKLNVNIRLSVAQDEADRDSDRIKDVFRLKVKKGEAITGSLPIGLMVGEDGKVAIDPDTVQIAYDMFDYFEAHNSKRGTLLYLIDKYNRYFCYETIARALRNPLYKGEYRGNPDYCPKIIDPARFDRIQVLGKRNVKVRKNNRYYVFSGLAQCKECGHALVANTTVQKRYNREYTQYRCNYYSNSHLCTHSHGMNEKAIEKYLLDNIKPELEKYVTAYEVKQNAPTKKADPSKIKTKMQRLKELYVNELIDLDDYRIEYEQYKQELDKLTSTAAPEAKDLSAIRSFLDLDLQSIYDSLTPQEKRTLWSSIIDKIIISDSGDIEIVFL

SEQ ID NO: 8140 - protein, 459 aa, Unknown
  Description of Unknown: Integrase B8141 sequence
  PTHR30461:SF3,SM00857,G3DSA:1.10.10.2600,IPR036162,PF13408, PS51737,IPR025827,G3DSA:3.40.50.1390,IPR006119,IPR038109, IPR011109,SSF53041,PF00239,PTHR30461,PS51736, Coil,cd00338
MINNELKPKLIRVALYIRVSGEEQKIKGLSLESQRERLEAYAREQGWVIVGIYIDAAKTARKKLHKRSEFQWMLDAVRHDEVDMLLFTRLDRWFRSVPDYYKVMEVLEAHNCEWKTIDDGEGYDTTTASGRLYINIKLSIAQNEADLDGERIDVVFDSKVQHGTVLSGKCPFWLRVNEEKRLELVPEKTAILQDAFDYYEQSTSQRATIKYIRETYGVNWCDATFRRMLHDKLAIGVYDRNGRYNPTFCPAAISSEQFERVQELTKRNSRSNPTGKVYIFTGILVCDECRHNMVGYKSRGIYYYRCNQHFQRGRCEHNHSAREDRVEAWLFEHLSDEIEKYEVSWDVQAAGRKKTAAGVERATLKRKLTKLKELYVNDLIDMEEYKKDYETYSAALLKLDEAQIEEKKVDLSGVRQIVSKGFQEIYGTLTREEKRTLWKSVLKEIRIDNDQNITGISFF

SEQ ID NO: 8141 - protein, 459 aa, Unknown
  Description of Unknown: Integrase B8142 sequence
  cd03768,SM00857,G3DSA:1.10.10.2600,IPR036162,PF13408, PS51737,G3DSA:3.40.50.1390,IPR025827,IPR006119,IPR038109, IPR011109,SSF53041,PTHR30461,PS51736,Coil, PF00239
MEQVTAGYSLEAQQEKLNGYAAYQKYTLLPPYADEGFSGASLSRPALQKLIGDVKDGKIDIVLIYKLDRLSRRVRDVIDLVELFAEHNVTLYSLTENLDVSSPFGRAALKMSATFSELERETIRDRMMMGKDQRVKQGKALPTRVAPFGYRYDIQKKRFEIVPEEAEIVQKLFELYISGSYNFRQLHDYARAHWNHPYFGERNPLSCKPIIHRIMYAGYIIYKGELYKGTNFDPIIEYQTYLQAQEVVKRHLTQRQSPNSPYLLTGLLVCARCGNRYVGKLYDRNVLQKNGTKTTKYKYRAYGCAARVKRDKNYHPVKCDNDIFPAEELDEIIEKRLKRLKFTQFVAGGQNLVDPLLEENVELKRRAEKLLDLYLDNGLTKEEYLSRRDKLEKKIVQNEKLIQEETSRPSRPNTTIDNLKERIAAYDTLDRVEKQNLLNSLISQISIDGERIVVKWRVK

SEQ ID NO: 8142 - protein, 459 aa, Unknown
  Description of Unknown: Integrase B8143 sequence
  SM00857,G3DSA:1.10.10.2600,IPR036162,PF13408,IPR025827, PS51737,G3DSA:3.40.50.1390,IPR006119,IPR038109,SSF53041, IPR011109,PTHR30461,Coil,PS51736,cd00338, PF00239
MSTTHFYSHYPTIEYKTCALYVRCSKEEQAKFGDTIEAQIEDLKAFAKLHHLKIYAIYVDEGHTARKKYNKRKEFMRMLQDVELHKFEYIIFTKLDRWFRNIADFYKIQEILDNNGVTWLTALERYEMETTNGKLNVNIRLSVAQDEADRDSDRIKDVFRLKVKKGEAITGSLPIGLTVGENGKVDIDPDTVQIAYDMFDYFEAHNSKRGTLLYLIDKYNRYFCYETIARALRNPLYKGEYRGNPDYCPKIIDPARFDRIQVLGKRNVKVRKNNRYYVFSGLAQCKECGHALVANTTVQKRYNREYTQYRCNYYSNSHLCTHSHGMNEKVIEKYLLDNIKPELEKYVTAYDVKQNAPTKKADPSKIKTKMQRLKELYVNELIDLDDYRIEYEQYKQELDKLTSTAAPEVKDLSAIRSFLALDLQSIYDSLTPQERRTLWSSIIDKIIISDGGDIEIVFL

SEQ ID NO: 8143 - protein, 459 aa, Unknown
  Description of Unknown: Integrase B8144 sequence
  PTHR30461:SF3,SM00857,IPR006118,IPR036162,PF13408, IPR025827,G3DSA:3.40.50.1390,PS00397,IPR006119,SSF53041, PTHR30461,Coil,PS51736,cd00338,PF00239
MKNNLLRVALYIRVSSEEQANSGDSIRDQKERCEKYIADHENMALQDTYIDDGISGQKLKRDDFQRLLQSVNDHKVDLIIFTKLDRWFRNLRHYLNTQAVLDKNDVSWTAIDQPYFDTSTPYGRAFVAQSMTWAELEAQNGGQRVKDVFKTKVQHGEVITGKVLRGYCIQDKHLVLSDEAPAMYDSIAFFLRTQSMGKTIKYMQQTHGITMTLQNFRNSYLRNEKLTGRYRGVENYCPRLISDEMFAQAQKLLDEKRNVRVSQKYPYIFTGLLVCSECGYKMSGCHINVVVKKKGEVYRYRYPAYECKQYGAYHRCNNGGEIRESRIEEYLLEHIGEEIDKYMADYDASGQAIIDNRAKKNKIRRKLDRLKELFLNELITLDEYKLDREALEAQLEQIPDTEEPKKNLIELKHLLDNDFNILYKDFSNEEKRLFWRSIIKEIQVPKSVNRHRKYKIMPL

SEQ ID NO: 8144 - protein, 459 aa, Unknown
  Description of Unknown: Integrase B8145 sequence
  SM00857,IPR036162,PF13408,IPR025827, PS51737,G3DSA:3.40.50.1390,IPR006119,IPR011109, SSF53041,PTHR30461,Coil,PS51736, cd00338,PF00239
MSTTHFYSHYPTIEYKTCALYVRCSKEEQAKFGDTIEAQIEDLKAFAKLHHLKIYAIYVDEGHTARKKYNKRKEFMRMLQDVELHKFEYIIFTKLDRWFRNIADFYKIQEILDNNGVTWLTALERYEMETTNGKLNVNIRLSVAQDEADRDSDRIKDVFRLKVKKGEAITGSLPIGLMVGENGKVDIDPDTVQIAYDMFDYFEVHNSKRGTLLYLIDKYNRYFCYETIARALRNPLYKGEYRGNPDYCPKIIDPARFDRIQVLGKRNVKVRKNNRYYVFSGLAQCKECGHALVANTTVQKRYNREYTQYRCNYYSNSHLCTHSHGTNEKVIEKYLLDNIKPELEKYVTAYEVKQNAPTKKADPSKIKTKMQRLKELYVNELIDLDDYRIEYEQYKQELDRLTSTAAPEVKDLSAIRSFLALDLQSIYDSLTPQEKRTLWSSIIDKIIISDSGDIEIVFL

SEQ ID NO: 8145 - protein, 459 aa, Unknown
  Description of Unknown: Integrase B8146 sequence
  PTHR30461:SF3,SM00857,G3DSA:1.10.10.2600,IPR036162,PF13408, PS51737,IPR025827,G3DSA:3.40.50.1390,IPR006119,IPR038109, PF07508,IPR011109,SSF53041,PF00239,PTHR30461, PS51736,Coil,cd00338
MDEYIDRAISGKTDNRPNFQRLIKDSEKGHFDAVIMYTLDRFARNRYDSAIYKAKLKKNGVRVFYAKQPMPDTPEGIILESVLEGYAEYYSENLARSIKRGLKENALHGIAMGNPGLGYKIGEDRRYVIDPVEAQAVREIFTLYAEGKSKTQIVEHLNEKGYKTSRGNPFNKNSLERILRNDRYIGVYRYDDVVLEDTVPPIIDKTLFAKVQALLQHNFASRARNKAKEDYLLSTKLFCGHCGSPMIGESGTSKTGKLYHYYKCGKRKRGGNCDKKIEKKDWLEELVVRYTVQYVLTDENIDLIATKAMELIEKDLQDTSVLIGLQGMLKDTNKKIKNLMSAIEQGIITATTKERLEELEQERLNIEGQIAREEMKKPLLSKERIVYWLTSFKSGDINDVEYQRRIIDTLVNAVFVYDDGDKGRRIVLTFNTSGNNTLTISGSDIEGFTPLKKQVELFV

SEQ ID NO: 8146 - protein, 459 aa, Unknown
  Description of Unknown: Integrase B8147 sequence
  SM00857,G3DSA:1.10.10.2600,IPR036162,PF13408,IPR025827, PS51737,G3DSA:3.40.50.1390,IPR006119,IPR038109,SSF53041, IPR011109,PTHR30461,Coil,PS51736,cd00338, PF00239
MSTTHFYSHYPTIEYKTCALYVRCSKEEQAKFGDTIEAQIEDLKAFAKLHHLKIYAIYVDEGHTARKKYNKRKEFMRMLQDVELHKFEYIIFTKLDRWFRNIADFYKIQEILDNNGVTWLTALERYEMETTNGKLNVNIRLSVAQDEADRDSDRIKDVFRLKVKKGEAITGSLPIGLMVGENGKVDIDPDTVQIAYDMFDYFEAHNSKRGTLLYLIDKYNRYFCYETIARALRNPLYKGEYRGNPDYCPKIIDPARFDRIQVLGKRNVKVRKNNRYYVFSGLAQCKECGHALVANTTVQKRYNREYTQYRCNYYSNSHLCTHSHGMNEKAIEKYLLDNIKPELEKYVTAYEIKQNAPTKKADPSKIKTKMQRLKELYVNELIDLDDYRIEYEQYKQELDKLTSTAAPEVKDLSAIRSFLALDLQSIYDSLTPQEKRTLWSSIIDKIIISDGGDIEIVFL

SEQ ID NO: 8147 - protein, 459 aa, Unknown
  Description of Unknown: Integrase B8148 sequence
  PTHR30461:SF3,SM00857,G3DSA:1.10.10.2600,IPR036162,PF13408, IPR025827,PS51737,G3DSA:3.40.50.1390,IPR006119,IPR038109, SSF53041,IPR011109,PTHR30461,Coil,PS51736, cd00338,PF00239
MSTTHFYSHYPTIEYKTCALYVRCSKEEQAKFGDTIEAQIEDLKAFAKLHHLKIYAIYVDEGHTARKKYNKRKEFMRMLQDVELHKFEYIIFTKLDRWFRNIADFYKIQEILDNNGVTWLTALERYEMETTNGKLNVNIRLSVAQDEADRDSDRIKDVFRLKVKKGEAITGSLPIGLMVGENGKVDIDPDTVQIAYDMFDYFETHNSKRGTLLYLIDKYNRYFCYETIARALRNPLYKGEYRGNPDYCPKIIDPARFDRIQVLGKRNVKVRKNNRYYVFSGLAQCKECGHALVANTTVQKRYNREYTQYRCNYYSNSHLCTHSHGTNEKVIEKYLLDNIKPELEKYVTAYEVKQNAPTKKADPSKIKTKMQRLKELYVNELIDLDDYRIEYEQYKQELDKLTSTAAPEVKDLSAIRSFLALDLQSIYDSLTPQEKRTLWSSIIDKIIISDGGDIEIVFL

SEQ ID NO: 8148 - protein, 459 aa, Unknown
  Description of Unknown: Integrase B8149 sequence
  PTHR30461:SF3,SM00857,G3DSA:1.10.10.2600,IPR036162,PF13408, PS51737,IPR025827,G3DSA:3.40.50.1390,IPR006119,IPR038109, SSF53041,IPR011109,PTHR30461,Coil,PS51736, cd00338,PF00239
MSTTHFYSHYPTIEYKTCALYVRCSKEEQAKFGDTIEAQIEDLKAFAKLHHLKIYAIYVDEGHTARKKYNKRKEFMRMLQDVELHKFEYIIFTKLDRWFRNIADFYKIQEILDNNGVTWLTALERYEMETTNGKLNVNIRLSVAQDEADRDSDRIKDVFRLKVKKGEAITGSLPIGLTVGENGKVDIDPDTVQIAYDMFDYFETHNSKRGTLLYLIDKYDRYFCYETIARALRNPLYKGEYRGNPDYCPKIIDPARFDRIQVLGKRNVKVRKNNRYYVFSGLAQCKECGHALVANTTVQKRYNREYTQYRCNYYSNSHLCTHSHGMNEKAIEKYLLDNIKPELEKYVTAYEVKQNTPTKKADPSKIKAKMQRLKELYVNELIDLDDYRIEYEQYKQELDRLTSTAAPEVKDLSAIRSFLALDLQSIYDSLTPQEKRTLWSSIIDKIIISDSGDIEIVFL

SEQ ID NO: 8149 - protein, 459 aa, Unknown
  Description of Unknown: Integrase B8150 sequence
  PTHR30461:SF3,SM00857,G3DSA:1.10.10.2600,IPR036162,PS51737, G3DSA:3.40.50.1390,IPR006119,IPR038109,PF07508,SSF53041, IPR011109,PTHR30461,PS51736,cd00338,PF00239
MGNKKVTKIDATIKIASFDGGIVKKRRVAAYARVSTAAEEQETSLAAQRDYYEQYIKENKEWEFVGIYYDDGISGLSFRNRDGFNRMIKDALDGKIDLILTKSLSRFARNTVDTLTTIRKLKAANIEVYFEKENIFTLDSKGEFLITIMSSIAQEESRSISENVTWGTRKRFSDGKYHVPYDSFLGYEKGTDGSLQIVEKEAAIVRLIYLLYLAGKSPHTICELFNALEIPTTKQQGPWNKTPVVSILTNEKYKGDALLQKTITIDFLTGKRKINEGEVTQYYVSNAHDPIVSAEVFEMVQNALKYRRGTSLRFSGFYPLGGRVFCSSCGSFFGHKILQRRRNGRLTRKEIWRCNSYYDGNAHPHSIKDGQMVDGLAAALQTAIESNMDVVDLCWETMKAIHPRLQRPKYEKIIRSIYEDANRTRKNILFLHFLIDKVSVSDGLHLTFCLKDGTQIEYN

SEQ ID NO: 8150 - protein, 459 aa, Unknown
  Description of Unknown: Integrase B8151 sequence
  PTHR30461:SF3,SM00857,IPR036162,PF13408,IPR025827, G3DSA:3.40.50.1390,PS51737,IPR006119,IPR011109,SSF53041, PF00239,PTHR30461,PS51736,Coil, cd00338
MSTTHFYSHYPTIEYKTCALYVRCSKEEQAKFGDTIEAQIEDLKAFAKLHHLKIYAIYVDEGHTARKKYNKRKEFMRMLQDVELHKFKYIIFTKLDRWFRNIADFYKIQEILDNNGVTWLTALERYEMETTNGKLNVNIRLSVAQDEADRDSDRIKDVFRLKVKKGEAITGSLPIGLTVGENGKVDIDPDTVQIAYDMFDYFETHNSKRGTLLYLIDKYDRYFCYETIARALMNPLYKGEYRGNPDYCPKIIDPARFDRIQVLGKRNVKVRKNNRYYVFSGLAQCKECGHALVANTTVQKRYSREYTRYRCNYYSNSHLCTHSHGISEKVIETYLLDNIKPELEKYITDYEIKQNVPTKKADPSKIKTKMQRLKELYVNELIDLDDYRIEYEQYKQELDKLTSTAAPEVKDLSAIRSFLALDLQSIYDSLTPQEKRTLWSSIIDKIIISDSGDIEIVFL

SEQ ID NO: 8151 - protein, 459 aa, Unknown
  Description of Unknown: Integrase B8152 sequence
  PTHR30461:SF3,G3DSA:1.10.10.2600,IPR036162,PF13408,PS51737, G3DSA:3.40.50.1390,IPR025827,IPR006119,IPR038109,PF07508, IPR011109,SSF53041,PTHR30461,Coil,cd00338, PF00239
MIEDSAKRQFQAVIVYRLDRFTRNRYDSAIYKARLKKNGVKVLSAMENLNGSPESIIMESLLEGMAEYYSVELSQKITRGMRENALKGKALGGQRVLGYKVNSDCYFEIDETTAPVVVDIFKLYSSGKTVKEICDILNARGVKTARGGAFNKNSLHTILTNKKYIGIYKTKYGEIVGGIPAIIDKELFEMVALRMEQNKKAPARAKAEINYLLSTKLFCGKCRSAMVGESGTSKTCKKYYYYACVKKKREKACDKSNVKKDWIEDLVIQRTVTDILKDDVIEKIADRLVELQKAEAAQSGTMLYLENSLAEIQVSIKNIMTAIEKGIITESTKTRLTELEDEKRNVEIEIAKESIARRIISREQIIYWISSFKDGDITSEKYRQQLIDTFVHAVFVYDDKIVITYNYSGENNTATISDLDLSSPPKINHPQGWIYFCRGPAGVEVYPPLRGKSLQVHQK

SEQ ID NO: 8152 - protein, 459 aa, Unknown
  Description of Unknown: Integrase B8153 sequence
  SM00857,G3DSA:1.10.10.2600,IPR036162,PF13408,IPR025827, PS51737,G3DSA:3.40.50.1390,IPR006119,IPR038109,SSF53041, IPR011109,PTHR30461,Coil,PS51736,cd00338, PF00239
MSTTHFYSHYPTIEYKTCALYVRCSKEEQAKFGDTIEAQIEDLKAFAKLHHLKIYAIYVDEGHTARKKYNKRKEFMRMLQDVELHKFEYIIFTKLDRWFRNIADFYKIQEILDNNGVTWLTALERYEMETTNGKLNVNIRLSVAQDEADRDSDRIKDVFRLKVKKGEAITGSLPIGLMVGENGKVDIDPDTVQIAYDMFDYFEAHNSKRGTLLYLIDKYNRYFCYETIARALRNPLYKGEYRGNPDYCPKIIDPARFDRIQVLGKRNVKVRKNNRYYVFSGLAQCKECGHALVANTTVQKRYNREYTQYRCNYYSNSHLCTHSHGTNEKVIEKYLLDNIKPELEKYVTAYEVKQNAPTKKADPSKIKTKMQRLKELYINELIDLDDYRIEYEQYKQELDRLTSTAAPEVKDLSAIRSFLALDLQSIYDSLTPQEKRTLWSSIIDKIIISDSGDIEIVFL

SEQ ID NO: 8153 - protein, 459 aa, Unknown
  Description of Unknown: Integrase B8154 sequence
  SM00857,G3DSA:1.10.10.2600,IPR036162,PF13408,IPR025827, G3DSA:3.40.50.1390,PS51737,IPR006119,IPR038109,SSF53041, IPR011109,PTHR30461,Coil,PS51736,cd00338, PF00239
MSTTHFYSHYPTIEYKTCALYVRCSKEEQAKFGDTIEAQIEDLKAFAKLHHLKIYAIYVDEGHTARKKYNKRKEFMRMLQDVELHKFEYIIFTKLDRWFRNIADFYKIQEILDNNGVTWLTALERYEMETTNGKLNVNIRLSVAQDEADRDSDRIKDVFRLKVKKGEAITGSLPIGLMVGENGKVDIDPDTVQIAYDMFDYFEAHNSKRGTLLYLIDKYNRYFCYETIAHALRNPLYKGEYRGNPDYCPKIIDPARFDRIQVLGKRNVKVRKNNRYYVFSGLAQCKECGHALVANTTVQKRYNREYTQYRCNYYSNSHLCTHSHGTNEKVIEKYLLDNIKPELEKYVTTYEVKQNAPTKKADPSKIKTKMQRLKELYVNELIDLDDYRIEYEQYKQELDRLTSTAAPEVKDLSAIRSFLALDLQSIYDSLTPQEKRTLWSSIIDKIIISDGGDIEIVFL

SEQ ID NO: 8154 - protein, 459 aa, Unknown
  Description of Unknown: Integrase B8155 sequence
  PTHR30461:SF3,SM00857,G3DSA:1.10.10.2600,IPR036162,PF13408, IPR025827,PS51737,G3DSA:3.40.50.1390,IPR006119,IPR038109, SSF53041,IPR011109,PTHR30461,Coil,PS51736, cd00338,PF00239
MSTTHFYSHYPTIEYKTCALYVRCSKEEQAKFGDTIEAQIEDLKAFAKLHHLKIYAIYVDEGHTARKKYNKRKEFMRMLQDVELHKFEYIIFTKLDRWFRNIADFYKIQEILDNNGVTWLTALERYEMETTNGKLNVNIRLSVAQDEADRDSDRIKDVFRLKVKKGEAITGSLPIGLTVGENGKVDIDPDTVQIAYDMFDYFETHNSKRGTLLYLIDKYDRYFCYETIARALRNPLYKGEYRGNPDYCPKIIDPARFDRIQVLGKRNVKVRKNNRYYVFSGLAQCKECGHALVANTTVQKRYNREYTQYRCNYYSNSHLCTHSHGMNEKVIEKYLLDNIKPELEKYVTAYEVKQNAPTKKADPSKIKTKMQRLKELYVNELIDLDDYRIEYEQYKQELDKLTSTAAPEAKDLSAIRSFLALDLQSIYDSLTPQEKRTLWSSIIDKIIISDGGDIEIVFL

SEQ ID NO: 8155 - protein, 459 aa, Unknown
  Description of Unknown: Integrase B8156 sequence
  SM00857,G3DSA:1.10.10.2600,IPR036162,PF13408,IPR025827, G3DSA:3.40.50.1390,PS51737,IPR006119,IPR038109,SSF53041, IPR011109,PTHR30461,Coil,PS51736,cd00338, PF00239
MSTTHFYSHYPTIEYKTCALYVRCSKEEQAKFGDTIEAQIEDLKAFAKLHHLKIYAIYVDEGHTARKKYNKRKEFMRMLQDVELHKFEYIIFTKLDRWFRNIADFYKIQEILDNNGVTWLTALERYEMETTNGKLNVNIRLSVAQDEADRDSDRIKDVFRLKVKKGEAITGSLPIGLTVGENGKVDIDPDTVQIAYDMFDYFETHNSKRSTLLYLIDKYNRYFCYETIARALRNPLYKGEYRGNPDYCPKIIDPARFDRIQVLGKRNVKVRKNNRYYVFSGLAQCKECGHALVANTTVQKRYNREYTQYRCNYYSNSHLCTHSHGMNEKAIEKYLLDNIKPELEKYVTAYEVKQNVPTKKADPSKIKTKMQRLKELYVNELIDLDDYRIEYEQYKQELDRLTSTAAPEVKDLSAIRSFLALDLQSIYDSLTPQEKRTLWSSIIDKIIISDSGDIEIVFL

SEQ ID NO: 8156 - protein, 459 aa, Unknown
  Description of Unknown: Integrase B8157 sequence
  PTHR30461:SF3,SM00857,IPR036162,PF13408,PS51737, IPR025827,G3DSA:3.40.50.1390,IPR006119,IPR011109,SSF53041, PTHR30461,Coil,PS51736,cd00338,PF00239
MSTTHFYSHYPTIEYKTCALYVRCSKEEQAKFGDTIEAQIEDLKAFAKLHHLKIYAIYVDEGHTARKKYNKRKEFMRMLQDVELHKFEYIIFTKLDRWFRNIADFYKIQEILDNNGVTWLTALERYEMETTNGKLNVNIRLSVAQDEADRDSDRIKDVFRLKVKKGEAITGSLPIGLMVGENGKVDIDPDTVQIAYDMFDYFEVHNSKRGTLLYLIDKYNRYFCYETIARALRNPLYKGEYRGNPDYCPKIIDPARFDRIQVLGKRNVKVRKNNRYYVFSGLAQCKECGHALVANTTVQKRYNREYTQYRCNYYSNSHLCTHSHGMNEKVIEKYLLDNIKPELEKYVTAYDVKQNAPTKKADPSKIKTKMQRLKELYVNELIDLDDYRIEYEQYKQELDKLTSTAAPEVKDLSAIRSFLALDLQSIYDSLTPQEKRTLWSSIIDKIIISDGGDIEIVFL

SEQ ID NO: 8157 - protein, 459 aa, Unknown
  Description of Unknown: Integrase B8158 sequence
  PTHR30461:SF3,SM00857,G3DSA:1.10.10.2600,IPR036162,PF13408, IPR025827,PS51737,G3DSA:3.40.50.1390,IPR006119,IPR038109, SSF53041,IPR011109,PTHR30461,Coil, PS51736,cd00338,PF00239
MSTTHFYSHYPTIEYKTCALYVRCSKEEQAKFGDTIEAQIEDLKAFAKLHHLKIYAIYVDEGHTARKKYNKRKEFMRMLQDVELHKFEYIIFTKLDRWFRNIADFYKIQEILDNNGVTWLTALERYEMETTNGKLNVNIRLSVAQDEADRDSDRIKDVFRLKVKKGEAITGSLPIGLTVGENGKVDIDPDTVQIAYDMFDYFEAHNSKRGTLLYLIDKYNRYFCYETIARALRNPLYKGEYRGNLDYCPKIIDPARFDRIQVLGKRNVKVRKNNRYYVFSGLAQCKECGHALVANTTVQKRYNREYTQYRCNYYSNSHLCTHSHGMNEKVIEKYLLDNIKPELEKYVTAYDVKQNAPTKKADPSKIKTKMQRLKELYVNELIDLDDYRIEYEQYKQELDKLTSTAAPEVKDLSAIRSFLALDLQSIYDSLTPQEKRTLWSSIIDKIIISDGGDIEIVFL

SEQ ID NO: 8158 - protein, 459 aa, Unknown
  Description of Unknown: Integrase B8159 sequence
  SM00857,G3DSA:1.10.10.2600,IPR036162,PF13408,IPR025827, PS51737,G3DSA:3.40.50.1390,IPR006119,IPR038109,SSF53041, IPR011109,PTHR30461,Coil,PS51736,cd00338, PF00239
MSTTHFYSHYPTIEYKTCALYVRCSKEEQAKFGDTIEAQIEDLKAFAKLHHLKIYAIYVDEGHTARKKYNKRKEFMRMLQDVELHKFEYIIFTKLDRWFRNIADFYKIQEILDNNGVTWLTALERYEMETTNGKLNVNIRLSVAQDEADRDSDRIKDVFRLKVKKGEAITGSLPIGLTVGENGKVDIDPDTVQIAYDMFDYFETHNSKRGTLLYLIDKYNRYFCYETIARALRNPLYKGEYRGNPDYCPKIIDPARFDRIQVLGKRNVKVRKNNRYYVFSGLAQCKECGHALVANTTVQKRYNREYTQYRCNYYSNSHLCTHSHGMNEKAIEKYLLDNIKPELEKYVTAYEVKQNAPTKKADPSKIKTKMQRLKELYVNELIDLDDYRIEYEQYKQELDRLTSTAAPKVKDLSAIRSFLALDLQSIYDSLTPQEKRTLWSSIIDKIIISDSGDIEIVFL

SEQ ID NO: 8159 - protein, 459 aa, Unknown
  Description of Unknown: Integrase B8160 sequence
  SM00857,G3DSA:1.10.10.2600,IPR036162,PF13408,IPR025827, PS51737,G3DSA:3.40.50.1390,IPR006119,IPR038109,SSF53041, IPR011109,PF00239,PTHR30461,PS51736,Coil, cd00338
MSTTHFYSHYPTIEYKTCALYVRCSKEEQAKFGDTIEAQIEDLKAFAKLHHLKIYAIYVDEGHTARKKYNKRKEFMRMLQDVELHKFEYIIFTKLDRWFRNIADFYKIQEILDNNGVTWLTALERYEMETTNGKLNVNIRLSVAQDEADRDSDRIKDVFRLKVKKGEAITGSLPIGLTVGENGKVDIDPDTVQIAYDMFDYFETHNSKRGTLLYLIDKYNRYFCYETISRALRNPLYKGEYRGNPDYCPKIIDPARFDRIQVLGKRNVKVRKNNRYYVFSGLAQCKECGHALVANTTVQKRYNREYTQYRCNYYSNSHLCTHSHGMNEKAIEKYLLDNIKPELEKYVTAYEVKQNAPTKKADPSKIKAKMQRLKELYVNELIDLDDYRIEYEQYKQELDRLTSTAAPEVKDLSAIRSFLALDLQSIYDSLTPQEKRTLWSSIIDKIIISDSGDIEIVFL

SEQ ID NO: 8160 - protein, 459 aa, Unknown
  Description of Unknown: Integrase B8161 sequence
  PTHR30461:SF3,SM00857,IPR036162,PF13408,PS51737, IPR025827,G3DSA:3.40.50.1390,IPR006119,IPR011109,SSF53041, PTHR30461,Coil,PS51736,cd00338,PF00239
MSTTHFYSHYPTIEYKTCALYVRCSKEEQAKFGDTIEAQIEDLKAFAKLHHLKIYAIYVDEGHTARKKYNKRKEFMRMLQDVELHKFEYIIFTKLDRWFRNIADFYKIQEILDNNGVTWLTALERYEMETTNGKLNVNIRLSVAQDEADRDSDRIKDVFRLKVKKGEAITGSLPIGLMVGENGKVDIDPDTVQIAYDMFDYFEVHNSKRGTLLYLIDKYNRYFCYETIARALRNPLYKGEYRGNPDYCPKIIDPARFDRIQVLGKRNVKVRKNNRYYVFSGLAQCKECGHALVANTTVQKRYNREYTQYRCNYYSNSHLCTHSHGMNEKVIEKYLLDNIKPELEKYVTAYDVKQNAPTKKADPNKIKTKMQRLKELYVNELIDLDDYRIEYEQYKQELDKLTSTAAPEVKDLSAIRSFLALDLQSIYDSLTPQEKRTLWSSIIDKIIISDGGDIEIVFL

SEQ ID NO: 8161 - protein, 459 aa, Unknown
  Description of Unknown: Integrase B8162 sequence
  SM00857,G3DSA:1.10.10.2600,IPR036162,PF13408, IPR025827,PS51737,G3DSA:3.40.50.1390,IPR006119, IPR038109,SSF53041,IPR011109,PTHR30461, Coil,PS51736,cd00338,PF00239
MSTTHFYSHYPTIEYKTCALYVRCSKEEQAKFGDTIEAQIEDLKAFAKLHHLKIYAIYVDEGHTARKKYNKRKEFMRMLQDVELHKFEYIIFTKLDRWFRNIADFYKIQEILDNNGVTWLTALERYEMETTNGKLNVNIRLSVAQDEADRDSDRIKDVFRLKVKKGEAITGSLPIGLMVGENGKVDIDPDTVQIAYDMFDYFETHNSKRGTLLYLIDKYNRYFCYETIARALRNPLYKGEYRGNPDYCPKIIDPARFDRIQVLGKRNVKVRKNNRYYVFSGLAQCKECGHALVANTTVQKRYNREYTQYRCNYYSNSHLCTHSHGMNEKVIEKYLLDNIKPELEKYVTAYDVKQNVPTKKADPSKIKTKMQRLKELYVNELIDLDDYRIEYEQYKQELDKLTSTAAPEVKDLSAILSFLALDLQSIYDSLTPQEKRTLWSSIIDKIIISDGGDIEIVFL

SEQ ID NO: 8162 - protein, 459 aa, Unknown
  Description of Unknown: Integrase B8163 sequence
  PTHR30461:SF3,cd00338,SM00857,G3DSA:1.10.10.2600,IPR036162, PF13408,PS51737,IPR025827,G3DSA:3.40.50.1390,IPR006119, IPR038109,IPR011109,SSF53041,PTHR30461,PS51736, Coil,PF00239
MINNELKPKLIRVALYIRVSGEEQKIKGLSLESQRERLEAYAREQGWVIVGIYIDAAKTARKKLHKRSEFQRMLDAVRHDEVDMLLFTRLDRWFRSVPDYYKVMEVLEAHNCEWKTIDDGEGYDTTTASGRLYINIKLSIAQNEADLDGERIDVVFDSKVQHGTVLSGKCPFWLRVNEEKRLELVPEKTAILQDAFDYYEQSTSQRATIKYIRETYGVNWCDATFRRMLHDKLAIGVYDRNGRYNPTFCPAAISPEQFERVQELTKRNSRSNPTGKVYIFTGILVCDECRHNMVGYKSRGIYYYRCNQHFQRGRCEHNHSAREDRVEAWLFEHLSDEIEKYEVSWDVQAAGRKKTAAGVERATLKRKLTKLKELYMNDLIDMEEYKKDYETYSAALLKLDKAQIEEKKVDLSGVRQIVSKGFLEIYDTLTREEKRTLWKSVLKEIRIDNDQNITGISFF

SEQ ID NO: 8163 - protein, 459 aa, Unknown
  Description of Unknown: Integrase B8164 sequence
  SM00857,IPR036162,PF13408,PS51737,IPR025827, G3DSA:3.40.50.1390,IPR006119,IPR011109,SSF53041,PTHR30461, Coil,PS51736,cd00338,PF00239
MSTTHFYSHYPTIEYKTCALYVRCSKEEQAKFGDTIEAQIEDLKAFAKLHHLKIYAIYVDEGHTARKKYNKRKEFMRMLQDVELHKFEYIIFTKLDRWFRNIADFYKIQEILDNNGVTWLTALERYEMETTNGKLNVNIRLSVAQDEADRDSDRIKDVFRLKVKKGEAITGSLPIGLMVGENGKVDIDPDTVQIAYDMFDYFEVHNSKRGTLLYLIDKYNRYFCYETIARALRNPLYKGEYRGNPDYCPKIIDPARFDRIQVLGKRNVKVRKNNRYYVFSGLAQCKECGHALVANTTVQKRYNREYTQYRCNYYSNSHLCTHSHGMNEKVIEKYLLDNIKPELEKYVTAYEVKQNAPTKKADPSKIKTKMQRLKDLYVNELIDLDDYRIEYEQYKQELDRLTSTASPEAKDLSAIRSFLALDLQSIYDSLTPQEKRTLWSSIIDKIIISDGGDIEIVFL

SEQ ID NO: 8164 - protein, 459 aa, Unknown
  Description of Unknown: Integrase B8165 sequence
  SM00857,G3DSA:1.10.10.2600,IPR036162,PF13408, IPR025827,PS51737,G3DSA:3.40.50.1390,IPR006119, IPR038109,SSF53041,IPR011109,PTHR30461, Coil,PS51736,cd00338,PF00239
MSTTHFYSHYPTIEYKTCALYVRCSKEEQAKFGDTIEAQIEDLKAFAKLHHLKIYAIYVDEGHTARKKYNKRKEFMRMLQDVELHKFEYIIFTKLDRWFRNIADFYKIQEILDNNGVTWLTALERYEMETTNGKLNVNIRLSVAQDEADRDSDRIKDVFRLKVKKGEAITGSLPIGLMVGENGKVDIDPDTVQIAYDMFDYFEAHNSKRGTLLYLIDKYNRYFCYETIARALRNPLYKGEYRGNPDYCPKIIDPARFDRIQVLGKRNVKVRKNNRYYVFSGLAQCKECGHALVANTTVQKRYNREYTQYRCNYYSNSHLCTHSHGTNEKVIEKYLLDNIKPELEKYVTAYEVKQNAPTKKADPSKIKTKMQRLKELYVNELIDLDDYRIEYEQYKQELDRLTSTAAPEIKDLSAIRSFLALDLQSIYDSLTPQEKRTLWSSIIDKIIISDGGDIEIVFL

SEQ ID NO: 8165 - protein, 459 aa, Unknown
  Description of Unknown: Integrase B8166 sequence
  PTHR30461:SF3,IPR036162,PS51737,IPR011109,PTHR30461, PS00397,PF00239,G3DSA:1.10.10.2600,IPR006119,SSF53041, SM00857,IPR025827,IPR038109,PS51736,cd03768, IPR006118,PF13408,G3DSA:3.40.50.1390,PF07508,Coil
MSKKKLKTAAIYVRVSTDAQAEEGYSVEAQKEQLAAYCISKEIKNYEFYIDGGWSGSSINRPEIQRLIRDAKAHKLSHCIVYKLDRLSRSQKDTLYLIEDVFIPNDVSFVSLNETIDTASPTGKMMIGILSAFAQLERENIRLRTRMGMKERVKDGYWMGGGRTPFGYDYDRNQGILVPNKDADKVKKIYNMYIEGKSQQAIADILDLKYDRLVTQILKRKSNYGVIEYNGEEYRGRHEPIITKEIYDKAMLCMKERSERRVPTSKHLLTGLLVCGHCGAKIRYQKWGESGCKLICYSHQKTKKYLIKDENCPQEKLWAHEVENTILNYLFSLKEDDNGDDLDESTLIIETNVLKELEEGRELLQKKIKRLYNLYAESDDDILLDTINEQKKKLADTEKKIEVEKLKVEDSSRKMKTAKLVTNLSETWDYMDIEEQQKTLRMIINKITITDNNINVDFK

SEQ ID NO: 8166 - protein, 459 aa, Unknown
  Description of Unknown: Integrase B8167 sequence
  PTHR30461:SF3,SM00857,IPR006118,G3DSA:1.10.10.2600,IPR036162, PF13408,IPR025827,G3DSA:3.40.50.1390,PS51737,IPR006119, IPR038109,SSF53041,IPR011109,PTHR30461,PS00397, PS51736,cd00338,PF00239
MYNNTPNKIIRVATYLRVSSDKQAKSGDSLRDQAETLTEYINKNENMILFDTYMDDGVSGQKIDRDDFSRLLDDIRADKIDLIIFTRLDRWFRSVKHYLNTQTILDKHNVSWTAVSQPFFDTSTAHGRAFVQQSMVWAELEANMDSERINAVFQNKVANGEVITGNPPVGYMVENKHLVFDPVKAPMVIKMFDTFIKTSNLSAVYRMLLDDYGIMRNPSTIRKMFKKRIYTGEYRGNKNYCPALIDKNKFDHVQNLLSKNIKCSQKHEYIFSAMVKCECCGNAMSAHQISTRGRTRKDGTFARYQHSGYRCKRRYDLKDCCNKKIIYESVLERWMLEHLHENIETYITEYDIASRPAMDNTAKIKSIEKKLSKLKELFLNDLISLDEYKLDKSNLENQLSLLPSCIAPVKDLKHINNVLNTDIDSIYTTFTIDEKQRFWRSFIDCIYVDDKRNFRVKFL

SEQ ID NO: 8167 - protein, 459 aa, Unknown
  Description of Unknown: Integrase B8168 sequence
  SM00857,G3DSA:1.10.10.2600,IPR036162,PF13408,IPR025827, G3DSA:3.40.50.1390,PS51737,IPR006119,IPR038109,SSF53041, IPR011109,PTHR30461,Coil,PS51736,cd00338, PF00239
MSTTHFYSHYPTIEYKTCALYVRCSKEEQAKFGDTIEAQIEDLKAFAKLHHLKIYAIYVDEGHTARKKYNKRKEFMRMLQDVELHKFEYIIFTKLDRWFRNIADFYKIQEILDNNGVTWLTALERYEMETTNGKLNVNIRLSVAQDEADRDSDRIKDVFRLKVKKGEAITGSLPIGLTVGENGKVDIDPDTVQIAYDMFDYFETHNSKRSTLLYLIDKYNRYFCYETIARALRNPLYKGEYRGNPDYCPKIIDPARFDRIQVLGKRNVKVRKNNRYYVFSGLAQCKECGHALVANTTVQKRYNREYTQYRCNYYSNSHLCTHSHGMNEKAIEKYLLDNIKPELEKYVTTYEVKQNAPTKKVDPSKIKTKMQRLKELYVNELIDLDDYRIEYEQYKQELDRLTSTAAPEVKDLSAIRSFLALDLQSIYDSLTPQEKRTLWSSIIDKIIISDSGDIEIEFL

SEQ ID NO: 8168 - protein, 459 aa, Unknown
  Description of Unknown: Integrase B8169 sequence
  PTHR30461:SF3,SM00857,G3DSA:1.10.10.2600,IPR036162,PF13408, IPR025827,PS51737,G3DSA:3.40.50.1390,IPR006119,IPR038109, SSF53041,IPR011109,PTHR30461,Coil,PS51736, cd00338,PF00239
MSTTHFYSHYPTIEYKTCALYVRCSKEEQAKFGDTIEAQIEDLKAFAKLHHLKIYAIYVDEGHTARKKYNKRKEFMRMLQDVELHKFEYIIFTKLDRWFRNIADFYKIQEILDNNGVTWLTALERYEMETTNGKLNVNIRLSVAQDEADRDSDRIKDVFRLKVKKGEAITGSLPIGLMVGENGKVDIDPDTVQIAYDMFDYFEAHNSKRGTLLYLIDKYNRYFCYETIARALRNPLYKGEYRGNPDYCPKIIDPARFDRIQVLGKRNVKVRKNNRYYVFSGLAQCKECGHALVANTTVQKRYNREYTQYRCNYYSNSHLCTHSHGTNEKVIEKYLLDNIKPELEKYVTAYEVKQNAPTKKADPSKIKTKMQRLKELYVNELIDLDDYRIEYEQYKQELDRLTSTAAPEVKDLSAIRSFLALDLQSIYDSLAPQEKRTLWSSIIDKIIISDSGDIEIVFL

SEQ ID NO: 8169 - protein, 459 aa, Unknown
  Description of Unknown: Integrase B8170 sequence
  PTHR30461:SF3,SM00857,IPR036162,PF13408,PS51737, IPR025827,G3DSA:3.40.50.1390,IPR006119,IPR011109,SSF53041, PTHR30461,Coil,PS51736,cd00338,PF00239
MSTTHFYSHYPTIEYKTCALYVRCSKEEQAKFGDTIEAQIEDLKAFAKLHHLKIYAIYVDEGHTARKKYNKRKEFMRMLQDVELHKFEYIIFTKLDRWFRNIADFYKIQEILDNNGVTWLTALERYEMETTNGKLNVNIRLSVAQDEADRDSDRIKDVFRLKVKKGEAITGSLPIGLMVGENGKVDIDPDTVQIAYDMFDYFEVHNSKRGTLLYLIDKYNRYFCYETIARALRNPLYKGEYRGNPDYCPKIIDPARFDRIQVLGKRNVKVRKNNRYYVFSGLAQCKECGHALVANTTVQKKYNREYTQYRCNYYSNSHLCTHSHGMNEKVIEKYLLDNIKPELEKYVTAYDVKQNAPTKKADPSKIKTKMQRLKELYVNELIDLDDYRIEYEQYKQELDKLTSTAAPEVKDLSAIRSFLALDLQSIYDSLTPQEKRTLWSSIIDKIIISDGGDIEIVFL

SEQ ID NO: 8170 - protein, 459 aa, Unknown
  Description of Unknown: Integrase B8171 sequence
  PTHR30461:SF3,SM00857,G3DSA:1.10.10.2600,IPR036162,PF13408, IPR025827,G3DSA:3.40.50.1390,PS51737,IPR006119,IPR038109, IPR011109,SSF53041,PF00239,PTHR30461, PS51736,Coil,cd00338
MSTTHFYSHYPTIEYKACALYVRCSKEEQAKFGDTIEAQIEDLKAFARLHHLKIYAIYADEGHTARKKYNKRKEFMRMLQDVELHKFEYIIFTKLDRWFRNIADFYKIQEILDNNGVTWLTALERYEMETTNGKLNVNIRLSVAQDEADRDSDRIKDVFRLKVKKGEAITGSLPIGLMVGENGKVDIDPDTVQIAYDMFDYFETHNSKRGTLLYLIDKYNRYFCYETIARALRNPLYKGEYRGNPDYCPKIIDPARFDRIQVLGKRNVKVRKNNRYYVFSGLAQCKECGHALVANTTVQKKYNREYTQYRCNYYSNSHLCTHSHGMNEKVIEKYLLDNIKPELEKYVTAYDVKQNAPTKKADPSKIKTKMQRLKELYVNELIDLDDYRIEYEQYKQELDKLTSTAAPEVKDLSAIRSFLALDLQSIYDSLTPQEKRTLWSSIIDKIIISDGGDIEIVFL

SEQ ID NO: 8171 - protein, 459 aa, Unknown
  Description of Unknown: Integrase B8172 sequence
  PTHR30461:SF3,SM00857,G3DSA:1.10.10.2600,IPR036162,PF13408, IPR025827,PS51737,G3DSA:3.40.50.1390,IPR006119,IPR038109, SSF53041,IPR011109,PTHR30461,Coil,PS51736, cd00338,PF00239
MSTTHFYSHYPTIEYKTCALYVRCSKEEQAKFGDTIEAQIEDLKAFAKLHHLKIYAIYVDEGHTARKKYNKRKEFMRMLQDVELHKFEYIIFTKLDRWFRNIADFYKIQEILDNNGVTWLTALERYEMETTNGKLNVNIRLSVAQDEADRDSDRIKDVFRLKVKKGEAITGSLPIGLMVGENGKVDIDPDTVQIAYDMFDYFETHNSKRGTLLYLIDKYNRYFCYETIARALRNPLYKGEYRGNPDYCPKIIDPARFDRIQVLGKRNVKVRKNNRYYVFSGLAQCKECGHALVANTTVQKKYNREYTQYRCNYYSNSHLCTHSHGMNEKVIEKYLLDNIKPELEKYVTAYDVKQNAPTKKADPNKIKTKMQRLKELYINELIDLDDYRIEYEQYKQELDKLTSTAAPEVKDLSAIRSFLALDLQSIYDSLTPQERRTLWSSIIDKIIISDGGDIEIVFL

SEQ ID NO: 8172 - protein, 459 aa, Unknown
  Description of Unknown: Integrase B8173 sequence
  PTHR30461:SF3,SM00857,IPR036162,PF13408,IPR025827, G3DSA:3.40.50.1390,PS51737,IPR006119,SSF53041,IPR011109, PF00239,PTHR30461,PS51736,Coil,cd00338
MSTTHFYSHYPTIEYKTCALYVRCSKEEQAKFGDTIEAQIEDLKAFAKLHHLKIYAIYVDEGHTARKKYNKRKEFMRMLQDVELHKFEYIIFTKLDRWFRNIADFYKIQEILDNNGVTWLTALERYEMETTNGKLNVNIRLSVAQDEADRDSDRIKDVFRLKVKKGEAITGSLPIGLTVGENGKVDIDPDTVQIAYDMFDYFETHNSKRGTLLYLIDKYDRYFCYETIARALMNPLYKGEYRGNPDYCPKIIDPARFDRIQVLGKRNVKVRKNNRYYVFSGLAQCKECGHALVANTTVQKRYSREYTRYRCNYYSNSHLCTHSHGISEKVIETYLLDNIKPELEKYITAYEVKQNAPTKKADPSKIKTKMQRLKELYVNELIDLDDYRIEYEQYKQELDKLTSTAAPEVKDLSAIRSFLALDLQSIYDSLTPQEKRTLWSSIIDKIIISDSGDIDIVFL

SEQ ID NO: 8173 - protein, 459 aa, Unknown
  Description of Unknown: Integrase B8174 sequence
  PTHR30461:SF3,SM00857,G3DSA:1.10.10.2600,IPR036162,PF13408, IPR025827,PS51737,G3DSA:3.40.50.1390,IPR006119,IPR038109, IPR011109,SSF53041,PTHR30461,Coil, PS51736,cd00338,PF00239
MSTTHFYSHYPTIEYKTCALYVRCSKEEQAKFGDTIEAQIEDLKAFAKLHHLKIYAIYVDEGHTARKKYNKRKEFMRMLQDVELHKFEYIIFTKLDRWFRNIADFYKIQEILDNNGITWLTALERYEMETTNGKLNVNIRLSVAQDEADRDSDRIKDVFRLKVKKGEAITGSLPIGLTVGENGKVDIDPDTVQIAYDMFDYFEAHNSKRGTLLYLIDKYNRYFCYETIARALRNPLYKGEYRGNPDYCPKIIDPARFDRIQVLGKRNVKVRKNNRYYVFSGLAQCKECGHALVANTTVQKRYNREYTQYRCNYYSNSHLCTHSHGMNEKVIEKYLLDNIKPELEKYVTAYDVKQNAPTKKADPSKIKTKMQRLKELYVNELIDLDDYRIEYEQYKQELDKLTSTAAPEVKDLSAIRSFLALDLQSIYDSLTPQEKRTLWSSIIDKIIISDGGDIEIVFL

SEQ ID NO: 8174 - protein, 459 aa, Unknown
  Description of Unknown: Integrase B8175 sequence
  PTHR30461:SF3,SM00857,IPR006118,G3DSA:1.10.10.2600,IPR036162, PF13408,PS51737,G3DSA:3.40.50.1390,IPR025827,IPR006119, IPR038109,IPR011109,SSF53041,PTHR30461,PS00397, PS51736,cd00338,PF00239
MNNLARNLESMPFRVALYIRVSTDEQAIKGLSLEAQQEDLMQHVREQGWTVAGIYVDAAKTARKRIYKRVEFLRMLEDVKEGKIDRILCTRLDRWFRNVGDYYKVMEVLEKNHCDWSCTQEQYDTSTAGGRLYINMKLSIAQNEADQTGERINVVFDSKIQNGTVVSGSVPFWLKVNKEKRLEIIPEKAAILKDAFDHYEATITKRGTITYIRNKYGLNWCEATFSRMLKDKLAIGVYDKNGRYNPSFCPAAISEEQFNHVQELMKRNGKTAPSGRIYLFTSLLVCAECKHNLVGYRNGQDYYYYRCNHHFRRKLCHHNRSLSERKIESWLLGNLASEIEKCKIAYSVNAAAKERNSRQAEKAVLKNKLTKLKELYVNDLIDLEDYKKDYEIYSTALANIPDEQQEKAPDFSLVERMMQNGFKEIYDGLSREEKRTFWRSIIKKIEINNDGEITGIFFG

SEQ ID NO: 8175 - protein, 459 aa, Unknown
  Description of Unknown: Integrase B8176 sequence
  PTHR30461:SF3,SM00857,G3DSA:1.10.10.2600,IPR036162,PF13408, IPR025827,PS51737,G3DSA:3.40.50.1390,IPR006119,IPR038109, SSF53041,IPR011109,PTHR30461,Coil,PS51736, cd00338,PF00239
MSTTHFYSHYPTIEYKTCALYVRCSKEEQAKFGDTIEAQIEDLKAFAKLHHLKIYAIYVDEGHTARKKYNKRKEFMRMLQDVELHKFEYIIFTKLDRWFRNIADFYKIQEILDNNGVTWLTALERYEMETTNGKLNVNIRLSVAQDEADRDSDRIKDVFRLKVKKGEAITGSLPIGLMVGENGKVDIDPDAVQIAYDMFDYFEAHNSKRGTLLYLIDKYNRYFCYETIARALRNPLYKGEYRGNPDYCPKIIDPARFDRIQVLGKRNVKVRKNNRYYVFSGLAQCKECGHALVANTTVQKRYNREYTQYRCNYYSNSHLCTHSHGTNEKVIEKYLLDNIKPELEKYVTTYEVKQNAPTKKADPSKIKTKMQRLKELYVNELIDLDDYRIEYEQYKQELDKLTSTAAPEAKDLSAIRSFLALDLQSIYDSLTPQEKRTLWSSIIDKIIISDGGDIEIVFL

SEQ ID NO: 8176 - protein, 459 aa, Unknown
  Description of Unknown: Integrase B8177 sequence
  PTHR30461:SF3,SM00857,IPR006118,IPR036162,PF13408, IPR025827,G3DSA:3.40.50.1390,IPR006119,SSF53041,PTHR30461, PS00397,PS51736,cd00338,PF00239
MKNNLLRVALYIRVSSEEQANSGDSIRDQKERCEKYIADHEDMALQDTYIDDGISGQKLKRDDFQRLLQSVKDRKVDLIIFTKLDRWFRNLRHYLNTQAVLDKNDVSWPAIDQPYFDTSTPYGRAFVAQSMTWAELEAQNGGQRVKDVFKTKVQHGEVITGKVLRGYCIQDKHLVLSDEAPAMYDSIAYFLRTQSMGKTIKYMQQTHGITMTLQNFRNSYLRNEKLTGRYRGVENYCPRLISDEMFAQAQNLLDEKRNVRVSQKYPYVFTGLLVCSECGYKMSGCHINVVVKKKGEVYRYRYPAYECKQYGAYHRCNNGGEIRESRIEEYLLEHIGEEIDRYMADYDASGQAVIDNRAKKNKIRRKLDRLKELFLNELVTLDEYKLDREALEAQLEQIPDIEEPKKNLIELKHLLDNDFNILYKDFSNEEKRLFWRSIIKEIQVPKSVNRHRKYKIIPL

SEQ ID NO: 8177 - protein, 459 aa, Unknown
  Description of Unknown: Integrase B8178 sequence
  PTHR30461:SF3,cd00338,SM00857,G3DSA:1.10.10.2600, IPR036162,PF13408,PS51737,IPR025827, G3DSA:3.40.50.1390,IPR006119,IPR038109,PF07508, IPR011109,SSF53041,PTHR30461,PS51736,Coil,PF00239
MAKKSFSIIDGASCRVALYIRVSGEEQKIKGLSLEAQQERLEAFAREKGWSIVGIYIDAAKTARKNIHKRTEFLRMLEAVKRDEVDLLLFCRLDRWFRSVADYYKVIEILEKHNCGWKTIDEDYDTSTANGRLYINVKLSIAQNEADICGERIAVVFDSKIAHGSAISGSYPYGYRLNSEKKLEIDPDAAAVVRDAFNRYENTVTMRGTTRYIRETYGVNWCCTTFRRILSQPLYTGSYNRHGRQNDNFCPAIISKDQFERVQTLLSKNVKYYPTGKIYLFSSLLVCDECGHRLSGFKSKAYHYYRCQLHHQYDTCSNNSAPREDIIEAWLFDHLQEEIERCKLEWKLKNAEQQRRLGTNEKAALKNKLTKLKELYVNDLIDLEDYKKDYEIYTAALNQLTDPVQETAPDFSAAERLLQSDFKALYDKLSQEDKRTLWRSVIKEIRINKTKEIVGIFFA

SEQ ID NO: 8178 - protein, 459 aa, Unknown
  Description of Unknown: Integrase B8179 sequence
  PTHR30461:SF3,SM00857,G3DSA:1.10.10.2600,IPR036162,PF13408, IPR025827,G3DSA:3.40.50.1390,PS51737,IPR006119,IPR038109, SSF53041,IPR011109,PTHR30461,Coil,PS51736, cd00338,PF00239
MSTTHFYSHYPTIEYKTCALYVRCSKEEQAKFGDTIEAQIEDLKAFAKLHHLKIYAIYVDEGHTARKKYNKRKEFMRMLQDVELHKFEYIIFTKLDRWFRNIADFYKIQEILDNNGVTWLTALERYEMETTNGKLNVNIRLSVAQDEADRDSDRIKDVFRLKVKKGEAITGSLPIGLMVGGNGKVDIDPDNVQIAYDMFDYFEAHNSKRGTLLYLIDKYNRYFCYETIARALRNPLYKGEYRGNPDYCPKIIDPARFDRIQVLGKRNVKVRKNNRYYVFSGLAQCKECGHALVANTTVQKRYNREYTQYRCNYYSNSHLCTHSHGTNEKVIEKYLLDNIKPELEKYVTAYEVKQNAPTKKADPSKIKTKMQRLKELYVNELIDLDDYRIEYEQYKQELDRLTSTAALEVKDLSAIRSFLALDLQSIYDSLTPQEKRTLWSSIIDKIIISDSGDIEIVFL

SEQ ID NO: 8179 - protein, 459 aa, Unknown
  Description of Unknown: Integrase B8180 sequence
  PTHR30461:SF3,SM00857,IPR006118,IPR036162,PF13408, IPR025827,G3DSA:3.40.50.1390,Coil,IPR006119,SSF53041, PTHR30461,PS00397,PS51736,cd00338,PF00239
MKNNLLRVALYIRVSSEEQANSGDSIRDQKERCEKYIADHENMALQDTYIDDGISGQKLKRDDFQRLLQSVKDHKVDLIIFTKLDRWFRNLRHYLNTQAVLDKNDVSWTAIDQPYFDTSTPYGRAFVAQSMTWAELEAQNGGQRVKDVFKTKVQHGEVITGKVLRGYCIQDKHLVLSDEAPAMYDSIAFFLRTQSMGKTIKYMQQTHGITMTLQNFRNSYLRNEKLTGRYRGVENYCPRLISDEMFAQAQKLLDEKRNVRVSQKYPYIFTGLLVCSECGYKMSGCHINVVVKKKGEVYRYRYPAYECKQYGAYHRCNNGGEIRESRIEEYLLEHIGEEIDKYIADYDASGQAIIDNRAKKNKIRRKLDRLKELFLNELITLDEYKLDREALEAQLEQIPDIEEPKKNLIELKHLLDNDFNILYKDFSNEEKRLFWRSIIKEIQVPKSVNRHRKYKIMPL

SEQ ID NO: 8180 - protein, 459 aa, Unknown
  Description of Unknown: Integrase B8181 sequence
  cd00338,SM00857,IPR036162,PF13408, IPR025827,G3DSA:3.40.50.1390,PS51737,IPR006119, IPR011109,SSF53041,PTHR30461,PS51736, Coil,PF00239
MSTTHFYSHYPTIEYKTCALYVRCSKEEQAKFGDTIEAQIEDLKAFAKLHHLKIHAIYVDEGHTARKKYNKRKEFMRMLQDVELHKFEYIIFTKLDRWFRNIADFYKIQEILDNNGVTWLTALERYEMETTNGKLNVNIRLSVAQDEADRDSDRIKDVFRLKVKKGEAITGSLPIGLTVGENGNVDIDPDTVQIAYDMFDYFETHNSKRGTLLYLIDKYDRYFCYETIARALRNPLYKGEYRGNPDYCPKIIDPARFDRIQVLGKRNVKVRKNNRYYVFSGLAQCKECGHALVANTTVQKRYNREYTQYRCNYYSNSHLCTHSHGMNEKAIEKYLLDNIKPELEKYVTAYEVKQNAPTKKADPSKIKTKMQRLKELYVNELIDLDDYRIEYEQYKQELDKLTSTAAPEVKDLSAIRSFLALDLQSIYDSLTPQEKRTLWSSIIDKIIISDGGDIEIVFL

SEQ ID NO: 8181 - protein, 459 aa, Unknown
  Description of Unknown: Integrase B8182 sequence
  PTHR30461:SF3,SM00857,G3DSA:1.10.10.2600,IPR036162,PF13408, IPR025827,PS51737,G3DSA:3.40.50.1390,IPR006119,IPR038109, PF07508,IPR011109,SSF53041,PTHR30461,Coil, PS51736,cd00338,PF00239
MTIIGEYCDKAISGKTDNRPSFQRLIKDSEKGQFEAVIMYTLDRFARNRYDSAIYKAKLKKNGVRVYYAKQPMPDTPEGIILESVLEGYAEYYSENLSRNIKRGMKENALQCIANGGAGMPLGYTVGEDRRYKIDPVGARIVQEIFQMYADGMSATQIINECNKRGYKTARGNAFNKNSLRTMLKNDRYIGVYRFADVVVEGGVPPIISRELFDKVQATLKHNYSARARNKAKDDYLLTAKLFCGHCGSSMVGESGTSKSGKLHHYYKCIERKRKHKCNKAVEKKDWMEELVVRFTVQKVLTDENIERIAVKAMEIIEKESADTTYIDGLRNELKEVKKKIKNLMTAIEQGIITPSTKERMDELELEKNEIEGRIASEEMKKPLLTKERIMYWLYSFKSGNIDDVEYKRRVIDTLVNSVYVYDEGDKGRRIVFTFNISGQNTATLSCSDIACFENTIDI

SEQ ID NO: 8182 - protein, 459 aa, Unknown
  Description of Unknown: Integrase B8183 sequence
  PTHR30461:SF3,SM00857,G3DSA:1.10.10.2600,IPR036162,PF13408, PS51737,G3DSA:3.40.50.1390,IPR025827,IPR006119,IPR038109, PF07508,SSF53041,IPR011109,PTHR30461,Coil, cd00338,PF00239
MTGRNDNRDEFQQMLSDCAKKQFQVVIVWKVDRIGRNREEITFNKYRMKRHGVRVEYVAENIPDSPEAVILESVLEGMAEYYSLQLSQNIRRGYRENAKKCKYAGGRVPLGYKLAEDKSFEIDPATAPVVKDIFNRYAAGQTITEIITDLNAQGLRTATGSEFTKNSLRALLKNEKYIGIFDFKNGEIRIEDGVPAITDKSTFDKVQKLLVTNQRAPAHKWSKAEYLLTDKLFCGSCGGLMVGESGTSKTGAKYSYYLCTNHKRKRGCAQKAIRADWLEKYVLDMAKSIILDDKTIEFIADGTWEYYQQHERRREKVEALKGQLAEVDKALTNIMRAIESGLPFTETTKARVEELDGQKTALTSAIAEAELAYDSGLTRDHILFFLKQFQEFDYSQPQYQKRLIDTFINSIYVYPDEMTFNFNFGNESKTIKFEEMEAAKGGEVFVRCAPCSTKMFGIF

SEQ ID NO: 8183 - protein, 458 aa, Unknown
  Description of Unknown: Integrase B8184 sequence
  cd03768,PTHR30461:SF3,SM00857,G3DSA:1.10.10.2600,IPR036162, PS51737,G3DSA:3.40.50.1390,IPR006119,IPR038109,PF07508, IPR011109,SSF53041,PTHR30461,PS51736,Coil, PF00239
MNYERSYLRSCQVSTLEQKEHGYSIEEQERKLKSFCEINDWSVSDVFIDAGFSGAKRERPELQRMMKDIKRFDLVLVYKLDRLTRNVRDLLDLLEIFEKHNVAFRSATEVYDTSTAMGRLFVTLVGAMAEWERETIRERVMMGKRAAIKQGMILTPPPFYYDRVDNTYIPNDYKKVVLWAYDEVMKGNSSKAIARKLNDSDIPPPNGKRWEDRTITRALRSPITRGHYTWGDVFIENSHEPIITEEMYQQIKERLEERINTKIVSHVSVFRGKFICPRCGGTLTLNTTTRKRKKGYVTYKTYYCNTCKGKKKSFGFAENEALRVFHDYLSKLDLEKYEVKTKQKDDVVTIDIDKIMEQRKRYHKLYAKGLMQEEELFELIKETDEIIAEYEKQKELVPSKTLDVDKIKNFKNVLLESWEIFSLEDKADFIKMAIKSIDIEYVKLKNRHSIKINDIEFY

SEQ ID NO: 8184 - protein, 458 aa, Unknown
  Description of Unknown: Integrase B8185 sequence
  cd03768,PTHR30461:SF3,SM00857,G3DSA:1.10.10.2600,IPR036162, PS51737,G3DSA:3.40.50.1390,IPR006119,IPR038109,PF07508, SSF53041,IPR011109,PTHR30461,PS51736,Coil, PF00239
MNYERSYLRSCQVSTLEQKEHGYSIEEQERKLKSFCEINDWSVSDVFIDAGFSGAKRDRPELQRMMNDIKRFDLVLVYKLDRLTRNVRDLLDLLEVFEQNNVAFRSATEVYDTSTAMGRLFVTLVGAMAEWERETIRERVMMGKRAAIKQGMILTPPPFYYDRVDNTYIPNDYKKVVLWAYDEVLKGVSSKGIARKLNDSDIPPPNGKRWEDRTITRALRSPITRGHYTWGDVFIENSHEPIITEEMYQQIKERLEERINTKIVSHVSVFRGKFICPRCGGTLTLNTVTRKRKKGYVTYKTYYCNTCKAKKESFGFSENEALRVFRDYLSELDLDKYKVKTKQNDDVVTIDIDKIMEQRKRYHKLYAKGLMQEEELFELIKETDETIAEYEKQKELVPRKSLDIDKIKKFKNALLESWKIFSLEDKADFIKMAIKSIDIDYVKLKNRHSIEIKDIEFY

SEQ ID NO: 8185 - protein, 458 aa, Unknown
  Description of Unknown: Integrase B8186 sequence
  PTHR30461:SF3,SM00857,IPR006118,IPR036162,PF13408, PS51737,IPR025827,G3DSA:3.40.50.1390,Coil,IPR006119, IPR011109,SSF53041,PTHR30461,PS00397,PS51736, cd00338,PF00239
MSELQGKRILTYLRVSTEEQARNGESIADQRQALRKWAEQNGCVIVHEFADEGFSARKPYRSRPALCALLNAVERQEADAVVFTKLDRWFRNVRDYAKVQEVLERCGVFWMATLEDYETRTSAGRFKVNLMLSLAEHEADQTSERIKFTFQQKRARGEIISGNMPKGYLLQDGKPVKDPATAPGVAAFWAEYLASGRLSVAMDQARAAGLPMAVSTGSFMLRNAAHYAGQIQGCPCEPYITPADCDRILVTRKPTPRRSGRPYLFSGMIFCAECSGRMGAHQHFYKRKTGMDGAQVYYNCSTHYRTRPPVCPSKVNIYERDVEGYILERLEDTLERCAVEAELRQQAAKVVDEQAIAQQITRLEQKKARCLDAYLDGFLEKEAFQQRQAAIDDQLTQLRQQIAPKRQKKPEEIRAILPAQWRTTYDGLDLAGRRRFWFSVLDRVTVSAARDIRFTLAL

SEQ ID NO: 8186 - protein, 458 aa, Unknown
  Description of Unknown: Integrase B8187 sequence
  PTHR30461:SF3,SM00857,IPR036162,PF13408,IPR025827, G3DSA:3.40.50.1390,PS51737,IPR006119,IPR011109,SSF53041, PF00239,PTHR30461,PS51736,Coil,cd00338
MKKDTPVGESLPLRAALYPRVSTEEQAKYGLSIHDQQGDLEEYARAHGMRIVGVFADAGYSARKKVEYRPAMLALLEAVKRDEVDIVLVTKLDRWFRNIGEYYKVQEILEAHNVSWRTIYEDYDTSTAAGRLKINIMLAVAQDEADRTSERIKKVFDGKRARLEPLTGDKPFGYTIEGKRYVKDPETEAAVSAFFRKYMACGSVSATQDYIKSEYGIFIPYQGADKLLRSTAYYGRYFGADGMCPAYITKAQYDAIQLMRKRVMRRPAQNRVYLFSGLIFCPVCGGRMGGRKNQNVVSSHYNCSNHFCRRIPCTNNRSISEAKLERYLLSALDAKFAEYKRQTSRLSGARRKDYSSEIAALKGKLSRLKELYLNELIFLDEYKRDRAGFMAKLDELEAKQAALAAPAPSGEKIDGLLQGDWKGMYADLPKDKQQEFWRIVIKEIRLYPDRHIEFDLNL

SEQ ID NO: 8187 - protein, 458 aa, Unknown
  Description of Unknown: Integrase B8188 sequence
  PTHR30461:SF3,SM00857,IPR006118,IPR036162,PF13408, IPR025827,G3DSA:3.40.50.1390,PS51737,IPR006119,SSF53041, IPR011109,PF00239,PTHR30461,PS00397, PS51736,Coil,cd00338
MKRILRAALYIRVSTEEQAKEGESLPAQESALVEYANEHGYRIVDIYKDAGVSGTRKVEKRPEMMRLLDDVKQDKIDIVLFIKINRWFRSVSEYWRVQRILDDYGVMWNAITEDFKNETAMDKAMINFALTFSEYFAGVQGEHIRFTLERMAKNGEPISGNQPYGYMIIQGPKHKMIAKDLSTGDYIPDMYQKYIECHNIAETTRYLNAKYPDQKFAETYTTRRRICTRAYTGYHWARPDYYPPYVTQETFDEANAILKARAERQAHSKHTPPKLFSGLIICPCCGRRLATTYKKPTKGYPNGFRKYRCSMAWNRTGKCSYRHELYQWVIEKYCVEHAMSELKSFTLKAKTIDTEALKTEQEREKLEAQLERLNDMYLYGKMDFEYYKRHMDEVTDKLDRIKRGVKPADRSVDELEALHIDNFESAYAALNEENRAMFWHKLLKGITVEKTHVTGLIF

SEQ ID NO: 8188 - protein, 458 aa, Unknown
  Description of Unknown: Integrase B8189 sequence
  PTHR30461:SF3,IPR036162,PS51737,IPR011109,PTHR30461, PS00397,PF00239,G3DSA:1.10.10.2600,IPR006119,SSF53041, cd00338,SM00857,IPR025827,IPR038109,PS51736, IPR006118,PF13408,G3DSA:3.40.50.1390,PF07508,Coil
MKKAGIYIRVSTPEQEKNGYSLNAQEEKLKSFALAKDYEVKKVYRDGGFSGAKLERPAMLEMIDDIENNRLDLVLVYKLDRLSRSQKNTMYLIEDVFLKNNVDFISMQESFDTTTSFGRAMIGILSVFAQLERDNIRERMTLGRMERIKRGFYMGGGKVSFGYRYNQESNVLEIDEGEATAVRRMFELFLGGNSIYSLINTLKKEFPHYEKTFYDASVRRRLANEHYIGNSQYDGKIYVNTHEPIIDDLTFNQAQLMLSTRSHGNAFKHKYLFSGMITCKKCGKSYNGFESVCGKYSNKYYRCSSTTYKFKKKNGWECSGKRFRCEDVDKYILDKIKSIATDQVVSKKSKSTSLPIKKEIDKLKAQQAKLLDLYLDDRIDTNVLDEKSKHIKDLLEKLNKQLKEKPAIEKKVFDESVDKLANNFESLSFEQQRILIGNVIEKIEVVGGDMNVYFFDTK

SEQ ID NO: 8189 - protein, 458 aa, Unknown
  Description of Unknown: Integrase B8190 sequence
  PTHR30461:SF3,SM00857,G3DSA:1.10.10.2600,IPR036162,PF13408, PS51737,IPR025827,G3DSA:3.40.50.1390,IPR006119,IPR038109, PF07508,IPR011109,SSF53041,PF00239,PTHR30461, PS51736,Coil,cd00338
MKNGFVVVNEYIDRAISGKTDNRPSFQRLIKDSEKGHFDAVIMYTLDRFARNRYDSAIYKAKLKKNGVRVFYAKQPMPDTPEGIILESVLEGYAEYYSENLARSIKRGMKENALHTIAMGSLGLGYKIGEDRKYEIDPVGAKAVRAIFTMYAEGKSKTEIVNWLNEHGFKTSQGNQFNKNSLSRILRNDKYIGVYRYADVVVENAIPPIIDKHLFDKVQALLKHNFASRARNKAKEDYLLSTKLFCGHCGSPMIGESGTSKLGRVYHYYKCSKRKRERDCSKKVEKKDWLEELVVRYTVHHVLTDENIELIATKAMELIEKDLQDTSVLVGLQGMLKDINKKIKNLMSAIEQGIITSSTKERLEELELERLNIEGQIAREEMKKPLLSKERIVYWLTSFKSGDIQDIEYQRRIIDTLVNSVFVYDDDGNGRRIVLTFNISGNNTLTIECSDIEGIAPP

SEQ ID NO: 8190 - protein, 458 aa, Unknown
  Description of Unknown: Integrase B8191 sequence
  cd03768,PTHR30461:SF3,SM00857,G3DSA:1.10.10.2600,IPR036162, PS51737,G3DSA:3.40.50.1390,IPR006119,IPR038109,PF07508, IPR011109,SSF53041,PTHR30461,PS51736,Coil, PF00239
MNYERRYLRSCQVSTLEQKEHGYSIEEQERKLKSFCEINDWSVSDVFIDAGFSGAKRDRPELQRMMNDIKRFDLVLVYKLDRLTRNVRDLLDLLEIFEQNNVAFRSATEVYDTSTAMGRLFVTLVGAMAEWERETIRERVMMGKRAAIKQGMILTPPPFYYDRVDNTYIPNDYKKVVLWAYDEVMKGNSSKAIARKLNDSDIPPPNGKRWEDRTITRALRNPITRGHYTWGDVFIENSHEPIITEEMYQQIKERLEERINTKIVSHVSVFRGKFICPRCGGTLTMNTATRKRKKGYVTYKTYYCNTCKTRKQSFGFSENEALRVFRDYLSKLDLDKYEVKTKQKDDVVTIDIDKIMEQRKRYHKLYAKGLMQEEELFELIKETDETIAEYEKQKELVPRKILDIDKIKSFKNVLLESWNIFSLEDKADFIKMAIKSIDIEYVELKNRHSIEIKEIEFY

SEQ ID NO: 8191 - protein, 458 aa, Unknown
  Description of Unknown: Integrase B8192 sequence
  cd03768,PTHR30461:SF3,SM00857,G3DSA:1.10.10.2600,IPR036162, PS51737,G3DSA:3.40.50.1390,IPR006119,IPR038109,PF07508, IPR011109,SSF53041,PTHR30461,PS51736,Coil, PF00239
MNYERSYLRSCQVSTLEQKEHGYSIEEQERKLKSFCEINDWSVSDVFIDAGFSGAKRERPELQRMMNDIKRFDLVLVYKLDRLTRNVRDLLDLLEIFEQNNVAFRSATEVYDTSTAMGRLFVTLVGAMAEWERETIRERVMMGKRAAIKQGMILTPPPFYYDRVDNTYIPNDYKKVVLWAYDEVMKGVSSKAIARKLNDSDIPPPNGKRWEDRTITRALRSPITRGHYTWGDVFIENSHESIITEEMYQQIKERLEERINTKIVSHISVFRGKFICPSCNGTLTMNTATRKRKKGYVTYKTYYCNTCKTKKQSFGFSENEALRVFRDYLSKLDLDKYEVKTKQNDDVVTIDIDKIMEQRKRYHKLYAKGLMQEEELFELIKETDETIAEYEKQKELVPRKTLDIDKIKGFKNVLLESWKIFSLEDKADFIKMAIKSIDIEYIKLKNRHSIEIKDIEFY

SEQ ID NO: 8192 - protein, 458 aa, Unknown
  Description of Unknown: Integrase B8193 sequence
  PTHR30461:SF3,SM00857,IPR036162,PF13408,PS51737, G3DSA:3.40.50.1390,IPR025827,IPR006119,SSF53041,IPR011109, PTHR30461,Coil,PS51736,cd00338,PF00239
MKKDTPVGESLPLRAALYPRVSTEEQAKYGLSIHDQQGDLEEYARAHGMRIVGVFADAGYSARKNVEYRPAMLALLEAVKRDEVDIVLVTKLDRWFRNIGEYYKVQEILEAHNVSWRTIYEDYDTSTAAGRLKINIMLAVAQDEADRTSERIKKVFDGKRARLEPLTGDKPFGYTIEGKRYVKDPETEAAVDAFFRKYMACGSVSATQDYIRSEYGIFIPYQGADKLLRSTAYYGRYFGTDGMCPAYITKAQYDAIQLMRKRVMRRPAQNRVYLFSGLIFCPVCGGRMGGRKNQNVVSSHYNCSNHFCRRIPCTNNRSISEAKLERYLLSALDAKFAEYKRQTSRLSGARRKDYSSEIAALKGKLSRLKELYLNELIFLDEYKRDRAGFMAKLDELEAKQAALAVPAPSGEKIDGLLQGDWKGMYADLPKDKQQEFWRIVIKEIRLYPDRHIEFDLNL

SEQ ID NO: 8193 - protein, 458 aa, Unknown
  Description of Unknown: Integrase B8194 sequence
  PTHR30461:SF3,SM00857,IPR036162,PF13408,IPR025827, G3DSA:3.40.50.1390,IPR006119,SSF53041,PTHR30461,PS51736, cd00338,PF00239
MKDKIIRCAIYDRVSTEGQVKDGLSLDAQEEALTEYALSHHYKIVDYYADEGITARKKMQNRKDLIRLLNDVKADKIDLILVTKLDRWFRNIKDYHNTQAILEAHNCNWKTIFEEYDTSTSNGRFAINIMLSVNENECDRDSDRIKNVFEYKKKQREHLNGKPAYGYISVNKKLVKDPETKYIVEDTIEHYFSCYSKKATVKYILSKYANEQNPPTMYQINRILTCETYTGRKYGIDNYCEAYITQEQYKKIVSTSDAKIIPHQTKPFLFSSMIKCPICGKNMSGFVKRQKLKNGNVSEYKRYRCGAKFTAYHNGACISESVIEAYLLDNVMGELNLELLQIKTKEQEEKQKKPASNPVKIMNEINRLNLMYQKGRIDDEYYDKQYAILNEKLSAAQQPQEHRTIENYTSIMETLNDGWYEMYKKLDITHKKAFWKGIIKEIYIDKESRQICGFKFLL

SEQ ID NO: 8194 - protein, 458 aa, Unknown
  Description of Unknown: Integrase B8195 sequence
  cd03768,PTHR30461:SF3,SM00857,G3DSA:1.10.10.2600,IPR036162, PS51737,G3DSA:3.40.50.1390,IPR006119,IPR038109,PF07508, IPR011109,SSF53041,PTHR30461,PS51736,Coil, PF00239
MNYERSYLRSCQVSTLEQKEHGYSIEEQERKLKSFCEINDWSVSDVFIDAGFSGAKRDRPELQRMMNDIKRFDLVLVYKLDRLTRNVRDLLDLLEVFEQNNVAFRSATEVYDTSTAMGRLFVTLVGAMAEWERETIRERVMMGKRAAIKQGMILTPPPFYYDRVDNTYIPNDYKKVVLWAYDEVMKGNSSKAIARKLNDSDIPPPNGKRWEDRTITRALRNPITRGHYTWGDVFIENSHEPIITEEMYQQIKERLEERINTKIVSHVSVFRGKFICPRCGGTLTMNTATRKRKKGYVTYKTYYCNTCKTKKQSFGFSENEALRVFRDYLSKLDLDKYEVKTKQKDDVVTIDIDKIMEQRKRYHKLYAKGLMQEEELFELIKETDETIAEYEKQKELVPSKTLDVDKIKKFKNALLESWEIFSLEDKADFIKMAIKSIDIDYVKLKNRHSIEIKDIEFY

SEQ ID NO: 8195 - protein, 458 aa, Unknown
  Description of Unknown: Integrase B8196 sequence
  PTHR30461:SF3,SM00857,IPR006118,IPR036162,PF13408, IPR025827,G3DSA:3.40.50.1390,PS51737,IPR006119,SSF53041, IPR011109,PF00239,PTHR30461,PS00397,PS51736, Coil,cd00338
MKRILRAALYIRVSTEEQAKEGESLPAQESALVEYANEHGYRIVDIYKDAGVSGTRKVEKRPEMMRLLDDVKQDKIDIVLFIKINRWFRSVSEYWRVQRILDDHDVMWNAITEDFKNETAMDKAMINFALTFSEYFAGVQGEHIRFTLERMAKNGEPISGNQPYGYMIIQGPKHKMIAKDLATGDYIPDMYQKYIECHNIAETTRYLNAKYPDQKFAETYTTRRRICTRAYTGYHWARPDYYPPYVTQETFDEANAILKARAERQAHNRHTPPKLFSGLIICPDCGRKLATTYKKPTKGYPNGFRKYRCSMAWNRTGKCSYRHELYQWVIEKYCVEHAMSELKSFTLKAKTIDTEALKAEQEQEKLEAQLERLNDMYLYGKMDFEYYKRHMDEVTDKLDRIKRGVKPADRSVEELEALHIDNFESAYAALNEENRAMFWHKLLKGITVEKTHVTGLIF

SEQ ID NO: 8196 - protein, 458 aa, Unknown
  Description of Unknown: Integrase B8197 sequence
  PTHR30461:SF3,SM00857,G3DSA:1.10.10.2600,IPR036162,PF13408, PS51737,IPR025827,G3DSA:3.40.50.1390,IPR006119,IPR038109, PF07508,IPR011109,SSF53041,PTHR30461,PS51736, cd00338,PF00239
MKKAKSETTLVRAALYIRVSGEEQKIKGLSLEAQEERLRDFCKERGWLICGVFIDAAKTARKNIRKRVEFQHMIDGVKKDQYDILVFCRLDRWFRSVADYYKIMDILNAHNCGWVTSDEDYDTTTANGRLYINVKLSIAQNESDICSERISVVFDSKIQHGTVLSGFSPFWLDVKDKKLVVNDERAAIVRDAIDYFEKDMTQNGTVRYIRNKYGINWDINMLKRVFKNKLLIGVYDSNGRYNDHFCDPIISVDQFNRVQSIFDKRIKVVPTKRVYIFTSILKCPVCGCRLSGQAAGTNTRYYYRCNRHFIRKDCSYGKITNERLIEKWLLENLKSKLSECEVAWNVKQVKKRLEPSAKQKASLKRKLSKLKDLYLNELIDLEDYKRDYIMYSSALSELSTSQKEETPPDFAAVHRILDNDFLSTYNTMDRTEKRTFWQSIIKEMVLDDNGHVTSLSFV

SEQ ID NO: 8197 - protein, 458 aa, Unknown
  Description of Unknown: Integrase B8198 sequence
  PTHR30461:SF3,SM00857,IPR006118,IPR036162,PF13408, IPR025827,PS51737,G3DSA:3.40.50.1390,IPR006119,IPR011109, SSF53041,PF00239,PTHR30461,PS00397,PS51736, Coil,cd00338
MKRILRAALYIRVSTEEQAKEGESLPAQESALVEYANEHGYRIVDIYKDAGVSGTRKVEKRPEMMRLLEDVKQDKIDIVLFIKINRWFRSVSEYWRVQRILDDHNVMWNAITEDFKNETAMDKAMINFALTFSEYFAGVQGEHIRFTLERMAKNGEPISGNQPYGYMIIQGPKHKMIAKDLSTGDYIPDMYQKYIECHNIAETTRYLNAKYPDQKFAETYTTRRRICTRAYTGYHWARPDYYPPYVTQETFDEANAILKARAERQAHSKHTPPKLFSGLIICPCCGRRLATTYKKPTKGYPNGFRKYRCSMAWNRTGKCSYRHELYQWVIEKYCVEHAMSELKSFTLKAKTIDTEALKTEQEREKLEAQLERLNDMYLYGKMDFEYYKRHMDEVTDKLDRIKRGVKPADRSVEELEALHIDNFESAYAALNEENRAMFWHKLLKGITVEKTHVTGLIF

SEQ ID NO: 8198 - protein, 458 aa, Unknown
  Description of Unknown: Integrase B8199 sequence
  SM00857,IPR036162,PF13408,IPR025827,G3DSA:3.40.50.1390, PS51737,IPR006119,SSF53041,IPR011109,PTHR30461, Coil,PS51736,cd00338,PF00239
MKEKIIRCAIYDRVSTDGQVKEGLSLDAQQEALTEYALSHHYKIVDYYADEGITARKKMQNRKDLIRLLNDVKADKIDLILVTKLDRWFRNVKDYHNTQAILESHNCNWKTIFEEYDTSTSNGRFAINIMLSVNENECDRDSDRIKNVFDYKKKQREHLNGKPAYGYISVKKKLVKDPETRHIVEETFNHYFGCYSKNATIKYILGKYANEQNPPTMYQVKRILTCETYAGRKYGIDNYCEAYITWEQYKKIVSTSDAKIIPHQTEPFLFSSMIKCPICGKNMSGFVKRQKLKNGSVSEYKRYRCGAKFTEYHNGACISESVIEAYLLDNVMGELDRELLQIKSKEQEEKQKKPAANPVKIMGEINRLNLMYQKGRIDDEYYDKQYSILNEKLSAAQQPHEHRTIESYTAIRETLNDGWYEMYKRLDITHKKAFWKGIIKEIYVDKDSRQICGFIFML

SEQ ID NO: 8199 - protein, 458 aa, Unknown
  Description of Unknown: Integrase B8200 sequence
  cd03768,PTHR30461:SF3,SM00857,G3DSA:1.10.10.2600,IPR036162, PS51737,G3DSA:3.40.50.1390,IPR006119,IPR038109,PF07508 ,IPR011109,SSF53041,PTHR30461,PS51736,Coil, PF00239
MNYERSYLRSCQVSTLEQKEHGYSIEEQERKLKSFCEINDWSISDVFIDAGFSGAKRERPELQRMMNDIKRFDLVLVYKLDRLTRNVRDLLDLLEVFEQNNVAFRSATEVYDTSTAMGRLFVTLVGAMAEWERETIRERVMMGKRAAIKQGMILTPPPFYYDRVDNTYIPNDYKKVVLWAYDEVMKGNSSKAIARKLNDSDIPPPNGKRWEDRTITRALRNPITRGHYTWGDVFIENSHEPIITEEMYQQIKERLEERINTKIVSHVSVFRGKFICPRCGGTLTMNTATRKRKKGYVTYKTYYCNTCKTRKQSFGFSENEALRVFRDYLSKLDLDKYEVKTKQKDDVVTIDIDKIMEQRKRYHKLYAKGLMQEEELFELIKETDETIAEYEKQKELVPRKILDIDKIKSFKNVLLESWNIFSLEDKADFIKMAIKSIDIEYVELKNRHSIEIKEIEFY

SEQ ID NO: 8200 - protein, 458 aa, Unknown
  Description of Unknown: Integrase B8201 sequence
  PTHR30461:SF3,SM00857,G3DSA:1.10.10.2600,IPR036162,PF13408, IPR025827,G3DSA:3.40.50.1390,PS51737,IPR006119,IPR038109, PF07508,IPR011109,SSF53041,PTHR30461,PS51736, cd00338,PF00239
MKKAKSETTLVRAALYIRVSGEEQKIKGLSLEAQEERLRDFCKERGWLICGVFIDAAKTARKNIRKRIEFQHMIEGVKKDQYDILVFCRLDRWFRSVADYYKIMDILNAHNCGWVTSDEDYDTTTANGRLYINVKLSIAQNESDICSERISVVFDSKIQHGTVLSGFSPFWLDVKDKKLVVNDERAAIVRDAIDYFEKDMTQNGTVRYIRNKYGINWDINMLKRVFKNKLLIGVYDSNGRYNDHFCDPIISVDQFNRVQSIFDKRIKVVPTKRVYIFTSILKCPVCGCRLSGQAVGTNTRYYYRCNRHFIRKDCSYGKITNERLIEKWLLENLKSKLSECEVAWSVKQAKKKLEPSAKQKASLKRKLSKLKDLYLNELIDLEDYKRDYIMYSSALSELSTLQKEETPPDFAAVHRILDNDFLSTYNTMDRTEKRTFWQSIIKEMVLDDNGHVTSLSFV

SEQ ID NO: 8201 - protein, 458 aa, Unknown
  Description of Unknown: Integrase B8202 sequence
  cd03768,PTHR30461:SF3,SM00857,G3DSA:1.10.10.2600,IPR036162, PS51737,G3DSA:3.40.50.1390,IPR006119,IPR038109,PF07508, IPR011109,SSF53041,PTHR30461,PS51736,Coil, PF00239
MNYERSYLRSCQVSTLEQKEHGYSIEEQERKLKSFCEINDWSVSDVFIDAGFSGAKRERPELQRMMNDIKRFDLVLVYKLDRLTRNVRDLLDLLEVFEQNNVAFRSATEVYDTSTAMGRLFVTLVGAMAEWERETIRERVMMGKRAAIKQGMILTPPPFYYDRVDNTYIPNDYKKVVLWAYDEVMKGNSSKAIARKLNDSDIPPPNGKRWEDRTITRALRNPITRGHYTWGDVFIENSHEPIITEEMYQQIKERLEERINTKIVSHVSVFRGKFICPRCGGTLTLNTVTRKRKKGYVTYKTYYCNTCKAKKESFGFSENEALRVFRDYLSKLDLEKYEVKKKQKDDVVTIDIDKVMEQRKRYHKLYAKGLMQEEELFELIKETDETIAEYEKQKELVPRKSLDIDKIKKFKNALLESWKIFSLEDKADFIKMAIKSIDIEYVKIKNRHSIKISDIEFY

SEQ ID NO: 8202 - protein, 458 aa, Unknown
  Description of Unknown: Integrase B8203 sequence
  PTHR30461:SF3,cd00338,SM00857,IPR006118,IPR036162, PF13408,IPR025827,PS51737,G3DSA:3.40.50.1390,IPR006119, SSF53041,IPR011109,PTHR30461,PS00397,PS51736, Coil,PF00239
MKRILRAALYIRVSTEEQAKEGESLPAQESALVEYANEHGYRIVDIYKDAGVSGTRKVEKRPEMMRLLEDVKQDKIDIVLFIKINRWFRSVSEYWRVQRILDDHSVMWNAITEDFKNETAMDKAMINFALTFSEYFAGVQGEHIRFTLERMAKNGEPISGNQPYGYMIIQGPKHKMIAKDLSTGDYIPDMYQKYIECHNIAETTRYLNAKYPDQKFAEAYTTRRRICTRAYTGYHWARPDYYPPYVTQETFDEANAILKARAERQAHSKHTPPKLFSGLIICPCCGRRLATTYKKPTKGYPNGFRKYRCSMAWNRTGKCSYRHELYQWVIEKYCVEHAMSELKSFTLKAKTIDTEALKTEQEREKLEAQLERLNDMYLYGKMDFEYYKRHMDEVTDKLDRIKRGVKPADRSVDELEALHIDNFESAYAALNEENRAMFWHKLLKGITVEKTHVTGLIF

SEQ ID NO: 8203 - protein, 458 aa, Unknown
  Description of Unknown: Integrase B8204 sequence
  PTHR30461:SF3,SM00857,IPR006118,IPR036162,PF13408, IPR025827,PS51737,G3DSA:3.40.50.1390,IPR006119,IPR011109, SSF53041,PF00239,PTHR30461,PS00397,PS51736, Coil,cd00338
MKRILRAALYIRVSTEEQAKEGESLPAQESALVEYANEHGYRIVDIYKDAGVSGTRRVEKRPEMMRLLEDVKQDKIDIVLFIKINRWFRSVSEYWRVQRILDDHSVMWNAITEDFKNETAMDKAMINFALTFSEYFAGVQGEHIRFTLERMAKNGEPISGNQPYGYMIIQGPKHKMIAKDLSTGDYIPDMYQKYIECHNIAETTRYLNAKYPDQKFAETYTTRRRICTRAYTGYHWARPDYYPPYVTQETFDEANAILKARAERQAHSKHTPPKLFSGLIICPCCGRRLATTYKKPTKGYPNGFRKYRCSMAWNRTGKCSYRHELYQWVIEKYCVEHAMSELKSFTLKAKTIDTEALKTEQEREKLEAQLERLNDMYLYGKMDFEYYKRHMDEVTDKLDRIKRGVKPADRSVEELEALHIDNFESAYAALNEENRAMFWHKLLKGITVEKTHVTGLIF

SEQ ID NO: 8204 - protein, 458 aa, Unknown
  Description of Unknown: Integrase B8205 sequence
  PTHR30461:SF3,SM00857,IPR006118,IPR036162,PF13408, IPR025827,G3DSA:3.40.50.1390,PS51737,IPR006119,SSF53041, IPR011109,PF00239,PTHR30461,PS00397,PS51736, Coil,cd00338
MKRILRAALYIRVSTEEQAKEGESLPAQESALVEYANEHGYRIVDIYKDAGVSGTRRVEKRPEMMRLLEDVKQDKIDIVLFIKINRWFRSVSEYWRVQRILDDHNVMWNAITEDFKNETAMDKAMINFALTFSEYFAGVQGEHIRFTLERMAKNGEPISGNQPYGYMIIQGPKHKMIAKDLATGDYIPDMYQKYIECHNIAETTRYLNAKYPDQKFAETYTTRRRICTRAYTGYHWARPDYYPPYVTQETFDEANAILKARAERQAHNRHTPPKLFSGLIICPDCGRKLATTYKKPTKGYPNGFRKYRCSMAWNRTGKCSYRHELYQWVIEKYCVEHAMSELKSFTLKAKTIDTEALKAEQEQEKLEAQLERLNDMYLYGKMDFEYYKRHMDEVTDKLDRIKRGVKPADRSVEELEALHIDNFESAYAALNEENRAMFWHKLLKGITVEKTHVTGLIF

SEQ ID NO: 8205 - protein, 458 aa, Unknown
  Description of Unknown: Integrase B8206 sequence
  PTHR30461:SF3,IPR036162,PS51737,IPR011109,PTHR30461, PS00397,PF00239,G3DSA:1.10.10.2600,IPR006119,SSF53041, cd00338,SM00857,IPR025827,IPR038109,PS51736, IPR006118,PF13408,G3DSA:3.40.50.1390,PF07508,Coil
MNKVIRCACYVRVSTDNQLENYSIKEQTERLTAFCKAKDYLIVKFYTDGAFSGGSINRPALQQMLGDIEKGLIDAVIVYKLDRLSREQKDTLMLIEDKFLANHVDFISLCENFDTSTPFGLAMIGILSAFSQLEKNQITERFTMGRIGRAKNGLFHGGSVAPTGYDYIDGQLVINEYEALQVRDLYTRFSKGYSLHNCWQYMQKHYYTKYGGWKSETLVRNVLKNDVYIGKVKFNGQSYPGIHEPIIPEELFQTVQDIFEHSRRDMPSFKRSPFKANTLLSGLIYCGKCGARCHGEHGNYTCYSRSKGDKRQIKDPDCKNKKWKIEELDVLVIKYVSELDFEETESVEVPVQTKVDYGKRISEIEKQLSKLIDLYQISDISFETISEKIEKLSKEKNALIEESEKELPEQTSNADRLKFQERFLALLDNGPLPEKRACLTQLIERITITDEDIEITLK

SEQ ID NO: 8206 - protein, 458 aa, Unknown
  Description of Unknown: Integrase B8207 sequence
  PTHR30461:SF3,SM00857,IPR036162,PF13408,IPR025827, PS51737,G3DSA:3.40.50.1390,IPR006119,SSF53041,IPR011109, PTHR30461,Coil,PS51736,cd00338,PF00239
MKDKIIRCAIYDRVSTEGQVKDGLSLDAQEEALTEYALSHHYKIVDYYADEGITARKKMQNRKDLIRLLNDVKADKIDLILVTKLDRWFRNVKDYHNTQAILEAHNCNWKTIFEEYDTSTSNGRFAINIMLSVNENECDRDSDRIKNVFEYKKKQREHLNGKPAYGYISVKKKLVKDPETQYIVEDTFKHYFSCYSKNATIKYILEKYANETNPPTMYQVKRILTCETYAGRKYGIDNYCESYITWDQYKKIVSTSDAKIIPHQTEPFLFSSMIKCPICGKNMSGFVKRQKLKNGNVSEYKRYRCGAKFTEYHNGACISESVIEAYLLDNVMGELDRELLQIKSKEQEEKQRKPAANPVKIMNEISRLNIMYQKGRINDDYYDKQYAILNDKLSAAQQPQERTSIESYTSILETLNDGWYEMYKKLDITHKKAFWKGIIKEIYVDKDSRQICGFKFLL

SEQ ID NO: 8207 - protein, 458 aa, Unknown
  Description of Unknown: Integrase B8208 sequence
  PTHR30461:SF3,SM00857,IPR036162,PF13408,IPR025827, PS51737,G3DSA:3.40.50.1390,IPR006119,IPR011109,SSF53041, PTHR30461,Coil,PS51736,cd00338, PF00239
MKKDTPAGESLPLRAALYPRVSTEEQAKYGLSIHDQQGDLEEYARAHGMRIVGVFADAGYSARKKVEKRPAMLALLEAVKRDEVDIVLVTKLDRWFRNIGEYYKVQEILEAHNVSWRTIYEDYDTSTAAGRLKINIMLAVAQDEADRTSERIKKVFDGKRARLEPLTGDKPFGYTIEGKRYVKDPETEAAVSAFFRKYMACGSVSATQDYIKSEYGIFIPYQGADKLLRSTAYYGRYFGADGMCPAYITKAQYDAIQLMRKRVMRRPAQNRVYLFSGLIFCPVCGGRMGGRKNQNVVSSHYNCSNHFCRRIPCTNNRSISEAKLERYLLSALDAKFAEYKRQTSRLSGARRKDYSSEIAALKGKLSRLKELYLNELIFLDEYKRDRAGFMAKLDELEAKQAALAVPAPSGEKIDGLLQGDWKGMYADLPKDKQQEFWRIVIKEIRLYPDRHIEFDLNL

SEQ ID NO: 8208 - protein, 458 aa, Unknown
  Description of Unknown: Integrase B8209 sequence
  cd03768,PTHR30461:SF3,SM00857,G3DSA:1.10.10.2600,IPR036162, PS51737,G3DSA:3.40.50.1390,IPR006119,IPR038109,PF07508, IPR011109,SSF53041,PTHR30461,PS51736,Coil, PF00239
MNYERSYLRSCQVSTLEQKEHGYSIEEQERKLKSFCEINDWSVSDVFIDAGFSGAKRERPELKRMMNDIKRFDLVLVYKLDRLTRNVRDLLDLLEVFEQNNVAFRSATEVYDTSTAMGRLFVTLVGAMAEWERETIRERVMMGKRAAIKQGMILTPPPFYYDRVDNTYIPNDYKKVVLWAYDEVMKGNSSKAIARKLNDSDITPPNGKKWEDRTITRALRSPITRGHYTWGDVFIENSHEPIITEEMYQQIKERLEERINTKIVSHVSVFRGKFICPRCGGTLTMNTATRKRKKGYVTYKTYYCNTCKGKKKSFGFAENEALRVFHDYLSKLDLEKYEVKTKQKDDVVTIDIDKIMEQRKRYHKLYAKGLMQEEELFELIKETDETIAEYEKQKELVPRKSLDIDKIKKFKNALLESWEIFSLEDRADFIKMAIKSINIDYVKLKNRHSIKINDIEFY

SEQ ID NO: 8209 - protein, 458 aa, Unknown
  Description of Unknown: Integrase B8210 sequence
  PTHR30461:SF3,SM00857,IPR036162,PF13408,IPR025827, G3DSA:3.40.50.1390,IPR006119,SSF53041,PF00239,PTHR30461, PS51736,Coil,cd00338
MKILRAGLFSRVSTEDQKRHGFSIATQKEELEEYCKKNNMRIVSHYCDEGVSAGLPYKKRPEMMRLLNDIEANKIDIVLFVSLDRWFRSIKQYYLVQEILEKHDVVWKATREDYSTADANGRFSVNIFLAIAEQERSRTSERIKAVFEHKRKNRESFFGANSIPFGYTEQLDENGVRRLVKDPELEEALDMFFQIAVKYENVSKAARDVNLEYGLTKARHKWMELSKMEIYTGTYRGVKDYCPAYISREDWLRLNNRNKIKANTKNNRVYLFTGLIECPMCHNNMRGTYCSQKRKSGETVEYYSYKCEYKTAHICDYKHTISQLNIEKFLLDNLEDLLKGEIANVEIEKKKKRPKPKTNVSALKEKLRRLEVIYMTGNKSDEEYITEAKQINDAIKKAEAETRNAADDRDLTNIKDILSTDFKSIYNTLSPEDKRRFWRTLIKRIYINGNRVEHVEFN

SEQ ID NO: 8210 - protein, 458 aa, Unknown
  Description of Unknown: Integrase B8211 sequence
  cd03768,PTHR30461:SF3,SM00857,G3DSA:1.10.10.2600, IPR036162,PS51737,G3DSA:3.40.50.1390,IPR006119, IPR038109,PF07508,IPR011109,SSF53041, PTHR30461,PS51736,Coil,PF00239
MNYERSYLRSCQVSTLEQKEHGYSIEEQERKLKSFCEINDWSVSDVFIDAGFSGAKRERPELKRMMNDIKRFDLVLVYKLDRLTRNVRDLLDLLEVFEQNNVAFRSATEVYDTSTAMGRLFVTLVGAMAEWERETIRERVMMGKRAAIKQGMILTPPPFYYDRVDNTYIPNDYKKVVLWAYDEVMKGNSSKAIARKLNDSDIPPPNGKRWEDRTITRALRNPITRGHYTWGDVFIENSHEPIITEEMYQQIKERLEERINTKIVSHVSVFRGKFICPRCGGTLTMNTATRKRKKGYVTYKTYYCNTCKTKKQSFGFSENEALRVFRDYLSKLDLDKYEVKTKQKDDVVTIDIDKIMEQRKRYHKLYAKGLMQEEELFELIKETDETIAEYEKQKELVPRKSLDIDKIKKFKNALLESWKIFSLEDKADFIKMAIKSIDIDYVKLKNRHSIKINDIEFY

SEQ ID NO: 8211 - protein, 458 aa, Unknown
  Description of Unknown: Integrase B8212 sequence
  PTHR30461:SF3,SM00857,G3DSA:1.10.10.2600,IPR036162,PF13408, IPR025827,G3DSA:3.40.50.1390,PS51737,IPR006119,IPR038109, PF07508,IPR011109,SSF53041,PTHR30461,PS51736, cd00338,PF00239
MKKAKSETTLVRAALYIRVSGEEQKIKGLSLEAQEERLRDFCKERGWLICGVFIDAAKTARKNIRKRIEFQHMIEGVKKDQYDILVFCRLDRWFRSVADYYKIMDILNAHNCGWVTSDEDYDTTTANGRLYINVKLSIAQNESDICSERISVVFDSKIQHGTVLSGFSPFWLDVKDKKLVVNEERAAIVRDAIDYFEKDMTQNGTARYVRNRYGINWDINMLKRVFKNKLLIGVYDSNGRYNDHFCDPIISVDQFNRVQSIFDKRIKVVPTKRVYIFTSILKCPVCGCRLSGQAAGTNTRYYYRCNRHFIRKDCSYGKITNERLIEKWLLENLKSKLSECEVAWSVKQAKKKLEPSAKQKASLKRKLSKLKDLYLNELIDLEDYKRDYIMYSSALSELSTSQKEETPPDFAAVHRILDNDFLSTYNTMDRTEKRTFWQSIIKEMVLDDNGHVTSLSFV

SEQ ID NO: 8212 - protein, 458 aa, Unknown
  Description of Unknown: Integrase B8213 sequence
  cd03768,PTHR30461:SF3,SM00857,G3DSA:1.10.10.2600,IPR036162, PS51737,G3DSA:3.40.50.1390,IPR006119,IPR038109,PF07508, SSF53041,IPR011109,PTHR30461,PS51736,Coil, PF00239
MNYERSYLRSCQVSTLEQKEHGYSIEEQERKLKSFCEINDWSVSDVFIDAGFSGAKRERPELQRMMNDIKRFDLILVYKLDRLTRNVRDLLDLLEIFEQNNVAFRSATEVYDTSTAMGRLFVTLVGAMAEWERETIRERVMMGKRAAIKQGMILTPPPFYYDRVDNTYIPNDYKKVVLWAYDEVLKGVSSKGIARKLNDSDIPPPNGKRWEDRTITRALRSPITRGHYTWGDVFIENSHEPIITEEMYQQIKERLEERINTKIVSHVSVFRGKFICPRCGGTLTMNTATRKRKKGYVTYKTYYCNTCKVKKESFGFAENEALRVFRDYLSKLDLEEYEVKTKQKDDVVTIDIDKIMEQRKRYHKLYAKGLMQEEELFELIKETDETIAEYEKQKELAPRKTLNVDKIKKFKNALLESWKIFSLEDKADFIKMAIKSIDIDYVKLKNRHSIKINDIEFY

SEQ ID NO: 8213 - protein, 458 aa, Unknown
  Description of Unknown: Integrase B8214 sequence
  cd03768,PTHR30461:SF3,SM00857,G3DSA:1.10.10.2600,IPR036162, PS51737,G3DSA:3.40.50.1390,IPR006119,IPR038109,PF07508, IPR011109,SSF53041,PTHR30461,PS51736,Coil, PF00239
MNYERSYLRSCQVSTLEQKEHGYSIEEQERKLKSFCEINDWSVSDVFIDAGFSGAKRERPELQRMMNDIKRFDLVLVYKLDRLTRNVRDLLDLLEIFEQNNVAFRSATEVYDTSTAMGRLFVTLVGAMAEWERETIRERVMMGKRAAIKQGMILTPPPFYYDRVDNTYIPNDYKKVVLWAYDEVMKGNSSKAIARKLNDSDIPPPNGKRWEDRTITRALRSPITRGHYTWGDVFIENSHEPIITEEMYQQIKERLEERINTKIVSHVSVFRGKFICPKCGGTLTMNTATRKRKKGYVTYKTYYCNTCKVKKESFGFAENEALRVFRDYLSKLDLEEYEVKTKQKDDVVTIDIDKIMEQRKRYHKLYAKGLMQEEELFELIKETDETIAEYEKQKELVPSKTLDVAKIKKFKNALLESWKIFSLEDKADFIKMAIKSIDIDYVKLKNRHSIKINDIEFY

SEQ ID NO: 8214 - protein, 458 aa, Unknown
  Description of Unknown: Integrase B8215 sequence
  cd03768,PTHR30461:SF3,SM00857,G3DSA:1.10.10.2600,IPR036162, PS51737,G3DSA:3.40.50.1390,IPR006119,IPR038109,PF07508, SSF53041,IPR011109,PTHR30461,PS51736,Coil, PF00239
MNYERSYLRSCQVSTLEQKEHGYSIEEQERKLKSFCEINDWSVSDVFIDAGFSGAKRDRPELQRMMNDIKRFDLVLVYKLDRLTRNVRDLLDLLEVFEQNNVAFRSATEVYDTSTAMGRLFVTLVGAMAEWERETIRERVMMGKRAAIKQGMILTPPPFYYDRVDNTYIPNDYKKVVLWAYNEVMKGNSSKAIARKLNDSDIPPPNGKRWEDRTITRALRSPITRGHYTWGDVFIENSHEPIITEKMYQQIKERLEERINTKIVSHVSVFRGKFICPRCGGTLTLNTVTRKRKKGYVTYKTYYCNTCKAKKESFGFSENEALRVFRDYLSKLDLDKYKVKTKQNDDVVTIDIDKIMEQRKRYHKLYAKGLMQEEELFELIKETDETIAEYEKQRELVPRKSLDIDKIKKFKNALLESWEIFSLEDKADFIKMAIKSIDIKYVKLKNRHSIKISDIEFY

SEQ ID NO: 8215 - protein, 458 aa, Unknown
  Description of Unknown: Integrase B8216 sequence
  PTHR30461:SF3,cd00338,SM00857,IPR006118,IPR036162, PF13408,IPR025827,G3DSA:3.40.50.1390,PS51737,IPR006119, IPR011109,SSF53041,PTHR30461,PS00397,PS51736, Coil,PF00239
MKRILRAALYIRVSTEEQAKEGESLPAQESALVEYANEHGYRIVDIYKDAGVSGTRKVEKRPEMMRLLEDVKQDKIDIVLFIKINRWFRSVSEYWRVQRILDDHDVMWNAITEDFKNETAMDKAMINFALTFSEYFAGVQGEHIRFTLERMAKNGEPITGNQPYGYMIIQGPKHKMIAKDLSTGDYIPDMYQKYIECHNIAETTRYLNAKYPDQKFAETYTTRRRICTRAYTGYHWARPDYYPPYVTQETFDEANAILKARAERQAHSKHTPPKLFSGLIICPCCGRRLATTYKKPTKGYPNGFRKYRCSMAWNRTGKCSYRHELYQWVIEKYCVEHAMSELKSFTLKAKTIDTEALKTEQEREKLEAQLERLNDMYLYGKMDFEYYKRHMDEVTDKLDRIKRGVKPADRSVEELEALHIDNFESAYAALNEENRAMFWHKLLKGITVEKTHVTGLIF

SEQ ID NO: 8216 - protein, 458 aa, Unknown
  Description of Unknown: Integrase B8217 sequence
  cd03768,PTHR30461:SF3,SM00857,G3DSA:1.10.10.2600,IPR036162, PS51737,G3DSA:3.40.50.1390,IPR006119,IPR038109,PF07508, IPR011109,SSF53041,PTHR30461,PS51736,Coil, PF00239
MNYERSYLRSCQVSTLEQKEHGYSIEEQERKLKSFCEINDWSVSDVFIDAGFSGAKRDRPELQRMMNDIKRFDLVLVYKLDRLTRNVRDLLDLLEVFEQNNVAFRSATEVYDTSTAMGRLFVTLVGAMAEWERETIRERVMMGKRAAIKQGMILTPPPFYYDRVDNTYIPNDYKKVVLWAYDEVMKGVSSKGIARKLNDSDIPPPNGKRWEDRTITRALRSPITRGHYTWGDVFIENSHEPIITEEMYQQIKERLEERINTKIVSHVSVFRGKFICPRCGGTLTLNTVTRKRKKGYVTYKTYYCNTCKAKKESFGFSENEALRVFRDYLSELDLDKYKVKTKQNDDVVTIDIDKIMEQRKRYHKLYAKGLMQEEELFELIKETDETIAEYEKQKELVPRKSLDIDKIKKFKNALLESWEIFSLEDKADFIKMAIKSIDIEYAKLKNRHSIEIKDIEFY

SEQ ID NO: 8217 - protein, 458 aa, Unknown
  Description of Unknown: Integrase B8218 sequence
  PTHR30461:SF3,SM00857,G3DSA:1.10.10.2600,IPR036162,PS51737, G3DSA:3.40.50.1390,IPR006119,IPR038109,IPR011109,SSF53041, PTHR30461,PS51736,cd00338,PF00239
MTFLVENPYDRVLRAALYERVSTTEQSMNGYSIDAQKDNLEEHAKKNNMKIVGHYTDAGISGTKPPLKRPDLKRLLDDVEAGKVDIILFTKLDRWFRSVKEYFKVQEILDTYGVQWRAIHENYDTTTANGQMAITMFLAIAQNERDRTAERIKVVLEHKRKNKEACFGGNAIPLGYKKEADENGVMRLVKDPETQQAVEEFWDIMIKTNNLNKAIRHMVNAYGINKDWKSWMRMTRSDFYCGIHRGVQDYCEPYVSPEDFLALHEKRPQKATPTGRIYLLRGLIRCPECCQKLCGDADTRKNKVYKTYRCAYRARGCSNHGSYSELKLMKQLVNGLDGYLREEIAAAEIELAKPRPKPKTNIKELKEKQRRLTVAYMAGNKTDKEYLQEDAELKSLIAKAEKTAPPEPRNIQPLKDLLESDFKSIYESLTEEEKQLFWTKLIKEIKLDGKQIKRVIFF

SEQ ID NO: 8218 - protein, 458 aa, Unknown
  Description of Unknown: Integrase B8219 sequence
  PTHR30461:SF3,SM00857,IPR006118,IPR036162, PF13408,IPR025827,PS51737,G3DSA:3.40.50.1390, IPR006119,IPR011109,SSF53041,PF00239, PTHR30461,PS00397,PS51736,Coil,cd00338
MKRILRAALYIRVSTEEQAKEGESLPAQESALVEYANEHGYRIVDIYKDAGVSGTRKVEKRPEMMRLLEDVKQDKIDIVLFIKINRWFRSVSEYWRVQRILDDHNVMWNAITEDFKNETAMDKAMINFALTFSEYFAGVQGEHIRFTLERMAKNGEPISGNQPYGYMIIQGPKHKMIAKDLSTGDYIPDMYQKYIECHNIAETTRYLNAKYPDQKFAETYTTRRRICTRAYTGYHWARPDYYPPYITQETFDEANAILKARAERQAHSKHTPPKLFSGLIICPDCGRRLATTYKKPTKGYPNGYRKYRCSMAWNRTGKCSYRHELYQWVIEKYCVEHAMSELKSFTLKAKTIDTEALKTEQEREKLEAQLERLNDMYLYGKMDFEYYKRHMDEVTDKLDRIKRGVKPADRSVEELEALHIDNFESAYAALNEENRAMFWHKLLKGITVEKTHVTGLIF

SEQ ID NO: 8219 - protein, 458 aa, Unknown
  Description of Unknown: Integrase B8220 sequence
  cd03768,PTHR30461:SF3,SM00857,G3DSA:1.10.10.2600,IPR036162, PS51737,G3DSA:3.40.50.1390,IPR006119,IPR038109,PF07508, IPR011109,SSF53041,PTHR30461,PS51736,Coil, PF00239
MNYERSYLRSCQVSTLEQKEHGYSIEEQERKLKSFCEINDWSVSDVFIDAGFSGAKRDRPELQRMMNDIKRFDLVLVYKLDRLTRNVRDLLDLLEVFEQNNVAFRSATEVYDTSTAMGRLFVTLVGAMAEWERETIRERVMMGKRAAIKQGMILTPPPFYYDRVDNTYIPNDYKKVVLWAYDEVMKGNSSKAIARKLNDSDIPPPNGKRWEDRTITRALRNPITRGHYTWGDVFIENSHEPIITEEMYQQIKERLEERINTKIVSHVSVFRGKFICPRCGGTLTLNTVTRKRKKGYVTYKTYYCNTCKTKKQSFGFSENEALRVFRDYLSKLDLDKYEVKTNQKDDVVTIDIDKIMEQRKRYHKLYAKGLMQEEELFELIKETDETIAEYEKQKELVPSKTLDVDKIKKFKNALLESWEIFSLEDKADFIKMAIKSIDIEYVKLKNRHSIKINDIEFY

SEQ ID NO: 8220 - protein, 458 aa, Unknown
  Description of Unknown: Integrase B8221 sequence
  PTHR30461:SF3,SM00857,IPR036162,PF13408,IPR025827, PS51737,G3DSA:3.40.50.1390,IPR006119,SSF53041,IPR011109, PTHR30461,Coil,PS51736,cd00338,PF00239
MKEKIIRCAIYDRVSTDGQVKDGLSLDAQEEALTEYALSHHYKIVDYYADEGITARKKMQNRKDLIRLLNDVKADKIDLILVTKLDRWFRNVKDYHNTQAILEAHNCNWKTIFEEYDTSTSNGRFAINIMLSVNENECDRDSDRIKNVFEYKKKQREHLNGKPAYGYISVKKKLVKDPETQYIVEDTFKHYFSCYSKNATIKYILEKYANETNPPTMYQVKRILTCETYAGRKYGIDNYCESYITWDQYKKIVSTSDAKIIPHQTEPFLFSSMIKCPICGKNMSGFVKRQKLKNGNVSEYKRYRCGAKFTEYHNGACISESVIEAYLLDNVMGELDRELLQIKSKEQEEKQRKPAANPVKIMNEISRLNIMYQKGRINDDYYDKQYAILNDKLSAAQQPQERTSIESYTSILETLNDGWYEMYKKLDITHKKAFWKGIIKEIYVDKDSRQICGFKFLL

SEQ ID NO: 8221 - protein, 458 aa, Unknown
  Description of Unknown: Integrase B8222 sequence
  cd03768,PTHR30461:SF3,SM00857,G3DSA:1.10.10.2600, IPR036162,PS51737,G3DSA:3.40.50.1390,IPR006119, IPR038109,PF07508,IPR011109,SSF53041, PTHR30461,PS51736,Coil,PF00239
MNYERSYLRSCQVSTLEQKEHGYSIEEQERKLKSFCEINDWSVSDVFIDAGFSGAKRDRPELQRMMNDIKRFDLVLVYKLDRLTRNVRDLLDLLEVFEQNNVAFRSATEVYDTSTAMGRLFVTLVGAMAEWERETIRERVMMGKRAAIKQGMILTPPPFYYDRVDNTYTPNDYKKVVLWAYDEVMKGNSSKAIARKLNDSDIPPPNGKRWEDRTITRSLRSPITRGHYTWGDVFIENSHEPIITEEMYQQIKERLEERINTKIVSHVSVFRGKFICPRCGGTLTLNTVTRKRKKGYVTYKTYYCNTCKTKKQSFGFSENEALRVFRDYLSKLDLDKYEVKTNQKDDVVTIDIDKIMEQRKRYHKLYAKGLMQEEELFELIKETDETIAEYEKQKELVPSKTLDVDKIKKFKNALLESWEIFSLEDKADFIKMAIKSIDIEYVKLKNRHSIKINDIEFY

SEQ ID NO: 8222 - protein, 458 aa, Unknown
  Description of Unknown: Integrase B8223 sequence
  PTHR30461:SF3,SM00857,G3DSA:1.10.10.2600,IPR036162,PF13408, IPR025827,G3DSA:3.40.50.1390,PS51737,IPR006119,IPR038109, PF07508,IPR011109,SSF53041,PTHR30461,PS51736, cd00338,PF00239
MKKAKSETTLVRAALYIRVSGEEQKIKGLSLEAQEERLRDFCKERGWLICGVFIDAAKTARKNIRKRIEFQHMIEGVKKDQYDILVFCRLDRWFRSVADYYKIMDILNAHNCGWVTSDEDYDTTTANGRLYINVKLSIAQNESDICSERISVVFDSKIQHGTVLSGFSPFWLDVKDKKLVVNDERAAIVRDAIDYFEKDMTQNGTVRYIRNKYGINWDINMLKRIFKNKLLIGVYDSNGRYNDHFCDPIISVDQFNRVQSIFDKRIKVVPTKRVYIFTSILKCPVCGCRLSGQAAGTNTRYYYRCNRHFIRKDCSYGKITNERLIEKWLLENLKSKLSECEVAWSVKQAKKKLEPSAKQKASLKRKLSKLKDLYLNELIDLDDYKRDYIMYSSALSELSTSQKEETPPDFAAVHRILDNDFLSTYNTMDRTEKRTFWQSIIKEMVLDDNGHVTSLSFV

SEQ ID NO: 8223 - protein, 458 aa, Unknown
  Description of Unknown: Integrase B8224 sequence
  cd03768,SM00857,G3DSA:1.10.10.2600,IPR036162,PS51737, G3DSA:3.40.50.1390,IPR006119,IPR038109,PF07508,IPR011109, SSF53041,PTHR30461,PS51736,Coil,PF00239
MKVAIYTRVSTLEQANEGYSIGEQERKLKQFCDINDWKVVDVYVDAGISGGSLKRPSLQKLLNDIDKFDMILVYKLDRLTRSVRDLLDLLEIFDQNNVAFRSATEVYDTTNAMGRLFVTLVGAMAEWERATTRERTLYGKEGALESGKYLGHVPFYYDLVDNKLIPNENRKYVDYIIKRLKENISATQIGKELSNMKDTPVKFNKTMVIQILHSPTAHGHTKYGKFFKENTHEPVITQEDYNTAIKILSTRRHTYKQNHTSIFRGKIECPNNCGRFLHLNVNKIKRADGSYYLRQYYKCDKCSREKKPSTIIRYDMMQQAFMKYLNNLSFDTIEPPENNDDQEQFEIDIAKVMRQREKYQKAWAMDLMTDDEFKARMKETDTLLKQASEKEVENNELEFEQVVKIQKLLQKSWKNLSEDKKEDLIAATIDKIQIELIRGNKTVNSPNEVKIKDVSFLL

SEQ ID NO: 8224 - protein, 458 aa, Unknown
  Description of Unknown: Integrase B8225 sequence
  PTHR30461:SF3,IPR036162,PS51737,IPR011109,PTHR30461, PS00397,PF00239,G3DSA:1.10.10.2600,IPR006119,SSF53041, cd00338,SM00857,IPR025827,IPR038109, PS51736,IPR006118,PF13408,G3DSA:3.40.50.1390,PF07508,Coil
MLRVALYIRVSTDEQALHGDSIATQKDALTFYARSNNMNIIDYYIDEGYTATNLKRPNLQRLLNDVKENKIDMILFTKIDRWSRGVRNYYKIQDILDANKVNWKTIFEDYDTSTASGRLHINIMLSVAENESAQTSERIKAVFKNKLAKGEVCSGKIPRGYKIENKKLVVDHEVAPMIQDIFNYYESVNSLNKLVDYVKNNYYHIHQLTLKRILTNTLYKGTHTSEYAVTENYCEAIISETQFDNVQRLLTINQKKYNNKFSDSIYLFSGLLICKECEHKLVGNRQIKENKTRGKYIYKVYKCQNHFKEHVCPNNYNIPEENILEKYLVDNIQSELKKYIIQYNRENSKKTYINLSNKKGALKRKLERLKDLYIDELIDKETYKNDYEKLTNELNKLKEENKNKIIPFNKNKIDEILNVNLKEDYYKLNENARRSFWTSIIDKIIIGNNRNDITIHFL

SEQ ID NO: 8225 - protein, 458 aa, Unknown
  Description of Unknown: Integrase B8226 sequence
  cd03768,PTHR30461:SF3,SM00857,G3DSA:1.10.10.2600,IPR036162, PS51737,G3DSA:3.40.50.1390,IPR006119,IPR038109,PF07508, IPR011109,SSF53041,PTHR30461,PS51736,Coil, PF00239
MNYERRYLRSCQVSTLEQKEHGYSIEEQERKLKSFCEINDWSVSDVFIDAGFSGAKRDRPELQRMMNDIKRFDLVLVYKLDRLTRNVRDLLDLLEIFERNNVAFRSATEVYDTSTAMGRLFVTLVGAMAEWERETIRERVMMGKRAAIKQGMILTPPPFYYDRVDNTYIPNDYKKVVLWAYDEVMKGNSSKAIARKLNDSDIPPPNGKRWEDRTITRALRNPITRGHYTWGDVFIENSHEPIITEEMYQQIKERLEERINTKIVSHVSVFRGKFICPRCGGTLTMNTATRKRKKGYVTYKTYYCNTCKTRKQSFGFSENEALRVFRDYLSKLDLDKYEVKTKQKDDVVTIDIDKIMEQRKRYHKLYAKGLMQEEELFELIKETDETIAEYEKQKELVPRKILDIDKIKSFKNVLLESWNIFSLEDKADFIKMAIKSIDIEYVELKNRHSIEIKEIEFY

SEQ ID NO: 8226 - protein, 458 aa, Unknown
  Description of Unknown: Integrase B8227 sequence
  PTHR30461:SF3,SM00857,IPR006118,IPR036162,PF13408, PS51737,IPR025827,G3DSA:3.40.50.1390,IPR006119,IPR011109, SSF53041,PF00239,PTHR30461,PS00397,PS51736, Coil,cd00338
MKRILRAALYIRVSTEEQAKEGESLPAQESALVEYANEHGYRIVDIYKDAGVSGTRKVEKRPEMMRLLEDVKQDKIDIVLFIKINRWFRSVSEYWRVQRILDDHNVMWNAITEDFKNETAMDKAMINFALTFSEYFAGVQGEHIRFTLERMAKNGEPISGNQPYGYMIIQGPKHKMIAKDLSTGDYIPDMYQKYIECHNIAETTRYLNAKYPDQKFAETYTTRRRICTRAYTGYHWARPDYYPPYVTQETFDEANTILKARAERQAHNRHTPPKLFSGLIICPDCGRKLATTYKKPTKGYPNGYRKYRCSMAWNRTGKCSYRHELYQWVIEKYCVEHAMSELKSFTLKAKTIDTEALKTEQEREKLEAQLERLNDMYLYGKMDFEYYKRHMDEVTDKLDRIKRGVKPADRSVEELEALHIDNFESAYATLNEENRAMFWHKLLKGITVEKTHVTGLIF

SEQ ID NO: 8227 - protein, 458 aa, Unknown
  Description of Unknown: Integrase B8228 sequence
  PTHR30461:SF3,SM00857,G3DSA:1.10.10.2600,IPR036162,PF13408, IPR025827,PS51737,G3DSA:3.40.50.1390,IPR006119,IPR038109, PF07508,IPR011109,SSF53041,PTHR30461,PS51736, cd00338,PF00239
MIKKELSSAGPLRVALYIRVSGEEQKIKGLSLEAQQERLEEYARQQGWVVVGTYIDAAKTARKDMRKRSEFQKMINAVKRDEIDLLLFCRLDRWFRSVADYYKIMEILQAHHCDWKTTDEEYDTSTANGRLYINVKLSIAQNEADICSERISVVFDSKVQHGTVVSGSCPFGYVVNEEKRLVIDPDAAAIVRDAFNYYESSISQRGTIRHIRETYGVNWCDATFRRMLSERLYTGVYDSRGRYNENFCEPIISKEQFEHVRALTSRNARSVPSGKVYIFTSVLKCAECNHNLVGYVTGPYYYYRCNQHFQRDRCSHNKSVRESYVEEWLFEHLGEELERCKLEWDVQAAERKKKMRSTDKAVLKRKLTKLKELYMDDLINIEEYKKDYQIYTAALQQIPDETPEETPPDFSAVERMLQADFKSIYDSLTREEKRTLWRSVISEIRVDRDNNITGIIFG

SEQ ID NO: 8228 - protein, 458 aa, Unknown
  Description of Unknown: Integrase B8229 sequence
  PTHR30461:SF3,cd00338,SM00857,IPR006118,IPR036162, PF13408,IPR025827,PS51737,G3DSA:3.40.50.1390,IPR006119, SSF53041,IPR011109,PTHR30461,PS00397,PS51736, Coil,PF00239
MKRILRAALYIRVSTEEQAKEGESLPAQESALVEYANEHGYRIVDIYKDAGVSGTRKVEKRPEMMRLLEDVKQDKIDIVLFIKINRWFRSVSEYWRVQRILDDHSVMWNAITEDFKNETAMDKAMINFALTFSEYFAGVQGEHIRFTLERMAKNGEPISGNQPYGYMIIQGPKHKMIAKDLSTGDYIPDMYQKYIECHNIAETTRYLNAKYPDQKFAETYTTRRRICTRAYTGYHWARPEYYPPYVTQETFDEANAILKARAERQAHSKHTPPKLFSGLIICPCCGRRLATTYKKPTKGYPNGFRKYRCSMAWNRTGKCSYRHELYQWVIEKYCVEHAMSELKSFTLKAKTIDTEALKTEQEREKLEAQLERLNDMYLYGKMDFEYYKRHMDEVTDKLDRIKRGVKPADRSVDELEALHIDNFESAYAALNEENRAMFWHKLLKGITVEKTHVTGLIF

SEQ ID NO: 8229 - protein, 458 aa, Unknown
  Description of Unknown: Integrase B8230 sequence
  cd03768,PTHR30461:SF3,SM00857,G3DSA:1.10.10.2600,IPR036162, PS51737,G3DSA:3.40.50.1390,IPR006119,IPR038109,PF07508, IPR011109,SSF53041,PTHR30461,PS51736,Coil, PF00239
MNYERSYLRSCQVSTLEQKEHGYSIEEQERKLKSFCEINDWSVSDVFIDAGFSGAKRERPELQRMMNDIKRFDLVLVYKLDRLTRNVRDLLDLLEIFEQNNVAFRSATEVYDTSTAMGRLFVTLVGAMAEWERETIRERVMMGKRAAIKQGMILTPPPFYYDRVDNTYIPNDYKKVVLWAYDEVMKGVSSKAIARKLNDSDIPPPNGKRWEDRTITRALRSPITRGHYTWGDVFIENSHEPIITEEMYQQIKERLEERINTKIVSHVSVFRGKFICPRCGGTLTMNTATRKRKKGYVTYKTYYCNTCKTKKQSFGFSENEALRVFRDYLSKLDLDKYEVKTKQNDDVVTIDIDKIMEQRKRYHKLYAKGLMQEEELFELIKETDETIAEYEKQKELVPRKTLDIDKIKGFKNVLLESWKIFSLEDKADFIKMAIKSIDIEYINLKNRHSIEIKDIEFY

SEQ ID NO: 8230 - protein, 458 aa, Unknown
  Description of Unknown: Integrase B8231 sequence
  cd03768,PTHR30461:SF3,SM00857,G3DSA:1.10.10.2600,IPR036162, PS51737,G3DSA:3.40.50.1390,IPR006119,IPR038109,PF07508, IPR011109,SSF53041,PTHR30461,PS51736,Coil, PF00239
MNYERSYLRSCQVSTLEQKEHGYSIEEQERKLKSFCEINDWSISDVFIDAGFSGAKRERPELKRMMNDIKRFDLVLVYKLDRLTRNVRDLLDLLEIFEQNNVAFRSATEVYDTSTAMGRLFVTLVGAMAEWERETIRERVMMGKRAAIKQGMILTPPPFYYDRVDNTYIPNDYKKVVLWAYDEVLKGVSSKGIARKLNDSDIPPPNGKKWEDRTITRALRSPITRGHYTWGDVFIENSHEPIITEEMYQQIKERLEERINTKIVSHVSVFRGKFICPRCGGTLTMNTATRKRKKGYVTYKTYYCNTCKTKKQSFGFSENEALRVFRDYLSKLDLEKYEVKTKQNDDVVTIDIDKVMEQRKRYHKLYAKGLMQEEELFELIKETDETIAEYEKQKELAPRKTLNVDKIKKFKSVLLESWEIFSLEDRADFIKMAIKSIDIDYVKLKNRHSIKINDIEFY

SEQ ID NO: 8231 - protein, 457 aa, Unknown
  Description of Unknown: Integrase B8232 sequence
  PTHR30461:SF3,SM00857,G3DSA:1.10.10.2600,IPR036162,PF13408, IPR025827,G3DSA:3.40.50.1390,PS51737,IPR006119,IPR038109, PF07508,IPR011109,SSF53041,PTHR30461,PS51736, cd00338,PF00239
MIKKELSTGPLRVALYIRVSGEEQKIKGLSLEAQQERLEEYARQQGWVVVGIYIDAAKTARKDMRKRSEFQKMINSVKRDEIDLLLFCRLDRWFRSVADYYKIMEILQAHHCDWKTTDEEYDTSTANGRLYINVKLSIAQNEADICSERISVVFDSKVQHGTVVSGNCPFGYVVNEEKRLVIDPDAAAIVRDAFNYYESSISQRGTIRHIRETYGVNWCDATFRRMLSERLYTGVYDSRGRYNENFCEPIISKEQFEHVQVLIGRNARSVPSGKVYIFTSVLKCAECNHNLVGYVTGPYYYYRCNQHFQRGRCSHNKSVRESYVEEWLFEHLGEELERCKLEWDVQAAERKKKMHSTDKAVLKRKLTKLKELYMDDLINIEEYKKDYQIYTAALQQIPDETPEETPPDFSAVERMLQADFKSIYDSLTREEKRTLWRSVISEIRVDRDNNITGIIFG

SEQ ID NO: 8232 - protein, 457 aa, Unknown
  Description of Unknown: Integrase B8233 sequence
  SM00857,IPR006118,IPR036162,PF13408,PS51737, G3DSA:3.40.50.1390,IPR025827,Coil,IPR006119,IPR011109, SSF53041,PTHR30461,PS00397,PS51736,cd00338, PF00239
MLKTPPACRAGIYIRVSTEEQHLNGLSLPAQRMALEDYASKNGYIIVGVYADEGISARKSMSHRKGLLRLLEDVRQNKIDMILVTKLDRWFRNIKDYNITEEILREHHCYWKTIFENYDSSTANGQMVINIMLSVNQAECDRTSERIKAVFDYKRAKGMCVTGKCAPYGYIIENGYIKKDPATRSIVEDAIQYYFSCFSIRHTTRYIADKYGENGPSYYKVDKIFHNPKYAGIDKDGKPYCEPYMTMDQYHALLKSRQAKSWSPSGYTYIFSSLITCPICGCKFSGRQRKAVRKNGNVYCDTRYNCMGKFRYHSGASLRESAIEEYLLEHMDSILEAARIDICLEPSGASAKPARSTQSIQDEINRLNTMYQKGRLSDDYYDQEYIRLTAALSEVSDQKAELQKKNLKCVSERFSGDWKSLYVRLDNEHKRAFWKQTIEEILVDPETRQIKDVKLLL

SEQ ID NO: 8233 - protein, 457 aa, Unknown
  Description of Unknown: Integrase B8234 sequence
  SM00857,G3DSA:1.10.10.2600,IPR036162,PF13408,PS51737, G3DSA:3.40.50.1390,IPR025827,IPR006119,IPR038109,PF07508, SSF53041,IPR011109,PTHR30461,PS51736,cd00338, PF00239
MIKKELSTGPLRVALYIRVSGEEQKIKGLSLEAQQERLEEYARQQGWVVVGIYIDAAKTARKDMRKRSEFQKMINAVKRDEIDLLLFCRLDRWFRSVADYYKIMEILQTHHCDWKTTDEEYDTSTANGRLYINVKLSIAQNEADICSERISVVFDSKVQHGTVVSGNCPFGYVVNEEKRLAIDPDAAAIVRDAFNYYESSISQRGTIRHIRETYGVNWCDATFRRMLAERLYTGAYDSKGRYNENFCEAIISKEQFERVQVLTSRNARSVPSGKVYIFTSILKCAECNHNLVGYVAGPYYYYRCNQHFQRGRCSHNKSVRESYVEEWLFEHLGEELERCKLEWDVQAAERKKKTRSTDKAVLKRKLTKLKELYMDDLITIEEYKKDYQIYTAALQQIPDETPEETPPDFSAVERMLQADFKSIYDSLTREEKRTLWRSVISEIRVDRDNNITGIIFG

SEQ ID NO: 8234 - protein, 457 aa, Unknown
  Description of Unknown: Integrase B8235 sequence
  PTHR30461:SF3,IPR036162,PS51737,IPR011109,PTHR30461, PS00397,PF00239,G3DSA:1.10.10.2600,IPR006119,SSF53041, SM00857,IPR025827,IPR038109,PS51736,cd03768, IPR006118,PF13408,G3DSA:3.40.50.1390,PF07508,Coil
MIKGACYVRVSTDNQLENYSIEEQTDRLRAYCKAKDIHIVKFYTDGGYSGGNLNRPALQQMLTDIDYGIIDLVVVYKLDRLSRSQKDTLTLIEDCFLSKNVDFISINENFDTSTPFGRAMIGILSVFAQLEKDQITERFTMGRIGRAKSGYFHGGPTAPTGYDYIDGNLIVNEYEAMQVRDLYARFLKGYSVYDCWQYMQKKYTTKYGGWKSETLVRNVLKNEVYTGKVKFKGTIYHGNHPAIIPEAQFRQVQELFSSSHRSSDTFKRSPFKASTLLASLIYCGKCGARFHGEHGNYSCYSRTKGDKKYIIDPNCRNKKWKIPELDALVTDYIARLNFSDLENKTPSPQPPIDYSARLGEIDRQIGKLIDLYQVGSIPIETISKKIEILSKEKSTLEEAARQKSTPSSSLKEMITARSTFMSIIKTGTLEEKRACLTLLIDRIVIDDDNVNIILHKI

SEQ ID NO: 8235 - protein, 457 aa, Unknown
  Description of Unknown: Integrase B8236 sequence
  PTHR30461:SF3,SM00857,G3DSA:1.10.10.2600,IPR036162,PF13408, PS51737,IPR025827,G3DSA:3.40.50.1390,IPR006119,IPR038109, SSF53041,IPR011109,PTHR30461,Coil,PS51736, cd00338,PF00239
MECVAYMRVSTEKQAEEGNGLESQKRDIENYCKKNEYIITDYYIDDGYTGANMDRPELQRLISDCVAKRIKCVVTFKLDRLSRSMVDGIYIIERVFQANNILFKCVHDSISYDSPMEQAYTQMMAVFAQLDKNTMMLRMRGGMLERVKQGYWMGGGNTPYCYNYDKEKGILVAIPERKKQANQALDLFIDGYSDAAIKKMLNFKHEHTVKMILTSPVNVGMIPYKGNLYQGLHEPIFDKDRFQLAQEVRKNRRKKKTVSLNKEPNLLTGLCYCGVCGCKMRYQKWGSESDAPKKIYCCSRNKDLFYLPNYNKDCDNSIEWAANIEKQVEAEIMKISLNLSSQKPVAKQSKIEIIQSQIKKEENRRKRLFNLYADGNDDVLDMIKQSDDTISSLKEQLETELSSKEANKKKSVAYENIKKIADVWDNIDKRNKNMILKSIIDKIIIVNGDIEIQLKNF

SEQ ID NO: 8236 - protein, 457 aa, Unknown
  Description of Unknown: Integrase B8237 sequence
  PTHR30461:SF3,SM00857,G3DSA:1.10.10.2600,IPR036162,PF13408, IPR025827,G3DSA:3.40.50.1390,PS51737,IPR006119,IPR038109, SSF53041,IPR011109,PTHR30461,PS51736,cd00338, PF00239
MECVAYMRVSTEKQAEDGNGLESQKRDIDNYCNKNGYIISDYYIDDGYTGANMDRPELQRLISDCVAKRIKCVVAFKLDRLSRSMVDGIYIIERVFQANNILFKCVHDSISYDSPMEQAYTQMMAVFAQLDKNTMMLRMRGGMLERVKQGYWMGGGNTPYCYKYDKEKGILVPIPERKEQANQALDLFIDGYSDVAIKKMLNFTHEHTVKMVLTSPVNIGMIPYKGNLYKGLHEPIFDKDRFQLAQEARKNRRKKKTVSLNKEPNLLTGLCYCGVCGCKMRYQKWGSESDAPKKIYCCSRNKDLFYLPNYNKDCDNSIEWATDIEKQVEAEIIKISLNLSSQKPIAKQSKIDIIQSQIKKEKYRRKRLFNLYADGNDDVLNIIKQSDDTISSLKEQLEIELLSKEANKKKSIAYENIKKIADVWDSIDKRNKNMILKTIIDKIIIVNGDIEIQLKNF

SEQ ID NO: 8237 - protein, 457 aa, Unknown
  Description of Unknown: Integrase B8238 sequence
  SM00857,IPR006118,IPR036162,PF13408,IPR025827, PS51737,G3DSA:3.40.50.1390,Coil,IPR006119,IPR011109, SSF53041,PTHR30461,PS00397,PS51736,cd00338, PF00239
MLKTPPACRAGIYIRVSTEEQHLNGLSLPAQRMALEDYASKNGYIIVGVYADEGISARKSMSHRKGLLRLLEDVRQNKIDMILVTKLDRWFRNIKDYNITEEILREHHCYWKTIFENYDSSTANGQMVINIMLSVNQAECDRTSERIKAVFDYKRAKGMCVTGKCAPYGYIIENGYIKKDPATRSIVEDAIQYYFSCFSIRHTTRYIADKYGENGPSYYKVDKIFHNPKYAGIDKDGKPYCEPYMTRDQYHALLKSRQAKSWSPSGYTYIFSSLITCPICGCKFSGRQRKAVRKNGNVYCDTRYNCMGKFRYHSGASLRESAIEEYLLEHMDSILEAARIDICLEPSGASAKPTRSTQSIQDEINRLNTMYQKGRLSDDYYDQEYIRLTAALSEVSDQKAELQKKNLKCVSERFSGDWKSLYVRLDNEHKRAFWKQTIEEILVDPETRQIKDVKLLL

SEQ ID NO: 8238 - protein, 457 aa, Unknown
  Description of Unknown: Integrase B8239 sequence
  PTHR30461:SF3,SM00857,G3DSA:1.10.10.2600,IPR036162,PF13408, IPR025827,PS51737,G3DSA:3.40.50.1390,IPR006119,IPR038109, SSF53041,IPR011109,PTHR30461,PS51736,cd00338, PF00239
MECVAYMRVSTEKQAEDGNGLESQKRDIDNYCNKNGYIISDYYIDDGYTGANMDRPQLQRLISDCVSKRVKCVVAFKLDRLSRSMVDGIYIIERVFQANNILFKCVHDSISYDSPMEQAYTQMMAVFAQLDKNTMMLRMRGGMLERVKQGYWMGGGNTPYCYKYDKEKGILVPIPERKEQANQALDLFIDGYSDVAIKKMLNFTHEHTVKMVLTSPVNIGMIPYKGNLYKGLHEPIFDKDRFQLAQEARKNRRKKKTVSLNKEPNLLTGLCYCGVCGCKMRYQKWGSESDAPKKIYCCSRNKDLFYLPNYNRDCDNSIEWATDIEKQVEAEIIKISLNLSSQKPIAKQSKIDIIQSQIKKEKYRRKRLFNLYADGNDDVLNIIKQSDDTISSLKEQLEIELLSKEANKKKSIAYENIKKIADVWDSIDKRNKNMILKTIIDKIIIVNGDIEIQLKNF

SEQ ID NO: 8239 - protein, 457 aa, Unknown
  Description of Unknown: Integrase B8240 sequence
  PTHR30461:SF3,SM00857,G3DSA:1.10.10.2600,IPR036162,PF13408, IPR025827,PS51737,G3DSA:3.40.50.1390,IPR006119,IPR038109, PF07508,IPR011109,SSF53041,PTHR30461,Coil, PS51736,cd00338,PF00239
MDNIKRAGLYIRVSHEEQVKDGFSLDAQKDNLIKYAKQNNYKIIDIYADEGISARKSYTKRKEFMRLIEDVKSNKIDIILFIKLDRWFRNVAEYHKIQEILEKYNVGWKATTENYDTTTANGRLYLNIRLAVAQDEADRTSERIKFVFEKKIQDGEYLSGKPTFGYKVENKHLVIDEEEAKVVRFVFETYLKLKSKRATVFATIKEFQRDFTYKVINCIFTNEKYIGKFRGNESYCDPIISKEVFETVQKTLKERRMRYSYSTSNKTNYNYIFSGIVRCPICGACLTGNKSSKINKTTGQKFKYYRCPNHLNQKSCLNSHTVNERNLENYLIENILQKLKDYKVEYQLKQKSKKTPNLNSKNKIENKIKRLQDLYVNELIEIEDYKKQYSKLKDELSQFEVIEEKEKDFTEIDNILNSDFEIIYNKLTPLNKRIFWQSIIEKITPTEDRNIFNIFLK

SEQ ID NO: 8240 - protein, 457 aa, Unknown
  Description of Unknown: Integrase B8241 sequence
  SM00857,IPR006118,IPR036162,PF13408,IPR025827, PS51737,G3DSA:3.40.50.1390,Coil,IPR006119,IPR011109, SSF53041,PTHR30461,PS00397,PS51736,cd00338, PF00239
MLKTPPACRAGIYIRVSTEEQHLNGLSLPAQRMALEDYASKNGYIIVGVYADEGISARKSMSHRKGLLRLLEDVRQNKIDMILVTKLDRWFRNIKDYNITEEILREHHCYWKTIFENYDSSTANGQMVINIMLSVNQAECDRTSERIKAVFDYKRAKGMCVTGKCAPYGYIIENGYIKKDPATRSIVEDAIQYYFSCFSIRHTTRYIADKYGENGPSYYKVDKIFHNPKYAGIDKDGKPYCEPYMTMDQYHTLLKSRQAKSWSPSGYTYIFSSLITCPICGCKFSGRQRKAVRKNGNVYCDTRYNCMGKFRYHSGASLRESAIEKYLLEHMDSILEAARIDICLEPSGVSAKPVRSTQSIQDEINRLNTMYQKGRLSDDYYDQEYIRLTAALSEVSDQKAELQKKNLKCVSERFSGDWKSLYVRLDNEHKRAFWKQTIEEILVDPETRQIKDVKLLL

SEQ ID NO: 8241 - protein, 457 aa, Unknown
  Description of Unknown: Integrase B8242 sequence
  PTHR30461:SF3,SM00857,G3DSA:1.10.10.2600,IPR036162,PF13408, IPR025827,G3DSA:3.40.50.1390,PS51737,IPR006119,IPR038109, IPR011109,SSF53041,PTHR30461,PS51736,cd00338, PF00239
MECVAYMRVSTEKQAEDGNGLESQKRDIDNYCNKNGYIIGDYYIDDGYTGANMDRPELQRLISDCVAKRIKCVVAFKLDRLSRSMVDGIYIIERVFQANNILFKCVHDSISYDSPMEQAYTQMMAVFAQLDKNTMMLRMRGGMLERVKQGYWMGGGNTPYCYKYDKEKGILVPIPERKEQANQALDLFIDGYSDVAIKKMLNFTHEHTVKMVLTSPVNIGMIPYKGNLYKGLHEPIFDKDRFQLAQEARKNRRKKKTVSLNKEPNLLTGLCYCGVCGCKMRYQKWGSESDAPKKIYCCSRNKDLFYLPNYNKDCDNSIEWATDIEKQVEAEIIKISLNLSSQKPIAKQSKIDIIQSQIKKEKYRRKRLFNLYADGNDDVLNIIKQSDDTISSLKEQLEIELLSKEANKKKSIAYENIKKIADVWDSIDKRNKNMILKTIIDKIIIVNGDIEIQLKNF

SEQ ID NO: 8242 - protein, 457 aa, Unknown
  Description of Unknown: Integrase B8243 sequence
  SM00857,G3DSA:1.10.10.2600,IPR036162,PF13408,PS51737, IPR025827,G3DSA:3.40.50.1390,IPR006119,IPR038109,PF07508, SSF53041,IPR011109,PTHR30461,PS51736,cd00338, PF00239
MIKKELSTGPLRVALYIRVSGEEQKIKGLSLEAQQERLEEYARQQGWVVVGIYIDAAKTARKDMRKRSEFQKMINAVKRDEIDLLLFCRLDRWFRSVADYYKIMEILQTHHCDWKTTDEEYDTSTANGRLYINVKLSIAQNEADICSERISVVFDSKVQHGTVVSGNCPFGYVVNEEKRLAIDPDAAAIVRDAFNYYESSISQRGTIRHIRETYGVNWCDATFRRMLAERLYTGVYDSKGRYNENFCEAIISKEQFERVQVLTSRNARSVPSGKVYIFTSILKCAECNHNLVGYVAGPYYYYRCNQHFQRGRCSHNKSVRESYVEEWLFEHLGEELERCKLEWDVQAAERKKKTRSTDKAVLKRKLTKLKELYMDDLITIEEYKKDYQIYTAALQQIPDEAPEETPPDFSAVERMLQTDFKSIYDSLTREEKRTLWRSVISEIRVDRDNNITGIIFG

SEQ ID NO: 8243 - protein, 457 aa, Unknown
  Description of Unknown: Integrase B8244 sequence
  SM00857,G3DSA:1.10.10.2600,IPR036162,PF13408,PS51737, IPR025827,G3DSA:3.40.50.1390,IPR006119,IPR038109,PF07508, IPR011109,SSF53041,PTHR30461,PS51736,cd00338, PF00239
MIKKELSTGPLRVALYIRVSGEEQKIKGLSLEAQQERLEEYARQQGWVVVGIYIDAAKTARKDMRKRSEFQKMINAVKRDEIDLLLFCRLDRWFRSVADYYKIMEILQTHHCDWKTTDEEYDTSTANGRLYINVKLSIAQNEADICSERISVVFDSKVQHGTVVSGNCPFGYVVNEEKRLAIDPDAAAIVRDAFNYYESSISQRGTIRHIRETYGVNWCDATFRRMLAERLYTGVYDSNGRYNENFCEAIISKEQFERVQVLTSRNARSVPSGKVYIFTSILKCAECNHNLVGYVAGPYYYYRCNQHFQRGRCSHNKSVRESYVEEWLFEHLGEELERCKLEWDVQAAERKKKTRSTDKAVLKRKLTKLKELYMDDLITIEEYKKDYQIYTAALQQIPDEAPEETPPDFSAVERMLQADFKSIYDSLTREEKRTLWRSVISEIRVDRDNNITGIIFG

SEQ ID NO: 8244 - protein, 457 aa, Unknown
  Description of Unknown: Integrase B8245 sequence
  PTHR30461:SF3,SM00857,G3DSA:1.10.10.2600,IPR036162,PF13408, PS51737,G3DSA:3.40.50.1390,IPR025827,IPR006119,IPR038109, SSF53041,IPR011109,PTHR30461,PS51736,cd00338, PF00239
MECVAYMRVSTEKQAEDGNGLESQKRDIDNYCNKNGYIISDYYIDDGYTGANMDRPELQRLISDCVAKRIKCVVAFKLDRLSRSMVDGIYIIERVFQANNILFKCVHDSISYDSPMEQAYTQMMAVFAQLDKNTMMLRMRGGMLERVKQGYWMGGGNTPYCYKYDKEKGILVPIPERKEQANQALDLFIDGYSDVAIKKMLNFTHEHTVKMVLTSPVNIGMIPYKGNLYKGLHEPIFDKDRFQLAQEARKNRRKKKTVSLNKEPNLLTGLCYCGVCGCKMRYQKWGSESDAPKKIYCCSRNKDLFYLPNYNKDCDNSIEWATDIEKQVEAEIIKISLNLSSQKPIAKQSKIDIIQSQIKKEKYRRNRLFNLYADGNDDVLDMIKQSDNTISSLKEQLETELSSKEANKKKSIAYENIKKIADVWDSIDKRNKNMILKTIIDKIIIVNGDIEIQLKNF

SEQ ID NO: 8245 - protein, 457 aa, Unknown
  Description of Unknown: Integrase B8246 sequence
  PTHR30461:SF3,SM00857,G3DSA:1.10.10.2600,IPR036162,PF13408, IPR025827,G3DSA:3.40.50.1390,PS51737,IPR006119,IPR038109, SSF53041,IPR011109,PTHR30461,PS51736,cd00338, PF00239
MECVAYMRVSTEKQAEDGNGLESQKRDIDNYCNKNGYIISDYYIDDGYTGANMDRPELQRLISDCVAKRIKCVVAFKLDRLSRSMVDGIYIIERVFQANNILFKCVHDSISYDSPMEQAYTQMMAVFAQLDKNTMMLRMRGGMLERVKQGYWMGGGNTPYCYKYDKEKGILVSIPERKEQANQALDLFIDGYSDVAIKKMLNFTHEHTVKMVLTSPVNIGMIPYKGNLYKGLHEPIFDKDRFQLAQEARKNRRKKKTVSLNKEPNLLTGLCYCGVCGCKMRYQKWGSESDAPKKIYCCSRNKNLFYLPNYNKDCDNSTEWAIDIEKQVEAEIIKISLNLSSQKPIAKQSKIDIIQSQIKKEKYRRNRLFNLYADGNDDVLDMIKQSDNTISSLKEQLETELSSKEANEKKSIAYENIKKIADVWDSIDKRNKNMILKTIIDKIIIVNGDIEIQLKNF

SEQ ID NO: 8246 - protein, 457 aa, Unknown
  Description of Unknown: Integrase B8247 sequence
  SM00857,IPR006118,IPR036162,PF13408,PS51737, G3DSA:3.40.50.1390,IPR025827,Coil,IPR006119,IPR011109, SSF53041,PTHR30461,PS00397,PS51736,cd00338, PF00239
MLKTPPACRAGIYIRVSTEEQHLNGLSLPAQRMALEDYANKNGYIIVGVYADEGISARKSMSHRKGLLRLLEDVRQNKIDMILVTKLDRWFRNIKDYNITEEILREHHCYWKTIFENYDSSTANGQMVINIMLSVNQAECDRTSERIKAVFDYKRAKGMCVTGKCAPYGYIIENGYIKKDPATRSIVEDAIQYYFSCFSIRHTTRYIADKYGENGPSYYKVDKIFHNPKYAGIDKDGKPYCEPYMTMDQYHALLKSRQAKSWSPSGYTYIFSSLITCPICGCKFSGRQRKAIRKNGNVYCDTRYNCMGKFRYHSGASLRESAIEEYLLEHMDSILEAARIDICLEPSGASAKPARSTQSIQDEINRLNTMYQKGRLSDDYYDQEYIRLTAALSEVSDQKAELQKKNLKCVSERFSGDWKSLYVRLDNEHKRAFWKQTIEEILVDPETRQIKDVKLLL

SEQ ID NO: 8247 - protein, 457 aa, Unknown
  Description of Unknown: Integrase B8248 sequence
  SM00857,G3DSA:1.10.10.2600,IPR036162,PF13408,PS51737, G3DSA:3.40.50.1390,IPR025827,IPR006119,IPR038109,SSF53041, IPR011109,PTHR30461,Coil,PS51736,cd00338, PF00239
MKKAKSETTLVRAALYIRVSGEEQKIKGLSLEAQEERLRDFCKERGWLICGVFIDAAKTARKNIKKRVEFQNMIDGVKQDEYDVLVFCRLDRWFRSVADYYKIMDILNAHNCGWVTSDEDYDTTTANGRLYINVKLSISQNESDICSERIGVVFDSKVQHGTVLSGNAPFWLKVQDKRYVLDPEKVEIIRDALDYFEKEMTQRGTVTYIREKYGINWCYASFARMIRDKLLIGVYDKNGRYNENFCPAAISKQQFDNIQRILGKNVKRTPAGRIYIFTSVLKCYECGHNLCGQLNKGIYYYRCNDFALRKRCTHNRFIREDKIEKYLLENLERELNKCELEWTMKAKKKQNNPVIIQRATLKRKLSKLKDLYLNELIELDEYKKDFEMYSNALDRLNDQIEKEEPAPNFKRVHELLDNNFTEMYKSLDRKEKRMFWQSVLKEVVIDRDLNIVSVSFA

SEQ ID NO: 8248 - protein, 457 aa, Unknown
  Description of Unknown: Integrase B8249 sequence
  SM00857,G3DSA:1.10.10.2600,IPR036162,PF13408,PS51737, IPR025827,G3DSA:3.40.50.1390,IPR006119,IPR038109,PF07508, IPR011109,SSF53041,PTHR30461,PS51736,cd00338, PF00239
MIKKELSTGPLRVALYIRVSGEEQKIKGLSLEAQQERLEEYARQQGWVVVGIYIDAAKTARKDMRKRSEFQKMINAVKRDEIDLLLFCRLDRWFRSVADYYKIMEILQTHHCDWKTTDEEYDTSTANGRLYINVKLSIAQNEADICSERISVVFDSKVQHGTVVSGNCPFGYVVNEEKRLSIDPDAAAIVRDAFNYYESSISQRGTIRHIRETYGVNWCDATFRRMLAERLYTGVYDSKGRYNENFCEAIISKEQFERVQVLTSRNARSVPSGKVYIFTSILKCAECNHNLVGYVAGPYYYYRCNQHFQRGRCSHNKSVRESYVEEWLFEHLGEELERCKLEWDVQAAERKKKTRSTDKAVLKRKLTKLKELYMDDLITIEEYKKDYQIYTAALQQIPDEAPEETPPDFSAVERMLQADFKSIYDSLTREEKRTLWRSVISEIRVDRDNNITGIIFG

SEQ ID NO: 8249 - protein, 457 aa, Unknown
  Description of Unknown: Integrase B8250 sequence
  SM00857,G3DSA:1.10.10.2600,IPR036162,PS51737,G3DSA:3.40.50.1390, IPR006119,IPR038109,PF07508,SSF53041,IPR011109, PTHR30461,Coil,PS51736,cd00338,PF00239
MNKITAIYCRESTEKQNISTLVDMCVEHAKKLGLKNIKVYDDVASGYTHERDEYIQLKNDIQDNKIETLVLYESSRLTRDELEHHIFYRLLKVYDVKLYTVTHGWIDLNNEDDTFLTSLLNLLDAREGRKTAKRSKDRKLEIARQGYWTGGTPPLGYRTDEHKVLQIVPEEAEVVKEVFKMFLEGNTRNNIAIHFGLDPKKIRRMLINPTYIGKIRYRLKIVKNKKVIKNPNDPLLFPGKHNPIISELTFNLTQNKLSKTIRETNSNNIYIFKDLITCACGAKMHKISTQNAYFCPVATKKDRECSVHMLTENYLIENIFPVLKELINNLDVDNLQNTSDSSLDKQLKLYSNEISNIEKQQEKLTRQLLNETVSEELFEKLQIELKEKKESILTRITDLQNKINNRKNNKSNSEILKKYWKKIENEKDPKKLNTFLKIIINDIRLVNDYRFYINLKI

SEQ ID NO: 8250 - protein, 457 aa, Unknown
  Description of Unknown: Integrase B8251 sequence
  SM00857,G3DSA:1.10.10.2600,IPR036162,PF13408, IPR025827,G3DSA:3.40.50.1390,PS51737,IPR006119, IPR038109,PF07508,IPR011109,SSF53041, PTHR30461,PS51736,cd00338,PF00239
MAKKVTVIPAKQVRANSTKAISAVRKTRVAAYCRVSTDAEEQLNSFDNQVEYYTRYINENPAYEMVGIYADEGISGTNTKKRKEFQRMIADCEARKIDLVIVKSISRFARNTQDCLTYSRKLKNLGIGIFFEKEHINTLDATGELLFTILSSLAQDESRNISENCKWGIRSKFQEGKPHINTYKFMGFDKNEEGRLVINEEEAKVVRRIFQEFLEGYNPADIARRLNEDGVPGVSGKPKWITPTILGMLQQEKYMGDSILQKWVTTDFLMHSLRRNTGQVAQYYVENSHPAIIDKDIWNAVQEELERREIYCQNYHLSMYAYRADKNPLNGKIVCGHCGHTFARKSWTNRGIAYWTCKSDTCKGNIKEEVIHKAFITAWNHTVKNKDRFMERWQQALDGEDSLARLRAKQMIDLTNEGTINTLVPELMLMVLGKITVHDLEHFTVSFLDGTEKEILV

SEQ ID NO: 8251 - protein, 457 aa, Unknown
  Description of Unknown: Integrase B8252 sequence
  SM00857,G3DSA:1.10.10.2600,IPR036162,PF13408,PS51737, G3DSA:3.40.50.1390,IPR025827,IPR006119,IPR038109,SSF53041, IPR011109,PTHR30461,Coil,PS51736,cd00338, PF00239
MKKAKSETTLVRAALYIRVSGEEQKIKGLSLEAQEERLRDFCKERGWLICGVFIDAAKTARKNIKKRVEFQNMIDGVKQDAYDVLVFCRLDRWFRSVADYYKIMDILNAHNCGWVTSDEDYDTTTANGRLYINVKLSISQNESDICSERIGVVFDSKVQHGTVLSGNAPFWLKVQDKRYVLDPEKVEIIRDALDYFEKEMTQRGTVTYIREKYGINWCYASFARMIRDKLLIGVYDKNGRYNENFCPAAISKQQFDNIQRILGKNVKRTPAGRIYIFTSVLKCYECGHNLCGQLNKGIYYYRCNDFALRKRCTHNRFIREDKIEKYLLENLERELNKCELEWTMKAKKKQNNPVIIQRATLKRKLSKLKDLYLNELIELDEYKKDFELYSNALDRLNDQIEKEEPAPNFKRVHELLDNNFTEMYKSLDRKEKRMFWQSVLKEVVIDRDLNIVSVSFA

SEQ ID NO: 8252 - protein, 457 aa, Unknown
  Description of Unknown: Integrase B8253 sequence
  SM00857,IPR006118,IPR036162,PF13408,PS51737, G3DSA:3.40.50.1390,IPR025827,Coil,IPR006119,IPR011109, SSF53041,PTHR30461,PS00397,PS51736,cd00338, PF00239
MLKTPPACRAGIYIRVSTEEQHLNGLSLPAQRMALEDYASKNGYIIVGVYADEGISARKSMSHRKGLLCLLEDVRQNKIDMILVTKLDRWFRNIKDYNITEEILREHHCYWKTIFENYDSSTANGQMVINIMLSVNQAECDRTSERIKAVFDYKRAKGMCVTGKCAPYGYIIENGYIKKDPATRSIVEDAIQYYFSCFSIRHTTRYIADKYGENGPSYYKVDKIFHNPKYAGIDKDGKPYCEPYMTMDQYHALLKSRQAKSWSPSGYTYIFSSLITCPICGCKFSGRQRKAVRKNGNVYCDTRYNCMGKFRYHSGASLRESAIEEYLLEHMDSILEAARIDICLEPSGASAKPARSTQSIQDEINRLNTMYQKGRLSDDYYDQEYIRLTAALSEVSDQKAELQKKNLRCVSERFSGDWKSLYVRLDNEHKRAFWKQTIEEILVDPETRQIKDVKLLL

SEQ ID NO: 8253 - protein, 457 aa, Unknown
  Description of Unknown: Integrase B8254 sequence
  SM00857,IPR006118,IPR036162,PF13408,PS51737, G3DSA:3.40.50.1390,IPR025827,Coil,IPR006119,IPR011109, SSF53041,PTHR30461,PS00397,PS51736,cd00338, PF00239
MLKTPPACRAGIYIRVSTEEQHLNGLSLPAQRMALEDYASKNGYIIVGVYADEGISARKSMSHRKGLLRLLEDVRQNKIDMILVTKLDRWFRNIKDYNITEEILREHHCYWKTIFENYDSSTANGQMVINIMLSVNQAECDRTSERIKAVFDYKRAKGMCVTGKCAPYGYIIENGYIKKDPATRSIVEDAIQYYFSCFSIRHTTRYIADKYGENGPSYYKVDKIFHNPKYAGIDKDGKPYCEPYMTMDQYHALLKSRQAKSWSPSGYTYIFSSLITCPICGCKFSGRQRKAVRKNGNVYCDTRYNCMGKFRYHSGASLRESAIEEYLLEHMDSILEAARIDICLEPSGASAKPARSTQSIQDEINRLNTMYQKGRLSDDYYDQEYIRLTAALSEVSDQKAELQKKNLRCVSERFSGDWKSLYVRLDNEHKRAFWKQTIEEILVDPETRQIKDVKLLL

SEQ ID NO: 8254 - protein, 457 aa, Unknown
  Description of Unknown: Integrase B8255 sequence
  SM00857,IPR006118,IPR036162,PF13408,PS51737, G3DSA:3.40.50.1390,Coil,IPR025827,IPR006119,IPR011109, SSF53041,PTHR30461,PS00397,PS51736,cd00338, PF00239
MLKTPPACRAGIYIRVSTEEQHLNGLSLPAQRMALEDYANKNGYIIVGVYADEGISARKSMSHRKGLLRLLEDVRQNKIDMILVTKLDRWFRNIKDYNITEEILREHHCYWKTIFENYDSSTANGQMVINIMLSVNQAECDRTSERIKAVFDYKRAKGMCVTGKCAPYGYIIENGYIKKDPATRSIVEDAIQYYFSCFSIRHTTRYIADKYGENGPSYYKVDKIFHNPKYAGIDKDGKPYCEPYMTMDQYHALLKSRQAKSWSPSGYTYIFSSLITCPICGCKFSGRQRKAVRKNGNVYCDIRYNCMGKFRYHSGASLRESAIEEYLLEHMDSILEAARIDICLEPSGASAKPARSTQSIQDEINRLNTMYQKGRLSDDYYDQEYIRLTAALSEVSDQKAELQKKNLRCVSERFSGDWKSLYVRLDNEHKRAFWKQTIEEILVDPETRQIKDVKLLL

SEQ ID NO: 8255 - protein, 457 aa, Unknown
  Description of Unknown: Integrase B8256 sequence
  PTHR30461:SF3,cd00338,SM00857,G3DSA:1.10.10.2600,IPR036162, PF13408,IPR025827,G3DSA:3.40.50.1390,PS51737,IPR006119, IPR038109,SSF53041,IPR011109,PTHR30461,PS51736, Coil,PF00239
MECVAYMRVSTEKQAEDGNGLESQKRDIDNYCNKNGYIISDYYIDDGYTGANMDRPQLQRLISDCVSKRVKCVVAFKLDRLSRSMVDGIYIIERVFQANNILFKCVHDSISYDSPMEQAYTQMMAVFAQLDKNTMMLRMRGGMLERVKQGYWMGGGNTPYCYKYDREKGILVPIPERKKQANQALDLFIDGYSDVAIKKMLNFTHEHTVKMVLTSPVNIGMIPYKGNLYKGLHEPIFDKDRFQLAQEARKNRRKKKTVSLNKEPNLLTGLCYCGVCGCKMRYQKWGSESDAPKKIYCCSRNKDLFYLPNYNKDCDNSTEWAVDIEKQVEAEIMKISLNLSSQKSVAKQSKIEIIQAQIQKEEKRRKRLFNLYADGNDDVLDMIKQSDNTISSLKEQLETELSSKEANKKKSIAYENIKKIADVWDSIDKRNKNMILKTIIDKIIIVNGDIEIQLKNF

SEQ ID NO: 8256 - protein, 457 aa, Unknown
  Description of Unknown: Integrase B8257 sequence
  PTHR30461:SF3,SM00857,G3DSA:1.10.10.2600,IPR036162,PS51737, G3DSA:3.40.50.1390,IPR006119,IPR038109,PF07508,IPR011109, SSF53041,PTHR30461,Coil,PS51736,cd00338, PF00239
MKIGIYTRVSTEEQAVHGVSLIAQENALMEYAKKHDYKVVDVYSDEGLSATTLDRPGLQRLLEDVRQGRIDLILITKLDRLSRGVANYYKIADVLENNNCGWKTILEDYDSTTASGRLHINIMLSVAENEAAVTRERINFVFKDKLSKGEIISGQKMFGYKIENKRYVIDPYEAEIVKYIFDDFLVTSSKGKTLKHVRDKFDIDMSFWTISNILKRKLYIGIYVSKGKEYPNFAPNIIPEDVYYNVQSLLNANTKFAKDPNKVFLFSKLIKCSKFKRNLTHTNMNTKYGVYSYIKCNSVCPYYKNGECNKRLPGMRVDKLEKDLVDLLVSQLTKEYKLENHIKTNNCANASYEKKVRKIKRKMSKLEDMYLDDLISKDKYKKQYNDCKSELEYYNTLIAENNKTRFASIDQDFVEFINTSDFKTLYYSLDNSKKHTFWASLVECIEVSETSHNLIFK

SEQ ID NO: 8257 - protein, 457 aa, Unknown
  Description of Unknown: Integrase B8258 sequence
  PTHR30461:SF3,cd00338,SM00857,IPR006118,IPR036162, PF13408,IPR025827,G3DSA:3.40.50.1390,PS51737,IPR006119, IPR011109,SSF53041,PTHR30461,PS00397,PS51736, Coil,PF00239
MPNKIERCAIYIRVSTTEQMMHGKSLEAQKEYLTNYAKEHNMAVVGVYADEGLKKRKAIHSLLQDVQAGKIDVIIFWRIDRWFRNLSDFYKVQDILDSHNVRWISTSEPGINMETRDGRLQLNVVLSIGQNEVDTTSERIKFVNEASIRSGKLIFGDVNMGYGYKSGIVDGQKRMVKDPDREHVVDAFYKYFFKHQNKCATLRYIQETYDPDFSFGIMRTLLSSEFYKGTYRGFPYCPAYLTEDEWNKLQKIQKRNVKATPSGRIYLFAGMIRCPECGQLLCGTGCSSIINRKTGAKRTYCYYRCNRAMIDHICSYRHRLSQNLVENYLLDNLEDEYKNYKVKCEKIEKEKEKQKKKLSPEKLRKELDRLNFLFQKGRIDWDYYNEEYGRVESELNDLQSVLPEPVTNYGYLEELLDTDFRTMYDQLSQENRRAFWRSIIQEIHVNEDHAITSVDFL

SEQ ID NO: 8258 - protein, 457 aa, Unknown
  Description of Unknown: Integrase B8259 sequence
  PTHR30461:SF3,cd00338,SM00857,G3DSA:1.10.10.2600,IPR036162, PF13408,IPR025827,G3DSA:3.40.50.1390,PS51737,IPR006119, IPR038109,SSF53041,IPR011109,PTHR30461,PS51736, Coil,PF00239
MECVAYMRVSTEKQAEDGNGLESQKRDIDNYCNKNGYIISDYYIDDGYTGANMDRPELQRLISDCVAKRIKCVVAFKLDRLSRSMVDGIYIIERVFQANNILFKCVHDSISYDSPMEQAYTQMMAVFAQLDKNTMMLRMRGGMLERVKQGYWMGGGNTPYCYKYDKEKGILVPIPERKEQANQALDLFIDGYSDVAIKKMLNFTHEHTVKMVLTSPVNIGMIPYKGNLYKGLHEPIFDKDRFQLAQEARKNRRKKKTVSLNKEPNLLTGLCYCGVCGCKMRYQKWGSESDAPKKIYCCSRNKDLFYLPNYNKDCDNSTEWAVDIEKQVEAEIMKISLNLSSQKPVAKQSKIEIIQAQIQKEEKRRKRLFNLYADGNDDVLDMIKQSDDTISSLKEQLETELSSKEANKKKSIAYENIKKIADVWDSIDKRNKNMILKTIIDKIIIVNGDIEIQLKNF

SEQ ID NO: 8259 - protein, 457 aa, Unknown
  Description of Unknown: Integrase B8260 sequence
  SM00857,G3DSA:1.10.10.2600,IPR036162,PF13408,IPR025827, PS51737,G3DSA:3.40.50.1390,IPR006119,IPR038109,IPR011109, SSF53041,PF00239,PTHR30461,PS51736,Coil, cd00338
MKKKEIISGPLRVALYIRVSGEEQKIKGLSLKAQQERLVAFAKEQGWIVTGIYIDAAKTARKNMYKRSEFQRMLDSVKRNEVDLLLFCRLDRWFRSVADYYKIMEILEAHNCGWKTIDEEYDTSTANGRLYINVKLSIAQNEADIDAERISVVFDSKIQNGTVLSGKCPFWIRITEEKKYELIPEKVAILQDAFDYFEQSTSQRATIKHIRETYGVNWCDATFRRMLHDKLAIGVYDKNGRYNPNFCPAAIRKEQFNRVQELCKRNSKAYPKGKVYFFTGILVCEECRHNLVGYQAREYYYYRCNQHFQRGRCTHNHSVREDYIESWLFEHLEEEINKYEIAWNVQNAKLKKDGFNIERAVLKRKLTKLKELYVNDLINLEDYKKDFEMYSAALSKMEEAQVIEKRVDLSGVRKIVSKNFRTIYNTLSRAEKRSLWKSVLREIRVDNDRNITGISFF

SEQ ID NO: 8260 - protein, 457 aa, Unknown
  Description of Unknown: Integrase B8261 sequence
  SM00857,G3DSA:1.10.10.2600,IPR036162,PF13408,PS51737, G3DSA:3.40.50.1390,IPR025827,IPR006119,IPR038109,SSF53041, IPR011109,PTHR30461,Coil,PS51736,cd00338, PF00239
MKKAKSETTLVRAALYIRVSGEEQKIKGLSLEAQEERLRDFCKERGWLICGVFIDAAKTARKNIKKRVEFQNMIDGVKQDAYDVLVFCRLDRWFRSVADYYKIMDILNAHNCGWVTSDEDYDTTTANGRLYINVKLSISQNESDICSERIGVVFDSKVQHGTVLSGNAPFWLKVQDKRYVLDPEKVEIIRDALDYFEKEMTQRGTVTYIREKYGINWCYASFARMIRDKLLIGVYDKNGRYNENFCPAAISKQQFDNIQRILGKNVKRTPAGRIYIFTSVLKCYECGHNLCGQLNKGIYYYRCNDFALRKRCTHNRFIREDKIEKYLLENLERELNKCELEWTMKAKKKQNNPVIIQRATLKRKLSKLKDLYLNELIELDEYKKDFEMYSNALDRLNDQIEKEEPAPNFKRVHELLDNNFTEMYKSLDRKEKRMFWQSVLKEVVIDRDLNIVSVSFA

SEQ ID NO: 8261 - protein, 456 aa, Unknown
  Description of Unknown: Integrase B8262 sequence
  PTHR30461:SF3,SM00857,G3DSA:1.10.10.2600,IPR036162,PF13408, IPR025827,G3DSA:3.40.50.1390,PS51737,IPR006119,IPR038109, PF07508,IPR011109,SSF53041,PF00239,PTHR30461, PS51736,Coil,cd00338
MRNKEIAPALVRVALYIRVSGEEQKIKGLSLEAQQERLEAYARERGWVIVGIYIDAAKTARKNIHKRTEFQRMMDSVKRDEVDILLFARLDRWFRSVADYYKVMEVLQAHNCDWKTTDEEYDTTTANGRLYINVKLSIAQNEADIDGERIDVVFDSKIAHGTVVSGSAPFGFRVNEEKRLEVVPEDAAIVQDAFNYFENTVSQRATVRYVRETYGVNWCDATFRRMLKEKLYTGVYDRGGRYNDQFCPAIISRQQFDRVQALLTRNVRSAPSGKVYIFTSILTCAECGHKLVGYKSSDYFYYRCNQHFQRGRCSHNHSAREDVVEQWLFEHLGEELERCQLEWGVEAAKKKASIARTDKAALKRKLTKLKELYVNDLIDIEDYKKDYQIYVSALNQIPEPAQEAPPDFAAVRRLLDNSFRTIYDTLTREEKRTLWRSVIKEIRIDNDQNITGVVFG

SEQ ID NO: 8262 - protein, 456 aa, Unknown
  Description of Unknown: Integrase B8263 sequence
  PTHR30461:SF3,IPR036162,PS51737,IPR011109,PTHR30461, PS00397,PF00239,G3DSA:1.10.10.2600,IPR006119,SSF53041, cd00338,SM00857,IPR025827,IPR038109,PS51736, IPR006118,PF13408,G3DSA:3.40.50.1390,Coil
MKYVACYCRVSTDEQAKFGFSIQAQKDALEKYCKENGYKYEFYIDEGISASSMKKRKALNEMLSKCNVFDIILFTKLDRLSRNVLDANNINKLLIDNKCTMKAIDEDDIDTSTADGTFIFNLKVSLAQREIGKTSERIKFVFQNKREKGEVTSGTKKYGYDIVDKKFVINKKEAENILNLYNEFINNNGNLKETYKYFIQHFENKGYDAMIHYLHDTSYIGKYKLYRKNIYIDNYIPHIMNNALFYSVQNLFKKREKTSIKTSNISLFSGLIFCGICNTRMCKKQDNRSTKKLIRYCCDNASRRKVGSMEYKCDNHKLIREEYIEKYLLDNIKSIAKNYINANVVISNQTTKNDNSNEIKRIENKILKLKDLYLDDLIDKKTYRSDYESLNKKMNELKNEAISTPQRDSSKLKEIMNLDIYKIYCLFSDEEKRTFWLKIIDKIYIENGKIKEITFS

SEQ ID NO: 8263 - protein, 456 aa, Unknown
  Description of Unknown: Integrase B8264 sequence
  PTHR30461:SF3,SM00857,G3DSA:1.10.10.2600,IPR036162,PF13408, IPR025827,G3DSA:3.40.50.1390,PS51737,IPR006119,IPR038109, PF07508,IPR011109,SSF53041,PTHR30461,PS51736, cd00338,PF00239
MRNKEIAPALVRVALYIRVSGEEQKIKGLSLEAQQERLEAYARERGWVIVGIYIDAAKTARKNIHKRTEFQRMMEAVKRDEVDILLFARLDRWFRSVADYYKVMEILQAHNCDWKTTDEEYDTTTANGRLYINVKLSIAQNEADIDGERIDVVFDSKIAHGTVVSGSSPFGFRVSEEKRLEIVPEDAAIVQDAFNYFENTVSQRATTKYIREKYGVNWCYATFHRMLIEELYTGVYNRGGRYNANFCPAIIQREQFDRVQALLKKNVRRAPSGRVYIFTSVLTCEECRHKLNGYISQGIYYYRCNQHLQRGRCTHNHSVREDRVEQWLFDHLGEELERCKLEWEVQAAEKKRSVTSRDKAALRRKLTKLKELYVNELIDIDDYKKDYEIYTAALNQIPDTTQEAPPDFAAVEKLLQKDFRKIYDTLTREEKRTLWRSVIKEIRIDNDQNITGVVFG

SEQ ID NO: 8264 - protein, 456 aa, Unknown
  Description of Unknown: Integrase B8265 sequence
  PTHR30461:SF3,SM00857,G3DSA:1.10.10.2600,IPR036162,PF13408, PS51737,G3DSA:3.40.50.1390,IPR025827,IPR006119,IPR038109, PF07508,IPR011109,SSF53041,PTHR30461,Coil, PS51736,cd00338,PF00239
MRNKEIAPALVRVALYIRVSGEEQKIKGLSLEAQQERLEAYARERGWVIVGIYIDAAKTARKNIHKRTEFQRMMDSVKRDEVDILLFARLDRWFRSVADYYKVMEILQAHNCDWKTTDEEYDTTTANGRLYINVKLSIAQNEADIDGERIDVVFDSKIAHGTVVSGSAPFGFRVNEEKRLEVVPEDAAIVQDAFNYFENTVSQRATVRYVRETYGVNWCDATFRRMLKEKLYTGVYDRGGRYNDQFCPAIINRQQFDRVQALLTRNVRSAPSGKVYIFTSILTCAECGHKLVGYKSSDYYYYRCNQHFQRGRCSHNHSAREDVVEQWLFEHLGEELERCQLEWDVEAAKKKASVARTDKAALKRKLTKLKELYVNDLIDIEDYKKDYQIYVSALNQIPEPAQEAPPDFAAVRRLLDNSFRTIYDTLTREEKRTLWRSVIKEIRIDNDQNITGVVFG

SEQ ID NO: 8265 - protein, 456 aa, Unknown
  Description of Unknown: Integrase B8266 sequence
  PTHR30461:SF3,SM00857,G3DSA:1.10.10.2600,IPR036162,PF13408, IPR025827,PS51737,G3DSA:3.40.50.1390,IPR006119,IPR038109, PF07508,SSF53041,IPR011109,PTHR30461,Coil, PS51736,cd00338,PF00239
MRNKEIAPALVRVALYIRVSGEEQKIKGLSLEAQQERLEAYARERGWVIVGIYIDAAKTARKNIHKRTEFQRMMDSVKRDEVDILLFARLDRWFRSVADYYKVMEVLQAHNCDWKTTDEEYDTTTANGRLYINVKLSIAQNEADIDGERIDVVFDSKIAHGTVVSGSSPFGFRVSEEKRLEIVPEGAAIVQDAFNYFENTVSQRATVRYIRETYGVNWCDATFRRMLKEKLYTGVYDRGGRYNDQFCPAIISRQQFDRVQALLTRNVRSAPSGKVYIFTSILTCAECGHKLVGYKSSDYFYYRCNQHFQRGRCSHNHSAREDVVEQWLFEHLGEELDRCQLEWDVEAAKKKASVARTDKAALKRKLTKLKELYVNDLIDIEDYKKDYQIYVSALNQIPEPAQEAPPDFAAVRRLLDNSFRTIYDTLTREEKRTLWRSVIKEIRIDNDQNITGVVFG

SEQ ID NO: 8266 - protein, 456 aa, Unknown
  Description of Unknown: Integrase B8267 sequence
  PTHR30461:SF3,SM00857,G3DSA:1.10.10.2600,IPR036162,PF13408, PS51737,IPR025827,G3DSA:3.40.50.1390,IPR006119,IPR038109, PF07508,IPR011109,SSF53041,PTHR30461,Coil, PS51736,cd00338,PF00239
MRNKEIAPALVRVALYIRVSGEEQKIKGLSLEAQQERLEAYARERGWVIVGIYIDAAKTARKNIHKRTEFQRMMDSVKRDEVDILLFARLDRWFRSVADYYKVMEILQAHNCDWKTTDEEYDTTTANGRLYINVKLSIAQNEADIDGERIDVVFDSKIAHGTVVSGSAPFGFRVNEEKRLEVVPEDAAIVQDAFNYFENTVSQRATVRYVRETYGVNWCDATFRRMLKEKLYTGVYDRGGRYNDQFCPAIINRQQFDRVQALLTRNVRSAPSGKVYIFTSILTCAECGHKLVGYKSSDYFYYRCNQHFQRGRCSHNHSAREDVVEQWLFEHLGEELDRCQLEWDVEAAKKKASVARTDKAALKRKLTKLKELYVNDLIDIEDYKKDYQIYVSALNQIPEPAQEAPPDFAAVRRLLDNSFRTIYDTLTREEKRTLWRSVIKEIRIDNDQNITGVVFG

SEQ ID NO: 8267 - protein, 456 aa, Unknown
  Description of Unknown: Integrase B8268 sequence
  PTHR30461:SF3,SM00857,G3DSA:1.10.10.2600,IPR036162,PF13408, IPR025827,G3DSA:3.40.50.1390,PS51737,IPR006119,IPR038109, PF07508,SSF53041,IPR011109,PTHR30461,Coil, PS51736,cd00338,PF00239
MYKKELAPDLVRVALYIRVSGEEQKIKGLSLEAQQERLEAYARERGWVIVGIYIDAAKTARKNIHKRTEFQRMMDSVKRDEVDILLFARLDRWFRSVADYYKVMEILQAHNCDWKTTDEEYDTTTANGRLYINVKLSIAQNEADIDGERIDVVFDSKIAHGTVVSGSAPFGFRVNEEKRLEVVPEDAAIVQDAFNYFENTVSQRATVRYVRETYGVNWCDATFRRMLKEKLYTGVYDRGGRYNDQFCPAIIDRQQFDRVQALLTRNVRSAPSGKVYIFTSILTCAECGHKLVGYKSSDYYYYRCNQHFQRGRCSHNHSAREDVVEQWLFEHLGEELERCQLEWDVEAAKKKASVARTDKAALKRKLTKLKELYVNDLIDIEDYKKDYQIYVSALNQIPEPAQEAPPDFAAVRRLLDNSFRTIYDTLTREEKRTLWRSVIKEIKIDNDQNITGVVFG

SEQ ID NO: 8268 - protein, 456 aa, Unknown
  Description of Unknown: Integrase B8269 sequence
  PTHR30461:SF3,SM00857,G3DSA:1.10.10.2600,IPR036162,PF13408, PS51737,IPR025827,G3DSA:3.40.50.1390,IPR006119,IPR038109, PF07508,IPR011109,SSF53041,PTHR30461,Coil, PS51736,cd00338,PF00239
MYKKELAPDLVRVALYIRVSGEEQKIKGLSLEAQQERLEAYARERGWVIVGIYIDAAKTARKNIHKRTEFQRMMDSVKRDEVDILLFARLDRWFRSVADYYKVMEVLQAHNCDWKTTDEEYDTTTANGRLYINVKLSIAQNEADIDGERIDVVFDSKIAHGTVVSGSAPFGFRVNEEKRLEVVPEDAAIVQDAFNYFENTVSQRATVRYVRETYGVNWCDATFRRMLKEKLYTGVYDRGGRYNDQFCPAIINRQQFDRVQALLTRNVRSAPSGKVYIFTSILTCAECGHKLVGYKSSDYFYYRCNQHFQRGRCSHNHSACEDVVEAWLFDHLGEELERCQLEWDVEAAKKKASVARTDKAALKRKLTKLKELYVNDLIDIEDYKKDYQIYVSALNQIPEPVQEAPPDFAAVRRLLDNSFRTIYDTLTREEKRTLWRSVIKEIRIDNDQNITGVVFG

SEQ ID NO: 8269 - protein, 456 aa, Unknown
  Description of Unknown: Integrase B8270 sequence
  PTHR30461:SF3,SM00857,G3DSA:1.10.10.2600,IPR036162,PF13408, IPR025827,G3DSA:3.40.50.1390,PS51737,IPR006119,IPR038109, PF07508,SSF53041,IPR011109,PTHR30461,Coil, PS51736,cd00338,PF00239
MRNKEIAPALVRVALYIRVSGEEQKIKGLSLEAQQERLEAYARERGWVIVGIYIDAAKTARKNIHKRTEFQRMMDSVKRDEVDILLFARLDRWFRSVADYYKVMEILQAHNCDWKTTDEEYDTTTANGRLYINVKLSIAQNEADIDGERIDVVFDSKIAHGTVVSGSAPFGFRVNEEKRLEVVPEDAAIVQDAFNYFENTVSQRATVRYVRETYGVNWCDATFRRMLKEKLYTGVYDRGGRYNDQFCPAIIDRQQFDRVQALLTRNVRSAPSGKVYIFTSILTCAECGHKLVGYKSSDYFYYRCNQHFQRGRCSHNHSAREDVVEQWLFEHLGEELERCQLEWDVEAAKKKASVARTDKAALKRKLTKLKELYVNDLIDIEDYKKDYQIYVSALNQIPEPAQEAPPDFAAVRRLLDNSFRTIYDTLTREEKRTLWRSVIKEIRIDNDQNITGVVFG

SEQ ID NO: 8270 - protein, 456 aa, Unknown
  Description of Unknown: Integrase B8271 sequence
  PTHR30461:SF3,SM00857,G3DSA:1.10.10.2600,IPR036162,PF13408, IPR025827,PS51737,G3DSA:3.40.50.1390,IPR006119,IPR038109, PF07508,IPR011109,SSF53041,PTHR30461,Coil, PS51736,cd00338,PF00239
MRNKEIAPALVRVALYIRVSGEEQKIKGLSLEAQQERLEAYARERGWVIVGIYIDAAKTARKNIHKRTEFQRMMGSVKRDEVDILLFARLDRWFRSVADYYKVMEILQAHNCDWKTTDEEYDTTTANGRLYINVKLSIAQNEADIDGERIDVVFDSKIAHGTVVSGSAPFGFRVNEEKRLEVVPEDAAIVQDAFNYFENTVSQRATVRYVRETYGVNWCDATFRRMLKEKLYTGVYDRGGRYNDQFCPSIIDRQQFDRVQALLTRNVRSAPSGKVYIFTSILTCAECGHKLVGYKSSDYFYYRCNQHFQRGRCCHNHSAREDVVEAWLFDHLGEELERCQLEWDVEAAKKKASVARTDKAALKRKLTKLKELYVNDLIDIEDYKKDYQIYVSALNQIPEPAQEAPPDFAAVRRLLDNSFRTIYDTLTREEKRTLWRSVIKEIRIDNDQNITGVVFG

SEQ ID NO: 8271 - protein, 456 aa, Unknown
  Description of Unknown: Integrase B8272 sequence
  PTHR30461:SF3,IPR036162,PS51737,IPR011109,PTHR30461, PS00397,PF00239,G3DSA:1.10.10.2600,IPR006119,SSF53041, cd00338,SM00857,IPR025827,IPR038109,PS51736, IPR006118,PF13408,G3DSA:3.40.50.1390,Coil
MKKEQPNVLHTAIYIRVSTDQQAKKGDSVDEQLDTCREYVEKHDNLILYDTYVDDGVSGQKIKRGDFSRLMTDVRSGQIDLIIFTKLDRWFRSLRHYLNTQATLEANHCAWLAVDQPYFDTSTPHGRAFVAQSMTFAELEAANDSTRIRDVFDYKYKRGEVLSGKAPLGYSIVDKHLVPNKDAEKVIKIFEHYAATSSLSSTVQFMEQELGIVMYSANLKNTILKQKKYIGVFRDNEHFCEPLISRELFDSVQRQLAMNIHSNRKYEYIFTGLIRCADCDHTINGFPQRGGKRKDGSYRIFPAYRCRIAYPYKRCPNRKLFYEAPLERYLVEHLHELLEIEISKYEQKNAKVIDYESKRAAIEKKIERLKDLYINEIITMDELKVSKAKYQEELSQLPAEAAAIEKRDLSALRNMLKMDLPSIYFTLNPQERRRLWRSCIREIRVDHDKNIDIVFL

SEQ ID NO: 8272 - protein, 456 aa, Unknown
  Description of Unknown: Integrase B8273 sequence
  PTHR30461:SF3,SM00857,G3DSA:1.10.10.2600,IPR036162,PF13408, PS51737,G3DSA:3.40.50.1390,IPR025827,IPR006119,IPR038109, PF07508,SSF53041,IPR011109,PF00239,PTHR30461, PS51736,Coil,cd00338
MYKKELAPDLVRVALYIRVSGEEQKIKGLSLEAQQERLEAYARERGWVIVGIYIDAAKTARKNIHKRTEFQRMMDSVKRDEVDILLFARLDRWFRSVADYYKVMEVLQAHNCDWKTTDEEYDTTTANGRLYINVKLSIAQNEADIDGERIDVVFDSKIAHGTVVSGSAPFGFRVNEEKRLEVVPEDAAIVQDAFNYFENTVSQRATVRYVRETYGVNWCDATFRRMLKEKLYTGVYDRGGRYNDKFCPAIINRQQFDRVQALLTRNVRSAPSGKVYIFTSILTCAECGHKLVGYKSSDYFYYRCNQHFQRGRCSHNHSAREDVVETWLFDHLGEELERCQLEWDVEAAKKKASVARTDKAALKRKLTKLKELYVNDLIDIEDYKKDYQIYVSALNQIPEPAQEAPPDFAAVRRLLDNSFRTIYDTLTREEKRTLWRSVIKEIRIDNDQNITGVVFG

SEQ ID NO: 8273 - protein, 456 aa, Unknown
  Description of Unknown: Integrase B8274 sequence
  PTHR30461:SF3,SM00857,G3DSA:1.10.10.2600,IPR036162,PF13408, IPR025827,G3DSA:3.40.50.1390,PS51737,IPR006119,IPR038109, PF07508,SSF53041,IPR011109,PTHR30461,Coil, PS51736,cd00338,PF00239
MRNKEIAPALVRVALYIRVSGEEQKIKGLSLEAQQERLEAYARERGWVIVGIYIDAAKTARKNIHKRTEFQRMMDSVKRDEVDILLFARLDRWFRSVADYYKVMEILQAHNCDWKTTDEEYDTTTANGRLYINVKLSIAQNEADIDGERIDVVFDSKIAHGTVVSGSAPFGFRVNEEKRLEVVPEDAAIVQDAFNYFENTVSQRATVRYVRETYGVNWCDATFRRMLKEKLYTGVYDRGGRYNDQFCPAIISRQQFDRVQALLTRNVRSAPSGKVYIFTSILTCAECGHKLVGYKSSDYFYYRCNQHFQRGRCSHNHSAREDVVEAWLFDHLGEELERCQLEWDVEAAKKKASVARTDKAALKRKLTKLKELYVNDLIDIEDYKKDYQIYVSALNQIPEPAQEAPPDFAAVRRLLDNSFRTIYDTLTREEKRTLWRSVIKEIRIDNDQNITGVVFG

SEQ ID NO: 8274 - protein, 456 aa, Unknown
  Description of Unknown: Integrase B8275 sequence
  PTHR30461:SF3,SM00857,G3DSA:1.10.10.2600,IPR036162,PF13408, IPR025827,G3DSA:3.40.50.1390,PS51737,IPR006119,IPR038109, PF07508,SSF53041,IPR011109,PTHR30461,Coil, PS51736,cd00338,PF00239
MRNKEIAPALVRVALYIRVSGEEQKIKGLSLEAQQERLEAYARERGWVIVGIYIDAAKTARKNIHKRTEFQRMMDSVKRDEVDILLFARLDRWFRSVADYYKVMEILQAHNCDWKTTDEEYDTTTANGRLYINVKLSIAQNEADIDGERIDVVFDSKIAHGTVVSGSAPFGFRVNEEKRLEVVPEDAAIVQDAFNYFESTVSQRATVRYVRETYGVNWCDATFRRMLKEKLYTGVYDRGGRYNDQFCPAIINRQQFDRVQALLTRNVRSAPSGKVYIFTSILTCAECGHKLVGYKSSDYFYYRCNQHFQRGRCSHNHSAREDIVEAWLFDHLGEELERCQLEWDVEAAKKKASVARTDKAALKRKLTKLKELYVNDLIDIEDYKKDYQIYVSALNQIPEPAQEAPPDFAAVRRLLDNSFRTIYDTLTREEKRTLWRSVIKEIRIDNDQNITGVVFG

SEQ ID NO: 8275 - protein, 456 aa, Unknown
  Description of Unknown: Integrase B8276 sequence
  PTHR30461:SF3,SM00857,G3DSA:1.10.10.2600,IPR036162,PF13408, PS51737,G3DSA:3.40.50.1390,IPR025827,IPR006119,IPR038109, PF07508,IPR011109,SSF53041,PTHR30461,Coil, PS51736,cd00338,PF00239
MRNKEIAPALVRVALYIRVSGEEQKIKGLSLEAQQERLEAYARERGWVIVGIYIDAAKTARKNIHKRTEFQHMMDSVKRDEVDILLFARLDRWFRSVADYYKVMEILQAHNCDWKTTDEEYDTTTANGRLYINVKLSIAQNEADIDGERIDVVFDSKIAHGTVVSGSAPFGFRVNEEKRLEVVPEDAAIVQDAFNYFENTVSQRATVRYVRETYGANWCDATFRRMLKEKLYTGVYDRGGRYNDQFCPAIIDRQQFDRVQALLTRNVRSAPSGKVYIFTSILTCAECGHKLVGYKSSDYYYYRCNQHFQRGRCSHNHSAREDVVEQWLFEHLGEELERCQLEWGVEAAKKKVSIARTDKAALKRKLTKLKELYVNDLIDIEDYKKDYQIYVSALNQIPEPAQEAPPDFAAVRRLLDNSFRTIYDTLTREEKRTLWRSVIKEIRIDNDQNITGVVFG

SEQ ID NO: 8276 - protein, 456 aa, Unknown
  Description of Unknown: Integrase B8277 sequence
  PTHR30461:SF3,SM00857,G3DSA:1.10.10.2600,IPR036162,PF13408, IPR025827,G3DSA:3.40.50.1390,PS51737,IPR006119,IPR038109, PF07508,IPR011109,SSF53041,PTHR30461,Coil, PS51736,cd00338,PF00239
MKRKEVAAGLVRVALYIRVSGEEQKIKGLSLEAQQERLEAYARERGWVIVGIYIDAAKTARKNIHKRTEFQRMMDSVKRDEVDILLFARLDRWFRSVADYYKVMEVLQAHNCDWKTTDEEYDTTTANGRLYINVKLSIAQNEADIDGERIDVVFDSKIAHGTVVSGSAPFGFRVNEEKRLEVVPEDAAIVQDAFNYFENTVSQRATVRYVRETYGVNWCDATFRRMLKEKLYTGVYDRGGRYNDQFCPAIIDRQQFDRVQALLTRNVRSAPSGKVYIFTSILTCAECGHKLVGYKSSDYFYYRCNQHFQRGRCSHNHSAREDVVEQWLFEHLGEELERCQLEWDVEAAKKKASVARTDKAALKRKLTKLKELYVNDLIDIEDYKKDYQIYVSALNQIPEPAQEAPPDFAAVRRLLDNSFRTIYDTLTREEKRTLWRSVIKEIRIDNDQNITGVVFG

SEQ ID NO: 8277 - protein, 456 aa, Unknown
  Description of Unknown: Integrase B8278 sequence
  PTHR30461:SF3,SM00857,G3DSA:1.10.10.2600,IPR036162,PF13408, IPR025827,PS51737,G3DSA:3.40.50.1390,IPR006119,IPR038109, PF07508,SSF53041,IPR011109,PF00239,PTHR30461, PS51736,Coil,cd00338
MRNKEIAPALVRVALYIRVSGEEQKIKGLSLEAQQERLEAYARERGWVIVGIYIDAAKTARKNIHKRTEFQRMMDSVKRDEVDILLFARLDRWFRSVADYYKVMEVLQAHNCDWKTTDEEYDTTTANGRLYINVKLSIAQNEADIDGERIDVVFDSKIAHGTVVSGSAPFGFRVNEEKRLEVVPEDAAIVQDAFNYFENTVSQRATVRYVRETYGVNWCDATFRRMLKEKLYTGVYDRGGRYNDQFCPVIINRQQFDRVQALLTRNVRSAPSGKVYIFTSILTCAECGHKLVGYKSSDYFYYRCNQHFQRGRCSHNHSAREDVVEAWLFDHLGEELERCQLEWDVEAAKKKASVARTDKAALKRKLTKLKELYVNDLIDIEDYKKDYQIYVSALNQIPEPAQEAPPDFAAVRRLLDNSFRTIYDTLTREEKRTLWRSVIKEIRIDNDQNITGVVFV

SEQ ID NO: 8278 - protein, 456 aa, Unknown
  Description of Unknown: Integrase B8279 sequence
  PTHR30461:SF3,SM00857,G3DSA:1.10.10.2600,IPR036162,PF13408, IPR025827,G3DSA:3.40.50.1390,PS51737,IPR006119,IPR038109, PF07508,SSF53041,IPR011109,PTHR30461,Coil, PS51736,cd00338,PF00239
MRNKEIAPALVRVALYIRVSGEEQKIKGLSLEAQQERLEAYARERGWVIVGIYIDAAKTARKNIHKRTEFQRMMDSVKRDEVDILLFARLDRWFRSVADYYKVMEILQAHNCDWKTTDEEYDTTTANGRLYINVKLSIAQNEADIDGERIDVVFDSKIAHGTVVSGSAPFGFRVNEEKRLEVVPEDAAIVQDAFNYFESTVSQRATVRYVRETYGVNWCDATFRRMLKEKLYTGVYDRGGRYNDQFCPAIINRQQFDRVQALLTRNVRSAPSGKVYIFTSILTCAECGHKLVGYKSSDYFYYRCNQHFQRGRCSHNHSAREDVVEQWLFEHLGEELERCQLEWGVEAAKKKASIARTDKAALKRKLTKLKELYVNDLIDIEDYKKDYQIYVSALNQIPEPAQEAPPDFAAVRRLLDNSFRTIYDTLTREEKRTLWRSVIKEIRIDNDQNITGVVFG

SEQ ID NO: 8279 - protein, 456 aa, Unknown
  Description of Unknown: Integrase B8280 sequence
  PTHR30461:SF3,SM00857,G3DSA:1.10.10.2600,IPR036162,PF13408, IPR025827,G3DSA:3.40.50.1390,PS51737,IPR006119,IPR038109, PF07508,IPR011109,SSF53041,PTHR30461,PS51736, cd00338,PF00239
MRNKEIAPALVRVALYIRVSGEEQKIKGLSLEAQQERLEAYARERGWVIVGIYIDAAKTARKNIHKRTEFQRMMDSVKRDEVDILLFARLDRWFRSVADYYKVMEILQAHNCDWKTTDEEYDTTTANGRLYINVKLSIAQNEADIDGERIDVVFDSKIAHGTVVSGSAPFGFRVNEEKRLEVVPEDAAIVQDAFNYFENTVSQRATVRYVRETYGVNWCDATFRRMLKEKLYTGVYDRGGRYNDQFCPAIIDRQQFDRVQALLTRNVRSAPSGKVYIFTSILTCAECGHKLVGYKSSDYFYYRCNQHFQRGRCSHNHSAREDVVEAWLFDHLGEELERCQLEWDVEAAKKKASVVRTDKAALKRKLTKLKELYVNDLIDIEDYKKDYQIYVSALNQIPEPAQEAPPDFAAVRRLLDNSFRTIYDTLTREEKRTLWRSVIKEIRIDNDQNITGVVFG

SEQ ID NO: 8280 - protein, 456 aa, Unknown
  Description of Unknown: Integrase B8281 sequence
  PTHR30461:SF3,SM00857,G3DSA:1.10.10.2600,IPR036162,PF13408, IPR025827,G3DSA:3.40.50.1390,PS51737,IPR006119,IPR038109, PF07508,IPR011109,SSF53041,PF00239,PTHR30461, PS51736,Coil,cd00338
MRNKEIAPALVRVALYIRVSGEEQKIKGLSLEAQQERLEAYARERGWVIVGIYIDAAKTARKNIHKRTEFQRMMDSVKRDEVDILLFARLDRWFRSVADYYKVMEVLQAHNCDWKTTDEEYDTTTANGRLYINVKLSIAQNEADIDGERIDVVFDSKIAHGTVVSGSAPFGFRVNEEKRLEVVPEDAAIVQDAFNYFENTVSQRATVRYVRETYGVNWCDATFRRMLKEKLYTGVYDRGGRYNDQFCPAIISRQQFDRVQALLTRNVRSAPSGKVYIFTSILTCAECGHKLVGYKSSDYFYYRCNQHFQRGRCSHNHSAREDVVEQWLFEHLGEELDRCQLEWDVEAAKKKASVARTDKAALKRKLTKLKELYVNDLIDIEDYKKDYQIYVSALNQIPEPAQEAPPDFAAVRRLLDNSFRTIYDTLTREEKRTLWRSVIKEIGIDNDQNITGVVFG

SEQ ID NO: 8281 - protein, 456 aa, Unknown
  Description of Unknown: Integrase B8282 sequence
  PTHR30461:SF3,SM00857,G3DSA:1.10.10.2600,IPR036162,PF13408, PS51737,IPR025827,G3DSA:3.40.50.1390,IPR006119,IPR038109, PF07508,IPR011109,SSF53041,PTHR30461,Coil, PS51736,cd00338,PF00239
MRNKEIAPALVRVALYIRVSGEEQKIKGLSLEAQQERLEAYARERGWVIVGIYIDAAKTARKNIHKRTEFQRMMDSVKRDEVDILLFARLDRWFRSVADYYKVMEILQAHNCDWKTTDEEYDTTTANGRLYINVKLSIAQNEADIDGERIDVVFDSKIAHGTVVSGSSPFGFRVSEEKRLEIVPEDAAIVQDAFNYFETTVSQRATTKYIREKYGVNWCYATFHRMLIEELYTGVYNRGGRYNANFCPAIIQREQFDRVQALLKKNVRRAPSGRVYIFTSVLTCEECRHKLNGYISQGIYYYRCNQHLQRGRCTHNHSVREDRVEQWLFDHLGEELERCKLEWEVQAAEKKRSVTSRDKAALKRKLTKLKELYVNELIDIDDYKKDYEIYTAALNQIPDTTQEAPPDFAAVEKLLQKDFRKIYDTLTREEKRTLWRSVIKEIRIDNDQNITGVVFG

SEQ ID NO: 8282 - protein, 456 aa, Unknown
  Description of Unknown: Integrase B8283 sequence
  PTHR30461:SF3,SM00857,G3DSA:1.10.10.2600,IPR036162,PF13408, IPR025827,G3DSA:3.40.50.1390,PS51737,IPR006119,IPR038109, PF07508,IPR011109,SSF53041,PTHR30461,PS51736, cd00338,PF00239
MRNQNTSEVPIRAALYARVSGEEQKIKGLSIEAQKERLVAYAKERGWIIAGLFVDAAKTARKNMHKRSEFQKMLDLVRANGVDMLLFCRLDRWFRSVRDYYKVMEVLEAHNCQWKTTDEEYDTTTANGRLYINVKLSIAQNEADICGERIHVVFDSKIQHGTVLSGKCPFWLRINDERRYELIPENAAIIQDAFNHFESTTSQRATIRYIRETYDVNWCEATFRRMLKDKLTIGVYNKNGRYNEDFCPPVVSREQFDHVQELLKRNSRHNPAGRVYIFTGILVCEECRHHLVGRKQKDFFYYRCNQHFQRGRCTHNHSAREDVIETWLFEHLGEEIEKYEVAWNVQAAERKRTVASIDRSVLRRKLTKLKDLYMNDLIDIDEYKKDYETYTAALSALEEPEEEKHIDLSGVRRIISHDFREIYDSLTREEKRTLWKNTLKEIRVNNANEITGISFF

SEQ ID NO: 8283 - protein, 456 aa, Unknown
  Description of Unknown: Integrase B8284 sequence
  PTHR30461:SF3,SM00857,G3DSA:1.10.10.2600,IPR036162,PF13408, IPR025827,G3DSA:3.40.50.1390,PS51737,IPR006119,IPR038109, PF07508,IPR011109,SSF53041,PTHR30461,Coil, PS51736,cd00338,PF00239
MRNKEIAPALVRVALYIRVSGEEQKIKGLSLEAQQERLEAYARERGWVIVGIYIDAAKTARKNIHKRTEFQRMMDSVKRDEVDILLFARLDRWFRSVADYYKVMEILQAHNCDWKTTDEEYDTTTANGRLYINVKLSIAQNEADIDGERIDVVFDSKIAHGTVVSGSAPFGFRVNEEKRLEVVPEDAAIVQDAFNYFENTVSQRATVRYVRETYGVNWCDATFRRMLKEKLYTGVYDRGGRYNDQFCPAIISRQQFDRVQALLTRNVRSAPSGKVYIFTSILTCAECGHKLVGYKSSDYYYYRCNQHFQRGRCSHNHSAREDVVEQWLFEHLGEELERCQLEWDVEAAKKKASVARTDKAALKRKLTKLKELYVNDLIDIEDYKKDYQIYVSALNQIPEPAQEAPPDFAAVRRLLDNSFRTIYDTLTREEKRTLWRSVIKEIRIDNDQNITGVVFG

SEQ ID NO: 8284 - protein, 456 aa, Unknown
  Description of Unknown: Integrase B8285 sequence
  PTHR30461:SF3,SM00857,G3DSA:1.10.10.2600,IPR036162,PF13408, IPR025827,G3DSA:3.40.50.1390,PS51737,IPR006119,IPR038109, PF07508,IPR011109,SSF53041,PTHR30461,Coil, PS51736,cd00338,PF00239
MRNKEIAPALVRVALYIRVSGEEQKIKGLSLEAQQERLEAYARERGWVIVGIYIDAAKTARKNIHKRTEFQRMMDSVKRDEVDILLFARLDRWFRSVADYYKVMEILQVHNCDWKTTDEEYDTTTANGRLYINVKLSIAQNEADIDGERIDVVFDSKIAHGTVVSGSAPFGFRVNEEKRLEVVPEDAAIVQDAFNYFENTVSQRATVRYVRETYGVNWCDATFRRMLKEKLYTGVYDRGGRYNDQFCPAIISRRQFDRVQALLTRNVRSAPSGKVYIFTSILTCAECGHKLVGYKSSDYYYYRCNQHFQRGRCCHNHSAREDVVEAWLFDHLGEELERCQLEWDVEAAKKKASVARTDKAALKRKLTKLKELYVNDLIDIEDYKKDYQIYVSALNQIPEPAQEAPPDFAAVRRLLDNSFRTIYDTLTREEKRTLWRSVIKEIRIDNDQNITGVVFG

SEQ ID NO: 8285 - protein, 456 aa, Unknown
  Description of Unknown: Integrase B8286 sequence
  PTHR30461:SF3,SM00857,G3DSA:1.10.10.2600,IPR036162,PF13408, PS51737,G3DSA:3.40.50.1390,IPR025827,IPR006119,IPR038109, PF07508,IPR011109,SSF53041,PTHR30461,Coil, PS51736,cd00338,PF00239
MRNKEIAPALVRVALYIRVSGEEQKIKGLSLEAQQERLEAYARERGWVIVGIYIDAAKTARKNIHKRTEFQRMMDSVKRDEVDILLFARLDRWFRSVADYYKVMEVLQAHNCDWKTTDEEYDTTTANGRLYINVKLSIAQNEADIDGERIDVVFDSKIAHGTVVSGSAPFGFHVNEEKRLEVVPEDAAIVQDAFNYFENTVSQRATVRYVRETYGVNWCDATFRRMLKEKLYTGVYDRGGRYNDQFCPAIISRQQFDRVQALLTRNVRSAPSGKVYIFTSILTCAECGHKLVGYKSSDYFYYRCNQHFQRGRCSHNHSAREDVVEQWLFEHLGEELERCQLEWDVEAAKKKASVARTDKAALKRKLTKLKELYVNDLIDIEDYKKDYQIYVSALNQIPEPAQEAPPDFAAVRRLLDNSFRTIYDTLTREEKRTLWRSVIKEIRIDNDQNITGVVFG

SEQ ID NO: 8286 - protein, 456 aa, Unknown
  Description of Unknown: Integrase B8287 sequence
  PTHR30461:SF3,SM00857,G3DSA:1.10.10.2600,IPR036162,PF13408, IPR025827,G3DSA:3.40.50.1390,PS51737,IPR006119,IPR038109, PF07508,SSF53041,IPR011109,PTHR30461,Coil, PS51736,cd00338,PF00239
MRNKEIAPALVRVALYIRVSGEEQKIKGLSLEAQQERLEAYARERGWVIVGIYIDAAKTARKNIHKRTEFQRMMDSVKRDEVDILLFARLDRWFRSVADYYKVMEILQAHNCDWKTTDEEYDTTTANGRLYINVKLSIAQNEADIDGERIDVVFDSKIAHGTVVSGSSPFGFRVSEEKRLEIVPEDAAIVQDAFNYFENTVSQRATTKYIREKYGVNWCYATFHRMLIEELYTGVYNRGGRYNANFCPAIIQREQFDRVQALLKKNVRRAPSGRVYIFTSVLTCEECRHKLNGYISQGIYYYRCNQHLQRGRCTHNHSVREDRVEQWLFDHLGEELERCKLEWEVQAAEKKRSVTSRDKAALKRKLTKLKELYVNELIDIDDYKKDYEIYTAALNQIPDTTQEAPPDFAAVEKLLQKDFRKIYDTLTREEKRTLWRSVIKEIRIDNDQNITGVVFG

SEQ ID NO: 8287 - protein, 456 aa, Unknown
  Description of Unknown: Integrase B8288 sequence
  PTHR30461:SF3,SM00857,G3DSA:1.10.10.2600,IPR036162,PF13408, IPR025827,G3DSA:3.40.50.1390,PS51737,IPR006119,IPR038109, PF07508,IPR011109,SSF53041,PTHR30461,PS51736, cd00338,PF00239
MRNQNTSEVPIRAALYVRVSGEEQKIKGLSIEAQKERLVAYAKERGWIIAGLFVDAAKTARKNMHKRSEFQKMLDLVRADGVDMLLFCRLDRWFRSVRDYYKVMEVLETHNCQWKTTDEEYDTTTANGRLYINVKLSIAQNEADICGERIHVVFDSKIQHGTVLSGKCPFWLRINNERRYELIPENAAIIQDAFNHFESTTSQRATIRYIRETYDVNWCEATFRRMLKDKLTIGVYNKNGRYNEDFCPPVVSREQFDHVQELLKRNSRHNPAGRVYIFTGILVCEECRHHLVGRKQKDFFYYRCNQHFQRGRCTHNHSAREDVIETWLFEHLGEEIEKYEVAWNVQAAERKRTAASIDRSVLRRKLTKLKDLYMNDLIDIDEYKKDYETYTAALSALEEPEEEKHIDLSGVRRIISHDFREIYDSLTREEKRTLWKNTLKEIRVNNANEITGISFF

SEQ ID NO: 8288 - protein, 456 aa, Unknown
  Description of Unknown: Integrase B8289 sequence
  SM00857,G3DSA:1.10.10.2600,IPR036162,PF13408,PS51737, IPR025827,G3DSA:3.40.50.1390,IPR006119,IPR038109,PF07508, IPR011109,SSF53041,PTHR30461,PS51736,cd00338, PF00239
MRNQNTSEVPIRAALYVRVSGEEQKIKGLSIEAQKERLVAYAKERGWIIAGLFVDAAKTARKNMHKRSEFQKMLDLVRADGVDMLLFCRLDRWFRSVRDYYKVMEVLETHNCQWKTTDEEYDTTTANGRLYINVKLSIAQNEADICGERIHVVFDSKIQHGTVLSGKCPFWLRINNERRYELIPENAAIIQDAFNHFENTTSQRATIRYIRETYDVNWCEATFRRMLRDKLTIGVYDKNGRYNDDFCPPVISKEQFEHVQELLRRNSRHNPAGRVYIFTGILVCEECRHNLVGYYSRGYIYYRCSQHFQRGRCIHNHSAREDVIEAWLFDHLGEEIEKYEVAWNVQAAERKRTAASIDRSVLRRKLTKLKDLYMNDLIDIDEYKKDYETYTAALSALEDPEEEKHIDLSGVRRIISHDFREIYDSLTREEKRTLWKNTLKEIRVNNANEITGISFF

SEQ ID NO: 8289 - protein, 456 aa, Unknown
  Description of Unknown: Integrase B8290 sequence
  PTHR30461:SF3,SM00857,G3DSA:1.10.10.2600,IPR036162,PF13408, PS51737,G3DSA:3.40.50.1390,IPR025827,IPR006119,IPR038109, PF07508,SSF53041,IPR011109,PTHR30461,Coil, PS51736,cd00338,PF00239
MRNKEIAPALVRVALYIRVSGEEQKIKGLSLEAQQERLEAYARERGWVIVGIYIDAAKTARKNIHKRTEFQRMMDSVMRDEVDILLFARLDRWFRSVADYYKVMEILQAHNCDWKTTDEEYDTTTANGRLYINVKLSIAQNEADIDGERIDVVFDSKIAHGTVVSGSAPFGFRVNEEKRLEVVPEDAAIVQDAFNYFENTVSQRATVRYVRETYGVNWCDATFRRMLKEKLYTGVYDRGGRYNDQFCPAIIDRQQFDRVQALLTRNVRSAPSGKVYIFTSILTCAECGHKLVGYKSSDYFYYRCNQHFQRGRCSHNHSAREDVVEAWLFDHLGEELERCQLEWDVETAKKKASVARTDKAALKRKLTKLKELYVNDLIDIEDYKKDYQIYVSALNQIPEPAQEAPPDFAAVRRLLDNSFRTIYDTLTREEKRTLWRSVIKEIRIDNDQNITGVVFG

SEQ ID NO: 8290 - protein, 456 aa, Unknown
  Description of Unknown: Integrase B8291 sequence
  PTHR30461:SF3,SM00857,G3DSA:1.10.10.2600,IPR036162,PF13408, PS51737,G3DSA:3.40.50.1390,IPR025827,IPR006119,IPR038109, PF07508,SSF53041,IPR011109,PTHR30461,Coil, PS51736,cd00338,PF00239
MRNKEIAPALVRVALYIRVSGEEQKIKGLSLEAQQERLEAYARERGWVIVGIYIDAAKTARKNIHKRTEFQRMMDSVKRDEVDILLFARLDRWFRSVADYYKVMEILQAHNCDWKTTDEEYDTTTANGRLYINVKLSIAQNEADIDGERIDVVFDSKIAHGTVVSGSAPFGFRVNEEKRLEVVPEDAAIVQDAFNYFENTVSQRATVRYVRETYGVNWCDATFRRMLKEKLYTGVYDRVGRYNDQFCPAIISRQQFDRVQALLTRNVRSAPSGKVYIFTSILTCAECGHKLVGYKSSDYFYYRCNQHFQRGRCSHNHSAREDVVEQWLFEHLGEELERCQLEWDVEAAKKKASVARTDKAALKRKLTKLKELYVNDLIDIEDYKKDYQIYVSALNQIPEPAQEAPPDFAAVRRLLDNSFRTIYDTLTREEKRTLWRSVIKEIRIDNDQNITGVVFG

SEQ ID NO: 8291 - protein, 456 aa, Unknown
  Description of Unknown: Integrase B8292 sequence
  PTHR30461:SF3,SM00857,G3DSA:1.10.10.2600,IPR036162,PF13408, IPR025827,G3DSA:3.40.50.1390,PS51737,IPR006119,IPR038109, PF07508,IPR011109,SSF53041,PTHR30461,Coil, PS51736,cd00338,PF00239
MRNKEIAPVLVRVALYIRVSGEEQKIKGLSLEAQQERLEAYARERGWVIVGIYIDAAKTARKNIHKRTEFQRMMDSVKRDEVDILLFARLDRWFRSVADYYKVMEILQAHNCDWKTTDEEYDTTTANGRLYINVKLSIAQNEADIDGERIDVVFDSKIAHGTVVSGSAPFGFRVNEEKRLEVVPEDAAIVQDAFNYFENTVSQRATVRYVRETYGVNWCDATFRRMLKEKLYTGVYDRGGRYNDQFCPAIISRQQFDRVQALLTRNVRSAPSGKVYIFTSILTCAECGHKLVGYKSSDYYYYRCNQHFQRGRCSHNHSAREDVVEQWLFEHLGEELDRCQLEWDVEAAKKKASVARTDKAALKRKLTKLKELYVNDLIDIEDYKKDYQIYVSALNQIPEPAQEAPPDFAAVRRLLDNSFRTIYDTLTREEKRTLWRSVIKEIRIDNDQNITGVVFG

SEQ ID NO: 8292 - protein, 456 aa, Unknown
  Description of Unknown: Integrase B8293 sequence
  PTHR30461:SF3,SM00857,G3DSA:1.10.10.2600,IPR036162,PF13408, IPR025827,G3DSA:3.40.50.1390,PS51737,IPR006119,IPR038109, PF07508,IPR011109,SSF53041,PTHR30461,Coil, PS51736,cd00338,PF00239
MRNKEIAPALVRVALYIRVSGEEQKIKGLSLEAQQERLEAYARERGWVIVGIYIDAAKTARKNIHKRTEFQRMMDSVKRDEVDILLFARLDRWFRSVADYYKVMEILQAHNCDWKTTDEEYDTTTANGRLYINVKLSIAQNEADIDGERIDVVFDSKIAHGTVVSGSAPFGFRVNEEKRLEVVPEDAAIVQDAFNYFENTVSQRATVRYVRETYGVNWCDATFRRMLKEKLYTGVYDRGGRYNDQFCPAIISRQQFDRVQALLTRNVRSAPSGKVYIFTSILTCAECGHKLVGYKSSDYFYYRCNQHFQRGRCSHNHSAREDVVEQWLFEHLGEELERCQLEWDVEAAKKKASVARTDKAALKRKLTKLKELYVNDLIDIEDYKKDYQIYVSALNQIPEPAQEAPPDFAAVRRLLDNSFRTIYDTLTREEKRTLWRSVIKEIRIDNDQNITGVVFG

SEQ ID NO: 8293 - protein, 456 aa, Unknown
  Description of Unknown: Integrase B8294 sequence
  PTHR30461:SF3,SM00857,G3DSA:1.10.10.2600,IPR036162,PF13408, PS51737,IPR025827,G3DSA:3.40.50.1390,IPR006119,IPR038109, PF07508,IPR011109,SSF53041,PTHR30461,Coil, PS51736,cd00338,PF00239
MRNKEIAPALVRVALYIRVSGEEQKIKGLSLEAQQERLEAYARERGWVIVGIYIDAAKTARKNIHKRTEFQRMMDSVKRDEVDILLFARLDRWFRSVADYYKVMEILQAHNCDWKTTDEEYDTTTANGRLYINVKLSIAQNEADIDGERIDVVFDSKIAHGTVVSGSAPFGFRVNEEKRLEVVPEDAAIVQDAFNYFENTVSQRATVRYVRETYGVNWCDATFRRMLKEKLYTGVYDRGGRYNDQFCPAIINRQQFDRVQALLTRNVRSAPSGKVYIFTSILTCAECGHKLVGYKSSDYFYYRCNQHFQRGRCSHNHSAREDVVEQWLFEHLGEELERCQLEWDVEAAKKKASVARTDKAALKRKLTKLKELYVNDLIDIEDYKKDYQIYVSALNQIPEPAQEAPPDFAAVRRLLDNSFRTIYDTLTREEKRTLWRSVIKEIRIDNDQNITGVVFG

SEQ ID NO: 8294 - protein, 456 aa, Unknown
  Description of Unknown: Integrase B8295 sequence
  PTHR30461:SF3,SM00857,G3DSA:1.10.10.2600,IPR036162,PF13408, IPR025827,PS51737,G3DSA:3.40.50.1390,IPR006119,IPR038109, PF07508,IPR011109,SSF53041,PTHR30461,PS51736, cd00338,PF00239
MRNKEIAPALVRVALYIRVSGEEQKIKGLSLEAQQERLEAYARERGWVIVGIYIDAAKTARKNIHKRTEFQRMMEAVKRDEVDILLFARLDRWFRSVADYYKVMEILQAHNCDWKTTDEEYDTTTANGRLYINVKLSIAQNEADIDGERIDVVFDSKIAHGTVVSGSAPFGFRVNEEKRLEVVPEDAAIVQDAFNYFENTVSQRATVRYVRETYGVNWCDATFRRMLKEKLYTGVYDRGGRYNDQFCPAIIDRQQFDRVQALLTRNVRSAPSGKVYIFTSILTCAECGHKLVGYKSSDYYYYRCNQHFQRGRCSHNHSAREDVVEQWLFEHLGEELERCQLEWDVEATKKKASVVRTDKAALKRKLTKLKELYVNDLIDIEDYKKDYQIYVSALNQIPEPAQEAPPDFAAVRRLLDNSFRTIYDTLTREEKRTLWRSVIKEIRIDNDQNITGVVFG

SEQ ID NO: 8295 - protein, 456 aa, Unknown
  Description of Unknown: Integrase B8296 sequence
  PTHR30461:SF3,SM00857,G3DSA:1.10.10.2600,IPR036162,PF13408, IPR025827,G3DSA:3.40.50.1390,PS51737,IPR006119,IPR038109, PF07508,IPR011109,SSF53041,PTHR30461,Coil, PS51736,cd00338,PF00239
MRNKEIAPALVRVALYIRVSGEEQKIKGLSLEAQQERLEAYARERGWVIVGIYIDAAKTARKNIHKRTEFQRMMDSVKRDEVDILLFARLDRWFRSVADYYKVMEILQAHNCDWKTTDEEYDTTTANGRLYINVKLSIAQNEADIDGERIDVVFDSKIAHGTVVSGSAPFGFRVNEEKRLEVVPEDAAIVQDAFNYFENTVSQRATVRYVRETYGVNWCDATFRRMLKEKLYTGVYDRGGRYNDQFCPAIISRQQFDRVQALLTRNVRSAPSGKVYIFTSILTCAECGHKLVGYKSSDYFYYRCNQHFQRGRCSHNHSAREDVVEQWLFEHLGEELDRCQLEWDVEAAKKKASVARTDKAALKRKLTKLKELYVNDLIDIEDYKKDYQIYVAALNQIPEPAQEAPPDFAAVRRLLDNSFRTIYDTLTREEKRTLWRSVIKEIRIDNDQNITGVVFG

SEQ ID NO: 8296 - protein, 456 aa, Unknown
  Description of Unknown: Integrase B8297 sequence
  PTHR30461:SF3,SM00857,G3DSA:1.10.10.2600,IPR036162,PF13408, IPR025827,G3DSA:3.40.50.1390,PS51737,IPR006119,IPR038109, PF07508,SSF53041,IPR011109,PTHR30461,Coil, PS51736,cd00338,PF00239
MYKKELAPDLVRVALYIRVSGEEQKIKGLSLEAQQERLEAYARERGWVIVGIYIDAAKTARKNIHKRTEFQRMMDSVKRDEVDILLFARLDRWFRSVADYYKVMEILQAHNCDWKTTDEEYDTTTANGRLYINVKLSIAQNEADIDGERIDVVFDSKIAHGTVVSGSAPFGFRVNEEKRLEVVPEDAAIVQDAFNYFENTVSQRATVRYVRETYGVNWCDATFRRMLKEKLYTGVYDRGGRYNDQFCPAIIDRQQFDRVQALLTRNVRSAPSGKVYIFTSILTCAECGHKLVGYKSSDYFYYRCNQHFQRGRCSHNHSAREDVVEQWLFEHLGEELERCQLEWDVEAAKKKASVARTDKAALKRKLTKLKELYVNDLIDIEDYKKDYQIYVSALNQIPEPAQEAPPDFAAVRRLLDNSFRTIYDTLTREEKRTLWRSVIKEIRIDNDQNITGVVFG

SEQ ID NO: 8297 - protein, 456 aa, Unknown
  Description of Unknown: Integrase B8298 sequence
  PTHR30461:SF3,SM00857,G3DSA:1.10.10.2600,IPR036162,PF13408, IPR025827,G3DSA:3.40.50.1390,PS51737,IPR006119,IPR038109, PF07508,IPR011109,SSF53041,PTHR30461,Coil, PS51736,cd00338,PF00239
MRNKEIAPALVRVALYIRVSGEEQKIKGLSLEAQQERLEAYARGRGWVIVGIYIDAAKTARKNIHKRTEFQRMMDSVKRDEVDILLFARLDRWFRSVADYYKVMEILQAHNCDWKTTDEEYDTTTANGRLYINVKLSIAQNEADIDGERIDVVFDSKIAHGTVVSGSAPFGFRVNEEKRLEVVPEDAAIVQDAFNYFENTVSQRATVRYVRETYGVNWCDATFRRMLKEKLYTGVYDRGGRYNDQFCPAIISRQQFDRVQALLTRNVRSAPSGKVYIFTSILTCAECGHKLVGYKSSDYFYYRCNQHFQRGRCSHNHSAREDVVEQWLFEHLGEELERCQLEWDVEAAKKKASVARTDKAALKRKLTKLKELYVNDLIDIEDYKKDYQIYVSALNQIPEPAQEAPPDFAAVRRLLDNSFRTIYDTLTREEKRTLWRSVIKEIRIDNDQNITGVVFG

SEQ ID NO: 8298 - protein, 456 aa, Unknown
  Description of Unknown: Integrase B8299 sequence
  PTHR30461:SF3,SM00857,G3DSA:1.10.10.2600,IPR036162,PF13408, IPR025827,G3DSA:3.40.50.1390,PS51737,IPR006119,IPR038109, PF07508,SSF53041,IPR011109,PTHR30461,PS51736, cd00338,PF00239
MRNKEIAPALVRVALYIRVSGEEQKIKGLSLEAQQERLEAYARERGWVIVGIYIDAAKTARKNIHKRTEFQRMMDSVKRDEVDILLFARLDRWFRSVADYYKVMEILQAHNCDWKTTDEEYDTTTANGRLYINVKLSIAQNEADIDGERIDVVFDSKIAHGTVVSGSSPFGFRVSEEKRLEIVPEDAAIVQDAFNYFENTVSQRATTKYIREKYGVNWCYATFHRMLIEELYTGVYNRGGRYNANFCPAIIQREQFDRVQALLKKNVRRAPSGRVYIFTSVLTCEECRHKLNGYISQGIYYYRCNQHLQRGRCTHNHSVREDRVEQWLFDHLGEELERCKLEWEVQTAEKKRSVTSRDKAALKRKLTKLKELYVNELIDIDDYKKDYEIYTAALNQIPDTTHEAPPDFAAVEKLLQKDFRKIYDTLTREEKRTLWRSVIKEIRIDNDQNITGVVFW

SEQ ID NO: 8299 - protein, 456 aa, Unknown
  Description of Unknown: Integrase B8300 sequence
  PTHR30461:SF3,SM00857,G3DSA:1.10.10.2600,IPR036162,PF13408, PS51737,IPR025827,G3DSA:3.40.50.1390,IPR006119,IPR038109, PF07508,IPR011109,SSF53041,PTHR30461,Coil, PS51736,cd00338,PF00239
MRNKEIAPALVRVALYIRVSGEEQKIKGLSLEAQQERLEAYARERGWVIVGIYIDAAKTARKNIHKRTEFQRMMDSVKRDEVDILLFARLDRWFRSVADYYKVMEILQAHNCDWKTTDEEYDTTTANGRLYINVKLSIAQNEADIDGERIDVVFDSKIAHGTVVSGSSPFGFRVSEEKRLEIVPEDAAIVQDAFNYFETTVSQRATTKYIREKYGVNWCYATFHRMLIEELYTGVYNRGGRYNANFCPAIIQREQFDRVQALLKKNVRRAPSGRVYIFTSVLTCEECRHKLNGYISQGIYYYRCNQHLQRGRCTHNHSVREDRVEQWLFDHLGEELERCKLEWEVQAAEKKRSVTSRDKAALKRKLTKLKELYVNELIDIDDYKKDYEIYTAALNQIPDTAQEAPPDFTAVEKLLQKDFRKIYDTLTREEKRTLWRSVIKEIRIDNDQNITGVVFG

SEQ ID NO: 8300 - protein, 456 aa, Unknown
  Description of Unknown: Integrase B8301 sequence
  PTHR30461:SF3,SM00857,G3DSA:1.10.10.2600,IPR036162,PF13408, IPR025827,G3DSA:3.40.50.1390,PS51737,IPR006119,IPR038109, PF07508,IPR011109,SSF53041,PTHR30461,Coil, PS51736,cd00338,PF00239
MRNKEIAPALVRVALYIRVSGEEQKIKGLSLEAQQERLEAYARERGWVIVGIYIDAAKTARKNIHKRTEFQRMMEAVKRDEVDILLFARLDRWFRSVADYYKVMEILQAHNCDWKTTDEEYDTTTANGRLYINVKLSIAQNEADIDGERIDVVFDSKIAHGTVVSGSAPFGFRVNEEKRLEVVPEDAAIVQDAFNYFENTVSQRATVRYVRETYGVNWCDATFRRMLKEKLYTGVYDRGGRYNDQFCPAIIDRQQFDRVQVLLTRNVRSAPSGKVYIFTSILTCAECGHKLVGYKSSDYYYYRCNQHFQRGRCSHNHSAREDVVEQWLFEHLGEELERCQLEWGVEAAKKKASVARTDKAALKRKLTKLKELYVNDLIDIEDYKKDYQIYVSALNQIPEPAQEAPPDFAAVRRLLDNNFRTIYDTLTREEKRTLWRSVIKEIRIDNDQNITGVVFG

SEQ ID NO: 8301 - protein, 456 aa, Unknown
  Description of Unknown: Integrase B8302 sequence
  PTHR30461:SF3,SM00857,G3DSA:1.10.10.2600,IPR036162,PF13408, PS51737,IPR025827,G3DSA:3.40.50.1390,IPR006119,IPR038109, PF07508,IPR011109,SSF53041,PTHR30461,Coil, PS51736,cd00338,PF00239
MYKKELAPDLVRVALYIRVSGEEQKIKGLSLEAQQERLEAYARERGWVIVGIYIDAAKTARKNIHKRTEFQRMMDSVKRDEVDILLFARLDRWFRSVADYYKVMEILQAHNCDWKTTDEEYDTTTANGRLYINVKLSIAQNEADIDGERIDVVFDSKIAHGTVVSGSAPFGFRVNEEKRLEVVPEDAAIVQDAFNYFENTVSQRATVRYVRETYGVNWCDATFRRMLKEKLYTGVYDRGGRYNDQFCPAIISRQQFDRVQVLLTRNVRSAPSGKVYIFTSILTCAECGHKLVGYKSSDYYYYRCNQHFQRGRCSHNHSAREDVVEQWLFEHLGEELERCQLEWGVEAAKKKASVARTDKAALKRKLTKLKELYVNDLIDIEDYKKDYQIYVSALNQIPEPAQEAPPDFAAVRRLLDNSFRTIYDTLTREEKRTLWRSVIKEIRIDNDQNITGVVFG

SEQ ID NO: 8302 - protein, 456 aa, Unknown
  Description of Unknown: Integrase B8303 sequence
  PTHR30461:SF3,SM00857,G3DSA:1.10.10.2600,IPR036162,PF13408, PS51737,G3DSA:3.40.50.1390,IPR025827,IPR006119,IPR038109, PF07508,SSF53041,IPR011109,PTHR30461,Coil, PS51736,cd00338,PF00239
MYKKELAPDLVRVALYIRVSGEEQKIKGLSLEAQQERLEAYARERGWVIVGIYIDAAKTARKNIHKRTEFQRMMDSVKRDEVDILLFARLDRWFRSVADYYKVMEILQAHNCDWKTTDEEYDTTTANGRLYINVKLSIAQNEADIDGERIDVVFDSKIAHGTVVSGSAPFGFRVNEEKRLEVVPEDAAIVQDAFNYFENTVSQRATVRYVRETYGVNWCDATFRRMLKEKLYTGVYDRGGRYNDQFCPAIINRHQFDRVQALLTRNVRSAPSGKVYIFTSILTCAECGHKLVGYKSSDYYYYRCNQHFQRGRCSHNHSAREDVVEAWLFDHLGEELERCQLEWDVEAAKKKASVARTDKAALKRKLTKLKELYVNDLIDIEDYKKDYQIYVSALNQIPEPAQEAPPDFAAVRRLLDNSFRTIYDTLTREEKRTLWRSVIKEIRIDNDQNITGVVFG

SEQ ID NO: 8303 - protein, 456 aa, Unknown
  Description of Unknown: Integrase B8304 sequence
  PTHR30461:SF3,SM00857,G3DSA:1.10.10.2600,IPR036162,PF13408, IPR025827,PS51737,G3DSA:3.40.50.1390,IPR006119,IPR038109, PF07508,IPR011109,SSF53041,PTHR30461,Coil, PS51736,cd00338,PF00239
MRNKEIAPALVRVALYIRVSGEEQKIKGLSLEAQQERLEAYARERGWVIVGIYIDAAKTARKNIHKRTEFQRMMDSVKRDEVDILLFARLDRWFRSVADYYKVMEILQAHNCDWKTTDEEYDTTTANGRLYINVKLSIAQNEADIDGERIDVVFNSKIAHGTVVSGSAPFGFRVNEEKRLEVVPEDAAIVQDAFNYFESTVSQRATVRYVRETYGVNWCDATFRRMLKEKLYTGVYDRGGRYNDQFCPAIIDRQQFDRVQALLTRNVRSAPSGKVYIFTSILTCAECGHKLVGYKSSDYFYYRCNQHFQRGRCSHNHSAREDVVEQWLFEHLGEELDRCQLEWDVEAAKKKASVARTDKAALKRKLTKLKELYVNDLIDIEDYKKDYQIYVSALNQIPEPAQEAPPDFAAVRRLLDNSFRTIYDTLTREEKRTLWRSVIKEIRIDNDQNITGVVFG

SEQ ID NO: 8304 - protein, 456 aa, Unknown
  Description of Unknown: Integrase B8305 sequence
  PTHR30461:SF3,SM00857,G3DSA:1.10.10.2600,IPR036162,PF13408, IPR025827,PS51737,G3DSA:3.40.50.1390,IPR006119,IPR038109, PF07508,IPR011109,SSF53041,PTHR30461,Coil, PS51736,cd00338,PF00239
MRNKEIVPALVRVALYIRVSGEEQKIKGLSLEAQQERLEAYARERGWVIVGIYIDAAKTARKNIHKRTEFQRMMDSVKRDEVDILLFARLDRWFRSVADYYKVMEILQAHNCDWKTTDEEYDTTTANGRLYINVKLSIAQNEADIDGERIDVVFDSKIAHGTVVSGSAPFGFRVNEEKRLEVVPEDAAIVQDAFNYFENTVSQRATVRYVRETYGVNWCDATFRRMLKEKLYTGVYDRGGRYNDQFCPAIIDRQQFDRVQVLLTRNVRSAPSGKVYIFTSILTCAECGHKLVGYKSSDYYYYRCNQHFQRGRCSHNHSAREDVVEQWLFEHLGEELERCQLEWDVEAAKKKASVARTDKAALKRKLTKLKELYVNDLIDIEDYKKDYQIYVSALNQIPEPAQEAPPDFAAVRRLLDNSFRTIYDTLTREEKRTLWRSVIKEIRIDNDQNITGVVFG

SEQ ID NO: 8305 - protein, 456 aa, Unknown
  Description of Unknown: Integrase B8306 sequence
  PTHR30461:SF3,SM00857,G3DSA:1.10.10.2600,IPR036162,PF13408, IPR025827,PS51737,G3DSA:3.40.50.1390,IPR006119,IPR038109, PF07508,IPR011109,SSF53041,PTHR30461,Coil, PS51736,cd00338,PF00239
MRNKEIAPALVRVALYIRVSGEEQKIKGLSLEAQQERLEAYARERGWVIVGIYIDAAKTARKNIHKRTEFQRMMEAVKRDEVDILLFARLDRWFRSVADYYKVMEILQAHNCDWKTTDEEYDTTTANGRLYINVKLSIAQNEADIDGERIDVVFDSKIAHGTVVSGSAPFGFRVNEEKRLEVVPEDAAIVQDAFNYFENTVSQRATVRYVRETYGVNWCDATFRRMLKEKLYTGVYDRGGRYNDQFCPAIISRQQFDRVQALLTRNVRSAPSGKVYIFTSILTCAECGHKLVGYKSSDYFYYRCNQHFQRGRCSHNHSAREDVVEQWLFEHLGEELERCQLEWDVEAAKKKASVARTDKAALKRKLTKLKELYVNDLIDIEDYKKDYQIYVSALNQIPEPAQEVPPDFAAVRRLLDNSFRTIYDTLTREEKRTLWRSVIKEIRIDNDQNITGVVFG

SEQ ID NO: 8306 - protein, 456 aa, Unknown
  Description of Unknown: Integrase B8307 sequence
  PTHR30461:SF3,SM00857,G3DSA:1.10.10.2600,IPR036162,PF13408, IPR025827,G3DSA:3.40.50.1390,PS51737,IPR006119,IPR038109, PF07508,IPR011109,SSF53041,PTHR30461,Coil, PS51736,cd00338,PF00239
MRNKEIAPALVRVALYIRVSGEEQKIKGLSLEAQQERLEAYARERGWVIVGIYIDAAKTARKNIHKRTEFQRMMDSVKRDEVDILLFARLDRWFRSVADYYKVMEVLQAHNCDWKTTDEEYDTTTANGRLYINVKLSIAQNEADIDGERIDVVFDSKIAHGTVVSGSAPFGFRVNEEKRLEVVPEDAAIVQDAFNYFENTVSQRATVRYVRETYGVNWCDATFRRMLKEKLYTGVYDRGGRYNDQFCPAIIDRQQFDRVQALLTRNVRSAPSGKVYIFTSILTCAECGHKLVGYKSSDYFYYRCNQHFQRGRCSHNHSAREDVVEAWLFDHLGEELERCQLEWDVEAAKKKASVARTDKAALKRKLTKLKELYVNDLIDIEDYKKDYQIYVSALNQIPEPAQEAPPDFAAVRRLLDNSFRTIYDTLTREEKRTLWRSVIKEIRIDNDQNITGVVFW

SEQ ID NO: 8307 - protein, 456 aa, Unknown
  Description of Unknown: Integrase B8308 sequence
  PTHR30461:SF3,SM00857,G3DSA:1.10.10.2600,IPR036162,PF13408, IPR025827,G3DSA:3.40.50.1390,PS51737,IPR006119,IPR038109, PF07508,SSF53041,IPR011109,PTHR30461,Coil, PS51736,cd00338,PF00239
MYKKELAPDLVRVALYIRVSGEEQKIKGLSLEAQQERLEAYARERGWVIVGIYIDAAKTARKNIHKRTEFQRMMDSVKRDEVDILLFARLDRWFRSVADYYKVMEILQAHNCDWKTTDEEYDTTTANGRLYINVKLSIAQNEADIDGERIDVVFDSKIAHGTVVSGSAPFGFRVNEEKRLEVVPEDAAIVQDAFNYFENTVSQRATVRYVRETYGVNWCDATFRRMLKEKLYTGVYDRGGRYNDQFCPAIIDRQQFDRVQALLTRNVRSAPSGKVYIFTSILTCAECGHKLVGYKSSDYFYYRCNQHFQRGRCSHNHSAREDVVEQWLFEHLGEELERYQLEWDVEAAKKKASVARTDKAALKRKLTKLKELYVNDLIDIEDYKKDYQIYVSALNQIPEPAQEAPPDFAAVRRLLDNSFRTIYDTLTREEKRTLWRSVIKEIRIDNDQNITGVVFG

SEQ ID NO: 8308 - protein, 456 aa, Unknown
  Description of Unknown: Integrase B8309 sequence
  PTHR30461:SF3,SM00857,G3DSA:1.10.10.2600,IPR036162,PF13408, IPR025827,G3DSA:3.40.50.1390,PS51737,IPR006119,IPR038109, PF07508,SSF53041,IPR011109,PTHR30461,PS51736, cd00338,PF00239
MRNQNTSETPVRAALYVRVSGEEQKIKGLSIEAQKERLVAYAKERGWIIAGLFVDAAKTARKNMHKRSEFQKMLDLVRADGVDMLLFCRLDRWFRSVRDYYKVMEVLEAHNCQWKTTDEEYDTTTANGRLYINVKLSIAQNEADICGERIHVVFDSKIQHGTVLSGKCPFWLRINNERRYELIPENAAIIRDAFNHFENTTSQRATIRYIRETYDVNWCEATFRRMLRDKLTIGVYDKNGRYNDDFCPPVISKEQFEHVQELLRRNSRHNPAGRVYIFTGILVCEECRHNLVGYYSRDYIYYRCSQHFQRGRCIHNHSAREDVIEAWLFEHLGEEIEKYEVAWNVQAAERKRTAASIDRSVLRRKLTKLKDLYMNDLIDIDEYKKDYETYTAALSALEDPEEEKHIDLSGVRRIISHDFREIYDSLTREEKRTLWKNTLKEIRVNNANEITGISFF

SEQ ID NO: 8309 - protein, 456 aa, Unknown
  Description of Unknown: Integrase B8310 sequence
  PTHR30461:SF3,SM00857,G3DSA:1.10.10.2600,IPR036162,PF13408, IPR025827,G3DSA:3.40.50.1390,PS51737,IPR006119,IPR038109, PF07508,SSF53041,IPR011109,PTHR30461,Coil, PS51736,cd00338,PF00239
MRNKEIAPALVRVALYIRVSGEEQKIKGLSLEAQQERLEAYARERGWVIVGIYIDAAKTARKNIHKRTEFQRMMDSVKRDEVDILLFARLDRWFRSVADYYKVMEILQAHNCDWKTTDEEYDTTTANGRLYINVKLSIAQNEADIDGERIDVVFDSKIAHGTVVSGSAPFGFRVNEEKRLEVVPEDAAIVQEAFNYFETTVSQRATTKYIREKYGVNWCYATFHRMLIEELYTGVYNRGGRYNANFCPAIIQREQFDRVQALLKKNVRRAPSGRVYIFTSVLTCEECRHKLNGYISQGIYYYRCNQHLQRGRCSHNHSAREDRVEQWLFDHLGEELERCKLEWEVQAAEKKRSVTSRDKAALKRKLTKLKELYVNELIDIDDYKKDYEIYTAALNQIPDMTQEAPPDFAAVENLLQKDFRKIYDTLTREEKRTLWRSVIKEIRIDNDQNITGVVFG

SEQ ID NO: 8310 - protein, 456 aa, Unknown
  Description of Unknown: Integrase B8311 sequence
  PTHR30461:SF3,SM00857,G3DSA:1.10.10.2600,IPR036162,PF13408, IPR025827,G3DSA:3.40.50.1390,PS51737,IPR006119,IPR038109, PF07508,SSF53041,IPR011109,PTHR30461,Coil, PS51736,cd00338,PF00239
MYKKELAPDLVRVALYIRVSGEEQKIKGLSLEAQQERLEAYARERGWVIVGIYIDAAKTARKNIHKRTEFQRMMDSVKRDEVDILLFARLDRWFRSVADYYKVMEILQAHNCDWKTTDEEYDTTTANGRLYINVKLSIAQNEADIDGERIDVVFDSKIAHGTVVSGSAPFGFRVNEEKRLEVVPEDAAIVQDAFNYFENTVSQRATVRYVRETYGVNWCDATFRRMLKEKLYTGVYDRGGRYNDQFCPAIIDRQQFDRVQALLTRNVRSAPSGKVYIFTSILTCAECGHKLVGYKSSDYFYYRCNQHFQRGRCSHNHSAREDVVEAWLFDHLGEELERCQLEWDVEAAKKKASVARTDKAALKRKLTKLKELYVNDLIDIEDYKKDYQIYVSALNQIPEPAQEAPPDFAAVRRLLDNSFRTIYDTLTREEKRTLWRSVIKEIRIDNDQNITGVVFG

SEQ ID NO: 8311 - protein, 456 aa, Unknown
  Description of Unknown: Integrase B8312 sequence
  PTHR30461:SF3,SM00857,G3DSA:1.10.10.2600,IPR036162,PF13408, IPR025827,G3DSA:3.40.50.1390,PS51737,IPR006119,IPR038109, PF07508,IPR011109,SSF53041,PTHR30461,PS51736, cd00338,PF00239
MRKQNNSEAPVRAALYVRVSGEEQKIKGLSIEAQKERLVAYAKERGWIIAGLFVDAAKTARKNMHKRSEFQKMLDLVRADGVDMLLFCRLDRWFRSVRDYYKVMEVLETHNCQWKTTDEEYDTTTANGRLYINVKLSIAQNEADICGERIHVVFDSKIQHGTVLSGKCPFWLRINDERRYELIPENAAIIQDAFNHFENTTSQRATIRYIRETYDVNWCEATFRRMLKDKLAIGVYNKNGRYNEDFCPPVISKEQFEHVQELLKRNSRHNPAGRIYIFTGILVCEECRHHLVGRKQKDFFYYRCNQHFQRGRCTHNHSAREDVIETWLFEHLGEEIKKYEVAWNVQAAERKRTAASIDRSVLRRKLTKLKDLYMNDLIDIDEYKKDYETYTAALSALEEPEEEKHIDLSGVHRIISHDFREIYDSLTREEKRTLWKNTLKEIRVNNANEITGISFF

SEQ ID NO: 8312 - protein, 456 aa, Unknown
  Description of Unknown: Integrase B8313 sequence
  cd00338,SM00857,IPR036162,PF13408,IPR025827, PS51737,G3DSA:3.40.50.1390,IPR006119,SSF53041,IPR011109, PTHR30461,PS51736,Coil,PF00239
MEKKIRCAIYDRVSHELQVERGHSLEAQKELLTQYAVSQGYEIVGYYEDEGISARKKMGDRKELLRLLEDVKKDKVDIILVTKLDRWFRSVKDYHNTQAILDNHNCSWRTILEDYDSSTADGQLKINIMLSVSQNEADRTSERIKTVFDYKKRHKKAISGSVPFGYMIDDEKNVIKNPDQSEIVEAAFKKYLSTFNKWGTLDYLRDIYGDDAPTENQLLAMFEHPAYIGTLFGIEGFCEPYINAEQREKIMAVKSQRKRVMTGTVYLFSSMIVCPWCGKKWSGLSNKYHRQDGGITIHPAYRCSKYYYTGKGRHPHPSLSERKIEDYLRANLFRLIREQIYDIEQEEKDKPRQRKNRIKSIQLEMQRLNFLFQKGRIGMDYYDENYAALEEEVKALQEESKVVQIQQLRKMIDIGESNWLGMYDALDRQHKKAFWKGIIKEIYIDKEKRITKVIFL

SEQ ID NO: 8313 - protein, 456 aa, Unknown
  Description of Unknown: Integrase B8314 sequence
  PTHR30461:SF3,SM00857,G3DSA:1.10.10.2600,IPR036162, PF13408,IPR025827,G3DSA:3.40.50.1390,PS51737, IPR006119,IPR038109,PF07508,SSF53041, IPR011109,PTHR30461,Coil,PS51736,cd00338,PF00239
MYKKELAPDLVRVALYIRVSGEEQKIKGLSLEAQQERLEAYARERGWVIVGIYIDAAKTARKNIHKRTEFQRMMDSVKRDEVDILLFARLDRWFRSVADYYKVMEILQAHNCDWKTTDEEYDTTTANGRLYINVKLSIAQNEADIDGERIDVVFDSKIAHGTVVSGSAPFGFRVNEEKRLEVVPEDAAIVQDAFNYFENTVSQRATVRYVRETYGVNWCDATFRRMLKEKLYTGVYDRGGRYNDQFCPAIIDRQQFDRVQALLTRNVRSAPSGKVYIFTSILTCAECGHKLVGYKSSDYYYYRCNQHFQRGRCSHNHSAREDVVEAWLFDHLGEELERCQLEWDVEAAKKKASVARTDKAALKRKLTKLKELYVNDLIDIEDYKKDYQIYVSALNQIPEPAQEAPPDFAAVRRLLDNSFRTIYDTLTREEKRTLWRSVIKEIRIDNDQNITGVVFG

SEQ ID NO: 8314 - protein, 456 aa, Unknown
  Description of Unknown: Integrase B8315 sequence
  PTHR30461:SF3,SM00857,G3DSA:1.10.10.2600,IPR036162,PF13408, IPR025827,G3DSA:3.40.50.1390,PS51737,IPR006119,IPR038109, PF07508,SSF53041,IPR011109,PTHR30461,PS51736, cd00338,PF00239
MRNKEIAPALVRVALYIRVSGEEQKIKGLSLEAQQERLEAYARERGWVIVGIYIDAAKTARKNIHKRTEFQRMMDSVKRDEVDILLFARLDRWFRSVADYYKVMEILQAHNCDWKTTDEEYDTTTANGRLYINVKLSIAQNEADIDGERIDVVFDSKIAHGTVVSGSAPFGFRVNEEKRLEVVPEDAAIVQDAFNYFESTVSQRATVRYVRETYGVNWCDATFRRMLKEKLYTGVYDRGGRYNDQFCPAIINRQQFDRVQALLTRNVRSAPSGKVYIFTSILTCAECGHKLVGYKSSDYFYYRCNQHFQRGRCSHNHSAREDIVEAWLFDHLGEELERCQLEWDVEAAKKKASVVRTDKAALKRKLTKLKELYVNDLIDIEDYKKDYQIYVSALNQIPEPAQEAPPDFAAVRRLLDNSFRTIYDTLTREEKRTLWRSVIKEIRIDNDQNITGVVFG

SEQ ID NO: 8315 - protein, 456 aa, Unknown
  Description of Unknown: Integrase B8316 sequence
  PTHR30461:SF3,SM00857,G3DSA:1.10.10.2600,IPR036162,PF13408, PS51737,IPR025827,G3DSA:3.40.50.1390,IPR006119,IPR038109, PF07508,IPR011109,SSF53041,PTHR30461,Coil, PS51736,cd00338,PF00239
MRNKEIAPALVRVALYIRVSGEEQKIKGLSLEAQQERLEAYARERGWVIVGIYIDAAKTARKNIHKRTEFQRMMEAVKRDEVDILLFARLDRWFRSVADYYKVMEILQAHNCDWKTTDEEYDTTTANGRLYINVKLSIAQNEADIDGERIDVVFDSKIAHGTVVSGSAPFGFRVSEEKRLEIVPEDAAIVQDAFNYFENTVSQRATVRYVRETYGVNWCDATFRRMLKEKLYTGVYDRGGRYNDQFCPAIIDRQQFDRVQALLTRNVRSAPSGKVYIFTSILTCAECGHKLVGYKSSDYFYYRCNQHFQRGRCSHNHSAREDVVEQWLFEHLGEELERCQLEWDVEAAKKKASVARTDKAALKRKLTKLKELYVNDLIDIEDYKKDYQIYVSALNQIPEPAQEAPPDFAAVRRLLDNSFRTIYDTLTREEKRTLWRSVIKEIRIDNDQNITGVVFG

SEQ ID NO: 8316 - protein, 456 aa, Unknown
  Description of Unknown: Integrase B8317 sequence
  PTHR30461:SF3,SM00857,G3DSA:1.10.10.2600,IPR036162,PF13408, IPR025827,G3DSA:3.40.50.1390,PS51737,IPR006119,IPR038109, PF07508,IPR011109,SSF53041,PTHR30461,Coil, PS51736,cd00338,PF00239
MRNKEIAPALVRVALYIRVSGEEQKIKGLSLEAQQERLEAYARERGWVIVGIYIDAAKTARKNIHKRTEFQRMMEAVKRDEVDILLFARLDRWFRSVADYYKVMEILQAHNCDWKTTDEEYDTTTANGRLYINVKLSIAQNEADIDGERIDVVFDSKIAHGTVVSGSAPFGFRVNEEKRLEVIPEDAAIVQDAFNYFENTVSQRATVRYIRETYGVNWCDATFRRMLKEKLYTGVYDRGGRYNDQFCPAIINRQQFDRVQALLTRNVRSAPSGKVYIFTSILTCAECGHKLVGYKSSDYFYYRCNQHFQRGRCSHNHSAREDIVEAWLFDHLGEELERCQLEWDVEAAKKKASVARTDKAALKRKLTKLKELYVNDLIDIEDYKKDYQIYVSALNQIPEPVQEAPPDFAAVRRLLDNSFRTIYDTLTREEKRTLWRSVIKEIRIDNDQNITGVVFG

SEQ ID NO: 8317 - protein, 456 aa, Unknown
  Description of Unknown: Integrase B8318 sequence
  PTHR30461:SF3,SM00857,G3DSA:1.10.10.2600,IPR036162,PF13408, IPR025827,G3DSA:3.40.50.1390,PS51737,IPR006119,IPR038109, PF07508,SSF53041,IPR011109,PTHR30461,Coil, PS51736,cd00338,PF00239
MYKKELAPDLVRVALYIRVSGEEQKIKGLSLEAQQERLEVYARERGWVIVGIYIDAAKTARKNIHKRTEFQRMMDSVKRDEVDILLFARLDRWFRSVADYYKVMEILQAHNCDWKTTDEEYDTTTANGRLYINVKLSIAQNEADIDGERIDVVFDSKIAHGTVVSGSAPFGFRVNEEKRLEVVPEDAAIVQDAFNYFENTVSQRATVRYVRETYGVNWCDATFRRMLKEKLYTGVYDRGGRYNDQFCPAIIDRQQFDRVQALLTRNVRSAPSGKVYIFTSILTCAECGHKLVGYKSSDYFYYRCNQHFQRGRCSHNHSAREDVVEQWLFEHLGEELERCQLEWGVEAAKKKASIARTDKAALKRKLTKLKELYVNDLIDIEDYKKDYQIYVSALNQIPEPAQEAPPDFAAVRRLLDNSFRTIYDTLTREEKRTLWRSVIKEIRIDNDQNITGVVFG

SEQ ID NO: 8318 - protein, 456 aa, Unknown
  Description of Unknown: Integrase B8319 sequence
  PTHR30461:SF3,SM00857,G3DSA:1.10.10.2600,IPR036162,PF13408, IPR025827,G3DSA:3.40.50.1390,PS51737,IPR006119,IPR038109, PF07508,IPR011109,SSF53041,PTHR30461,Coil, PS51736,cd00338,PF00239
MRNKEIAPALVRVALYIRVSGEEQKIKGLSLEAQQERLEAYARERGWVIVGIYIDAAKTARKNIHKRTEFQRMMDSVKRDEVDILLFARLDRWFRSVADYYKVMEVLQAHNCDWKTTDEEYDTTTANGRLYINVKLSIAQNEADIDGERIDVVFDSKIAHGTVVSGSSPFGFRVSEEKRLEIVPEDAAIVQDAFNYFENTVSQRATTKYIREKYGVNWCYATFHRMLIEELYTGVYNRGGRYNANFCPAIIQREQFDRVQALLKKNVRRAPSGRVYIFTSVLTCEECRHKLNGYISQGIYYYRCNQHLQRGRCTHNHSVREDRVEQWLFDHLGEELERCKLEWEVQAAEKKRSVTSRDKAALKRKLTKLKELYVNELIDIDDYKKDYEIYTAALNQIPDTTQEAPPDFAAVEKLLQKDFRKIYDTLTREEKRTLWRSVIKEIRIDNDQNITGVVFG

SEQ ID NO: 8319 - protein, 456 aa, Unknown
  Description of Unknown: Integrase B8320 sequence
  PTHR30461:SF3,SM00857,G3DSA:1.10.10.2600,IPR036162,PF13408, PS51737,IPR025827,G3DSA:3.40.50.1390,IPR006119,IPR038109, PF07508,SSF53041,IPR011109,PTHR30461,PS51736, cd00338,PF00239
MRNKEIAPALVRVALYIRVSGEEQKIKGLSLEAQQERLEAYARERGWVIVGIYIDAAKTARKNIHKRTEFQRMMDSVKRDEVDILLFARLDRWFRSVADYYKVMEILQAHNCDWKTTDEEYDTTTANGRLYINVKLSIAQNEADIDGERIDVVFDSKIAHGTVVSGSAPFGFRVNEEKRLEVVPEDAAIVQDAFNYFENTVSQRATVRYVRETYGVNWCDATFRRMLKEKLYTGVYDRGGRFNDHFCPAIISKQQFDRVQALLERNARSVPSGKVYIFTSILTCAECGHKLVGYKSSDYYYYRCNQHFQRGRCSHNHSAREDVVEKWLFEHLAEELERCQLEWEVAAAKKKASVARTDKAALKRKLTKLKELYVNDLIDIEDYKRDYQIYTAALKQIPEPSIEPPPDFAAVRRLLDNDFKTIYENLTREEKRTLWRSVIKEIRIDNDQNITGVVFG

SEQ ID NO: 8320 - protein, 456 aa, Unknown
  Description of Unknown: Integrase B8321 sequence
  PTHR30461:SF3,SM00857,G3DSA:1.10.10.2600,IPR036162,PF13408, PS51737,IPR025827,G3DSA:3.40.50.1390,IPR006119,IPR038109, PF07508,IPR011109,SSF53041,PTHR30461,Coil, PS51736,cd00338,PF00239
MRNKEIAPALVRVALYIRVSGEEQKIKGLSLEAQQERLEAYARERGWVIVGIYIDAAKTARKNIHKRTEFQRMMDSVKRDEVDILLFARLDRWFRSVADYYKVMEILQAHNCDWKTTDEEYDTTTANGRLYINVKLSIAQNEADIDGERIDVVFDSKIAHGTVVSGSAPFGFRVNEEKRLEVVPEDAAIVQDAFNYFENTVSQRATVRYVRETYGVNWCDATFRRMLKEKLYTGVYDRGGRYNDQFCPAIISRQQFDRVQVLLTRNVRSAPSGKVYIFTSILTCAECGHKLVGYKSSDYFYYRCNQHFQRGRCSHNHSAREDVVEQWLFEHLGEELERCQLEWDVEAAKKKASVARTDKAALKRKLTKLKELYVNDLIDIEDYKKDYQIYVSALNQIPEPAQEAPPDFAAVRRLLDNSFRTIYDTLTREEKRTLWRSVIKEIRIDNDQNITGVVFG

SEQ ID NO: 8321 - protein, 456 aa, Unknown
  Description of Unknown: Integrase B8322 sequence
  PTHR30461:SF3,SM00857,G3DSA:1.10.10.2600,IPR036162,PF13408, PS51737,IPR025827,G3DSA:3.40.50.1390,IPR006119,IPR038109, PF07508,IPR011109,SSF53041,PTHR30461,Coil, PS51736,cd00338,PF00239
MRNKEIAPALVRVALYIRVSGEEQKIKGLSLEAQQERLEAYARERGWVIVGIYIDAAKTARKNIHKRTEFQRMMDSVKRDEVDILLFARLDRWFRSVADYYKVMEILQAHNCDWKTTDEEYDTTTANGRLYINVKLSIAQNEADIDGERIDVVFDSKIAHGTVVSGSAPFGFRVNEEKRLEVVPEDAAIVQDAFNYFENTVSQRATVRYVRETYGVNWCDATFRRMLKEKLYTGVYDRGGRYNDQFCPAIINRQQFDRVQALLTRNVRSAPSGKVYIFTSILTCAECGHKLVGYKSSDYFYYRCNQHFQRGRCSHNHSAREDVVEQWLFEHLGEELERCQLEWDVEAAKKKASVARTDKAALKRKLTKLKELYVNDLIDIEDYKKDYQIYVSALNQIPEPAQEAPPDFAAVHRLLDNSFRTIYDTLTREEKRTLWRSVIKEIRIDNDQNITGVVFG

SEQ ID NO: 8322 - protein, 456 aa, Unknown
  Description of Unknown: Integrase B8323 sequence
  PTHR30461:SF3,SM00857,G3DSA:1.10.10.2600,IPR036162,PF13408, IPR025827,G3DSA:3.40.50.1390,PS51737,IPR006119,IPR038109, PF07508,SSF53041,IPR011109,PTHR30461,Coil, PS51736,cd00338,PF00239
MRNKEIAPALVRVALYIRVSGEEQKIKGLSLEAQQERLEAYARERGWVIVGIYIDAAKTARKNIHKRTEFQRMMEAVKRDEVDILLFARLDRWFRSVADYYKVMEVLQAHNCDWKTTDEEYDTTTANGRLYINVKLSIAQNEADIDGERIDVVFDSKIAHGTVVSGSAPFGFRVNEEKRLEIVPEDAAIVQDAFNYFENTVSQRATVRYVRETYGVNWCDATFRRMLKEKLYTGVYDRGGRYNDQFCPAIISRQQFDRVQALLTRNVRSAPSGKVYIFTSILTCAECGHKLVGYKSSDYFYYRCNQHFQRGRCSHNHSAREDVVEQWLFEHLGEELERCQLEWDVEAAKKKASVARTDKAALKRKLTKLKELYVNDLIDIEDYKKDYQIYVSALNQIPEPAQEAPPDFAAVHRLLDNSFRTIYDTLTREEKRTLWRSVIKEIRIDNDQNITGVVFG

SEQ ID NO: 8323 - protein, 456 aa, Unknown
  Description of Unknown: Integrase B8324 sequence
  PTHR30461:SF3,SM00857,G3DSA:1.10.10.2600,IPR036162,PF13408, IPR025827,G3DSA:3.40.50.1390,PS51737,IPR006119,IPR038109, PF07508,SSF53041,IPR011109,PTHR30461,Coil, PS51736,cd00338,PF00239
MRNKEIAPALVRVALYIRVSGEEQKIKGLSLEAQQERLEAYARERGWVIVGIYIDAAKTARKNIHKRTEFQRMMDSVKRDEVDILLFARLDRWFRSVADYYKVMEILQAHNCDWKTTDEEYDTTTANGRLYINVKLSIAQNEADIDGERIDVVFDSKIAHGTVVSGSAPFGFRVNEEKRLEVVPEDAAIVQDAFNYFENTVSQRATVRYVRETYGVNWCDATFRRMLKEKLYTGVYDRGGRYNDQFCPAIIDRQQFDRVQALLTRNVRSAPSGKVYIFTSILTCAECGHKLVGYKSSDYYYYRCNQHFQRGRCSHNHSAREDVVEAWLFEHLGEELERCQLEWDVEAAKKKASVARTDKAALKRKLTKLKELYVNDLIDIEDYKKDYQIYVSALNQIPEPAQEAPPDFAAVRRLLDNNFRTIYDTLTREEKRTLWRSVIKEIRIDNDQNITGVVFG

SEQ ID NO: 8324 - protein, 456 aa, Unknown
  Description of Unknown: Integrase B8325 sequence
  PTHR30461:SF3,SM00857,G3DSA:1.10.10.2600,IPR036162,PF13408, PS51737,IPR025827,G3DSA:3.40.50.1390,IPR006119,IPR038109, PF07508,IPR011109,SSF53041,PTHR30461,Coil, PS51736,cd00338,PF00239
MRNKEIAPALVRVALYIRVSGEEQKIKGLSLEAQQERLEAYARERGWVIVGIYIDAAKTARKNIHKRTEFQRMMDSVKRDEVDILLFARLDRWFRSVADYYKVMEILQAHNCDWKTTDEEYDTTTANGRLYINVKLSIAQNEADIDGERIDVVFDSKIAHGTVVSGSAPFGFRVNEEKRLEVVPEDAAIVQDAFNYFENTVSQRATVRYVRETYGVNWCDATFRRMLKEKLYTGVYDRGGRYNDQFCPAIINRQQFDRVQALLTRNVRSAPSGKVYIFTSILTCAECGHKLVGYKSSDYFYYRCNQHFQRGRCSHNHSAREDVVEQWLFEHLGEELDRCQLEWDVEAAKKKASVARTDKAALKRKLTKLKELYVNDLIDIEDYKKDYQIYVSALNQIPEPAQEAPPDFAAVRRLLDNSFRTIYDTLTREEKRTLWRSVIKEIKIDNDQNITGVVFG

SEQ ID NO: 8325 - protein, 456 aa, Unknown
  Description of Unknown: Integrase B8326 sequence
  PTHR30461:SF3,SM00857,G3DSA:1.10.10.2600,IPR036162,PF13408, IPR025827,G3DSA:3.40.50.1390,PS51737,IPR006119,IPR038109, PF07508,IPR011109,SSF53041,PTHR30461,Coil, PS51736,cd00338,PF00239
MRNKEIAPALVRVALYIRVSGEEQKIKGLSLEAQQERLEAYARERGWVIVGIYIDAAKTARKNIHKRTEFQRMMDSVKRDEVDILLFARLDRWFRSVADYYKVMEVLQAHNCDWKTTDEEYDTTTANGRLYINVKLSIAQNEADIDGERIDVVFDSKIAHGTVVSGSAPFGFRVNEEKRLEIVPEDAAIVQDAFNYFENTVSQRATVRYVRETYGVNWCDATFRRMLKEKLYTGVYDRGGRYNDQFCPAIISRQQFDRVQALLTRNVRSAPSGKVYIFTSILTCAECGHKLVGYKSSDYFYYRCNQHFQRGRCSHNHSAREDVVEQWLFEHLGEELERCQLEWDVEAAKKKASVARTDKAALKRKLTKLKELYVNDLIDIEDYKKDYQIYVSALNQIPEPAQEAPPDFAAVRRLLDNSFRTIYDTLTREEKRTLWRSVIKEIRIDNDQNITGVVFG

SEQ ID NO: 8326 - protein, 456 aa, Unknown
  Description of Unknown: Integrase B8327 sequence
  PTHR30461:SF3,SM00857,G3DSA:1.10.10.2600,IPR036162,PF13408, IPR025827,PS51737,G3DSA:3.40.50.1390,IPR006119,IPR038109, PF07508,SSF53041,IPR011109,PTHR30461,Coil, PS51736,cd00338,PF00239
MRNKEIAPALVRVALYIRVSGEEQKIKGLSLEAQQERLEAYARERGWVIVGIYIDAAKTARKNIHKRTEFQRMMEAVKRDEVDILLFARLDRWFRSVADYYKVMEILQAHNCDWKTTDEEYDTTTANGRLYINVKLSIAQNEADIDGERIDVVFDSKIAHGTVVSGSAPFGFRVNEEKRLEVVPEDAAIVQDAFNYFESTVSQRATVRYVRETYGVNWCDATFRRMLKEKLYTGVYDRGGRYNDQFCPAIIDRQQFDRVQALLTRNVRSAPSGKVYIFTSILTCAECGHKLVGYKSSDYYYYRCNQHFQRGRCSHNHSAREDVVEQWLFEHLGEELERCQLEWDVEAAKKKASVARTDKAALKRKLTKLKELYVNDLIDIEDYKKDYQIYVSALNQIPEPAQEAPPDFAAVRRLLDNSFRTIYDTLTREEKRTLWRSVIKEIMIDNDQNITGVVFG

SEQ ID NO: 8327 - protein, 456 aa, Unknown
  Description of Unknown: Integrase B8328 sequence
  PTHR30461:SF3,SM00857,G3DSA:1.10.10.2600,IPR036162,PF13408, IPR025827,G3DSA:3.40.50.1390,PS51737,IPR006119,IPR038109, PF07508,IPR011109,SSF53041,PTHR30461,Coil, PS51736,cd00338,PF00239
MRNKEIAPALVRVALYIRVSGEEQKIKGLSLEAQQERLEAYARERGWVIVGIYIDAAKTARKNIHKRTEFQRMMDSVKRDEVDILLFARLDRWFRSVADYYKVMEVLQAHNCDWKTTDEEYDTTTANGRLYINVKLSIAQNEADIDGERIDVVFDSKIAHGTVVSGSAPFGFRVNEEKRLEVVPEDAAIVQDAFNYFENTVSQRATVRYVRETYGVNWCDATFRRMLKEKLYTGVYDRGGRYNDQFCPAIISRQQFDRVQALLTRNVRSAPSGKVYIFTSILTCAECGHKLVGYKSSDYFYYRCNQHFQRGRCSHNHSAREDVVEQWLFEHLGEELERCQLEWDVEAAKKKASVARTDKAALKRKLTKLKELYVNDLIDIEDYKKDYQIYVSALNQIPEPAQEAPPDFAAVRRLLDNSFRTIYDTLTREEKRTLWRSVIKEIRIDNDQNITGVVFG

SEQ ID NO: 8328 - protein, 456 aa, Unknown
  Description of Unknown: Integrase B8329 sequence
  PTHR30461:SF3,SM00857,G3DSA:1.10.10.2600,IPR036162,PF13408, IPR025827,G3DSA:3.40.50.1390,PS51737,IPR006119,IPR038109, PF07508,SSF53041,IPR011109,PTHR30461,Coil, PS51736,cd00338,PF00239
MRNKEIAPALVRVALYIRVSGEEQKIKGLSLEAQQERLEAYARERGWVIVGIYIDAAKTARKNIHKRTEFQRMMDSVKRDEVDILLFARLDRWFRSVADYYKVMEILQAHNCDWKTTDEEYDTTTANGRLYINVKLSIAQNEADIDGERIDVVFDSKIAHGTVVSGSAPFGFRVNEEKRLEVVPEDAAIVQDAFNYFENTVSQRATVRYVRETYGVNWCDATFRRMLKEKLYTGVYDRGGRYNDQFCPAIIDRQQFDRVQALLTRNVRSAPSGKVYIFTSILTCAECGHKLVGYKSSDYFYYRCNQHFQRGRCSHNHSAREDVVEQWLFEHLGEELERCQLEWDVEAAKKKASVARTDKAALKRKLTKLKELYVNDLIDIEDYKKDYQIYVSALNQIPEPAQEAPPDFAAVRRLLDNSFRTIYDTLTREEKRTLWRSVIKEIKIDNDQNITGVVFG

SEQ ID NO: 8329 - protein, 456 aa, Unknown
  Description of Unknown: Integrase B8330 sequence
  PTHR30461:SF3,IPR036162,PS51737,IPR011109,PTHR30461, PS00397,PF00239,G3DSA:1.10.10.2600,IPR006119,SSF53041, cd00338,SM00857,IPR025827,IPR038109,PS51736, IPR006118,PF13408,G3DSA:3.40.50.1390,Coil
MKNAACYCRVSTDEQVKFGFSIQAQVDALKKYCKENNYKYEFYIDEGISASTMKRPALQAMLKKINSFDIVLFTKLDRLSRNVLDANNINKILNDNNCTMKAIDEDDIDTSTADGTFIFNLKVSLAQREIGKTSERIKFVFQNKREKREVTSGTCKYGYKIENKKFVINNEEAENIINLYKYFISVNGSISKAYQYFIEHFNGKGYDAFSSYLRDTAYIGKYKLYRKNIYIDDYIPRIMEDELFYNVQDLLKKKQYSLSKNKEIALFAGILYCNKCGIRLTKNQDNRSKKMVIRYFCDNARRFKVGSLSKKCSNKSYIREDNIENYLLKNLYNEAQKYKAKYSISNLPSKIADNTSKINTLKKKLSKLKDLYLEDLIDKSEYEHDYTKYKKELSDLQSNYEEKIQRKDFSKLNKILNSGIINIYNSLSREEKRKFWLSIIDKIYVEDNQIKKITFL

SEQ ID NO: 8330 - protein, 456 aa, Unknown
  Description of Unknown: Integrase B8331 sequence
  PTHR30461:SF3,SM00857,G3DSA:1.10.10.2600,IPR036162,PF13408, IPR025827,G3DSA:3.40.50.1390,PS51737,IPR006119,IPR038109, PF07508,SSF53041,IPR011109,PTHR30461,Coil, PS51736,cd00338,PF00239
MYKKELAPDLVRVALYIRVSGEEQKIKGLSLEAQQERLEAYARERGWVIVGIYIDAAKTARKNIHKRTEFQRMMDSVKRDEVDILLFARLDRWFRSVADYYKVMEILQAHNCDWKTTDEEYDTTTANGRLYINVKLSIAQNEADIDGERIDVVFDSKIAHGTVVSGSAPFGFRVNEEKRLEVVPEDAAIVQDAFNYFENTVSQRATVRYVRETYGVNWCDATFRRMLKEKLYTGVYDRGGRYNDQFCPAIIDRQQFDRVQALLTRNVRSAPSGKVYIFTSILTCAECGHKLVGYKSSDYFYYRCNQHFQRGRCSHNHSAREDVVEQWLFEHLGEELERCQLEWDVEAAKKKASIARTDKAALKRKLTKLKELYVNDLIDIEDYKKDYQIYVSALNQIPEPAQEAPPDFAAVRRLLDNSFRTIYDTLTREEKRTLWRSVIKEIRIDNDQNITGVVFG

SEQ ID NO: 8331 - protein, 456 aa, Unknown
  Description of Unknown: Integrase B8332 sequence
  PTHR30461:SF3,IPR036162,PS51737,IPR011109,PTHR30461, PS00397,PF00239,G3DSA:1.10.10.2600,IPR006119,SSF53041, cd00338,SM00857,IPR025827,IPR038109,PS51736, IPR006118,PF13408,G3DSA:3.40.50.1390,Coil
MKYVACYCRVSTDEQAKFGFSIQAQKDALEKYCKENGYKYEFYIDEGISASSMKKRKALNEMLSKCNVFDMILFTKLDRLSRNVLDANNINKLLIDNKCTMKAIDEDDVDTSTADGTFIFNLKVSLAQREIGKTSERIKFVFKNKREKGEITSGTKKYGYDIVNKKYQINQSEAQNIINLYNYFIKVNGNTQETYKYFIQHFKNKGYDAMSNYLRETSYIGKYKLYRKNIYIDNYIPRIMNDDLFYTVQNLLKKREKTSIRTSNPSLFSGLIFCNICNTRMCKKQDNRSTKKLIRYCCDNASRRKVGSMEYKCSNHKLIREEYVEKYLLDNIASIAKKYINTNAVNSNQIIKKNNSKEIKQIENKILKLKDLYLDDLIDKKTYKTDYETLNRKLNELKNEEIIVPQKDFSKLKEIINLDIYKIYGVLSDEEKRTFWLRIIDKIYIENGEIKEVTFL

SEQ ID NO: 8332 - protein, 456 aa, Unknown
  Description of Unknown: Integrase B8333 sequence
  PTHR30461:SF3,SM00857,G3DSA:1.10.10.2600,IPR036162,PF13408, IPR025827,PS51737,G3DSA:3.40.50.1390,IPR006119,IPR038109, PF07508,SSF53041,IPR011109,PTHR30461,Coil, PS51736,cd00338,PF00239
MYKKELAPDLVRVALYIRVSGEEQKIKGLSLEAQQERLEAYARERGWVIVGIYIDAAKTARKNIHKRTEFQRMMDSVKRDEVDILLFARLDRWFRSVADYYKVMEILQAHNCDWKTTDEEYDTTTANGRLYINVKLSIAQNEADIDGERIDVVFDSKIAHGTVVSGSAPFGFRVNEEKRLEVVPEDAAIVQDAFNYFENTVSQRATVRYVRETYGVNWCDATFRRMLKEKLYTGVYDRGGRYNDQFCPVIINRQQFDRVQALLTRNVRSAPSGKVYIFTSILTCAECGHKLVGYKSSDYFYYRCNQHFQRGRCSHNHSAREDVVEAWLFDHLGEELERCQLEWDVEAAKKKASVARTDKAALKRKLTKLKELYVNDLIDIEDYKKDYQIYVSALNQIPEPAQEAPPDFAAVRRLLDNSFRTIYDTLTREEKRTLWRSVIKEIRIDNDQNITGVVFG

SEQ ID NO: 8333 - protein, 456 aa, Unknown
  Description of Unknown: Integrase B8334 sequence
  PTHR30461:SF3,SM00857,G3DSA:1.10.10.2600,IPR036162,PF13408, PS51737,IPR025827,G3DSA:3.40.50.1390,IPR006119,IPR038109, PF07508,IPR011109,SSF53041,PTHR30461,Coil, PS51736,cd00338,PF00239
MRNKEIAPALVRVALYIRVSGEEQKIKGLSLEAQQERLEAYARERGWVIVGIYIDAAKTARKNIHKRTEFQRMMDSVKRDEVDILLFARLDRWFRSVADYYKVMEILQAHNCDWKTTDEEYDTTTANGRLYINVKLSIAQNEADIDGERIDVVFDSKIAHGTVVSGSAPFGFRVNEKKRLEVVPEDAAIVQDAFNYFENTVSQRATVRYVRETYGVNWCDATFRRMLKEKLYTGVYDRGGRYNDQFCPAIINRQQFDRVQALLTRNVRSAPSGKVYIFTSILTCAECGHKLVGYKSSDYYYYRCNQHFQRGRCSHNHSAREDVVEQWLFEHLGEELERCQLEWDVEAAKKKASVARTDKAALKRKLTKLKELYVNDLIDIEDYKKDYQIYVSALNQIPEPAQEAPPDFAAVRRLLDNSFRTIYDTLTREEKRTLWRSVIKEIRIDNDQNITGVVFG

SEQ ID NO: 8334 - protein, 456 aa, Unknown
  Description of Unknown: Integrase B8335 sequence
  PTHR30461:SF3,SM00857,G3DSA:1.10.10.2600,IPR036162,PF13408, PS51737,IPR025827,G3DSA:3.40.50.1390,IPR006119,IPR038109, PF07508,IPR011109,SSF53041,PTHR30461,Coil, PS51736,cd00338,PF00239
MRNKEIAPALVRVALYIRVSGEEQKIKGLSLEAQQERLEAYARERGWVIVGIYIDAAKTARKNIHKRTEFQRMMEAVKRDEVDILLFARLDRWFRSVADYYKVMEILQAHNCDWKTTDEEYDTTTANGRLYINVKLSIAQNEADIDGERIDVVFDSKIAHGTVVSGSAPFGFRVNEEKRLEVVPEDAAIVQDAFNYFENTVSQRATVRYVRETYGVNWCDATFRRMLKEKLYTGVYDRGGRYNDQFCPAIINRQQFDRVQALLTRNVRSAPSGKVYIFTSILTCAECGHKLVGYKSSDYFYYRCNQHFQRGRCSHNHSAREDVVEQWLFEHLGEELERCQLEWDVEAAKKKASVARTDKAALKRKLTKLKELYVNDLIDIEDYKKDYQIYVSALNQIPEPAQEAPPDFAAVRRLLDNSFRTIYDTLTREEKRTLWRSVIKEIRIDNDQNITGVVFG
